United States Patent Application Publication US 2026/0226133 A1 - sequence listing, part 19

SEQ ID NO: 43532 - protein, 872 aa, synthetic construct
MALPVTALLLPLALLLHAARPLEEDLKNVFPPEVAVFEPSEAEISHTQKATLVCLATGFYPDHVELSWWVNGKEVHSGVSTDPQPLKEQPALNDSRYCLSSRLRVSATFWQNPRNHFRCQVQFYGLSENDEWTQDRAKPVTQIVSAEAWGRADCGFTSESYQQGVLSATNLSVIGFRILLLKVAGFNLLMTLRLWSSRAKRSGSGATNFSLLKQAGDVEENPGPTSMALPVTALLLPLALLLHAARPSYVLTQPPSVSVAPGQTARITCGGNNIGGKSVHWYQQPPGQAPVVVVYDDSDRPSGIPERFSGSNSGNTATLTISRVEAGDEAVYYCQVWDSSSDHVVFGGGTKLTVLGGGGSGGGGSGGGGSQLQLQESGPGLVKPSETLSLTCTVSGGSISSSSYFWGWIRQPPGKGLEWIGSIYYSGITYYNPSLKSRVTISVDTSKNQFSLKLSSVTAADTAVYYCARHDGAVAGLFDYWGQGTLVTVSSATRIQNPDPAVYQLRDSKSSDKSVCLFTDFDSQTNVSQSKDSDVYITDKTVLDMRSMDFKSNSAVAWSNKSDFACANAFNNSIIPEDTFFPSPESSCDVKLVEKSFETDTNLNFQILYEILLGKATLYAVLVSALVLMAMVKRKDSRGRAKRSGSGVKQTLNFDLLKLAGDVESNPGPSRGHMTEYKPTVRLATRDDVPRAVRTLAAAFADYPATRHTVDPDRHIERVTELQELFLTRVGLDIGKVWVADDGAAVAVWTTPESVEAGAVFAEIGPRMAELSGSRLAAQQQMEGLLAPHRPKEPAWFLATVGVSPDHQGKGLGSAVVLPGVEAAERAGVPAFLETSAPRNLPFYERLGFTVTADVEVPEGPRTWCMTRKPGA

SEQ ID NO: 43533 - protein, 872 aa, synthetic construct
MALPVTALLLPLALLLHAARPLEIQNPDPAVYQLRDSKSSDKSVCLFTDFDSQTNVSQSKDSDVYITDKTVLDMRSMDFKSNSAVAWSNKSDFACANAFNNSIIPEDTFFPSPESSCDVKLVEKSFETDTNLNFQILYEILLGKATLYAVLVSALVLMAMVKRKDSRGRAKRSGSGATNFSLLKQAGDVEENPGPTSMALPVTALLLPLALLLHAARPSYVLTQPPSVSVAPGQTARITCGGNNIGGKSVHWYQQPPGQAPVVVVYDDSDRPSGIPERFSGSNSGNTATLTISRVEAGDEAVYYCQVWDSSSDHVVFGGGTKLTVLGGGGSGGGGSGGGGSQLQLQESGPGLVKPSETLSLTCTVSGGSISSSSYFWGWIRQPPGKGLEWIGSIYYSGITYYNPSLKSRVTISVDTSKNQFSLKLSSVTAADTAVYYCARHDGAVAGLFDYWGQGTLVTVSSATREDLKNVFPPEVAVFEPSEAEISHTQKATLVCLATGFYPDHVELSWWVNGKEVHSGVSTDPQPLKEQPALNDSRYCLSSRLRVSATFWQNPRNHFRCQVQFYGLSENDEWTQDRAKPVTQIVSAEAWGRADCGFTSESYQQGVLSATNLSVIGFRILLLKVAGFNLLMTLRLWSSRAKRSGSGVKQTLNFDLLKLAGDVESNPGPSRGHMTEYKPTVRLATRDDVPRAVRTLAAAFADYPATRHTVDPDRHIERVTELQELFLTRVGLDIGKVWVADDGAAVAVWTTPESVEAGAVFAEIGPRMAELSGSRLAAQQQMEGLLAPHRPKEPAWFLATVGVSPDHQGKGLGSAVVLPGVEAAERAGVPAFLETSAPRNLPFYERLGFTVTADVEVPEGPRTWCMTRKPGA

SEQ ID NO: 43534 - protein, 872 aa, synthetic construct
MALPVTALLLPLALLLHAARPLEEDLKNVFPPEVAVFEPSEAEISHTQKATLVCLATGFYPDHVELSWWVNGKEVHSGVCTDPQPLKEQPALNDSRYCLSSRLRVSATFWQNPRNHFRCQVQFYGLSENDEWTQDRAKPVTQIVSAEAWGRADCDVKLVEKSFETDTNLNFQNLSVIGFRILLLKVAGFNLLMTLRLWSSRAKRSGSGATNFSLLKQAGDVEENPGPTSMALPVTALLLPLALLLHAARPSYVLTQPPSVSVAPGQTARITCGGNNIGGKSVHWYQQPPGQAPVVVVYDDSDRPSGIPERFSGSNSGNTATLTISRVEAGDEAVYYCQVWDSSSDHVVFGGGTKLTVLGGGGSGGGGSGGGGSQLQLQESGPGLVKPSETLSLTCTVSGGSISSSSYFWGWIRQPPGKGLEWIGSIYYSGITYYNPSLKSRVTISVDTSKNQFSLKLSSVTAADTAVYYCARHDGAVAGLFDYWGQGTLVTVSSATRIQNPDPAVYQLRDSKSSDKSVCLFTDFDSQTNVSQSKDSDVYITDKCVLDMRSMDFKSNSAVAWSNKSDFACANAFNNSIIPEDTFFPSPESSCGFTSESYQQGVLSATILYEILLGKATLYAVLVSALVLMAMVKRKDSRGRAKRSGSGVKQTLNFDLLKLAGDVESNPGPSRGHMTEYKPTVRLATRDDVPRAVRTLAAAFADYPATRHTVDPDRHIERVTELQELFLTRVGLDIGKVWVADDGAAVAVWTTPESVEAGAVFAEIGPRMAELSGSRLAAQQQMEGLLAPHRPKEPAWFLATVGVSPDHQGKGLGSAVVLPGVEAAERAGVPAFLETSAPRNLPFYERLGFTVTADVEVPEGPRTWCMTRKPGA

SEQ ID NO: 43535 - protein, 872 aa, synthetic construct
MALPVTALLLPLALLLHAARPLEEDLKNVFPPEVAVFEPSEAEISHTQKATLVCLATGFYPDHVELSWWVNGKEVHSGVSTDPQPLKEQPALNDSRYCLSSRLRVSATFWQNPRNHFRCQVQFYGLSENDEWTQDRAKPVTQIVSAEAWGRADCDVKLVEKSFETDTNLNFQNLSVIGFRILLLKVAGFNLLMTLRLWSSRAKRSGSGATNFSLLKQAGDVEENPGPTSMALPVTALLLPLALLLHAARPSYVLTQPPSVSVAPGQTARITCGGNNIGGKSVHWYQQPPGQAPVVVVYDDSDRPSGIPERFSGSNSGNTATLTISRVEAGDEAVYYCQVWDSSSDHVVFGGGTKLTVLGGGGSGGGGSGGGGSQLQLQESGPGLVKPSETLSLTCTVSGGSISSSSYFWGWIRQPPGKGLEWIGSIYYSGITYYNPSLKSRVTISVDTSKNQFSLKLSSVTAADTAVYYCARHDGAVAGLFDYWGQGTLVTVSSATRIQNPDPAVYQLRDSKSSDKSVCLFTDFDSQTNVSQSKDSDVYITDKTVLDMRSMDFKSNSAVAWSNKSDFACANAFNNSIIPEDTFFPSPESSCGFTSESYQQGVLSATILYEILLGKATLYAVLVSALVLMAMVKRKDSRGRAKRSGSGVKQTLNFDLLKLAGDVESNPGPSRGHMTEYKPTVRLATRDDVPRAVRTLAAAFADYPATRHTVDPDRHIERVTELQELFLTRVGLDIGKVWVADDGAAVAVWTTPESVEAGAVFAEIGPRMAELSGSRLAAQQQMEGLLAPHRPKEPAWFLATVGVSPDHQGKGLGSAVVLPGVEAAERAGVPAFLETSAPRNLPFYERLGFTVTADVEVPEGPRTWCMTRKPGA

SEQ ID NO: 43536 - protein, 975 aa, synthetic construct
MALPVTALLLPLALLLHAARPLEEEDLKNVFPPEVAVFEPSEAEISHTQKATLVCLATGFYPDHVELSWWVNGKEVHSGVSTDPQPLKEQPALNDSRYCLSSRLRVSATFWQNPRNHFRCQVQFYGLSENDEWTQDRAKPVTQIVSAEAWGRADDVIKIHWQEKKSNTILGSQEGNTMKTNDTYMKFSWLTVPEKSLDKEHRCIVRHENNKNGVDQEIIFPPIKTDVITMDPKDNCSKDANDTLLLQLTNTSAYYMYLLLLLKSVVYFAIITCCLLRRTAFCCNGEKSRAKRSGSGATNFSLLKQAGDVEENPGPTSMALPVTALLLPLALLLHAARPSYVLTQPPSVSVAPGQTARITCGGNNIGGKSVHWYQQPPGQAPVVVVYDDSDRPSGIPERFSGSNSGNTATLTISRVEAGDEAVYYCQVWDSSSDHVVFGGGTKLTVLGGGGSGGGGSGGGGSQLQLQESGPGLVKPSETLSLTCTVSGGSISSSSYFWGWIRQPPGKGLEWIGSIYYSGITYYNPSLKSRVTISVDTSKNQFSLKLSSVTAADTAVYYCARHDGAVAGLFDYWGQGTLVTVSSATRIQNPDPAVYQLRDSKSSDKSVCLFTDFDSQTNVSQSKDSDVYITDKTVLDMRSMDFKSNSAVAWSNKSDFACANAFNNSIIPEDTFFPSPESSDSTDHVKPKETENTKQPSKSCHKPKAIVHTEKVNMMSLTVLGLRMLFAKTVAVNFLLTAKLFFLRAKRSGSGVKQTLNFDLLKLAGDVESNPGPSRGHMTEYKPTVRLATRDDVPRAVRTLAAAFADYPATRHTVDPDRHIERVTELQELFLTRVGLDIGKVWVADDGAAVAVWTTPESVEAGAVFAEIGPRMAELSGSRLAAQQQMEGLLAPHRPKEPAWFLATVGVSPDHQGKGLGSAVVLPGVEAAERAGVPAFLETSAPRNLPFYERLGFTVTADVEVPEGPRTWCMTRKPGA

SEQ ID NO: 43537 - protein, 872 aa, synthetic construct
MALPVTALLLPLALLLHAARPLEEDLKNVFPPEVAVFEPSEAEISHTQKATLVCLATGFYPDHVELSWWVNGKEVHSGVCTDPQPLKEQPALNDSRYCLSSRLRVSATFWQNPRNHFRCQVQFYGLSENDEWTQDRAKPVTQIVSAEAWGRADCGFTSESYQQGVLSATNLSVIGFRILLLKVAGFNLLMTLRLWSSRAKRSGSGATNFSLLKQAGDVEENPGPTSMALPVTALLLPLALLLHAARPSYVLTQPPSVSVAPGQTARITCGGNNIGGKSVHWYQQPPGQAPVVVVYDDSDRPSGIPERFSGSNSGNTATLTISRVEAGDEAVYYCQVWDSSSDHVVFGGGTKLTVLGGGGSGGGGSGGGGSQLQLQESGPGLVKPSETLSLTCTVSGGSISSSSYFWGWIRQPPGKGLEWIGSIYYSGITYYNPSLKSRVTISVDTSKNQFSLKLSSVTAADTAVYYCARHDGAVAGLFDYWGQGTLVTVSSATRIQNPDPAVYQLRDSKSSDKSVCLFTDFDSQTNVSQSKDSDVYITDKCVLDMRSMDFKSNSAVAWSNKSDFACANAFNNSIIPEDTFFPSPESSCDVKLVEKSFETDTNLNFQILYEILLGKATLYAVLVSALVLMAMVKRKDSRGRAKRSGSGVKQTLNFDLLKLAGDVESNPGPSRGHMTEYKPTVRLATRDDVPRAVRTLAAAFADYPATRHTVDPDRHIERVTELQELFLTRVGLDIGKVWVADDGAAVAVWTTPESVEAGAVFAEIGPRMAELSGSRLAAQQQMEGLLAPHRPKEPAWFLATVGVSPDHQGKGLGSAVVLPGVEAAERAGVPAFLETSAPRNLPFYERLGFTVTADVEVPEGPRTWCMTRKPGA

SEQ ID NO: 43538 - protein, 901 aa, synthetic construct
MALPVTALLLPLALLLHAARPLEEEDLKNVFPPEVAVFEPSEAEISHTQKATLVCLATGFYPDHVELSWWVNGKEVHSGVCTDPQPLKEQPALNDSRYCLSSRLRVSATFWQNPRNHFRCQVQFYGLSENDEWTQDRAKPVTQIVSAEAWGRADCGFTSESYQQGVLSATNLSVIGFRILLLKVAGFNLLMTLRLWSSRAKRSGSGATNFSLLKQAGDVEENPGPTSMALPVTALLLPLALLLHAARPSYVLTQPPSVSVAPGQTARITCGGNNIGGKSVHWYQQPPGQAPVVVVYDDSDRPSGIPERFSGSNSGNTATLTISRVEAGDEAVYYCQVWDSSSDHVVFGGGTKLTVLGGGGSGGGGSGGGGSQLQLQESGPGLVKPSETLSLTCTVSGGSISSSSYFWGWIRQPPGKGLEWIGSIYYSGITYYNPSLKSRVTISVDTSKNQFSLKLSSVTAADTAVYYCARHDGAVAGLFDYWGQGTLVTVSSATRGQPKANPTVTLFPPSSEELQANKATLVCLISDFYPGAVTVAWKADGSPVKAGVETTKPSKQSNNKYAASSYLSLTPEQWKSHRSYSCQVTHEGSTVEKTVAPTECSPIKTDVITMDPKDNCSKDANDTLLLQLTNTSAYYMYLLLLLKSVVYFAIITCCLLRRTAFCCNGEKSRAKRSGSGVKQTLNFDLLKLAGDVESNPGPSRGHMTEYKPTVRLATRDDVPRAVRTLAAAFADYPATRHTVDPDRHIERVTELQELFLTRVGLDIGKVWVADDGAAVAVWTTPESVEAGAVFAEIGPRMAELSGSRLAAQQQMEGLLAPHRPKEPAWFLATVGVSPDHQGKGLGSAVVLPGVEAAERAGVPAFLETSAPRNLPFYERLGFTVTADVEVPEGPRTWCMTRKPGA

SEQ ID NO: 43539 - protein, 901 aa, synthetic construct
MALPVTALLLPLALLLHAARPLEGQPKANPTVTLFPPSSEELQANKATLVCLISDFYPGAVTVAWKADGSPVKAGVETTKPSKQSNNKYAASSYLSLTPEQWKSHRSYSCQVTHEGSTVEKTVAPTECSPIKTDVITMDPKDNCSKDANDTLLLQLTNTSAYYMYLLLLLKSVVYFAIITCCLLRRTAFCCNGEKSRAKRSGSGATNFSLLKQAGDVEENPGPTSMALPVTALLLPLALLLHAARPSYVLTQPPSVSVAPGQTARITCGGNNIGGKSVHWYQQPPGQAPVVVVYDDSDRPSGIPERFSGSNSGNTATLTISRVEAGDEAVYYCQVWDSSSDHVVFGGGTKLTVLGGGGSGGGGSGGGGSQLQLQESGPGLVKPSETLSLTCTVSGGSISSSSYFWGWIRQPPGKGLEWIGSIYYSGITYYNPSLKSRVTISVDTSKNQFSLKLSSVTAADTAVYYCARHDGAVAGLFDYWGQGTLVTVSSATREEDLKNVFPPEVAVFEPSEAEISHTQKATLVCLATGFYPDHVELSWWVNGKEVHSGVCTDPQPLKEQPALNDSRYCLSSRLRVSATFWQNPRNHFRCQVQFYGLSENDEWTQDRAKPVTQIVSAEAWGRADCGFTSESYQQGVLSATNLSVIGFRILLLKVAGFNLLMTLRLWSSRAKRSGSGVKQTLNFDLLKLAGDVESNPGPSRGHMTEYKPTVRLATRDDVPRAVRTLAAAFADYPATRHTVDPDRHIERVTELQELFLTRVGLDIGKVWVADDGAAVAVWTTPESVEAGAVFAEIGPRMAELSGSRLAAQQQMEGLLAPHRPKEPAWFLATVGVSPDHQGKGLGSAVVLPGVEAAERAGVPAFLETSAPRNLPFYERLGFTVTADVEVPEGPRTWCMTRKPGA

SEQ ID NO: 43540 - protein, 898 aa, synthetic construct
MALPVTALLLPLALLLHAARPLEEASTKGPSVFPLAPSSKSTSGGTAALGCLVKDYFPEPVTVSWNSGALTSGVHTFPAVLQSSGLYSLSSVVTVPSSSLGTQTYICNVNHKPSNTKVDKRVEPKSCPIKTDVITMDPKDNCSKDANDTLLLQLTNTSAYYMYLLLLLKSVVYFAIITCCLLRRTAFCCNGEKSRAKRSGSGATNFSLLKQAGDVEENPGPTSMALPVTALLLPLALLLHAARPSYVLTQPPSVSVAPGQTARITCGGNNIGGKSVHWYQQPPGQAPVVVVYDDSDRPSGIPERFSGSNSGNTATLTISRVEAGDEAVYYCQVWDSSSDHVVFGGGTKLTVLGGGGSGGGGSGGGGSQLQLQESGPGLVKPSETLSLTCTVSGGSISSSSYFWGWIRQPPGKGLEWIGSIYYSGITYYNPSLKSRVTISVDTSKNQFSLKLSSVTAADTAVYYCARHDGAVAGLFDYWGQGTLVTVSSATRGQPKANPTVTLFPPSSEELQANKATLVCLISDFYPGAVTVAWKADGSPVKAGVETTKPSKQSNNKYAASSYLSLTPEQWKSHRSYSCQVTHEGSTVEKTVAPTECSEVKTDSTDHVKPKETENTKQPSKSCHKPKAIVHTEKVNMMSLTVLGLRMLFAKTVAVNFLLTAKLFFLRAKRSGSGVKQTLNFDLLKLAGDVESNPGPSRGHMTEYKPTVRLATRDDVPRAVRTLAAAFADYPATRHTVDPDRHIERVTELQELFLTRVGLDIGKVWVADDGAAVAVWTTPESVEAGAVFAEIGPRMAELSGSRLAAQQQMEGLLAPHRPKEPAWFLATVGVSPDHQGKGLGSAVVLPGVEAAERAGVPAFLETSAPRNLPFYERLGFTVTADVEVPEGPRTWCMTRKPGA

SEQ ID NO: 43541 - protein, 876 aa, synthetic construct
MALPVTALLLPLALLLHAARPLEEASTKGPSVFPLAPSSKSTSGGTAALGCLVKDYFPEPVTVSWNSGALTSGVHTFPAVLQSSGLYSLSSVVTVPSSSLGTQTYICNVNHKPSNTKVDKRVEPKSCGRADCGFTSESYQQGVLSATILYEILLGKATLYAVLVSALVLMAMVKRKDSRGRAKRSGSGATNFSLLKQAGDVEENPGPTSMALPVTALLLPLALLLHAARPSYVLTQPPSVSVAPGQTARITCGGNNIGGKSVHWYQQPPGQAPVVVVYDDSDRPSGIPERFSGSNSGNTATLTISRVEAGDEAVYYCQVWDSSSDHVVFGGGTKLTVLGGGGSGGGGSGGGGSQLQLQESGPGLVKPSETLSLTCTVSGGSISSSSYFWGWIRQPPGKGLEWIGSIYYSGITYYNPSLKSRVTISVDTSKNQFSLKLSSVTAADTAVYYCARHDGAVAGLFDYWGQGTLVTVSSATRGQPKANPTVTLFPPSSEELQANKATLVCLISDFYPGAVTVAWKADGSPVKAGVETTKPSKQSNNKYAASSYLSLTPEQWKSHRSYSCQVTHEGSTVEKTVAPTECSIPEDTFFPSPESSCDVKLVEKSFETDTNLNFQNLSVIGFRILLLKVAGFNLLMTLRLWSSRAKRSGSGVKQTLNFDLLKLAGDVESNPGPSRGHMTEYKPTVRLATRDDVPRAVRTLAAAFADYPATRHTVDPDRHIERVTELQELFLTRVGLDIGKVWVADDGAAVAVWTTPESVEAGAVFAEIGPRMAELSGSRLAAQQQMEGLLAPHRPKEPAWFLATVGVSPDHQGKGLGSAVVLPGVEAAERAGVPAFLETSAPRNLPFYERLGFTVTADVEVPEGPRTWCMTRKPGA

SEQ ID NO: 43542 - protein, 876 aa, synthetic construct
MALPVTALLLPLALLLHAARPLEEASTKGPSVFPLAPSSKSTSGGTAALGCLVKDYFPEPVTVSWNSGALTSGVHTFPAVLQSSGLYSLSSVVTVPSSSLGTQTYICNVNHKPSNTKVDKRVEPKSCIPEDTFFPSPESSCDVKLVEKSFETDTNLNFQNLSVIGFRILLLKVAGFNLLMTLRLWSSRAKRSGSGATNFSLLKQAGDVEENPGPTSMALPVTALLLPLALLLHAARPSYVLTQPPSVSVAPGQTARITCGGNNIGGKSVHWYQQPPGQAPVVVVYDDSDRPSGIPERFSGSNSGNTATLTISRVEAGDEAVYYCQVWDSSSDHVVFGGGTKLTVLGGGGSGGGGSGGGGSQLQLQESGPGLVKPSETLSLTCTVSGGSISSSSYFWGWIRQPPGKGLEWIGSIYYSGITYYNPSLKSRVTISVDTSKNQFSLKLSSVTAADTAVYYCARHDGAVAGLFDYWGQGTLVTVSSATRGQPKANPTVTLFPPSSEELQANKATLVCLISDFYPGAVTVAWKADGSPVKAGVETTKPSKQSNNKYAASSYLSLTPEQWKSHRSYSCQVTHEGSTVEKTVAPTECSGRADCGFTSESYQQGVLSATILYEILLGKATLYAVLVSALVLMAMVKRKDSRGRAKRSGSGVKQTLNFDLLKLAGDVESNPGPSRGHMTEYKPTVRLATRDDVPRAVRTLAAAFADYPATRHTVDPDRHIERVTELQELFLTRVGLDIGKVWVADDGAAVAVWTTPESVEAGAVFAEIGPRMAELSGSRLAAQQQMEGLLAPHRPKEPAWFLATVGVSPDHQGKGLGSAVVLPGVEAAERAGVPAFLETSAPRNLPFYERLGFTVTADVEVPEGPRTWCMTRKPGA

SEQ ID NO: 43543 - protein, 623 aa, synthetic construct
MALPVTALLLPLALLLHAARPSYVLTQPPSVSVAPGQTARITCGGNNIGGKSVHWYQQPPGQAPVVVVYDDSDRPSGIPERFSGSNSGNTATLTISRVEAGDEAVYYCQVWDSSSDHVVFGGGTKLTVLLEDLKNVFPPEVAVFEPSEAEISHTQKATLVCLATGFYPDHVELSWWVNGKEVHSGVCTDPQPLKEQPALNDSRYCLSSRLRVSATFWQNPRNHFRCQVQFYGLSENDEWTQDRAKPVTQIVSAEAWGRADSGFTSESYQQGVLSATILYEILLGKATLYAVLVSALVLMAMVKRKDSRGRAKRSGSGATNFSLLKQAGDVEENPGPTSMDWIWRILFLVGAATGAHSFEQLQLQESGPGLVKPSETLSLTCTVSGGSISSSSYFWGWIRQPPGKGLEWIGSIYYSGITYYNPSLKSRVTISVDTSKNQFSLKLSSVTAADTAVYYCARHDGAVAGLFDYWGQGTLVTVSSATRIQNPDPAVYQLRDSKSSDKSVCLFTDFDSQTNVSQSKDSDVYITDKCVLDMRSMDFKSNSAVAWSNKSDFACANAFNNSIIPEDTFFPSPESSSDVKLVEKSFETDTNLNFQNLSVIGFRILLLKVAGFNLLMTLRLWSS

SEQ ID NO: 43544 - protein, 902 aa, synthetic construct
MALPVTALLLPLALLLHAARPEVQLLESGGGLVQPGGSLRLSCAASGRTFSMGWYRQAPGKGLEFVSAITYSGGSPYYADSVKGRFTISRDNSKNTVYLQMNSLRAEDTAVYYCAANPTYGSDWNAENWGQGTLVTVSSGTGGGGSGGGGSGGGGSEFSYVLTQPPSVSVAPGQTARITCGGNNIGGKSVHWYQQPPGQAPVVVVYDDSDRPSGIPERFSGSNSGNTATLTISRVEAGDEAVYYCQVWDSSSDHVVFGGGTKLTVLLEIQNPDPAVYQLRDSKSSDKSVCLFTDFDSQTNVSQSKDSDVYITDKCVLDMRSMDFKSNSAVAWSNKSDFACANAFNNSIIPEDTFFPSSDVPCDVKLVEKSFETDTNLNFQNLSVIGFRILLLKVAGFNLLMTLRLWSSRAKRSGSGVKQTLNFDLLKLAGDVESNPGPTSTMDWIWRILFLVGAATGTHSGPEVQLVESGGGLVQPGGSLRLSCAASGRTFTMGWYRQAPGKEREFVAAISLSPTLAYYADSVKGRFTISRDNSKNTVVLQMNSLRAEDTALYYCAADRKSVMSIRPDYWGQGTLVTVSSGSGGGGSGGGGSGGGGSFEQLQLQESGPGLVKPSETLSLTCTVSGGSISSSSYFWGWIRQPPGKGLEWIGSIYYSGITYYNPSLKSRVTISVDTSKNQFSLKLSSVTAADTAVYYCARHDGAVAGLFDYWGQGTLVTVSSATREDLKNVFPPEVAVFEPSKAEIAHTQKATLVCLATGFYPDHVELSWWVNGKEVHSGVCTDPQPLKEQPALNDSRYCLSSRLRVSATFWQNPRNHFRCQVQFYGLSENDEWTQDRAKPVTQIVSAEAWGRADCGITSASYHQGVLSATILYEILLGKATLYAVLVSALVLMAMVKRKDSRG

SEQ ID NO: 43545 - protein, 902 aa, synthetic construct
MALPVTALLLPLALLLHAARPEVQLVESGGGLVQAGGSLRLSCAASGRTFSMGWFRQAPGKEREFVAAITYSGGSPYYADSVKGRFTISRDNAKNTVYLQMNSLKPEDTAVYYCAANPTYGSDWNAENWGQGTQVTVSSGTGGGGSGGGGSGGGGSEFSYVLTQPPSVSVAPGQTARITCGGNNIGGKSVHWYQQPPGQAPVVVVYDDSDRPSGIPERFSGSNSGNTATLTISRVEAGDEAVYYCQVWDSSSDHVVFGGGTKLTVLLEIQNPDPAVYQLRDSKSSDKSVCLFTDFDSQTNVSQSKDSDVYITDKCVLDMRSMDFKSNSAVAWSNKSDFACANAFNNSIIPEDTFFPSSDVPCDVKLVEKSFETDTNLNFQNLSVIGFRILLLKVAGFNLLMTLRLWSSRAKRSGSGVKQTLNFDLLKLAGDVESNPGPTSTMDWIWRILFLVGAATGAHSGPEVQLVESGGGLVQPGGSLRLSCAASGRTFTMGWYRQAPGKEREFVAAISLSPTLAYYADSVKGRFTISRDNSKNTVVLQMNSLRAEDTALYYCAADRKSVMSIRPDYWGQGTLVTVSSGSGGGGSGGGGSGGGGSFEQLQLQESGPGLVKPSETLSLTCTVSGGSISSSSYFWGWIRQPPGKGLEWIGSIYYSGITYYNPSLKSRVTISVDTSKNQFSLKLSSVTAADTAVYYCARHDGAVAGLFDYWGQGTLVTVSSATREDLKNVFPPEVAVFEPSKAEIAHTQKATLVCLATGFYPDHVELSWWVNGKEVHSGVCTDPQPLKEQPALNDSRYCLSSRLRVSATFWQNPRNHFRCQVQFYGLSENDEWTQDRAKPVTQIVSAEAWGRADCGITSASYHQGVLSATILYEILLGKATLYAVLVSALVLMAMVKRKDSRG

SEQ ID NO: 43546 - protein, 899 aa, synthetic construct
MALPVTALLLPLALLLHAARPEVQLVESGGGLVQAGGSLRLSCAASGRTFSMGWFRQAPGKEREFVAAITYSGGSPYYADSVKGRFTISRDNAKNTVYLQMNSLKPEDTAVYYCAANPTYGSDWNAENWGQGTQVTVSSGTGGGGSGGGGSGGGGSEFSYVLTQPPSVSVAPGQTARITCGGNNIGGKSVHWYQQPPGQAPVVVVYDDSDRPSGIPERFSGSNSGNTATLTISRVEAGDEAVYYCQVWDSSSDHVVFGGGTKLTVLLEDLKNVFPPEVAVFEPSEAEISHTQKATLVCLATGFYPDHVELSWWVNGKEVHSGVCTDPQPLKEQPALNDSRYCLSSRLRVSATFWQNPRNHFRCQVQFYGLSENDEWTQDRAKPVTQIVSAEAWGRADCGFTSESYQQGVLSATILYEILLGKATLYAVLVSALVLMAMVKRKDSRGRAKRSGSGATNFSLLKQAGDVEENPGPTSATMDWIWRILFLVGAATGAHSGPEVQLVESGGGLVQAGGSLRLSCAASGRTFTMGWFRQAPGKEREFVAAISLSPTLAYYADSVKGRFTISRDNAKNTVVLQMNSLKPEDTALYYCAADRKSVMSIRPDYWGQGTQVTVSSGSGGGGSGGGGSGGGGSFEQLQLQESGPGLVKPSETLSLTCTVSGGSISSSSYFWGWIRQPPGKGLEWIGSIYYSGITYYNPSLKSRVTISVDTSKNQFSLKLSSVTAADTAVYYCARHDGAVAGLFDYWGQGTLVTVSSATRIQNPDPAVYQLRDSKSSDKSVCLFTDFDSQTNVSQSKDSDVYITDKCVLDMRSMDFKSNSAVAWSNKSDFACANAFNNSIIPEDTFFPSPESSCDVKLVEKSFETDTNLNFQNLSVIGFRILLLKVAGFNLLMTLRLWSS

SEQ ID NO: 43547 - protein, 770 aa, synthetic construct
MALPVTALLLPLALLLHAARPEVQLVESGGGLVQPGGSLRLSCEASGFASDDYIIGWFRQAPGKEREGVSCISSKYANTVYTDSVKGRFRLSRGTAKNTVYLQMSALKPEDTAVYYCAMDSRRVTCPEISTMHRNFDSWGQGTLVTVSSGTGGGGSGGGGSGGGGSEFSYVLTQPPSVSVAPGQTARITCGGNNIGGKSVHWYQQPPGQAPVVVVYDDSDRPSGIPERFSGSNSGNTATLTISRVEAGDEAVYYCQVWDSSSDHVVFGGGTKLTVLLEDLKNVFPPEVAVFEPSKAEIAHTQKATLVCLATGFYPDHVELSWWVNGKEVHSGVCTDPQPLKEQPALNDSRYCLSSRLRVSATFWQNPRNHFRCQVQFYGLSENDEWTQDRAKPVTQIVSAEAWGRADCGITSASYHQGVLSATILYEILLGKATLYAVLVSALVLMAMVKRKDSRGRAKRSGSGATNFSLLKQAGDVEENPGPTSMDWIWRILFLVGAATGAHSFEQLQLQESGPGLVKPSETLSLTCTVSGGSISSSSYFWGWIRQPPGKGLEWIGSIYYSGITYYNPSLKSRVTISVDTSKNQFSLKLSSVTAADTAVYYCARHDGAVAGLFDYWGQGTLVTVSSATRIQNPDPAVYQLRDSKSSDKSVCLFTDFDSQTNVSQSKDSDVYITDKCVLDMRSMDFKSNSAVAWSNKSDFACANAFNNSIIPEDTFFPSSDVPCDVKLVEKSFETDTNLNFQNLSVIGFRILLLKVAGFNLLMTLRLWSS

SEQ ID NO: 43548 - protein, 761 aa, synthetic construct
MALPVTALLLPLALLLHAARPSYVLTQPPSVSVAPGQTARITCGGNNIGGKSVHWYQQPPGQAPVVVVYDDSDRPSGIPERFSGSNSGNTATLTISRVEAGDEAVYYCQVWDSSSDHVVFGGGTKLTVLLEDLKNVFPPEVAVFEPSEAEISHTQKATLVCLATGFYPDHVELSWWVNGKEVHSGVCTDPQPLKEQPALNDSRYCLSSRLRVSATFWQNPRNHFRCQVQFYGLSENDEWTQDRAKPVTQIVSAEAWGRADCGFTSESYQQGVLSATILYEILLGKATLYAVLVSALVLMAMVKRKDSRGRAKRSGSGATNFSLLKQAGDVEENPGPTSTMDWIWRILFLVGAATGAHSGPEVQLVESGGGLVQPGGSLRLSCAASGRTFTMGWYRQAPGKEREFVAAISLSPTLAYYADSVKGRFTISRDNSKNTVVLQMNSLRAEDTALYYCAADRKSVMSIRPDYWGQGTLVTVSSGSGGGGSGGGGSGGGGSFEQLQLQESGPGLVKPSETLSLTCTVSGGSISSSSYFWGWIRQPPGKGLEWIGSIYYSGITYYNPSLKSRVTISVDTSKNQFSLKLSSVTAADTAVYYCARHDGAVAGLFDYWGQGTLVTVSSATRIQNPDPAVYQLRDSKSSDKSVCLFTDFDSQTNVSQSKDSDVYITDKCVLDMRSMDFKSNSAVAWSNKSDFACANAFNNSIIPEDTFFPSPESSCDVKLVEKSFETDTNLNFQNLSVIGFRILLLKVAGFNLLMTLRLWSS

SEQ ID NO: 43549 - protein, 768 aa, synthetic construct
MALPVTALLLPLALLLHAARPSYVLTQPPSVSVAPGQTARITCGGNNIGGKSVHWYQQPPGQAPVVVVYDDSDRPSGIPERFSGSNSGNTATLTISRVEAGDEAVYYCQVWDSSSDHVVFGGGTKLTVLLEDLKNVFPPEVAVFEPSEAEISHTQKATLVCLATGFYPDHVELSWWVNGKEVHSGVCTDPQPLKEQPALNDSRYCLSSRLRVSATFWQNPRNHFRCQVQFYGLSENDEWTQDRAKPVTQIVSAEAWGRADCGFTSESYQQGVLSATILYEILLGKATLYAVLVSALVLMAMVKRKDSRGRAKRSGSGATNFSLLKQAGDVEENPGPTSTMDWIWRILFLVGAATGAHSGPQVQLVESGGGLVQPGGSLRLSCAASGNINSRNCMGWFRQAPGKGREGVAAIGQVTGRTYYVDSVKGRFTISLDNSKNTLYLQMNSLRAEDTAVYYCAAAPGCLLSALRSADYRNWGQGTLVTVSSGSGGGGSGGGGSGGGGSFEQLQLQESGPGLVKPSETLSLTCTVSGGSISSSSYFWGWIRQPPGKGLEWIGSIYYSGITYYNPSLKSRVTISVDTSKNQFSLKLSSVTAADTAVYYCARHDGAVAGLFDYWGQGTLVTVSSATRIQNPDPAVYQLRDSKSSDKSVCLFTDFDSQTNVSQSKDSDVYITDKCVLDMRSMDFKSNSAVAWSNKSDFACANAFNNSIIPEDTFFPSPESSCDVKLVEKSFETDTNLNFQNLSVIGFRILLLKVAGFNLLMTLRLWSS

SEQ ID NO: 43550 - protein, 768 aa, synthetic construct
MALPVTALLLPLALLLHAARPSYVLTQPPSVSVAPGQTARITCGGNNIGGKSVHWYQQPPGQAPVVVVYDDSDRPSGIPERFSGSNSGNTATLTISRVEAGDEAVYYCQVWDSSSDHVVFGGGTKLTVLLEDLKNVFPPEVAVFEPSEAEISHTQKATLVCLATGFYPDHVELSWWVNGKEVHSGVCTDPQPLKEQPALNDSRYCLSSRLRVSATFWQNPRNHFRCQVQFYGLSENDEWTQDRAKPVTQIVSAEAWGRADCGFTSESYQQGVLSATILYEILLGKATLYAVLVSALVLMAMVKRKDSRGRAKRSGSGATNFSLLKQAGDVEENPGPTSTMDWIWRILFLVGAATGAHSGPQVQLVESGGGSVQAGGSLRLSCGASGNISSRNCMGWFRQAPGKEREGVAAIGQVTGRSYYVDSVKGRFTISLDNAKNTLYLQMNTLKPEDTAMYYCAAAPGCLLSALRSADYRNWGQGTQVTVSSGSGGGGSGGGGSGGGGSFEQLQLQESGPGLVKPSETLSLTCTVSGGSISSSSYFWGWIRQPPGKGLEWIGSIYYSGITYYNPSLKSRVTISVDTSKNQFSLKLSSVTAADTAVYYCARHDGAVAGLFDYWGQGTLVTVSSATRIQNPDPAVYQLRDSKSSDKSVCLFTDFDSQTNVSQSKDSDVYITDKCVLDMRSMDFKSNSAVAWSNKSDFACANAFNNSIIPEDTFFPSPESSCDVKLVEKSFETDTNLNFQNLSVIGFRILLLKVAGFNLLMTLRLWSS

SEQ ID NO: 43551 - protein, 909 aa, synthetic construct
MALPVTALLLPLALLLHAARPEVQLVESGGGLVQAGGSLRLSCAASGRTFSMGWFRQAPGKEREFVAAITYSGGSPYYADSVKGRFTISRDNAKNTVYLQMNSLKPEDTAVYYCAANPTYGSDWNAENWGQGTQVTVSSGTGGGGSGGGGSGGGGSEFSYVLTQPPSVSVAPGQTARITCGGNNIGGKSVHWYQQPPGQAPVVVVYDDSDRPSGIPERFSGSNSGNTATLTISRVEAGDEAVYYCQVWDSSSDHVVFGGGTKLTVLLEIQNPDPAVYQLRDSKSSDKSVCLFTDFDSQTNVSQSKDSDVYITDKCVLDMRSMDFKSNSAVAWSNKSDFACANAFNNSIIPEDTFFPSSDVPCDVKLVEKSFETDTNLNFQNLSVIGFRILLLKVAGFNLLMTLRLWSSRAKRSGSGVKQTLNFDLLKLAGDVESNPGPTSTMDWIWRILFLVGAATGAHSGPQVQLVESGGGSVQAGGSLRLSCGASGNISSRNCMGWFRQAPGKEREGVAAIGQVTGRSYYVDSVKGRFTISLDNAKNTLYLQMNTLKPEDTAMYYCAAAPGCLLSALRSADYRNWGQGTQVTVSSGSGGGGSGGGGSGGGGSFEQLQLQESGPGLVKPSETLSLTCTVSGGSISSSSYFWGWIRQPPGKGLEWIGSIYYSGITYYNPSLKSRVTISVDTSKNQFSLKLSSVTAADTAVYYCARHDGAVAGLFDYWGQGTLVTVSSATREDLKNVFPPEVAVFEPSKAEIAHTQKATLVCLATGFYPDHVELSWWVNGKEVHSGVCTDPQPLKEQPALNDSRYCLSSRLRVSATFWQNPRNHFRCQVQFYGLSENDEWTQDRAKPVTQIVSAEAWGRADCGITSASYHQGVLSATILYEILLGKATLYAVLVSALVLMAMVKRKDSRG

SEQ ID NO: 43552 - protein, 906 aa, synthetic construct
MALPVTALLLPLALLLHAARPQVQLVESGGGSVQAGGSLRLSCGASGNISSRNCMGWFRQAPGKEREGVAAIGQVTGRSYYVDSVKGRFTISLDNAKNTLYLQMNTLKPEDTAMYYCAAAPGCLLSALRSADYRNWGQGTQVTVSSGTGGGGSGGGGSGGGGSEFSYVLTQPPSVSVAPGQTARITCGGNNIGGKSVHWYQQPPGQAPVVVVYDDSDRPSGIPERFSGSNSGNTATLTISRVEAGDEAVYYCQVWDSSSDHVVFGGGTKLTVLLEDLKNVFPPEVAVFEPSEAEISHTQKATLVCLATGFYPDHVELSWWVNGKEVHSGVCTDPQPLKEQPALNDSRYCLSSRLRVSATFWQNPRNHFRCQVQFYGLSENDEWTQDRAKPVTQIVSAEAWGRADCGFTSESYQQGVLSATILYEILLGKATLYAVLVSALVLMAMVKRKDSRGRAKRSGSGATNFSLLKQAGDVEENPGPTSATMDWIWRILFLVGAATGAHSGPEVQLVESGGGLVQAGGSLRLSCAASGRTFTMGWFRQAPGKEREFVAAISLSPTLAYYADSVKGRFTISRDNAKNTVVLQMNSLKPEDTALYYCAADRKSVMSIRPDYWGQGTQVTVSSGSGGGGSGGGGSGGGGSFEQLQLQESGPGLVKPSETLSLTCTVSGGSISSSSYFWGWIRQPPGKGLEWIGSIYYSGITYYNPSLKSRVTISVDTSKNQFSLKLSSVTAADTAVYYCARHDGAVAGLFDYWGQGTLVTVSSATRIQNPDPAVYQLRDSKSSDKSVCLFTDFDSQTNVSQSKDSDVYITDKCVLDMRSMDFKSNSAVAWSNKSDFACANAFNNSIIPEDTFFPSPESSCDVKLVEKSFETDTNLNFQNLSVIGFRILLLKVAGFNLLMTLRLWSS

SEQ ID NO: 43553 - protein, 769 aa, synthetic construct
MALPVTALLLPLALLLHAARPQVQLVESGGGSVQAGGSLRLSCGASGNISSRNCMGWFRQAPGKEREGVAAIGQVTGRSYYVDSVKGRFTISLDNAKNTLYLQMNTLKPEDTAMYYCAAAPGCLLSALRSADYRNWGQGTQVTVSSGTGGGGSGGGGSGGGGSEFSYVLTQPPSVSVAPGQTARITCGGNNIGGKSVHWYQQPPGQAPVVVVYDDSDRPSGIPERFSGSNSGNTATLTISRVEAGDEAVYYCQVWDSSSDHVVFGGGTKLTVLLEDLKNVFPPEVAVFEPSEAEISHTQKATLVCLATGFYPDHVELSWWVNGKEVHSGVCTDPQPLKEQPALNDSRYCLSSRLRVSATFWQNPRNHFRCQVQFYGLSENDEWTQDRAKPVTQIVSAEAWGRADCGFTSESYQQGVLSATILYEILLGKATLYAVLVSALVLMAMVKRKDSRGRAKRSGSGATNFSLLKQAGDVEENPGPTSATMDWIWRILFLVGAATGAHSFEQLQLQESGPGLVKPSETLSLTCTVSGGSISSSSYFWGWIRQPPGKGLEWIGSIYYSGITYYNPSLKSRVTISVDTSKNQFSLKLSSVTAADTAVYYCARHDGAVAGLFDYWGQGTLVTVSSATRIQNPDPAVYQLRDSKSSDKSVCLFTDFDSQTNVSQSKDSDVYITDKCVLDMRSMDFKSNSAVAWSNKSDFACANAFNNSIIPEDTFFPSPESSCDVKLVEKSFETDTNLNFQNLSVIGFRILLLKVAGFNLLMTLRLWSS

SEQ ID NO: 43554 - protein, 769 aa, synthetic construct
MALPVTALLLPLALLLHAARPQVQLVESGGGVVQPGGSLRLSCAASGLSFSTYTVAWFRQAPGKGLEGVAAIPYTSQHMVYTDSVRGRFTISRDNSKNTLYLQMNSLRAEDTAVYYCATDRRPGTSMLAINGYNRWGQGTTVTVSSGTGGGGSGGGGSGGGGSEFSYVLTQPPSVSVAPGQTARITCGGNNIGGKSVHWYQQPPGQAPVVVVYDDSDRPSGIPERFSGSNSGNTATLTISRVEAGDEAVYYCQVWDSSSDHVVFGGGTKLTVLLEDLKNVFPPEVAVFEPSEAEISHTQKATLVCLATGFYPDHVELSWWVNGKEVHSGVCTDPQPLKEQPALNDSRYCLSSRLRVSATFWQNPRNHFRCQVQFYGLSENDEWTQDRAKPVTQIVSAEAWGRADCGFTSESYQQGVLSATILYEILLGKATLYAVLVSALVLMAMVKRKDSRGRAKRSGSGATNFSLLKQAGDVEENPGPTSATMDWIWRILFLVGAATGAHSFEQLQLQESGPGLVKPSETLSLTCTVSGGSISSSSYFWGWIRQPPGKGLEWIGSIYYSGITYYNPSLKSRVTISVDTSKNQFSLKLSSVTAADTAVYYCARHDGAVAGLFDYWGQGTLVTVSSATRIQNPDPAVYQLRDSKSSDKSVCLFTDFDSQTNVSQSKDSDVYITDKCVLDMRSMDFKSNSAVAWSNKSDFACANAFNNSIIPEDTFFPSPESSCDVKLVEKSFETDTNLNFQNLSVIGFRILLLKVAGFNLLMTLRLWSS

SEQ ID NO: 43555 - protein, 768 aa, synthetic construct
MALPVTALLLPLALLLHAARPSYVLTQPPSVSVAPGQTARITCGGNNIGGKSVHWYQQPPGQAPVVVVYDDSDRPSGIPERFSGSNSGNTATLTISRVEAGDEAVYYCQVWDSSSDHVVFGGGTKLTVLLEDLKNVFPPEVAVFEPSEAEISHTQKATLVCLATGFYPDHVELSWWVNGKEVHSGVCTDPQPLKEQPALNDSRYCLSSRLRVSATFWQNPRNHFRCQVQFYGLSENDEWTQDRAKPVTQIVSAEAWGRADCGFTSESYQQGVLSATILYEILLGKATLYAVLVSALVLMAMVKRKDSRGRAKRSGSGATNFSLLKQAGDVEENPGPTSTMDWIWRILFLVGAATGAHSGPQVQLVESGGGVVQPGGSLRLSCAASGLSFSTYTVAWFRQAPGKGLEGVAAIPYTSQHMVYTDSVRGRFTISRDNSKNTLYLQMNSLRAEDTAVYYCATDRRPGTSMLAINGYNRWGQGTTVTVSSGSGGGGSGGGGSGGGGSFEQLQLQESGPGLVKPSETLSLTCTVSGGSISSSSYFWGWIRQPPGKGLEWIGSIYYSGITYYNPSLKSRVTISVDTSKNQFSLKLSSVTAADTAVYYCARHDGAVAGLFDYWGQGTLVTVSSATRIQNPDPAVYQLRDSKSSDKSVCLFTDFDSQTNVSQSKDSDVYITDKCVLDMRSMDFKSNSAVAWSNKSDFACANAFNNSIIPEDTFFPSPESSCDVKLVEKSFETDTNLNFQNLSVIGFRILLLKVAGFNLLMTLRLWSS

SEQ ID NO: 43556 - protein, 770 aa, synthetic construct
MALPVTALLLPLALLLHAARPSYVLTQPPSVSVAPGQTARITCGGNNIGGKSVHWYQQPPGQAPVVVVYDDSDRPSGIPERFSGSNSGNTATLTISRVEAGDEAVYYCQVWDSSSDHVVFGGGTKLTVLLEDLKNVFPPEVAVFEPSEAEISHTQKATLVCLATGFYPDHVELSWWVNGKEVHSGVCTDPQPLKEQPALNDSRYCLSSRLRVSATFWQNPRNHFRCQVQFYGLSENDEWTQDRAKPVTQIVSAEAWGRADCGFTSESYQQGVLSATILYEILLGKATLYAVLVSALVLMAMVKRKDSRGRAKRSGSGATNFSLLKQAGDVEENPGPTSTMDWIWRILFLVGAATGAHSGPEVQLVESGGGSVQAGGSLRLSCAASGYTYSINCMGWFRQAPGKEREGVAAISTGGGRTDYRDSVKGRFTISQDNAKNTVYLQMNSLKPEDTAMYYCAGKTTYPGYGCGLGRSAYNYWGQGTQVTVSSGSGGGGSGGGGSGGGGSFEQLQLQESGPGLVKPSETLSLTCTVSGGSISSSSYFWGWIRQPPGKGLEWIGSIYYSGITYYNPSLKSRVTISVDTSKNQFSLKLSSVTAADTAVYYCARHDGAVAGLFDYWGQGTLVTVSSATRIQNPDPAVYQLRDSKSSDKSVCLFTDFDSQTNVSQSKDSDVYITDKCVLDMRSMDFKSNSAVAWSNKSDFACANAFNNSIIPEDTFFPSPESSCDVKLVEKSFETDTNLNFQNLSVIGFRILLLKVAGFNLLMTLRLWSS

SEQ ID NO: 43557 - protein, 623 aa, synthetic construct
MALPVTALLLPLALLLHAARPSYVLTQPPSVSVAPGQTARITCGGNNIGGKSVHWYQQPPGQAPVVVVYDDSDRPSGIPERFSGSNSGNTATLTISRVEAGDEAVYYCQVWDSSSDHVVFGGGTKLTVLLEDLKHVFPPEVAVFEPSDAEIWHTQKATLVCLATGFYPDHVELSWWVNGKEVHSGVSTDPQPLKEQPALNDSRYCLSSRLRVSATFWQNPRNHFRCQVQFYGLSENDEWTQDRAKPVTQIVSAEAWGRADCGFTSESYQQGVLSATILYEILLGKATLYAVLVSALVLMAMVKRKDSRGRAKRSGSGATNFSLLKQAGDVEENPGPTSMDWIWRILFLVGAATGAHSFEQLQLQESGPGLVKPSETLSLTCTVSGGSISSSSYFWGWIRQPPGKGLEWIGSIYYSGITYYNPSLKSRVTISVDTSKNQFSLKLSSVTAADTAVYYCARHDGAVAGLFDYWGQGTLVTVSSATRIQNPDPAVYQLRDSKSSDKSVCLFTDFDSQTNVSQSKDSDVYITDKTVLDMRSMDFKSNSAVAWSSKSDFACANAFNNSIIPEDTFFPSPEMACDVKLVEKSFETDTNLNFQNLLVIWLRILLLKVAGFNLLMTLRLWSS

SEQ ID NO: 43558 - protein, 623 aa, synthetic construct
MALPVTALLLPLALLLHAARPSYVLTQPPSVSVAPGQTARITCGGNNIGGKSVHWYQQPPGQAPVVVVYDDSDRPSGIPERFSGSNSGNTATLTISRVEAGDEAVYYCQVWDSSSDHVVFGGGTKLTVLLEDLKHVFPPEVAVFEPSDAEIWHTQKATLVCLATGFYPDHVELSWWVNGKEVHSGVSTDPQPLKEQPALNDSRYCLSSRLRVSATFWQNPRNHFRCQVQFYGLSENDEWTQDRAKPVTQIVSAEAWGRADCGFTSESYQQGVLSATILYEILLGKATLYAVLVSALVLMAMVKRKDSRGRAKRSGSGATNFSLLKQAGDVEENPGPTSMDWIWRILFLVGAATGAHSFEQLQLQESGPGLVKPSETLSLTCTVSGGSISSSSYFWGWIRQPPGKGLEWIGSIYYSGITYYNPSLKSRVTISVDTSKNQFSLKLSSVTAADTAVYYCARHDGAVAGLFDYWGQGTLVTVSSATRIQNPDPAVYQLRDSKSSDKSVCLFTDFDSQTNVSQSKDSDVYITDKTVLDMRSMDFKSNSAVAWSTKSDFACANAFNNSIIPEDTFFPSPEVVCDVKLVEKSFETDTNLNFQNLVVIGARILLLKVAGFNLLMTLRLWSS

SEQ ID NO: 43559 - protein, 623 aa, synthetic construct
MALPVTALLLPLALLLHAARPSYVLTQPPSVSVAPGQTARITCGGNNIGGKSVHWYQQPPGQAPVVVVYDDSDRPSGIPERFSGSNSGNTATLTISRVEAGDEAVYYCQVWDSSSDHVVFGGGTKLTVLLEDLKNVFPPEVAVFEPSKAEISRTQKATLVCLATGFYPPHVELSWWVNGKEVHDGVCTDPQPLKEQPALNDSRYCLSSRLRVSATFWQNPRNHFRCQVQFYGLSENDEWTQDRAKPVTQIVSAEAWGRADCGFTSESYQQGVLSATILYEILLGKATLYAVLVSALVLMAMVKRKDSRGRAKRSGSGATNFSLLKQAGDVEENPGPTSMDWIWRILFLVGAATGAHSFEQLQLQESGPGLVKPSETLSLTCTVSGGSISSSSYFWGWIRQPPGKGLEWIGSIYYSGITYYNPSLKSRVTISVDTSKNQFSLKLSSVTAADTAVYYCARHDGAVAGLFDYWGQGTLVTVSSATRIQNPDPAVYQLRDSKSSDKFVCLFTDFDSQINVSQSKDSDVYITDKCVLDMRSMDFKSNSAVAWSNKSDFTCANAFNNSIIPEDTFFPSPESSCDVKLVEKSFETDTNLNFQNLSVIGFRILLLKVAGFNLLMTLRLWSS

SEQ ID NO: 43560 - protein, 765 aa, synthetic construct
MALPVTALLLPLALLLHAARPSYVLTQPPSVSVAPGQTARITCGGNNIGGKSVHWYQQPPGQAPVVVVYDDSDRPSGIPERFSGSNSGNTATLTISRVEAGDEAVYYCQVWDSSSDHVVFGGGTKLTVLLEDLKNVFPPEVAVFEPSEAEISHTQKATLVCLATGFYPDHVELSWWVNGKEVHSGVCTDPQPLKEQPALNDSRYCLSSRLRVSATFWQNPRNHFRCQVQFYGLSENDEWTQDRAKPVTQIVSAEAWGRADCGFTSESYQQGVLSATILYEILLGKATLYAVLVSALVLMAMVKRKDSRGRAKRSGSGATNFSLLKQAGDVEENPGPTSTMDWIWRILFLVGAATGAHSGPQVQLQESGPGLVKPSQTLSLTCTVSGASITTGEYYWNWFRQPPGKGLEWMGAIAASGSTTYSPSFESRTSISRDTSKNQFSLKLSSVTAADTAVYYCGRSFGVAAVTTGQNRGQGTLVTVSSGSGGGGSGGGGSGGGGSFEQLQLQESGPGLVKPSETLSLTCTVSGGSISSSSYFWGWIRQPPGKGLEWIGSIYYSGITYYNPSLKSRVTISVDTSKNQFSLKLSSVTAADTAVYYCARHDGAVAGLFDYWGQGTLVTVSSATRIQNPDPAVYQLRDSKSSDKSVCLFTDFDSQTNVSQSKDSDVYITDKCVLDMRSMDFKSNSAVAWSNKSDFACANAFNNSIIPEDTFFPSPESSCDVKLVEKSFETDTNLNFQNLSVIGFRILLLKVAGFNLLMTLRLWSS

SEQ ID NO: 43561 - protein, 906 aa, synthetic construct
MALPVTALLLPLALLLHAARPQVQLQESGPGLVKPSQTLSLTCTVSGGSITTGEFYWNWFRQPPGKGLEWMGAIAASGSTTYSPSFESRTSISRDTSKNQFSLKLSSVTAADTAVYYCGRSFGVAAVTTGQNRGQGTLVTVSSGTGGGGSGGGGSGGGGSEFSYVLTQPPSVSVAPGQTARITCGGNNIGGKSVHWYQQPPGQAPVVVVYDDSDRPSGIPERFSGSNSGNTATLTISRVEAGDEAVYYCQVWDSSSDHVVFGGGTKLTVLLEIQNPDPAVYQLRDSKSSDKSVCLFTDFDSQTNVSQSKDSDVYITDKCVLDMRSMDFKSNSAVAWSNKSDFACANAFNNSIIPEDTFFPSSDVPCDVKLVEKSFETDTNLNFQNLSVIGFRILLLKVAGFNLLMTLRLWSSRAKRSGSGVKQTLNFDLLKLAGDVESNPGPTSTMDWIWRILFLVGAATGAHSGPEVQLVESGGGLVQPGGSLRLSCAASGRTFTMGWYRQAPGKEREFVAAISLSPTLAYYADSVKGRFTISRDNSKNTVVLQMNSLRAEDTALYYCAADRKSVMSIRPDYWGQGTLVTVSSGSGGGGSGGGGSGGGGSFEQLQLQESGPGLVKPSETLSLTCTVSGGSISSSSYFWGWIRQPPGKGLEWIGSIYYSGITYYNPSLKSRVTISVDTSKNQFSLKLSSVTAADTAVYYCARHDGAVAGLFDYWGQGTLVTVSSATREDLKNVFPPEVAVFEPSKAEIAHTQKATLVCLATGFYPDHVELSWWVNGKEVHSGVCTDPQPLKEQPALNDSRYCLSSRLRVSATFWQNPRNHFRCQVQFYGLSENDEWTQDRAKPVTQIVSAEAWGRADCGITSASYHQGVLSATILYEILLGKATLYAVLVSALVLMAMVKRKDSRG

SEQ ID NO: 43562 - protein, 769 aa, synthetic construct
MALPVTALLLPLALLLHAARPQVQLQESGPGLVKPSQTLSLTCTVSGGSITTGEFYWNWFRQPPGKGLEWMGAIAASGSTTYSPSFESRTSISRDTSKNQFSLKLSSVTAADTAVYYCGRSFGVAAVTTGQNRGQGTLVTVSSGTGGGGSGGGGSGGGGSEFSYVLTQPPSVSVAPGQTARITCGGNNIGGKSVHWYQQPPGQAPVVVVYDDSDRPSGIPERFSGSNSGNTATLTISRVEAGDEAVYYCQVWDSSSDHVVFGGGTKLTVLLEIQNPDPAVYQLRDSKSSDKSVCLFTDFDSQTNVSQSKDSDVYITDKCVLDMRSMDFKSNSAVAWSNKSDFACANAFNNSIIPEDTFFPSSDVPCDVKLVEKSFETDTNLNFQNLSVIGFRILLLKVAGFNLLMTLRLWSSRAKRSGSGVKQTLNFDLLKLAGDVESNPGPTSTMDWIWRILFLVGAATGAHSFEQLQLQESGPGLVKPSETLSLTCTVSGGSISSSSYFWGWIRQPPGKGLEWIGSIYYSGITYYNPSLKSRVTISVDTSKNQFSLKLSSVTAADTAVYYCARHDGAVAGLFDYWGQGTLVTVSSATREDLKNVFPPEVAVFEPSKAEIAHTQKATLVCLATGFYPDHVELSWWVNGKEVHSGVCTDPQPLKEQPALNDSRYCLSSRLRVSATFWQNPRNHFRCQVQFYGLSENDEWTQDRAKPVTQIVSAEAWGRADCGITSASYHQGVLSATILYEILLGKATLYAVLVSALVLMAMVKRKDSRG

SEQ ID NO: 43563 - protein, 902 aa, synthetic construct
MALPVTALLLPLALLLHAARPEVQLVESGGGLVQAGGSLRLSCAASGRTFSMGWFRQAPGKEREFVAAITYSGGSPYYADSVKGRFTISRDNAKNTVYLQMNSLKPEDTAVYYCAANPTYGSDWNAENWGQGTQVTVSSGTGGGGSGGGGSGGGGSEFSYVLTQPPSVSVAPGQTARITCGGNNIGGKSVHWYQQPPGQAPVVVVYDDSDRPSGIPERFSGSNSGNTATLTISRVEAGDEAVYYCQVWDSSSDHVVFGGGTKLTVLLEDLKNVFPPEVAVFEPSEAEISHTQKATLVCLATGFYPDHVELSWWVNGKEVHSGVCTDPQPLKEQPALNDSRYCLSSRLRVSATFWQNPRNHFRCQVQFYGLSENDEWTQDRAKPVTQIVSAEAWGRADCGFTSESYQQGVLSATILYEILLGKATLYAVLVSALVLMAMVKRKDSRGRAKRSGSGATNFSLLKQAGDVEENPGPTSTMDWIWRILFLVGAATGAHSGPQVQLQESGPGLVKPSQTLSLTCTVSGASITTGEYYWNWFRQPPGKGLEWMGAIAASGSTTYSPSFESRTSISRDTSKNQFSLKLSSVTAADTAVYYCGRSFGVAAVTTGQNRGQGTLVTVSSGSGGGGSGGGGSGGGGSFEQLQLQESGPGLVKPSETLSLTCTVSGGSISSSSYFWGWIRQPPGKGLEWIGSIYYSGITYYNPSLKSRVTISVDTSKNQFSLKLSSVTAADTAVYYCARHDGAVAGLFDYWGQGTLVTVSSATRIQNPDPAVYQLRDSKSSDKSVCLFTDFDSQTNVSQSKDSDVYITDKCVLDMRSMDFKSNSAVAWSNKSDFACANAFNNSIIPEDTFFPSPESSCDVKLVEKSFETDTNLNFQNLSVIGFRILLLKVAGFNLLMTLRLWSS

SEQ ID NO: 43564 - protein, 909 aa, synthetic construct
MALPVTALLLPLALLLHAARPEVQLVESGGGLVQAGGSLRLSCAASGRTFSMGWFRQAPGKEREFVAAITYSGGSPYYADSVKGRFTISRDNAKNTVYLQMNSLKPEDTAVYYCAANPTYGSDWNAENWGQGTQVTVSSGTGGGGSGGGGSGGGGSEFSYVLTQPPSVSVAPGQTARITCGGNNIGGKSVHWYQQPPGQAPVVVVYDDSDRPSGIPERFSGSNSGNTATLTISRVEAGDEAVYYCQVWDSSSDHVVFGGGTKLTVLLEIQNPDPAVYQLRDSKSSDKSVCLFTDFDSQTNVSQSKDSDVYITDKCVLDMRSMDFKSNSAVAWSNKSDFACANAFNNSIIPEDTFFPSSDVPCDVKLVEKSFETDTNLNFQNLSVIGFRILLLKVAGFNLLMTLRLWSSRAKRSGSGVKQTLNFDLLKLAGDVESNPGPTSTMDWIWRILFLVGAATGAHSGPQVQLVESGGGLVQPGGSLRLSCAASGNINSRNCMGWFRQAPGKGREGVAAIGQVTGRTYYVDSVKGRFTISLDNSKNTLYLQMNSLRAEDTAVYYCAAAPGCLLSALRSADYRNWGQGTLVTVSSGSGGGGSGGGGSGGGGSFEQLQLQESGPGLVKPSETLSLTCTVSGGSISSSSYFWGWIRQPPGKGLEWIGSIYYSGITYYNPSLKSRVTISVDTSKNQFSLKLSSVTAADTAVYYCARHDGAVAGLFDYWGQGTLVTVSSATREDLKNVFPPEVAVFEPSKAEIAHTQKATLVCLATGFYPDHVELSWWVNGKEVHSGVCTDPQPLKEQPALNDSRYCLSSRLRVSATFWQNPRNHFRCQVQFYGLSENDEWTQDRAKPVTQIVSAEAWGRADCGITSASYHQGVLSATILYEILLGKATLYAVLVSALVLMAMVKRKDSRG

SEQ ID NO: 43565 - protein, 905 aa, synthetic construct
MALPVTALLLPLALLLHAARPEVQLVESGGGLVQAGGSLRLSCAASGRTFSMGWFRQAPGKEREFVAAITYSGGSPYYADSVKGRFTISRDNAKNTVYLQMNSLKPEDTAVYYCAANPTYGSDWNAENWGQGTQVTVSSGTGGGGSGGGGSGGGGSEFSYVLTQPPSVSVAPGQTARITCGGNNIGGKSVHWYQQPPGQAPVVVVYDDSDRPSGIPERFSGSNSGNTATLTISRVEAGDEAVYYCQVWDSSSDHVVFGGGTKLTVLLEDLKNVFPPEVAVFEPSEAEISHTQKATLVCLATGFYPDHVELSWWVNGKEVHSGVCTDPQPLKEQPALNDSRYCLSSRLRVSATFWQNPRNHFRCQVQFYGLSENDEWTQDRAKPVTQIVSAEAWGRADCGFTSESYQQGVLSATILYEILLGKATLYAVLVSALVLMAMVKRKDSRGRAKRSGSGATNFSLLKQAGDVEENPGPTSTMDWIWRILFLVGAATGAHSGPQVQLVESGGGLVQPGGSLRLSCAASGNINSRNCMGWFRQAPGKGREGVAAIGQVTGRTYYVDSVKGRFTISLDNSKNTLYLQMNSLRAEDTAVYYCAAAPGCLLSALRSADYRNWGQGTLVTVSSGSGGGGSGGGGSGGGGSFEQLQLQESGPGLVKPSETLSLTCTVSGGSISSSSYFWGWIRQPPGKGLEWIGSIYYSGITYYNPSLKSRVTISVDTSKNQFSLKLSSVTAADTAVYYCARHDGAVAGLFDYWGQGTLVTVSSATRIQNPDPAVYQLRDSKSSDKSVCLFTDFDSQTNVSQSKDSDVYITDKCVLDMRSMDFKSNSAVAWSNKSDFACANAFNNSIIPEDTFFPSPESSCDVKLVEKSFETDTNLNFQNLSVIGFRILLLKVAGFNLLMTLRLWSS

SEQ ID NO: 43566 - protein, 905 aa, synthetic construct
MALPVTALLLPLALLLHAARPEVQLVESGGGLVQAGGSLRLSCAASGRTFTMGWFRQAPGKEREFVAAISLSPTLAYYADSVKGRFTISRDNAKNTVVLQMNSLKPEDTALYYCAADRKSVMSIRPDYWGQGTQVTVSSGTGGGGSGGGGSGGGGSEFSYVLTQPPSVSVAPGQTARITCGGNNIGGKSVHWYQQPPGQAPVVVVYDDSDRPSGIPERFSGSNSGNTATLTISRVEAGDEAVYYCQVWDSSSDHVVFGGGTKLTVLLEDLKNVFPPEVAVFEPSEAEISHTQKATLVCLATGFYPDHVELSWWVNGKEVHSGVCTDPQPLKEQPALNDSRYCLSSRLRVSATFWQNPRNHFRCQVQFYGLSENDEWTQDRAKPVTQIVSAEAWGRADCGFTSESYQQGVLSATILYEILLGKATLYAVLVSALVLMAMVKRKDSRGRAKRSGSGATNFSLLKQAGDVEENPGPTSTMDWIWRILFLVGAATGAHSGPQVQLVESGGGLVQPGGSLRLSCAASGNINSRNCMGWFRQAPGKGREGVAAIGQVTGRTYYVDSVKGRFTISLDNSKNTLYLQMNSLRAEDTAVYYCAAAPGCLLSALRSADYRNWGQGTLVTVSSGSGGGGSGGGGSGGGGSFEQLQLQESGPGLVKPSETLSLTCTVSGGSISSSSYFWGWIRQPPGKGLEWIGSIYYSGITYYNPSLKSRVTISVDTSKNQFSLKLSSVTAADTAVYYCARHDGAVAGLFDYWGQGTLVTVSSATRIQNPDPAVYQLRDSKSSDKSVCLFTDFDSQTNVSQSKDSDVYITDKCVLDMRSMDFKSNSAVAWSNKSDFACANAFNNSIIPEDTFFPSPESSCDVKLVEKSFETDTNLNFQNLSVIGFRILLLKVAGFNLLMTLRLWSS

SEQ ID NO: 43567 - protein, 909 aa, synthetic construct
MALPVTALLLPLALLLHAARPQVQLQESGPGLVKPSQTLSLTCTVSGGSITTGEFYWNWFRQPPGKGLEWMGAIAASGSTTYSPSFESRTSISRDTSKNQFSLKLSSVTAADTAVYYCGRSFGVAAVTTGQNRGQGTLVTVSSGTGGGGSGGGGSGGGGSEFSYVLTQPPSVSVAPGQTARITCGGNNIGGKSVHWYQQPPGQAPVVVVYDDSDRPSGIPERFSGSNSGNTATLTISRVEAGDEAVYYCQVWDSSSDHVVFGGGTKLTVLLEDLKNVFPPEVAVFEPSEAEISHTQKATLVCLATGFYPDHVELSWWVNGKEVHSGVCTDPQPLKEQPALNDSRYCLSSRLRVSATFWQNPRNHFRCQVQFYGLSENDEWTQDRAKPVTQIVSAEAWGRADCGFTSESYQQGVLSATILYEILLGKATLYAVLVSALVLMAMVKRKDSRGRAKRSGSGATNFSLLKQAGDVEENPGPTSTMDWIWRILFLVGAATGAHSGPQVQLVESGGGLVQPGGSLRLSCAASGNINSRNCMGWFRQAPGKGREGVAAIGQVTGRTYYVDSVKGRFTISLDNSKNTLYLQMNSLRAEDTAVYYCAAAPGCLLSALRSADYRNWGQGTLVTVSSGSGGGGSGGGGSGGGGSFEQLQLQESGPGLVKPSETLSLTCTVSGGSISSSSYFWGWIRQPPGKGLEWIGSIYYSGITYYNPSLKSRVTISVDTSKNQFSLKLSSVTAADTAVYYCARHDGAVAGLFDYWGQGTLVTVSSATRIQNPDPAVYQLRDSKSSDKSVCLFTDFDSQTNVSQSKDSDVYITDKCVLDMRSMDFKSNSAVAWSNKSDFACANAFNNSIIPEDTFFPSPESSCDVKLVEKSFETDTNLNFQNLSVIGFRILLLKVAGFNLLMTLRLWSS

SEQ ID NO: 43568 - protein, 487 aa, synthetic construct
MALPVTALLLPLALLLHAARPDIQMTQSPSSLSASVGDRVTITCKASDHINNWLAWYQQKPGQAPKLLIYGATTLETGVPSRFSGSGSGTDYTLTISSLQPEDFATYYCQQSWNTPWTFGQGTKLEIKRGGGGSGGGGSGGGGSQVQLQQPGAELVKPGASVKMSCKASGYAFSSYWINWMKQKPGQGLEWIGQIYPGDGDTNYNGKFKGRATLTADTSSSTAYMQLSSLTSEDSAVYFCARSITTVVGCAMDYWGQGTSVTVSSTRKIEVMYPPPYLDNEKSNGTIIHVKGKHLCPSPLFPGPSKPFWVLVVVGGVLACYSLLVTVAFIIFWVRSKRSRLLHSDYMNMTPRRPGPTRKHYQPYAPPRDFAAYRSRVKFSRSADAPAYQQGQNQLYNELNLGRREEYDVLDKRRGRDPEMGGKPRRKNPQEGLYNELQKDKMAEAYSEIGMKGERRRGKGHDGLYQGLSTATKDTYDALHMQALPPR

SEQ ID NO: 43569 - protein, 493 aa, synthetic construct
MALPVTALLLPLALLLHAARPDIQMTQSPSSLSASVGDRVTITCKASDHINNWLAWYQQKPGQAPKLLIYGATTLETGVPSRFSGSGSGTDYTLTISSLQPEDFATYYCQQSWNTPWTFGQGTKLEIKRGGGGSGGGGSGGGGSQVQLQQPGAELVKPGASVKMSCKASGYAFSSYWINWMKQKPGQGLEWIGQIYPGDGDTNYNGKFKGRATLTADTSSSTAYMQLSSLTSEDSAVYFCARSITTVVGCAMDYWGQGTSVTVSSTRAKPTTTPAPRPPTPAPTIASQPLSLRPEACRPAAGGAVHTRGLDFACDIYIWAPLAGTCGVLLLSLVITLYCKRGRKKLLYIFKQPFMRPVQTTQEEDGCSCRFPEEEEGGCELRVKFSRSADAPAYQQGQNQLYNELNLGRREEYDVLDKRRGRDPEMGGKPRRKNPQEGLYNELQKDKMAEAYSEIGMKGERRRGKGHDGLYQGLSTATKDTYDALHMQALPPR

SEQ ID NO: 43570 - protein, 493 aa, synthetic construct
MALPVTALLLPLALLLHAARPQVQLQQPGAELVKPGASVKMSCKASGYAFSSYWINWMKQKPGQGLEWIGQIYPGDGDTNYNGKFKGRATLTADTSSSTAYMQLSSLTSEDSAVYFCARSITTVVGCAMDYWGQGTSVTVSSGGGGSGGGGSGGGGSDIQMTQSPSSLSASVGDRVTITCKASDHINNWLAWYQQKPGQAPKLLIYGATTLETGVPSRFSGSGSGTDYTLTISSLQPEDFATYYCQQSWNTPWTFGQGTKLEIKRTRAKPTTTPAPRPPTPAPTIASQPLSLRPEACRPAAGGAVHTRGLDFACDIYIWAPLAGTCGVLLLSLVITLYCKRGRKKLLYIFKQPFMRPVQTTQEEDGCSCRFPEEEEGGCELRVKFSRSADAPAYQQGQNQLYNELNLGRREEYDVLDKRRGRDPEMGGKPRRKNPQEGLYNELQKDKMAEAYSEIGMKGERRRGKGHDGLYQGLSTATKDTYDALHMQALPPR

SEQ ID NO: 43571 - protein, 626 aa, synthetic construct
MALPVTALLLPLALLLHAARPDIQMTQSPSSLSASVGDRVTITCKASDHINNWLAWYQQKPGQAPKLLIYGATTLETGVPSRFSGSGSGTDYTLTISSLQPEDFATYYCQQSWNTPWTFGQGTKLEIKRLEIQNPDPAVYQLRDSKSSDKSVCLFTDFDSQTNVSQSKDSDVYITDKCVLDMRSMDFKSNSAVAWSNKSDFACANAFNNSIIPEDTFFPSSDVPCDVKLVEKSFETDTNLNFQNLSVIGFRILLLKVAGFNLLMTLRLWSSRAKRSGSGVKQTLNFDLLKLAGDVESNPGPTSMDWIWRILFLVGAATGAHSFEQVQLQQPGAELVKPGASVKMSCKASGYAFSSYWINWMKQKPGQGLEWIGQIYPGDGDTNYNGKFKGRATLTADTSSSTAYMQLSSLTSEDSAVYFCARSITTVVGCAMDYWGQGTSVTVSSTREDLKNVFPPEVAVFEPSKAEIAHTQKATLVCLATGFYPDHVELSWWVNGKEVHSGVCTDPQPLKEQPALNDSRYCLSSRLRVSATFWQNPRNHFRCQVQFYGLSENDEWTQDRAKPVTQIVSAEAWGRADCGITSASYHQGVLSATILYEILLGKATLYAVLVSALVLMAMVKRKDSRG

SEQ ID NO: 43572 - protein, 622 aa, synthetic construct
MALPVTALLLPLALLLHAARPDIQMTQSPSSLSASVGDRVTITCKASDHINNWLAWYQQKPGQAPKLLIYGATTLETGVPSRFSGSGSGTDYTLTISSLQPEDFATYYCQQSWNTPWTFGQGTKLEIKRLEDLKNVFPPEVAVFEPSKAEIAHTQKATLVCLATGFYPDHVELSWWVNGKEVHSGVCTDPQPLKEQPALNDSRYCLSSRLRVSATFWQNPRNHFRCQVQFYGLSENDEWTQDRAKPVTQIVSAEAWGRADCGITSASYHQGVLSATILYEILLGKATLYAVLVSALVLMAMVKRKDSRGRAKRSGSGATNFSLLKQAGDVEENPGPTSMDWIWRILFLVGAATGAHSFEQVQLQQPGAELVKPGASVKMSCKASGYAFSSYWINWMKQKPGQGLEWIGQIYPGDGDTNYNGKFKGRATLTADTSSSTAYMQLSSLTSEDSAVYFCARSITTVVGCAMDYWGQGTSVTVSSTRIQNPDPAVYQLRDSKSSDKSVCLFTDFDSQTNVSQSKDSDVYITDKCVLDMRSMDFKSNSAVAWSNKSDFACANAFNNSIIPEDTFFPSSDVPCDVKLVEKSFETDTNLNFQNLSVIGFRILLLKVAGFNLLMTLRLWSS

SEQ ID NO: 43573 - protein, 622 aa, synthetic construct; identical to SEQ ID NO: 11632

SEQ ID NO: 43574 - protein, 626 aa, synthetic construct; identical to SEQ ID NO: 11634

SEQ ID NO: 43575 - protein, 638 aa, synthetic construct
MALPVTALLLPLALLLHAARPLEEDLKNVFPPEVAVFEPSKAEIAHTQKATLVCLATGFYPDHVELSWWVNGKEVHSGVCTDPQPLKEQPALNDSRYCLSSRLRVSATFWQNPRNHFRCQVQFYGLSENDEWTQDRAKPVTQIVSAEAWGRADCGITSASYHQGVLSATILYEILLGKATLYAVLVSALVLMAMVKRKDSRGRAKRSGSGATNFSLLKQAGDVEENPGPTSMALPVTALLLPLALLLHAARPDIQMTQSPSSLSASVGDRVTITCKASDHINNWLAWYQQKPGQAPKLLIYGATTLETGVPSRFSGSGSGTDYTLTISSLQPEDFATYYCQQSWNTPWTFGQGTKLEIKRGGGGSGGGGSGGGGSQVQLQQPGAELVKPGASVKMSCKASGYAFSSYWINWMKQKPGQGLEWIGQIYPGDGDTNYNGKFKGRATLTADTSSSTAYMQLSSLTSEDSAVYFCARSITTVVGCAMDYWGQGTSVTVSSTRIQNPDPAVYQLRDSKSSDKSVCLFTDFDSQTNVSQSKDSDVYITDKCVLDMRSMDFKSNSAVAWSNKSDFACANAFNNSIIPEDTFFPSSDVPCDVKLVEKSFETDTNLNFQNLSVIGFRILLLKVAGFNLLMTLRLWSS

SEQ ID NO: 43576 - protein, 645 aa, synthetic construct
MALPVTALLLPLALLLHAARPLEGSGDRPDPAVYQLRDSKSSDKSVCLFTDFDSQTNVSQSKDSDVYITDKCVLDMRSMDFKSNSAVAWSNKSDFACANAFNNSIIPEDTFFPSPESSCDVKLVEKSFETDTNLNFQNLSVIGFRILLLKVAGFNLLMTLRLWSSSSRAKRSGSGVKQTLNFDLLKLAGDVESNPGPTSMALPVTALLLPLALLLHAARPDIQMTQSPSSLSASVGDRVTITCKASDHINNWLAWYQQKPGQAPKLLIYGATTLETGVPSRFSGSGSGTDYTLTISSLQPEDFATYYCQQSWNTPWTFGQGTKLEIKRGGGGSGGGGSGGGGSQVQLQQPGAELVKPGASVKMSCKASGYAFSSYWINWMKQKPGQGLEWIGQIYPGDGDTNYNGKFKGRATLTADTSSSTAYMQLSSLTSEDSAVYFCARSITTVVGCAMDYWGQGTSVTVSSTREDLKNVFPPEVAVFEPSEAEISHTQKATLVCLATGFYPDHVELSWWVNGKEVHSGVCTDPQPLKEQPALNDSRYCLSSRLRVSATFWQNPRNHFRCQVQFYGLSENDEWTQDRAKPVTQIVSAEAWGRADCGFTSESYQQGVLSATILYEILLGKATLYAVLVSALVLMAMVKRKDSRG

SEQ ID NO: 43577 - protein, 622 aa, synthetic construct
MALPVTALLLPLALLLHAARPDIQMTQSPSSLSASVGDRVTITCKASDHINNWLAWYQQKPGQAPKLLIYGATTLETGVPSRFSGSGSGTDYTLTISSLQPEDFATYYCQQSWNTPWTFGQGTKLEIKRLEDLKNVFPPEVAVFEPSEAEISHTQKATLVCLATGFYPDHVELSWWVNGKEVHSGVSTDPQPLKEQPALNDSRYCLSSRLRVSATFWQNPRNHFRCQVQFYGLSENDEWTQDRAKPVTQIVSAEAWGRADCGFTSESYQQGVLSATILYEILLGKATLYAVLVSALVLMAMVKRKDSRGRAKRSGSGATNFSLLKQAGDVEENPGPTSMDWIWRILFLVGAATGAHSFEQVQLQQPGAELVKPGASVKMSCKASGYAFSSYWINWMKQKPGQGLEWIGQIYPGDGDTNYNGKFKGRATLTADTSSSTAYMQLSSLTSEDSAVYFCARSITTVVGCAMDYWGQGTSVTVSSTRIQNPDPAVYQLRDSKSSDKSVCLFTDFDSQTNVSQSKDSDVYITDKTVLDMRSMDFKSNSAVAWSNKSDFACANAFNNSIIPEDTFFPSPESSCDVKLVEKSFETDTNLNFQNLSVIGFRILLLKVAGFNLLMTLRLWSS

SEQ ID NO: 43578 - protein, 630 aa, synthetic construct
MALPVTALLLPLALLLHAARPDIQMTQSPSSLSASVGDRVTITCKASDHINNWLAWYQQKPGQAPKLLIYGATTLETGVPSRFSGSGSGTDYTLTISSLQPEDFATYYCQQSWNTPWTFGQGTKLEIKRLEDKQLDADVSPKPTIFLPSIAETKLQKAGTYLCLLEKFFPDVIKIHWQEKKSNTILGSQEGNTMKTNDTYMKFSWLTVPEKSLDKEHRCIVRHENNKNGVDQEIIFPPIKTDVITMDPKDNCSKDANDTLLLQLTNTSAYYMYLLLLLKSVVYFAIITCCLLRRTAFCCNGEKSRAKRSGSGATNFSLLKQAGDVEENPGPTSMDWIWRILFLVGAATGAHSFEQVQLQQPGAELVKPGASVKMSCKASGYAFSSYWINWMKQKPGQGLEWIGQIYPGDGDTNYNGKFKGRATLTADTSSSTAYMQLSSLTSEDSAVYFCARSITTVVGCAMDYWGQGTSVTVSSTRSQPHTKPSVFVMKNGTNVACLVKEFYPKDIRINLVSSKKITEFDPAIVISPSGKYNAVKLGKYEDSNSVTCSVQHDNKTVHSTDFEVKTDSTDHVKPKETENTKQPSKSCHKPKAIVHTEKVNMMSLTVLGLRMLFAKTVAVNFLLTAKLFFL

SEQ ID NO: 43579 - protein, 630 aa, synthetic construct; identical to SEQ ID NO: 11642

SEQ ID NO: 43580 - protein, 645 aa, synthetic construct
MALPVTALLLPLALLLHAARPLEDKQLDADVSPKPTIFLPSIAETKLQKAGTYLCLLEKFFPDVIKIHWQEKKSNTILGSQEGNTMKTNDTYMKFSWLTVPEKSLDKEHRCIVRHENNKNGVDQEIIFPPIKTDVITMDPKDNCSKDANDTLLLQLTNTSAYYMYLLLLLKSVVYFAIITCCLLRRTAFCCNGEKSRAKRSGSGATNFSLLKQAGDVEENPGPTSMALPVTALLLPLALLLHAARPDIQMTQSPSSLSASVGDRVTITCKASDHINNWLAWYQQKPGQAPKLLIYGATTLETGVPSRFSGSGSGTDYTLTISSLQPEDFATYYCQQSWNTPWTFGQGTKLEIKRGGGGSGGGGSGGGGSQVQLQQPGAELVKPGASVKMSCKASGYAFSSYWINWMKQKPGQGLEWIGQIYPGDGDTNYNGKFKGRATLTADTSSSTAYMQLSSLTSEDSAVYFCARSITTVVGCAMDYWGQGTSVTVSSTRSQPHTKPSVFVMKNGTNVACLVKEFYPKDIRINLVSSKKITEFDPAIVISPSGKYNAVKLGKYEDSNSVTCSVQHDNKTVHSTDFEVKTDSTDHVKPKETENTKQPSKSCHKPKAIVHTEKVNMMSLTVLGLRMLFAKTVAVNFLLTAKLFFL

SEQ ID NO: 43581 - protein, 799 aa, synthetic construct
MALPVTALLLPLALLLHAARPDIQMTQSPSSLSASVGDRVTITCKASDHINNWLAWYQQKPGQAPKLLIYGATTLETGVPSRFSGSGSGTDYTLTISSLQPEDFATYYCQQSWNTPWTFGQGTKLEIKRGQPKANPTVTLFPPSSEELQANKATLVCLISDFYPGAVTVAWKADGSPVKAGVETTKPSKQSNNKYAASSYLSLTPEQWKSHRSYSCQVTHEGSTVEKTVAPTECSGSQSFGLLDPKLCYLLDGILFIYGVILTALFLRVKFSRSADAPAYQQGQNQLYNELNLGRREEYDVLDKRRGRDPEMGGKPQRRKNPQEGLYNELQKDKMAEAYSEIGMKGERRRGKGHDGLYQGLSTATKDTYDALHMQALPPRRAKRSGSGATNFSLLKQAGDVEENPGPTSMDWIWRILFLVGAATGAHSFEQVQLQQPGAELVKPGASVKMSCKASGYAFSSYWINWMKQKPGQGLEWIGQIYPGDGDTNYNGKFKGRATLTADTSSSTAYMQLSSLTSEDSAVYFCARSITTVVGCAMDYWGQGTSVTVSSASTKGPSVFPLAPSSKSTSGGTAALGCLVKDYFPEPVTVSWNSGALTSGVHTFPAVLQSSGLYSLSSVVTVPSSSLGTQTYICNVNHKPSNTKVDKRVEPKSCGTQSFGLLDPKLCYLLDGILFIYGVILTALFLRVKFSRSADAPAYQQGQNQLYNELNLGRREEYDVLDKRRGRDPEMGGKPQRRKNPQEGLYNELQKDKMAEAYSEIGMKGERRRGKGHDGLYQGLSTATKDTYDALHMQALPPR

SEQ ID NO: 43582 - protein, 818 aa, synthetic construct; identical to SEQ ID NO: 9379

SEQ ID NO: 43583 - protein, 860 aa, synthetic construct
MALPVTALLLPLALLLHAARPDIQMTQSPSSLSASVGDRVTITCKASDHINNWLAWYQQKPGQAPKLLIYGATTLETGVPSRFSGSGSGTDYTLTISSLQPEDFATYYCQQSWNTPWTFGQGTKLEIKRLEEDLKNVFPPEVAVFEPSEAEISHTQKATLVCLATGFYPDHVELSWWVNGKEVHSGVSTDPQPLKEQPALNDSRYCLSSRLRVSATFWQNPRNHFRCQVQFYGLSENDEWTQDRAKPVTQIVSAEAWGRADCGSQSFGLLDPKLCYLLDGILFIYGVILTALFLRVKFSRSADAPAYQQGQNQLYNELNLGRREEYDVLDKRRGRDPEMGGKPQRRKNPQEGLYNELQKDKMAEAYSEIGMKGERRRGKGHDGLYQGLSTATKDTYDALHMQALPPRRAKRSGSGATNFSLLKQAGDVEENPGPTSMDWIWRILFLVGAATGAHSFEQVQLQQPGAELVKPGASVKMSCKASGYAFSSYWINWMKQKPGQGLEWIGQIYPGDGDTNYNGKFKGRATLTADTSSSTAYMQLSSLTSEDSAVYFCARSITTVVGCAMDYWGQGTSVTVSSTRIQNPDPAVYQLRDSKSSDKSVCLFTDFDSQTNVSQSKDSDVYITDKTVLDMRSMDFKSNSAVAWSNKSDFACANAFNNSIIPEDTFFPSPESSCGTQSFGLLDPKLCYLLDGILFIYGVILTALFLRSKRSRLLHSDYMNMTPRRPGPTRKHYQPYAPPRDFAAYRSRVKFSRSADAPAYQQGQNQLYNELNLGRREEYDVLDKRRGRDPEMGGKPQRRKNPQEGLYNELQKDKMAEAYSEIGMKGERRRGKGHDGLYQGLSTATKDTYDALHMQALPPR

SEQ ID NO: 43584 - protein, 903 aa, synthetic construct
MALPVTALLLPLALLLHAARPDIQMTQSPSSLSASVGDRVTITCKASDHINNWLAWYQQKPGQAPKLLIYGATTLETGVPSRFSGSGSGTDYTLTISSLQPEDFATYYCQQSWNTPWTFGQGTKLEIKRLEEDLKNVFPPEVAVFEPSEAEISHTQKATLVCLATGFYPDHVELSWWVNGKEVHSGVSTDPQPLKEQPALNDSRYCLSSRLRVSATFWQNPRNHFRCQVQFYGLSENDEWTQDRAKPVTQIVSAEAWGRADCGSQSFGLLDPKLCYLLDGILFIYGVILTALFLKRGRKKLLYIFKQPFMRPVQTTQEEDGCSCRFPEEEEGGCELRVKFSRSADAPAYQQGQNQLYNELNLGRREEYDVLDKRRGRDPEMGGKPQRRKNPQEGLYNELQKDKMAEAYSEIGMKGERRRGKGHDGLYQGLSTATKDTYDALHMQALPPRRAKRSGSGATNFSLLKQAGDVEENPGPTSMDWIWRILFLVGAATGAHSFEQVQLQQPGAELVKPGASVKMSCKASGYAFSSYWINWMKQKPGQGLEWIGQIYPGDGDTNYNGKFKGRATLTADTSSSTAYMQLSSLTSEDSAVYFCARSITTVVGCAMDYWGQGTSVTVSSTRIQNPDPAVYQLRDSKSSDKSVCLFTDFDSQTNVSQSKDSDVYITDKTVLDMRSMDFKSNSAVAWSNKSDFACANAFNNSIIPEDTFFPSPESSCGTQSFGLLDPKLCYLLDGILFIYGVILTALFLKRGRKKLLYIFKQPFMRPVQTTQEEDGCSCRFPEEEEGGCELRVKFSRSADAPAYQQGQNQLYNELNLGRREEYDVLDKRRGRDPEMGGKPQRRKNPQEGLYNELQKDKMAEAYSEIGMKGERRRGKGHDGLYQGLSTATKDTYDALHMQALPPR

SEQ ID NO: 43585 - protein, 590 aa, synthetic construct
MALPVTALLLPLALLLHAARPDIQMTQSPSSLSASVGDRVTITCKASDHINNWLAWYQQKPGQAPKLLIYGATTLETGVPSRFSGSGSGTDYTLTISSLQPEDFATYYCQQSWNTPWTFGQGTKLEIKRLEQSFGLLDPKLCYLLDGILFIYGVILTALFLRVKFSRSADAPAYQQGQNQLYNELNLGRREEYDVLDKRRGRDPEMGGKPQRRKNPQEGLYNELQKDKMAEAYSEIGMKGERRRGKGHDGLYQGLSTATKDTYDALHMQALPPRRAKRSGSGATNFSLLKQAGDVEENPGPTSMDWIWRILFLVGAATGAHSFEQVQLQQPGAELVKPGASVKMSCKASGYAFSSYWINWMKQKPGQGLEWIGQIYPGDGDTNYNGKFKGRATLTADTSSSTAYMQLSSLTSEDSAVYFCARSITTVVGCAMDYWGQGTSVTVSSTRQSFGLLDPKLCYLLDGILFIYGVILTALFLRVKFSRSADAPAYQQGQNQLYNELNLGRREEYDVLDKRRGRDPEMGGKPQRRKNPQEGLYNELQKDKMAEAYSEIGMKGERRRGKGHDGLYQGLSTATKDTYDALHMQALPPR

SEQ ID NO: 43586 - protein, 648 aa, synthetic construct; identical to SEQ ID NO: 11652

SEQ ID NO: 43587 - protein, 626 aa, synthetic construct; identical to SEQ ID NO: 11653

SEQ ID NO: 43588 - protein, 626 aa, synthetic construct; identical to SEQ ID NO: 11654

SEQ ID NO: 43589 - protein, 452 aa, synthetic construct; identical to SEQ ID NO: 11655

SEQ ID NO: 43590 - protein, 417 aa, synthetic construct; identical to SEQ ID NO: 11656

SEQ ID NO: 43591 - protein, 427 aa, synthetic construct; identical to SEQ ID NO: 11657

SEQ ID NO: 43592 - protein, 410 aa, synthetic construct; identical to SEQ ID NO: 11658

SEQ ID NO: 43593 - protein, 505 aa, synthetic construct; identical to SEQ ID NO: 11663

SEQ ID NO: 43594 - protein, 480 aa, synthetic construct; identical to SEQ ID NO: 9875

SEQ ID NO: 43595 - protein, 481 aa, synthetic construct; identical to SEQ ID NO: 9594

SEQ ID NO: 43596 - protein, 725 aa, synthetic construct
MALPVTALLLPLALLLHAARPDIQMTQSPSSLSASVGDRVTITCKASDHINNWLAWYQQKPGQAPKLLIYGATTLETGVPSRFSGSGSGTDYTLTISSLQPEDFATYYCQQSWNTPWTFGQGTKLEIKRLEGQPKANPTVTLFPPSSEELQANKATLVCLISDFYPGAVTVAWKADGSPVKAGVETTKPSKQSNNKYAASSYLSLTPEQWKSHRSYSCQVTHEGSTVEKTVAPTECSGSQSFGLLDPKLCYLLDGILFIYGVILTALFLRVKFSRSADAPAYQQGQNQLYNELNLGRREEYDVLDKRRGRDPEMGGKPQRRKNPQEGLYNELQKDKMAEAYSEIGMKGERRRGKGHDGLYQGLSTATKDTYDALHMQALPPRRAKRSGSGATNFSLLKQAGDVEENPGPTSMDWIWRILFLVGAATGAHSFEQVQLQQPGAELVKPGASVKMSCKASGYAFSSYWINWMKQKPGQGLEWIGQIYPGDGDTNYNGKFKGRATLTADTSSSTAYMQLSSLTSEDSAVYFCARSITTVVGCAMDYWGQGTSVTVSSTRASTKGPSVFPLAPSSKSTSGGTAALGCLVKDYFPEPVTVSWNSGALTSGVHTFPAVLQSSGLYSLSSVVTVPSSSLGTQTYICNVNHKPSNTKVDKRVEPKSCGTITQGLAVSTISSFFPPGYQVSFCLVMVLLFAVDTGLYFSVKTNIRSSTRDWKDHKFKWRKDPQDK

SEQ ID NO: 43597 - protein, 740 aa, synthetic construct
MALPVTALLLPLALLLHAARPDIQMTQSPSSLSASVGDRVTITCKASDHINNWLAWYQQKPGQAPKLLIYGATTLETGVPSRFSGSGSGTDYTLTISSLQPEDFATYYCQQSWNTPWTFGQGTKLEIKRLEDLKNVFPPEVAVFEPSEAEISHTQKATLVCLATGFYPDHVELSWWVNGKEVHSGVSTDPQPLKEQPALNDSRYCLSSRLRVSATFWQNPRNHFRCQVQFYGLSENDEWTQDRAKPVTQIVSAEAWGRADCGSQSFGLLDPKLCYLLDGILFIYGVILTALFLRVKFSRSADAPAYQQGQNQLYNELNLGRREEYDVLDKRRGRDPEMGGKPQRRKNPQEGLYNELQKDKMAEAYSEIGMKGERRRGKGHDGLYQGLSTATKDTYDALHMQALPPRRAKRSGSGATNFSLLKQAGDVEENPGPTSMDWIWRILFLVGAATGAHSFEQVQLQQPGAELVKPGASVKMSCKASGYAFSSYWINWMKQKPGQGLEWIGQIYPGDGDTNYNGKFKGRATLTADTSSSTAYMQLSSLTSEDSAVYFCARSITTVVGCAMDYWGQGTSVTVSSTRIQNPDPAVYQLRDSKSSDKSVCLFTDFDSQTNVSQSKDSDVYITDKTVLDMRSMDFKSNSAVAWSNKSDFACANAFNNSIIPEDTFFPSPESSCGTITQGLAVSTISSFFPPGYQVSFCLVMVLLFAVDTGLYFSVKTNIRSSTRDWKDHKFKWRKDPQDK

SEQ ID NO: 43598 - protein, 715 aa, synthetic construct
MALPVTALLLPLALLLHAARPDIQMTQSPSSLSASVGDRVTITCKASDHINNWLAWYQQKPGQAPKLLIYGATTLETGVPSRFSGSGSGTDYTLTISSLQPEDFATYYCQQSWNTPWTFGQGTKLEIKRLEDLKNVFPPEVAVFEPSEAEISHTQKATLVCLATGFYPDHVELSWWVNGKEVHSGVSTDPQPLKEQPALNDSRYCLSSRLRVSATFWQNPRNHFRCQVQFYGLSENDEWTQDRAKPVTQIVSAEAWGRADCGSQSFGLLDPKLCYLLDGILFIYGVILTALFLRVKFSRSADAPAYQQGQNQLYNELNLGRREEYDVLDKRRGRDPEMGGKPQRRKNPQEGLYNELQKDKMAEAYSEIGMKGERRRGKGHDGLYQGLSTATKDTYDALHMQALPPRRAKRSGSGATNFSLLKQAGDVEENPGPTSMDWIWRILFLVGAATGAHSFEQVQLQQPGAELVKPGASVKMSCKASGYAFSSYWINWMKQKPGQGLEWIGQIYPGDGDTNYNGKFKGRATLTADTSSSTAYMQLSSLTSEDSAVYFCARSITTVVGCAMDYWGQGTSVTVSSTRIQNPDPAVYQLRDSKSSDKSVCLFTDFDSQTNVSQSKDSDVYITDKTVLDMRSMDFKSNSAVAWSNKSDFACANAFNNSIIPEDTFFPSPESSCGTITQGLAVSTISSFFPPGYQVSFCLVMVLLFAVDTGLYFSV

SEQ ID NO: 43599 - protein, 716 aa, synthetic construct
MALPVTALLLPLALLLHAARPDIQMTQSPSSLSASVGDRVTITCKASDHINNWLAWYQQKPGQAPKLLIYGATTLETGVPSRFSGSGSGTDYTLTISSLQPEDFATYYCQQSWNTPWTFGQGTKLEIKRLEDLKNVFPPEVAVFEPSEAEISHTQKATLVCLATGFYPDHVELSWWVNGKEVHSGVSTDPQPLKEQPALNDSRYCLSSRLRVSATFWQNPRNHFRCQVQFYGLSENDEWTQDRAKPVTQIVSAEAWGRADCGSQSFGLLDPKLCYLLDGILFIYGVILTALFLRVKFSRSADAPAYQQGQNQLYNELNLGRREEYDVLDKRRGRDPEMGGKPQRRKNPQEGLYNELQKDKMAEAYSEIGMKGERRRGKGHDGLYQGLSTATKDTYDALHMQALPPRRAKRSGSGATNFSLLKQAGDVEENPGPTSMDWIWRILFLVGAATGAHSFEQVQLQQPGAELVKPGASVKMSCKASGYAFSSYWINWMKQKPGQGLEWIGQIYPGDGDTNYNGKFKGRATLTADTSSSTAYMQLSSLTSEDSAVYFCARSITTVVGCAMDYWGQGTSVTVSSTRIQNPDPAVYQLRDSKSSDKSVCLFTDFDSQTNVSQSKDSDVYITDKTVLDMRSMDFKSNSAVAWSNKSDFACANAFNNSIIPEDTFFPSPESSCGTITQGLAVSTISSFFPPGYQVSFCLVMVLLFAVDTGLYFSVK

SEQ ID NO: 43600 - protein, 717 aa, synthetic construct
MALPVTALLLPLALLLHAARPDIQMTQSPSSLSASVGDRVTITCKASDHINNWLAWYQQKPGQAPKLLIYGATTLETGVPSRFSGSGSGTDYTLTISSLQPEDFATYYCQQSWNTPWTFGQGTKLEIKRLEDLKNVFPPEVAVFEPSEAEISHTQKATLVCLATGFYPDHVELSWWVNGKEVHSGVSTDPQPLKEQPALNDSRYCLSSRLRVSATFWQNPRNHFRCQVQFYGLSENDEWTQDRAKPVTQIVSAEAWGRADCGSQSFGLLDPKLCYLLDGILFIYGVILTALFLRVKFSRSADAPAYQQGQNQLYNELNLGRREEYDVLDKRRGRDPEMGGKPQRRKNPQEGLYNELQKDKMAEAYSEIGMKGERRRGKGHDGLYQGLSTATKDTYDALHMQALPPRRAKRSGSGATNFSLLKQAGDVEENPGPTSMDWIWRILFLVGAATGAHSFEQVQLQQPGAELVKPGASVKMSCKASGYAFSSYWINWMKQKPGQGLEWIGQIYPGDGDTNYNGKFKGRATLTADTSSSTAYMQLSSLTSEDSAVYFCARSITTVVGCAMDYWGQGTSVTVSSTRIQNPDPAVYQLRDSKSSDKSVCLFTDFDSQTNVSQSKDSDVYITDKTVLDMRSMDFKSNSAVAWSNKSDFACANAFNNSIIPEDTFFPSPESSCGTITQGLAVSTISSFFPPGYQVSFCLVMVLLFAVDTGLYFSVKT

SEQ ID NO: 43601 - protein, 653 aa, synthetic construct; identical to SEQ ID NO: 9381

SEQ ID NO: 43602 - protein, 623 aa, synthetic construct
MALPVTALLLPLALLLHAARPDIQMTQSPSSLSASVGDRVTITCKASDHINNWLAWYQQKPGQAPKLLIYGATTLETGVPSRFSGSGSGTDYTLTISSLQPEDFATYYCQQSWNTPWTFGQGTKLEIKRLEDLKNVFPPEVAVFEPSEAEISHTQKATLVCLATGFYPDHVELSWWVNGKEVHSGVCTDPQPLKEQPALNDSRYCLSSRLRVSATFWQNPRNHFRCQVQFYGLSENDEWTQDRAKPVTQIVSAEAWGRADCGFTSESYQQGVLSAYYMYLLLLLKSVVYFAIITCCLLRRTAFCCNGEKSRAKRSGSGATNFSLLKQAGDVEENPGPTSMDWIWRILFLVGAATGAHSFEQVQLQQPGAELVKPGASVKMSCKASGYAFSSYWINWMKQKPGQGLEWIGQIYPGDGDTNYNGKFKGRATLTADTSSSTAYMQLSSLTSEDSAVYFCARSITTVVGCAMDYWGQGTSVTVSSTRIQNPDPAVYQLRDSKSSDKSVCLFTDFDSQTNVSQSKDSDVYITDKCVLDMRSMDFKSNSAVAWSNKSDFACANAFNNSIIPEDTFFPSPESSCDVKLVEKSFETDTNLNFQNLSVIGFRILLLKVAGFNLLMTLRLWSS

SEQ ID NO: 43603 - protein, 629 aa, synthetic construct
MALPVTALLLPLALLLHAARPDIQMTQSPSSLSASVGDRVTITCKASDHINNWLAWYQQKPGQAPKLLIYGATTLETGVPSRFSGSGSGTDYTLTISSLQPEDFATYYCQQSWNTPWTFGQGTKLEIKRLEDKQLDADVSPKPTIFLPSIAETKLQKAGTYLCLLEKFFPDVIKIHWQEKKSNTILGSQEGNTMKTNDTYMKFSWLTVPEKSLDKEHRCIVRHENNKNGVDQEIIFPPIKTDVITMDPKDNCSKDANDTLLLQLTNTSAYYMYEILLGKATLYAVLVSALVLMAMVKRKDSRGRAKRSGSGATNFSLLKQAGDVEENPGPTSMDWIWRILFLVGAATGAHSFEQVQLQQPGAELVKPGASVKMSCKASGYAFSSYWINWMKQKPGQGLEWIGQIYPGDGDTNYNGKFKGRATLTADTSSSTAYMQLSSLTSEDSAVYFCARSITTVVGCAMDYWGQGTSVTVSSTRSQPHTKPSVFVMKNGTNVACLVKEFYPKDIRINLVSSKKITEFDPAIVISPSGKYNAVKLGKYEDSNSVTCSVQHDNKTVHSTDFEVKTDSTDHVKPKETENTKQPSKSCHKPKAIVHTEKVNMMSLTVIGFRILLLKVAGFNLLMTLRLWSS

SEQ ID NO: 43604 - protein, 629 aa, synthetic construct
MALPVTALLLPLALLLHAARPDIQMTQSPSSLSASVGDRVTITCKASDHINNWLAWYQQKPGQAPKLLIYGATTLETGVPSRFSGSGSGTDYTLTISSLQPEDFATYYCQQSWNTPWTFGQGTKLEIKRLEDKQLDADVSPKPTIFLPSIAETKLQKAGTYLCLLEKFFPDVIKIHWQEKKSNTILGSQEGNTMKTNDTYMKFSWLTVPEKSLDKEHRCIVRHENNKNGVDQEIIFPPIKTDVITMDPKDNCSKDANDTLLLQLTNTSATILYEILLGKATLYAVLVSALVLMAMVKRKDSRGRAKRSGSGATNFSLLKQAGDVEENPGPTSMDWIWRILFLVGAATGAHSFEQVQLQQPGAELVKPGASVKMSCKASGYAFSSYWINWMKQKPGQGLEWIGQIYPGDGDTNYNGKFKGRATLTADTSSSTAYMQLSSLTSEDSAVYFCARSITTVVGCAMDYWGQGTSVTVSSTRSQPHTKPSVFVMKNGTNVACLVKEFYPKDIRINLVSSKKITEFDPAIVISPSGKYNAVKLGKYEDSNSVTCSVQHDNKTVHSTDFEVKTDSTDHVKPKETENTKQPSKSCHKPKAIVHTEKVNMMSLTVIGFRILLLKVAGFNLLMTLRLWSS

SEQ ID NO: 43605 - protein, 629 aa, synthetic construct
MALPVTALLLPLALLLHAARPDIQMTQSPSSLSASVGDRVTITCKASDHINNWLAWYQQKPGQAPKLLIYGATTLETGVPSRFSGSGSGTDYTLTISSLQPEDFATYYCQQSWNTPWTFGQGTKLEIKRLEDKQLDADVSPKPTIFLPSIAETKLQKAGTYLCLLEKFFPDVIKIHWQEKKSNTILGSQEGNTMKTNDTYMKFSWLTVPEKSLDKEHRCIVRHENNKNGVDQEIIFPPIKTDVITMDPKDNCSKDANDTLLLQLTNTSAYYMYEILLGKATLYAVLVSALVLMAMVKRKDSRGRAKRSGSGATNFSLLKQAGDVEENPGPTSMDWIWRILFLVGAATGAHSFEQVQLQQPGAELVKPGASVKMSCKASGYAFSSYWINWMKQKPGQGLEWIGQIYPGDGDTNYNGKFKGRATLTADTSSSTAYMQLSSLTSEDSAVYFCARSITTVVGCAMDYWGQGTSVTVSSTRSQPHTKPSVFVMKNGTNVACLVKEFYPKDIRINLVSSKKITEFDPAIVISPSGKYNAVKLGKYEDSNSVTCSVQHDNKTVHSTDFEVKTDSTDHVKPKETENTKQPSKSCHKPKAIVHTEKVNMMSLTVLGFRILLLKVAGFNLLMTLRLWSS

SEQ ID NO: 43606 - protein, 629 aa, synthetic construct
MALPVTALLLPLALLLHAARPDIQMTQSPSSLSASVGDRVTITCKASDHINNWLAWYQQKPGQAPKLLIYGATTLETGVPSRFSGSGSGTDYTLTISSLQPEDFATYYCQQSWNTPWTFGQGTKLEIKRLEDKQLDADVSPKPTIFLPSIAETKLQKAGTYLCLLEKFFPDVIKIHWQEKKSNTILGSQEGNTMKTNDTYMKFSWLTVPEKSLDKEHRCIVRHENNKNGVDQEIIFPPIKTDVITMDPKDNCSKDANDTLLLQLTNTSATILYEILLGKATLYAVLVSALVLMAMVKRKDSRGRAKRSGSGATNFSLLKQAGDVEENPGPTSMDWIWRILFLVGAATGAHSFEQVQLQQPGAELVKPGASVKMSCKASGYAFSSYWINWMKQKPGQGLEWIGQIYPGDGDTNYNGKFKGRATLTADTSSSTAYMQLSSLTSEDSAVYFCARSITTVVGCAMDYWGQGTSVTVSSTRSQPHTKPSVFVMKNGTNVACLVKEFYPKDIRINLVSSKKITEFDPAIVISPSGKYNAVKLGKYEDSNSVTCSVQHDNKTVHSTDFEVKTDSTDHVKPKETENTKQPSKSCHKPKAIVHTEKVNMMSLTVLGFRILLLKVAGFNLLMTLRLWSS

SEQ ID NO: 43607 - protein, 623 aa, synthetic construct; identical to SEQ ID NO: 23704

SEQ ID NO: 43608 - protein, 652 aa, synthetic construct
MALPVTALLLPLALLLHAARPDIQMTQSPSSLSASVGDRVTITCKASDHINNWLAWYQQKPGQAPKLLIYGATTLETGVPSRFSGSGSGTDYTLTISSLQPEDFATYYCQQSWNTPWTFGQGTKLEIKRLEDLKNVFPPEVAVFEPSEAEISHTQKATLVCLATGFYPDHVELSWWVNGKEVHSGVSTDPQPLKEQPALNDSRYCLSSRLRVSATFWQNPRNHFRCQVQFYGLSENDEWTQDRAKPVTQIVSAEAWGRADCGSSKDANDTLLLQLTNTSAYYMYLLLLLKSVVYFAIITCCLLRRTAFCCNGEKSRAKRSGSGATNFSLLKQAGDVEENPGPTSMDWIWRILFLVGAATGAHSFEQVQLQQPGAELVKPGASVKMSCKASGYAFSSYWINWMKQKPGQGLEWIGQIYPGDGDTNYNGKFKGRATLTADTSSSTAYMQLSSLTSEDSAVYFCARSITTVVGCAMDYWGQGTSVTVSSTRIQNPDPAVYQLRDSKSSDKSVCLFTDFDSQTNVSQSKDSDVYITDKTVLDMRSMDFKSNSAVAWSNKSDFACANAFNNSIIPEDTFFPSPESSCGTEVKTDSTDHVKPKETENTKQPSKSCHKPKAIVHTEKVNMMSLTVLGLRMLFAKTVAVNFLLTAKLFFL

SEQ ID NO: 43609 - protein, 622 aa, synthetic construct; identical to SEQ ID NO: 9442

SEQ ID NO: 43610 - protein, 622 aa, synthetic construct; identical to SEQ ID NO: 9443

SEQ ID NO: 43611 - protein, 622 aa, synthetic construct; identical to SEQ ID NO: 9442

SEQ ID NO: 43612 - protein, 622 aa, synthetic construct; identical to SEQ ID NO: 9443

SEQ ID NO: 43613 - protein, 622 aa, synthetic construct; identical to SEQ ID NO: 9442

SEQ ID NO: 43614 - protein, 625 aa, synthetic construct
MALPVTALLLPLALLLHAARPDIQMTQSPSSLSASVGDRVTITCKASDHINNWLAWYQQKPGQAPKLLIYGATTLETGVPSRFSGSGSGTDYTLTISSLQPEDFATYYCQQSWNTPWTFGQGTKLEIKRLEADVSPKPTIFLPSIAETKLQKAGTYLCLLEKFFPDVIKIHWQEKKSNTILGSQEGNTMKTNDTYMKFSWLTVPEKSLDKEHRCIVRHENNKNGVDQEIIFPPIKTDVITMDPKDNCSKDANDTLLLQLTNTSAYYMYLLLLLKSVVYFAIITCCLLRRTAFCCNGEKSRAKRSGSGATNFSLLKQAGDVEENPGPTSMDWIWRILFLVGAATGAHSFEQVQLQQPGAELVKPGASVKMSCKASGYAFSSYWINWMKQKPGQGLEWIGQIYPGDGDTNYNGKFKGRATLTADTSSSTAYMQLSSLTSEDSAVYFCARSITTVVGCAMDYWGQGTSVTVSSTRSQPHTKPSVFVMKNGTNVACLVKEFYPKDIRINLVSSKKITEFDPAIVISPSGKYNAVKLGKYEDSNSVTCSVQHDNKTVHSTDFEVKTDSTDHVKPKETENTKQPSKSCHKPKAIVHTEKVNMMSLTVIGFRILLLKVAGFNLLMTLRLWSS

SEQ ID NO: 43615 - protein, 625 aa, synthetic construct
MALPVTALLLPLALLLHAARPDIQMTQSPSSLSASVGDRVTITCKASDHINNWLAWYQQKPGQAPKLLIYGATTLETGVPSRFSGSGSGTDYTLTISSLQPEDFATYYCQQSWNTPWTFGQGTKLEIKRLEADVSPKPTIFLPSIAETKLQKAGTYLCLLEKFFPDVIKIHWQEKKSNTILGSQEGNTMKTNDTYMKFSWLTVPEKSLDKEHRCIVRHENNKNGVDQEIIFPPIKTDVITMDPKDNCSKDANDTLLLQLTNTSAYYMYLLLLLKSVVYFAIITCCLLRRTAFCCNGEKSRAKRSGSGATNFSLLKQAGDVEENPGPTSMDWIWRILFLVGAATGAHSFEQVQLQQPGAELVKPGASVKMSCKASGYAFSSYWINWMKQKPGQGLEWIGQIYPGDGDTNYNGKFKGRATLTADTSSSTAYMQLSSLTSEDSAVYFCARSITTVVGCAMDYWGQGTSVTVSSTRSQPHTKPSVFVMKNGTNVACLVKEFYPKDIRINLVSSKKITEFDPAIVISPSGKYNAVKLGKYEDSNSVTCSVQHDNKTVHSTDFEVKTDSTDHVKPKETENTKQPSKSCHKPKAIVHTEKVNMMSLTVLGFRILLLKVAGFNLLMTLRLWSS

SEQ ID NO: 43616 - protein, 622 aa, synthetic construct; identical to SEQ ID NO: 9442

SEQ ID NO: 43617 - protein, 626 aa, synthetic construct; identical to SEQ ID NO: 12596

SEQ ID NO: 43618 - protein, 757 aa, synthetic construct; identical to SEQ ID NO: 12761

SEQ ID NO: 43619 - protein, 761 aa, synthetic construct; identical to SEQ ID NO: 12926

SEQ ID NO: 43620 - protein, 894 aa, synthetic construct; identical to SEQ ID NO: 13091

SEQ ID NO: 43621 - protein, 898 aa, synthetic construct; identical to SEQ ID NO: 13256

SEQ ID NO: 43622 - protein, 692 aa, synthetic construct; identical to SEQ ID NO: 13301

SEQ ID NO: 43623 - protein, 696 aa, synthetic construct; identical to SEQ ID NO: 13302

SEQ ID NO: 43624 - protein, 669 aa, synthetic construct; identical to SEQ ID NO: 13303

SEQ ID NO: 43625 - protein, 673 aa, synthetic construct; identical to SEQ ID NO: 13304

SEQ ID NO: 43626 - protein, 759 aa, synthetic construct; identical to SEQ ID NO: 13307

SEQ ID NO: 43627 - protein, 763 aa, synthetic construct; identical to SEQ ID NO: 13308

SEQ ID NO: 43628 - protein, 765 aa, synthetic construct; identical to SEQ ID NO: 13309

SEQ ID NO: 43629 - protein, 769 aa, synthetic construct; identical to SEQ ID NO: 13310

SEQ ID NO: 43630 - protein, 763 aa, synthetic construct; identical to SEQ ID NO: 13311

SEQ ID NO: 43631 - protein, 767 aa, synthetic construct; identical to SEQ ID NO: 13312

SEQ ID NO: 43632 - protein, 731 aa, synthetic construct; identical to SEQ ID NO: 13313

SEQ ID NO: 43633 - protein, 735 aa, synthetic construct; identical to SEQ ID NO: 13314

SEQ ID NO: 43634 - protein, 760 aa, synthetic construct; identical to SEQ ID NO: 13315

SEQ ID NO: 43635 - protein, 764 aa, synthetic construct; identical to SEQ ID NO: 13316

SEQ ID NO: 43636 - protein, 1131 aa, synthetic construct; identical to SEQ ID NO: 13329

SEQ ID NO: 43637 - protein, 769 aa, synthetic construct; identical to SEQ ID NO: 13330

SEQ ID NO: 43638 - protein, 769 aa, synthetic construct; identical to SEQ ID NO: 13331

SEQ ID NO: 43639 - protein, 769 aa, synthetic construct; identical to SEQ ID NO: 13332

SEQ ID NO: 43640 - protein, 769 aa, synthetic construct; identical to SEQ ID NO: 13333

SEQ ID NO: 43641 - protein, 760 aa, synthetic construct; identical to SEQ ID NO: 13334

SEQ ID NO: 43642 - protein, 761 aa, synthetic construct; identical to SEQ ID NO: 13335

SEQ ID NO: 43643 - protein, 762 aa, synthetic construct; identical to SEQ ID NO: 13336

SEQ ID NO: 43644 - protein, 758 aa, synthetic construct; identical to SEQ ID NO: 13337

SEQ ID NO: 43645 - protein, 756 aa, synthetic construct; identical to SEQ ID NO: 13338

SEQ ID NO: 43646 - protein, 1125 aa, synthetic construct; identical to SEQ ID NO: 13339

SEQ ID NO: 43647 - protein, 1124 aa, synthetic construct; identical to SEQ ID NO: 13340

SEQ ID NO: 43648 - protein, 949 aa, synthetic construct; identical to SEQ ID NO: 13342

SEQ ID NO: 43649 - protein, 949 aa, synthetic construct; identical to SEQ ID NO: 13343

SEQ ID NO: 43650 - protein, 1066 aa, synthetic construct; identical to SEQ ID NO: 13344

SEQ ID NO: 43651 - protein, 949 aa, synthetic construct; identical to SEQ ID NO: 13345

SEQ ID NO: 43652 - protein, 1159 aa, synthetic construct; identical to SEQ ID NO: 13346

SEQ ID NO: 43653 - protein, 622 aa, synthetic construct; identical to SEQ ID NO: 9443

SEQ ID NO: 43654 - protein, 626 aa, synthetic construct; identical to SEQ ID NO: 13632

SEQ ID NO: 43655 - protein, 757 aa, synthetic construct; identical to SEQ ID NO: 13797

SEQ ID NO: 43656 - protein, 761 aa, synthetic construct; identical to SEQ ID NO: 13962

SEQ ID NO: 43657 - protein, 894 aa, synthetic construct; identical to SEQ ID NO: 14127

SEQ ID NO: 43658 - protein, 898 aa, synthetic construct; identical to SEQ ID NO: 14292

SEQ ID NO: 43659 - protein, 726 aa, synthetic construct; identical to SEQ ID NO: 14503

SEQ ID NO: 43660 - protein, 730 aa, synthetic construct; identical to SEQ ID NO: 14668

SEQ ID NO: 43661 - protein, 861 aa, synthetic construct; identical to SEQ ID NO: 14833

SEQ ID NO: 43662 - protein, 865 aa, synthetic construct; identical to SEQ ID NO: 14998

SEQ ID NO: 43663 - protein, 998 aa, synthetic construct; identical to SEQ ID NO: 15163

SEQ ID NO: 43664 - protein, 1002 aa, synthetic construct; identical to SEQ ID NO: 15329

SEQ ID NO: 43665 - protein, 724 aa, synthetic construct; identical to SEQ ID NO: 15540

SEQ ID NO: 43666 - protein, 728 aa, synthetic construct; identical to SEQ ID NO: 15705

SEQ ID NO: 43667 - protein, 859 aa, synthetic construct; identical to SEQ ID NO: 15870

SEQ ID NO: 43668 - protein, 996 aa, synthetic construct; identical to SEQ ID NO: 16200

SEQ ID NO: 43669 - protein, 622 aa, synthetic construct; identical to SEQ ID NO: 16457

SEQ ID NO: 43670 - protein, 622 aa, synthetic construct; identical to SEQ ID NO: 16464

SEQ ID NO: 43671 - protein, 726 aa, synthetic construct; identical to SEQ ID NO: 16471

SEQ ID NO: 43672 - protein, 724 aa, synthetic construct; identical to SEQ ID NO: 16478

SEQ ID NO: 43673 - protein, 867 aa, synthetic construct; identical to SEQ ID NO: 16527

SEQ ID NO: 43674 - protein, 867 aa, synthetic construct; identical to SEQ ID NO: 16545

SEQ ID NO: 43675 - protein, 867 aa, synthetic construct; identical to SEQ ID NO: 16527

SEQ ID NO: 43676 - protein, 975 aa, synthetic construct; identical to SEQ ID NO: 16671

SEQ ID NO: 43677 - protein, 975 aa, synthetic construct; identical to SEQ ID NO: 16689

SEQ ID NO: 43678 - protein, 973 aa, synthetic construct; identical to SEQ ID NO: 16707

SEQ ID NO: 43679 - protein, 973 aa, synthetic construct; identical to SEQ ID NO: 16725

SEQ ID NO: 43680 - protein, 973 aa, synthetic construct; identical to SEQ ID NO: 16743

SEQ ID NO: 43681 - protein, 973 aa, synthetic construct; identical to SEQ ID NO: 16761

SEQ ID NO: 43682 - protein, 871 aa, synthetic construct; identical to SEQ ID NO: 18919

SEQ ID NO: 43683 - protein, 871 aa, synthetic construct; identical to SEQ ID NO: 18949

SEQ ID NO: 43684 - protein, 764 aa, synthetic construct; identical to SEQ ID NO: 19008

SEQ ID NO: 43685 - protein, 975 aa, synthetic construct; identical to SEQ ID NO: 16671

SEQ ID NO: 43686 - protein, 975 aa, synthetic construct; identical to SEQ ID NO: 16689

SEQ ID NO: 43687 - protein, 974 aa, synthetic construct; identical to SEQ ID NO: 19096

SEQ ID NO: 43688 - protein, 974 aa, synthetic construct; identical to SEQ ID NO: 19126

SEQ ID NO: 43689 - protein, 871 aa, synthetic construct; identical to SEQ ID NO: 19155

SEQ ID NO: 43690 - protein, 871 aa, synthetic construct; identical to SEQ ID NO: 19185

SEQ ID NO: 43691 - protein, 871 aa, synthetic construct; identical to SEQ ID NO: 19214

SEQ ID NO: 43692 - protein, 871 aa, synthetic construct; identical to SEQ ID NO: 19273

SEQ ID NO: 43693 - protein, 974 aa, synthetic construct; identical to SEQ ID NO: 19391

SEQ ID NO: 43694 - protein, 871 aa, synthetic construct; identical to SEQ ID NO: 19450

SEQ ID NO: 43695 - protein, 900 aa, synthetic construct; identical to SEQ ID NO: 19509

SEQ ID NO: 43696 - protein, 900 aa, synthetic construct; identical to SEQ ID NO: 19539

SEQ ID NO: 43697 - protein, 897 aa, synthetic construct; identical to SEQ ID NO: 19568

SEQ ID NO: 43698 - protein, 875 aa, synthetic construct; identical to SEQ ID NO: 19627

SEQ ID NO: 43699 - protein, 875 aa, synthetic construct; identical to SEQ ID NO: 19686

SEQ ID NO: 43700 - protein, 622 aa, synthetic construct; identical to SEQ ID NO: 23690

SEQ ID NO: 43701 - protein, 901 aa, synthetic construct
MALPVTALLLPLALLLHAARPEVQLLESGGGLVQPGGSLRLSCAASGRTFSMGWYRQAPGKGLEFVSAITYSGGSPYYADSVKGRFTISRDNSKNTVYLQMNSLRAEDTAVYYCAANPTYGSDWNAENWGQGTLVTVSSGTGGGGSGGGGSGGGGSEFDIQMTQSPSSLSASVGDRVTITCKASDHINNWLAWYQQKPGQAPKLLIYGATTLETGVPSRFSGSGSGTDYTLTISSLQPEDFATYYCQQSWNTPWTFGQGTKLEIKRLEIQNPDPAVYQLRDSKSSDKSVCLFTDFDSQTNVSQSKDSDVYITDKCVLDMRSMDFKSNSAVAWSNKSDFACANAFNNSIIPEDTFFPSSDVPCDVKLVEKSFETDTNLNFQNLSVIGFRILLLKVAGFNLLMTLRLWSSRAKRSGSGVKQTLNFDLLKLAGDVESNPGPTSTMDWIWRILFLVGAATGTHSGPEVQLVESGGGLVQPGGSLRLSCAASGRTFTMGWYRQAPGKEREFVAAISLSPTLAYYADSVKGRFTISRDNSKNTVVLQMNSLRAEDTALYYCAADRKSVMSIRPDYWGQGTLVTVSSGSGGGGSGGGGSGGGGSFEQVQLQQPGAELVKPGASVKMSCKASGYAFSSYWINWMKQKPGQGLEWIGQIYPGDGDTNYNGKFKGRATLTADTSSSTAYMQLSSLTSEDSAVYFCARSITTVVGCAMDYWGQGTSVTVSSTREDLKNVFPPEVAVFEPSKAEIAHTQKATLVCLATGFYPDHVELSWWVNGKEVHSGVCTDPQPLKEQPALNDSRYCLSSRLRVSATFWQNPRNHFRCQVQFYGLSENDEWTQDRAKPVTQIVSAEAWGRADCGITSASYHQGVLSATILYEILLGKATLYAVLVSALVLMAMVKRKDSRG

SEQ ID NO: 43702 - protein, 901 aa, synthetic construct
MALPVTALLLPLALLLHAARPEVQLVESGGGLVQAGGSLRLSCAASGRTFSMGWFRQAPGKEREFVAAITYSGGSPYYADSVKGRFTISRDNAKNTVYLQMNSLKPEDTAVYYCAANPTYGSDWNAENWGQGTQVTVSSGTGGGGSGGGGSGGGGSEFDIQMTQSPSSLSASVGDRVTITCKASDHINNWLAWYQQKPGQAPKLLIYGATTLETGVPSRFSGSGSGTDYTLTISSLQPEDFATYYCQQSWNTPWTFGQGTKLEIKRLEIQNPDPAVYQLRDSKSSDKSVCLFTDFDSQTNVSQSKDSDVYITDKCVLDMRSMDFKSNSAVAWSNKSDFACANAFNNSIIPEDTFFPSSDVPCDVKLVEKSFETDTNLNFQNLSVIGFRILLLKVAGFNLLMTLRLWSSRAKRSGSGVKQTLNFDLLKLAGDVESNPGPTSTMDWIWRILFLVGAATGAHSGPEVQLVESGGGLVQPGGSLRLSCAASGRTFTMGWYRQAPGKEREFVAAISLSPTLAYYADSVKGRFTISRDNSKNTVVLQMNSLRAEDTALYYCAADRKSVMSIRPDYWGQGTLVTVSSGSGGGGSGGGGSGGGGSFEQVQLQQPGAELVKPGASVKMSCKASGYAFSSYWINWMKQKPGQGLEWIGQIYPGDGDTNYNGKFKGRATLTADTSSSTAYMQLSSLTSEDSAVYFCARSITTVVGCAMDYWGQGTSVTVSSTREDLKNVFPPEVAVFEPSKAEIAHTQKATLVCLATGFYPDHVELSWWVNGKEVHSGVCTDPQPLKEQPALNDSRYCLSSRLRVSATFWQNPRNHFRCQVQFYGLSENDEWTQDRAKPVTQIVSAEAWGRADCGITSASYHQGVLSATILYEILLGKATLYAVLVSALVLMAMVKRKDSRG

SEQ ID NO: 43703 - protein, 898 aa, synthetic construct
MALPVTALLLPLALLLHAARPEVQLVESGGGLVQAGGSLRLSCAASGRTFSMGWFRQAPGKEREFVAAITYSGGSPYYADSVKGRFTISRDNAKNTVYLQMNSLKPEDTAVYYCAANPTYGSDWNAENWGQGTQVTVSSGTGGGGSGGGGSGGGGSEFDIQMTQSPSSLSASVGDRVTITCKASDHINNWLAWYQQKPGQAPKLLIYGATTLETGVPSRFSGSGSGTDYTLTISSLQPEDFATYYCQQSWNTPWTFGQGTKLEIKRLEDLKNVFPPEVAVFEPSEAEISHTQKATLVCLATGFYPDHVELSWWVNGKEVHSGVCTDPQPLKEQPALNDSRYCLSSRLRVSATFWQNPRNHFRCQVQFYGLSENDEWTQDRAKPVTQIVSAEAWGRADCGFTSESYQQGVLSATILYEILLGKATLYAVLVSALVLMAMVKRKDSRGRAKRSGSGATNFSLLKQAGDVEENPGPTSATMDWIWRILFLVGAATGAHSGPEVQLVESGGGLVQAGGSLRLSCAASGRTFTMGWFRQAPGKEREFVAAISLSPTLAYYADSVKGRFTISRDNAKNTVVLQMNSLKPEDTALYYCAADRKSVMSIRPDYWGQGTQVTVSSGSGGGGSGGGGSGGGGSFEQVQLQQPGAELVKPGASVKMSCKASGYAFSSYWINWMKQKPGQGLEWIGQIYPGDGDTNYNGKFKGRATLTADTSSSTAYMQLSSLTSEDSAVYFCARSITTVVGCAMDYWGQGTSVTVSSTRIQNPDPAVYQLRDSKSSDKSVCLFTDFDSQTNVSQSKDSDVYITDKCVLDMRSMDFKSNSAVAWSNKSDFACANAFNNSIIPEDTFFPSPESSCDVKLVEKSFETDTNLNFQNLSVIGFRILLLKVAGFNLLMTLRLWSS

SEQ ID NO: 43704 - protein, 769 aa, synthetic construct
MALPVTALLLPLALLLHAARPEVQLVESGGGLVQPGGSLRLSCEASGFASDDYIIGWFRQAPGKEREGVSCISSKYANTVYTDSVKGRFRLSRGTAKNTVYLQMSALKPEDTAVYYCAMDSRRVTCPEISTMHRNFDSWGQGTLVTVSSGTGGGGSGGGGSGGGGSEFDIQMTQSPSSLSASVGDRVTITCKASDHINNWLAWYQQKPGQAPKLLIYGATTLETGVPSRFSGSGSGTDYTLTISSLQPEDFATYYCQQSWNTPWTFGQGTKLEIKRLEDLKNVFPPEVAVFEPSKAEIAHTQKATLVCLATGFYPDHVELSWWVNGKEVHSGVCTDPQPLKEQPALNDSRYCLSSRLRVSATFWQNPRNHFRCQVQFYGLSENDEWTQDRAKPVTQIVSAEAWGRADCGITSASYHQGVLSATILYEILLGKATLYAVLVSALVLMAMVKRKDSRGRAKRSGSGATNFSLLKQAGDVEENPGPTSMDWIWRILFLVGAATGAHSFEQVQLQQPGAELVKPGASVKMSCKASGYAFSSYWINWMKQKPGQGLEWIGQIYPGDGDTNYNGKFKGRATLTADTSSSTAYMQLSSLTSEDSAVYFCARSITTVVGCAMDYWGQGTSVTVSSTRIQNPDPAVYQLRDSKSSDKSVCLFTDFDSQTNVSQSKDSDVYITDKCVLDMRSMDFKSNSAVAWSNKSDFACANAFNNSIIPEDTFFPSSDVPCDVKLVEKSFETDTNLNFQNLSVIGFRILLLKVAGFNLLMTLRLWSS

SEQ ID NO: 43705 - protein, 760 aa, synthetic construct
MALPVTALLLPLALLLHAARPDIQMTQSPSSLSASVGDRVTITCKASDHINNWLAWYQQKPGQAPKLLIYGATTLETGVPSRFSGSGSGTDYTLTISSLQPEDFATYYCQQSWNTPWTFGQGTKLEIKRLEDLKNVFPPEVAVFEPSEAEISHTQKATLVCLATGFYPDHVELSWWVNGKEVHSGVCTDPQPLKEQPALNDSRYCLSSRLRVSATFWQNPRNHFRCQVQFYGLSENDEWTQDRAKPVTQIVSAEAWGRADCGFTSESYQQGVLSATILYEILLGKATLYAVLVSALVLMAMVKRKDSRGRAKRSGSGATNFSLLKQAGDVEENPGPTSTMDWIWRILFLVGAATGAHSGPEVQLVESGGGLVQPGGSLRLSCAASGRTFTMGWYRQAPGKEREFVAAISLSPTLAYYADSVKGRFTISRDNSKNTVVLQMNSLRAEDTALYYCAADRKSVMSIRPDYWGQGTLVTVSSGSGGGGSGGGGSGGGGSFEQVQLQQPGAELVKPGASVKMSCKASGYAFSSYWINWMKQKPGQGLEWIGQIYPGDGDTNYNGKFKGRATLTADTSSSTAYMQLSSLTSEDSAVYFCARSITTVVGCAMDYWGQGTSVTVSSTRIQNPDPAVYQLRDSKSSDKSVCLFTDFDSQTNVSQSKDSDVYITDKCVLDMRSMDFKSNSAVAWSNKSDFACANAFNNSIIPEDTFFPSPESSCDVKLVEKSFETDTNLNFQNLSVIGFRILLLKVAGFNLLMTLRLWSS

SEQ ID NO: 43706 - protein, 767 aa, synthetic construct
MALPVTALLLPLALLLHAARPDIQMTQSPSSLSASVGDRVTITCKASDHINNWLAWYQQKPGQAPKLLIYGATTLETGVPSRFSGSGSGTDYTLTISSLQPEDFATYYCQQSWNTPWTFGQGTKLEIKRLEDLKNVFPPEVAVFEPSEAEISHTQKATLVCLATGFYPDHVELSWWVNGKEVHSGVCTDPQPLKEQPALNDSRYCLSSRLRVSATFWQNPRNHFRCQVQFYGLSENDEWTQDRAKPVTQIVSAEAWGRADCGFTSESYQQGVLSATILYEILLGKATLYAVLVSALVLMAMVKRKDSRGRAKRSGSGATNFSLLKQAGDVEENPGPTSTMDWIWRILFLVGAATGAHSGPQVQLVESGGGLVQPGGSLRLSCAASGNINSRNCMGWFRQAPGKGREGVAAIGQVTGRTYYVDSVKGRFTISLDNSKNTLYLQMNSLRAEDTAVYYCAAAPGCLLSALRSADYRNWGQGTLVTVSSGSGGGGSGGGGSGGGGSFEQVQLQQPGAELVKPGASVKMSCKASGYAFSSYWINWMKQKPGQGLEWIGQIYPGDGDTNYNGKFKGRATLTADTSSSTAYMQLSSLTSEDSAVYFCARSITTVVGCAMDYWGQGTSVTVSSTRIQNPDPAVYQLRDSKSSDKSVCLFTDFDSQTNVSQSKDSDVYITDKCVLDMRSMDFKSNSAVAWSNKSDFACANAFNNSIIPEDTFFPSPESSCDVKLVEKSFETDTNLNFQNLSVIGFRILLLKVAGFNLLMTLRLWSS

SEQ ID NO: 43707 - protein, 767 aa, synthetic construct
MALPVTALLLPLALLLHAARPDIQMTQSPSSLSASVGDRVTITCKASDHINNWLAWYQQKPGQAPKLLIYGATTLETGVPSRFSGSGSGTDYTLTISSLQPEDFATYYCQQSWNTPWTFGQGTKLEIKRLEDLKNVFPPEVAVFEPSEAEISHTQKATLVCLATGFYPDHVELSWWVNGKEVHSGVCTDPQPLKEQPALNDSRYCLSSRLRVSATFWQNPRNHFRCQVQFYGLSENDEWTQDRAKPVTQIVSAEAWGRADCGFTSESYQQGVLSATILYEILLGKATLYAVLVSALVLMAMVKRKDSRGRAKRSGSGATNFSLLKQAGDVEENPGPTSTMDWIWRILFLVGAATGAHSGPQVQLVESGGGSVQAGGSLRLSCGASGNISSRNCMGWFRQAPGKEREGVAAIGQVTGRSYYVDSVKGRFTISLDNAKNTLYLQMNTLKPEDTAMYYCAAAPGCLLSALRSADYRNWGQGTQVTVSSGSGGGGSGGGGSGGGGSFEQVQLQQPGAELVKPGASVKMSCKASGYAFSSYWINWMKQKPGQGLEWIGQIYPGDGDTNYNGKFKGRATLTADTSSSTAYMQLSSLTSEDSAVYFCARSITTVVGCAMDYWGQGTSVTVSSTRIQNPDPAVYQLRDSKSSDKSVCLFTDFDSQTNVSQSKDSDVYITDKCVLDMRSMDFKSNSAVAWSNKSDFACANAFNNSIIPEDTFFPSPESSCDVKLVEKSFETDTNLNFQNLSVIGFRILLLKVAGFNLLMTLRLWSS

SEQ ID NO: 43708 - protein, 908 aa, synthetic construct
MALPVTALLLPLALLLHAARPEVQLVESGGGLVQAGGSLRLSCAASGRTFSMGWFRQAPGKEREFVAAITYSGGSPYYADSVKGRFTISRDNAKNTVYLQMNSLKPEDTAVYYCAANPTYGSDWNAENWGQGTQVTVSSGTGGGGSGGGGSGGGGSEFDIQMTQSPSSLSASVGDRVTITCKASDHINNWLAWYQQKPGQAPKLLIYGATTLETGVPSRFSGSGSGTDYTLTISSLQPEDFATYYCQQSWNTPWTFGQGTKLEIKRLEIQNPDPAVYQLRDSKSSDKSVCLFTDFDSQTNVSQSKDSDVYITDKCVLDMRSMDFKSNSAVAWSNKSDFACANAFNNSIIPEDTFFPSSDVPCDVKLVEKSFETDTNLNFQNLSVIGFRILLLKVAGFNLLMTLRLWSSRAKRSGSGVKQTLNFDLLKLAGDVESNPGPTSTMDWIWRILFLVGAATGAHSGPQVQLVESGGGSVQAGGSLRLSCGASGNISSRNCMGWFRQAPGKEREGVAAIGQVTGRSYYVDSVKGRFTISLDNAKNTLYLQMNTLKPEDTAMYYCAAAPGCLLSALRSADYRNWGQGTQVTVSSGSGGGGSGGGGSGGGGSFEQVQLQQPGAELVKPGASVKMSCKASGYAFSSYWINWMKQKPGQGLEWIGQIYPGDGDTNYNGKFKGRATLTADTSSSTAYMQLSSLTSEDSAVYFCARSITTVVGCAMDYWGQGTSVTVSSTREDLKNVFPPEVAVFEPSKAEIAHTQKATLVCLATGFYPDHVELSWWVNGKEVHSGVCTDPQPLKEQPALNDSRYCLSSRLRVSATFWQNPRNHFRCQVQFYGLSENDEWTQDRAKPVTQIVSAEAWGRADCGITSASYHQGVLSATILYEILLGKATLYAVLVSALVLMAMVKRKDSRG

SEQ ID NO: 43709 - protein, 905 aa, synthetic construct
MALPVTALLLPLALLLHAARPQVQLVESGGGSVQAGGSLRLSCGASGNISSRNCMGWFRQAPGKEREGVAAIGQVTGRSYYVDSVKGRFTISLDNAKNTLYLQMNTLKPEDTAMYYCAAAPGCLLSALRSADYRNWGQGTQVTVSSGTGGGGSGGGGSGGGGSEFDIQMTQSPSSLSASVGDRVTITCKASDHINNWLAWYQQKPGQAPKLLIYGATTLETGVPSRFSGSGSGTDYTLTISSLQPEDFATYYCQQSWNTPWTFGQGTKLEIKRLEDLKNVFPPEVAVFEPSEAEISHTQKATLVCLATGFYPDHVELSWWVNGKEVHSGVCTDPQPLKEQPALNDSRYCLSSRLRVSATFWQNPRNHFRCQVQFYGLSENDEWTQDRAKPVTQIVSAEAWGRADCGFTSESYQQGVLSATILYEILLGKATLYAVLVSALVLMAMVKRKDSRGRAKRSGSGATNFSLLKQAGDVEENPGPTSATMDWIWRILFLVGAATGAHSGPEVQLVESGGGLVQAGGSLRLSCAASGRTFTMGWFRQAPGKEREFVAAISLSPTLAYYADSVKGRFTISRDNAKNTVVLQMNSLKPEDTALYYCAADRKSVMSIRPDYWGQGTQVTVSSGSGGGGSGGGGSGGGGSFEQVQLQQPGAELVKPGASVKMSCKASGYAFSSYWINWMKQKPGQGLEWIGQIYPGDGDTNYNGKFKGRATLTADTSSSTAYMQLSSLTSEDSAVYFCARSITTVVGCAMDYWGQGTSVTVSSTRIQNPDPAVYQLRDSKSSDKSVCLFTDFDSQTNVSQSKDSDVYITDKCVLDMRSMDFKSNSAVAWSNKSDFACANAFNNSIIPEDTFFPSPESSCDVKLVEKSFETDTNLNFQNLSVIGFRILLLKVAGFNLLMTLRLWSS

SEQ ID NO: 43710 - protein, 768 aa, synthetic construct
MALPVTALLLPLALLLHAARPQVQLVESGGGSVQAGGSLRLSCGASGNISSRNCMGWFRQAPGKEREGVAAIGQVTGRSYYVDSVKGRFTISLDNAKNTLYLQMNTLKPEDTAMYYCAAAPGCLLSALRSADYRNWGQGTQVTVSSGTGGGGSGGGGSGGGGSEFDIQMTQSPSSLSASVGDRVTITCKASDHINNWLAWYQQKPGQAPKLLIYGATTLETGVPSRFSGSGSGTDYTLTISSLQPEDFATYYCQQSWNTPWTFGQGTKLEIKRLEDLKNVFPPEVAVFEPSEAEISHTQKATLVCLATGFYPDHVELSWWVNGKEVHSGVCTDPQPLKEQPALNDSRYCLSSRLRVSATFWQNPRNHFRCQVQFYGLSENDEWTQDRAKPVTQIVSAEAWGRADCGFTSESYQQGVLSATILYEILLGKATLYAVLVSALVLMAMVKRKDSRGRAKRSGSGATNFSLLKQAGDVEENPGPTSATMDWIWRILFLVGAATGAHSFEQVQLQQPGAELVKPGASVKMSCKASGYAFSSYWINWMKQKPGQGLEWIGQIYPGDGDTNYNGKFKGRATLTADTSSSTAYMQLSSLTSEDSAVYFCARSITTVVGCAMDYWGQGTSVTVSSTRIQNPDPAVYQLRDSKSSDKSVCLFTDFDSQTNVSQSKDSDVYITDKCVLDMRSMDFKSNSAVAWSNKSDFACANAFNNSIIPEDTFFPSPESSCDVKLVEKSFETDTNLNFQNLSVIGFRILLLKVAGFNLLMTLRLWSS

SEQ ID NO: 43711 - protein, 768 aa, synthetic construct
MALPVTALLLPLALLLHAARPQVQLVESGGGVVQPGGSLRLSCAASGLSFSTYTVAWFRQAPGKGLEGVAAIPYTSQHMVYTDSVRGRFTISRDNSKNTLYLQMNSLRAEDTAVYYCATDRRPGTSMLAINGYNRWGQGTTVTVSSGTGGGGSGGGGSGGGGSEFDIQMTQSPSSLSASVGDRVTITCKASDHINNWLAWYQQKPGQAPKLLIYGATTLETGVPSRFSGSGSGTDYTLTISSLQPEDFATYYCQQSWNTPWTFGQGTKLEIKRLEDLKNVFPPEVAVFEPSEAEISHTQKATLVCLATGFYPDHVELSWWVNGKEVHSGVCTDPQPLKEQPALNDSRYCLSSRLRVSATFWQNPRNHFRCQVQFYGLSENDEWTQDRAKPVTQIVSAEAWGRADCGFTSESYQQGVLSATILYEILLGKATLYAVLVSALVLMAMVKRKDSRGRAKRSGSGATNFSLLKQAGDVEENPGPTSATMDWIWRILFLVGAATGAHSFEQVQLQQPGAELVKPGASVKMSCKASGYAFSSYWINWMKQKPGQGLEWIGQIYPGDGDTNYNGKFKGRATLTADTSSSTAYMQLSSLTSEDSAVYFCARSITTVVGCAMDYWGQGTSVTVSSTRIQNPDPAVYQLRDSKSSDKSVCLFTDFDSQTNVSQSKDSDVYITDKCVLDMRSMDFKSNSAVAWSNKSDFACANAFNNSIIPEDTFFPSPESSCDVKLVEKSFETDTNLNFQNLSVIGFRILLLKVAGFNLLMTLRLWSS

SEQ ID NO: 43712 - protein, 767 aa, synthetic construct
MALPVTALLLPLALLLHAARPDIQMTQSPSSLSASVGDRVTITCKASDHINNWLAWYQQKPGQAPKLLIYGATTLETGVPSRFSGSGSGTDYTLTISSLQPEDFATYYCQQSWNTPWTFGQGTKLEIKRLEDLKNVFPPEVAVFEPSEAEISHTQKATLVCLATGFYPDHVELSWWVNGKEVHSGVCTDPQPLKEQPALNDSRYCLSSRLRVSATFWQNPRNHFRCQVQFYGLSENDEWTQDRAKPVTQIVSAEAWGRADCGFTSESYQQGVLSATILYEILLGKATLYAVLVSALVLMAMVKRKDSRGRAKRSGSGATNFSLLKQAGDVEENPGPTSTMDWIWRILFLVGAATGAHSGPQVQLVESGGGVVQPGGSLRLSCAASGLSFSTYTVAWFRQAPGKGLEGVAAIPYTSQHMVYTDSVRGRFTISRDNSKNTLYLQMNSLRAEDTAVYYCATDRRPGTSMLAINGYNRWGQGTTVTVSSGSGGGGSGGGGSGGGGSFEQVQLQQPGAELVKPGASVKMSCKASGYAFSSYWINWMKQKPGQGLEWIGQIYPGDGDTNYNGKFKGRATLTADTSSSTAYMQLSSLTSEDSAVYFCARSITTVVGCAMDYWGQGTSVTVSSTRIQNPDPAVYQLRDSKSSDKSVCLFTDFDSQTNVSQSKDSDVYITDKCVLDMRSMDFKSNSAVAWSNKSDFACANAFNNSIIPEDTFFPSPESSCDVKLVEKSFETDTNLNFQNLSVIGFRILLLKVAGFNLLMTLRLWSS

SEQ ID NO: 43713 - protein, 769 aa, synthetic construct
MALPVTALLLPLALLLHAARPDIQMTQSPSSLSASVGDRVTITCKASDHINNWLAWYQQKPGQAPKLLIYGATTLETGVPSRFSGSGSGTDYTLTISSLQPEDFATYYCQQSWNTPWTFGQGTKLEIKRLEDLKNVFPPEVAVFEPSEAEISHTQKATLVCLATGFYPDHVELSWWVNGKEVHSGVCTDPQPLKEQPALNDSRYCLSSRLRVSATFWQNPRNHFRCQVQFYGLSENDEWTQDRAKPVTQIVSAEAWGRADCGFTSESYQQGVLSATILYEILLGKATLYAVLVSALVLMAMVKRKDSRGRAKRSGSGATNFSLLKQAGDVEENPGPTSTMDWIWRILFLVGAATGAHSGPEVQLVESGGGSVQAGGSLRLSCAASGYTYSINCMGWFRQAPGKEREGVAAISTGGGRTDYRDSVKGRFTISQDNAKNTVYLQMNSLKPEDTAMYYCAGKTTYPGYGCGLGRSAYNYWGQGTQVTVSSGSGGGGSGGGGSGGGGSFEQVQLQQPGAELVKPGASVKMSCKASGYAFSSYWINWMKQKPGQGLEWIGQIYPGDGDTNYNGKFKGRATLTADTSSSTAYMQLSSLTSEDSAVYFCARSITTVVGCAMDYWGQGTSVTVSSTRIQNPDPAVYQLRDSKSSDKSVCLFTDFDSQTNVSQSKDSDVYITDKCVLDMRSMDFKSNSAVAWSNKSDFACANAFNNSIIPEDTFFPSPESSCDVKLVEKSFETDTNLNFQNLSVIGFRILLLKVAGFNLLMTLRLWSS

SEQ ID NO: 43714 - protein, 622 aa, synthetic construct
MALPVTALLLPLALLLHAARPDIQMTQSPSSLSASVGDRVTITCKASDHINNWLAWYQQKPGQAPKLLIYGATTLETGVPSRFSGSGSGTDYTLTISSLQPEDFATYYCQQSWNTPWTFGQGTKLEIKRLEDLKHVFPPEVAVFEPSDAEIWHTQKATLVCLATGFYPDHVELSWWVNGKEVHSGVSTDPQPLKEQPALNDSRYCLSSRLRVSATFWQNPRNHFRCQVQFYGLSENDEWTQDRAKPVTQIVSAEAWGRADCGFTSESYQQGVLSATILYEILLGKATLYAVLVSALVLMAMVKRKDSRGRAKRSGSGATNFSLLKQAGDVEENPGPTSMDWIWRILFLVGAATGAHSFEQVQLQQPGAELVKPGASVKMSCKASGYAFSSYWINWMKQKPGQGLEWIGQIYPGDGDTNYNGKFKGRATLTADTSSSTAYMQLSSLTSEDSAVYFCARSITTVVGCAMDYWGQGTSVTVSSTRIQNPDPAVYQLRDSKSSDKSVCLFTDFDSQTNVSQSKDSDVYITDKTVLDMRSMDFKSNSAVAWSSKSDFACANAFNNSIIPEDTFFPSPEMACDVKLVEKSFETDTNLNFQNLLVIWLRILLLKVAGFNLLMTLRLWSS

SEQ ID NO: 43715 - protein, 622 aa, synthetic construct
MALPVTALLLPLALLLHAARPDIQMTQSPSSLSASVGDRVTITCKASDHINNWLAWYQQKPGQAPKLLIYGATTLETGVPSRFSGSGSGTDYTLTISSLQPEDFATYYCQQSWNTPWTFGQGTKLEIKRLEDLKHVFPPEVAVFEPSDAEIWHTQKATLVCLATGFYPDHVELSWWVNGKEVHSGVSTDPQPLKEQPALNDSRYCLSSRLRVSATFWQNPRNHFRCQVQFYGLSENDEWTQDRAKPVTQIVSAEAWGRADCGFTSESYQQGVLSATILYEILLGKATLYAVLVSALVLMAMVKRKDSRGRAKRSGSGATNFSLLKQAGDVEENPGPTSMDWIWRILFLVGAATGAHSFEQVQLQQPGAELVKPGASVKMSCKASGYAFSSYWINWMKQKPGQGLEWIGQIYPGDGDTNYNGKFKGRATLTADTSSSTAYMQLSSLTSEDSAVYFCARSITTVVGCAMDYWGQGTSVTVSSTRIQNPDPAVYQLRDSKSSDKSVCLFTDFDSQTNVSQSKDSDVYITDKTVLDMRSMDFKSNSAVAWSTKSDFACANAFNNSIIPEDTFFPSPEVVCDVKLVEKSFETDTNLNFQNLVVIGARILLLKVAGFNLLMTLRLWSS

SEQ ID NO: 43716 - protein, 622 aa, synthetic construct
MALPVTALLLPLALLLHAARPDIQMTQSPSSLSASVGDRVTITCKASDHINNWLAWYQQKPGQAPKLLIYGATTLETGVPSRFSGSGSGTDYTLTISSLQPEDFATYYCQQSWNTPWTFGQGTKLEIKRLEDLKNVFPPEVAVFEPSKAEISRTQKATLVCLATGFYPPHVELSWWVNGKEVHDGVCTDPQPLKEQPALNDSRYCLSSRLRVSATFWQNPRNHFRCQVQFYGLSENDEWTQDRAKPVTQIVSAEAWGRADCGFTSESYQQGVLSATILYEILLGKATLYAVLVSALVLMAMVKRKDSRGRAKRSGSGATNFSLLKQAGDVEENPGPTSMDWIWRILFLVGAATGAHSFEQVQLQQPGAELVKPGASVKMSCKASGYAFSSYWINWMKQKPGQGLEWIGQIYPGDGDTNYNGKFKGRATLTADTSSSTAYMQLSSLTSEDSAVYFCARSITTVVGCAMDYWGQGTSVTVSSTRIQNPDPAVYQLRDSKSSDKFVCLFTDFDSQINVSQSKDSDVYITDKCVLDMRSMDFKSNSAVAWSNKSDFTCANAFNNSIIPEDTFFPSPESSCDVKLVEKSFETDTNLNFQNLSVIGFRILLLKVAGFNLLMTLRLWSS

SEQ ID NO: 43717 - protein, 764 aa, synthetic construct
MALPVTALLLPLALLLHAARPDIQMTQSPSSLSASVGDRVTITCKASDHINNWLAWYQQKPGQAPKLLIYGATTLETGVPSRFSGSGSGTDYTLTISSLQPEDFATYYCQQSWNTPWTFGQGTKLEIKRLEDLKNVFPPEVAVFEPSEAEISHTQKATLVCLATGFYPDHVELSWWVNGKEVHSGVCTDPQPLKEQPALNDSRYCLSSRLRVSATFWQNPRNHFRCQVQFYGLSENDEWTQDRAKPVTQIVSAEAWGRADCGFTSESYQQGVLSATILYEILLGKATLYAVLVSALVLMAMVKRKDSRGRAKRSGSGATNFSLLKQAGDVEENPGPTSTMDWIWRILFLVGAATGAHSGPQVQLQESGPGLVKPSQTLSLTCTVSGASITTGEYYWNWFRQPPGKGLEWMGAIAASGSTTYSPSFESRTSISRDTSKNQFSLKLSSVTAADTAVYYCGRSFGVAAVTTGQNRGQGTLVTVSSGSGGGGSGGGGSGGGGSFEQVQLQQPGAELVKPGASVKMSCKASGYAFSSYWINWMKQKPGQGLEWIGQIYPGDGDTNYNGKFKGRATLTADTSSSTAYMQLSSLTSEDSAVYFCARSITTVVGCAMDYWGQGTSVTVSSTRIQNPDPAVYQLRDSKSSDKSVCLFTDFDSQTNVSQSKDSDVYITDKCVLDMRSMDFKSNSAVAWSNKSDFACANAFNNSIIPEDTFFPSPESSCDVKLVEKSFETDTNLNFQNLSVIGFRILLLKVAGFNLLMTLRLWSS

SEQ ID NO: 43718 - protein, 905 aa, synthetic construct
MALPVTALLLPLALLLHAARPQVQLQESGPGLVKPSQTLSLTCTVSGGSITTGEFYWNWFRQPPGKGLEWMGAIAASGSTTYSPSFESRTSISRDTSKNQFSLKLSSVTAADTAVYYCGRSFGVAAVTTGQNRGQGTLVTVSSGTGGGGSGGGGSGGGGSEFDIQMTQSPSSLSASVGDRVTITCKASDHINNWLAWYQQKPGQAPKLLIYGATTLETGVPSRFSGSGSGTDYTLTISSLQPEDFATYYCQQSWNTPWTFGQGTKLEIKRLEIQNPDPAVYQLRDSKSSDKSVCLFTDFDSQTNVSQSKDSDVYITDKCVLDMRSMDFKSNSAVAWSNKSDFACANAFNNSIIPEDTFFPSSDVPCDVKLVEKSFETDTNLNFQNLSVIGFRILLLKVAGFNLLMTLRLWSSRAKRSGSGVKQTLNFDLLKLAGDVESNPGPTSTMDWIWRILFLVGAATGAHSGPEVQLVESGGGLVQPGGSLRLSCAASGRTFTMGWYRQAPGKEREFVAAISLSPTLAYYADSVKGRFTISRDNSKNTVVLQMNSLRAEDTALYYCAADRKSVMSIRPDYWGQGTLVTVSSGSGGGGSGGGGSGGGGSFEQVQLQQPGAELVKPGASVKMSCKASGYAFSSYWINWMKQKPGQGLEWIGQIYPGDGDTNYNGKFKGRATLTADTSSSTAYMQLSSLTSEDSAVYFCARSITTVVGCAMDYWGQGTSVTVSSTREDLKNVFPPEVAVFEPSKAEIAHTQKATLVCLATGFYPDHVELSWWVNGKEVHSGVCTDPQPLKEQPALNDSRYCLSSRLRVSATFWQNPRNHFRCQVQFYGLSENDEWTQDRAKPVTQIVSAEAWGRADCGITSASYHQGVLSATILYEILLGKATLYAVLVSALVLMAMVKRKDSRG

SEQ ID NO: 43719 - protein, 768 aa, synthetic construct
MALPVTALLLPLALLLHAARPQVQLQESGPGLVKPSQTLSLTCTVSGGSITTGEFYWNWFRQPPGKGLEWMGAIAASGSTTYSPSFESRTSISRDTSKNQFSLKLSSVTAADTAVYYCGRSFGVAAVTTGQNRGQGTLVTVSSGTGGGGSGGGGSGGGGSEFDIQMTQSPSSLSASVGDRVTITCKASDHINNWLAWYQQKPGQAPKLLIYGATTLETGVPSRFSGSGSGTDYTLTISSLQPEDFATYYCQQSWNTPWTFGQGTKLEIKRLEIQNPDPAVYQLRDSKSSDKSVCLFTDFDSQTNVSQSKDSDVYITDKCVLDMRSMDFKSNSAVAWSNKSDFACANAFNNSIIPEDTFFPSSDVPCDVKLVEKSFETDTNLNFQNLSVIGFRILLLKVAGFNLLMTLRLWSSRAKRSGSGVKQTLNFDLLKLAGDVESNPGPTSTMDWIWRILFLVGAATGAHSFEQVQLQQPGAELVKPGASVKMSCKASGYAFSSYWINWMKQKPGQGLEWIGQIYPGDGDTNYNGKFKGRATLTADTSSSTAYMQLSSLTSEDSAVYFCARSITTVVGCAMDYWGQGTSVTVSSTREDLKNVFPPEVAVFEPSKAEIAHTQKATLVCLATGFYPDHVELSWWVNGKEVHSGVCTDPQPLKEQPALNDSRYCLSSRLRVSATFWQNPRNHFRCQVQFYGLSENDEWTQDRAKPVTQIVSAEAWGRADCGITSASYHQGVLSATILYEILLGKATLYAVLVSALVLMAMVKRKDSRG

SEQ ID NO: 43720 - protein, 901 aa, synthetic construct
MALPVTALLLPLALLLHAARPEVQLVESGGGLVQAGGSLRLSCAASGRTFSMGWFRQAPGKEREFVAAITYSGGSPYYADSVKGRFTISRDNAKNTVYLQMNSLKPEDTAVYYCAANPTYGSDWNAENWGQGTQVTVSSGTGGGGSGGGGSGGGGSEFDIQMTQSPSSLSASVGDRVTITCKASDHINNWLAWYQQKPGQAPKLLIYGATTLETGVPSRFSGSGSGTDYTLTISSLQPEDFATYYCQQSWNTPWTFGQGTKLEIKRLEDLKNVFPPEVAVFEPSEAEISHTQKATLVCLATGFYPDHVELSWWVNGKEVHSGVCTDPQPLKEQPALNDSRYCLSSRLRVSATFWQNPRNHFRCQVQFYGLSENDEWTQDRAKPVTQIVSAEAWGRADCGFTSESYQQGVLSATILYEILLGKATLYAVLVSALVLMAMVKRKDSRGRAKRSGSGATNFSLLKQAGDVEENPGPTSTMDWIWRILFLVGAATGAHSGPQVQLQESGPGLVKPSQTLSLTCTVSGASITTGEYYWNWFRQPPGKGLEWMGAIAASGSTTYSPSFESRTSISRDTSKNQFSLKLSSVTAADTAVYYCGRSFGVAAVTTGQNRGQGTLVTVSSGSGGGGSGGGGSGGGGSFEQVQLQQPGAELVKPGASVKMSCKASGYAFSSYWINWMKQKPGQGLEWIGQIYPGDGDTNYNGKFKGRATLTADTSSSTAYMQLSSLTSEDSAVYFCARSITTVVGCAMDYWGQGTSVTVSSTRIQNPDPAVYQLRDSKSSDKSVCLFTDFDSQTNVSQSKDSDVYITDKCVLDMRSMDFKSNSAVAWSNKSDFACANAFNNSIIPEDTFFPSPESSCDVKLVEKSFETDTNLNFQNLSVIGFRILLLKVAGFNLLMTLRLWSS

SEQ ID NO: 43721 - protein, 908 aa, synthetic construct
MALPVTALLLPLALLLHAARPEVQLVESGGGLVQAGGSLRLSCAASGRTFSMGWFRQAPGKEREFVAAITYSGGSPYYADSVKGRFTISRDNAKNTVYLQMNSLKPEDTAVYYCAANPTYGSDWNAENWGQGTQVTVSSGTGGGGSGGGGSGGGGSEFDIQMTQSPSSLSASVGDRVTITCKASDHINNWLAWYQQKPGQAPKLLIYGATTLETGVPSRFSGSGSGTDYTLTISSLQPEDFATYYCQQSWNTPWTFGQGTKLEIKRLEIQNPDPAVYQLRDSKSSDKSVCLFTDFDSQTNVSQSKDSDVYITDKCVLDMRSMDFKSNSAVAWSNKSDFACANAFNNSIIPEDTFFPSSDVPCDVKLVEKSFETDTNLNFQNLSVIGFRILLLKVAGFNLLMTLRLWSSRAKRSGSGVKQTLNFDLLKLAGDVESNPGPTSTMDWIWRILFLVGAATGAHSGPQVQLVESGGGLVQPGGSLRLSCAASGNINSRNCMGWFRQAPGKGREGVAAIGQVTGRTYYVDSVKGRFTISLDNSKNTLYLQMNSLRAEDTAVYYCAAAPGCLLSALRSADYRNWGQGTLVTVSSGSGGGGSGGGGSGGGGSFEQVQLQQPGAELVKPGASVKMSCKASGYAFSSYWINWMKQKPGQGLEWIGQIYPGDGDTNYNGKFKGRATLTADTSSSTAYMQLSSLTSEDSAVYFCARSITTVVGCAMDYWGQGTSVTVSSTREDLKNVFPPEVAVFEPSKAEIAHTQKATLVCLATGFYPDHVELSWWVNGKEVHSGVCTDPQPLKEQPALNDSRYCLSSRLRVSATFWQNPRNHFRCQVQFYGLSENDEWTQDRAKPVTQIVSAEAWGRADCGITSASYHQGVLSATILYEILLGKATLYAVLVSALVLMAMVKRKDSRG

SEQ ID NO: 43722 - protein, 904 aa, synthetic construct
MALPVTALLLPLALLLHAARPEVQLVESGGGLVQAGGSLRLSCAASGRTFSMGWFRQAPGKEREFVAAITYSGGSPYYADSVKGRFTISRDNAKNTVYLQMNSLKPEDTAVYYCAANPTYGSDWNAENWGQGTQVTVSSGTGGGGSGGGGSGGGGSEFDIQMTQSPSSLSASVGDRVTITCKASDHINNWLAWYQQKPGQAPKLLIYGATTLETGVPSRFSGSGSGTDYTLTISSLQPEDFATYYCQQSWNTPWTFGQGTKLEIKRLEDLKNVFPPEVAVFEPSEAEISHTQKATLVCLATGFYPDHVELSWWVNGKEVHSGVCTDPQPLKEQPALNDSRYCLSSRLRVSATFWQNPRNHFRCQVQFYGLSENDEWTQDRAKPVTQIVSAEAWGRADCGFTSESYQQGVLSATILYEILLGKATLYAVLVSALVLMAMVKRKDSRGRAKRSGSGATNFSLLKQAGDVEENPGPTSTMDWIWRILFLVGAATGAHSGPQVQLVESGGGLVQPGGSLRLSCAASGNINSRNCMGWFRQAPGKGREGVAAIGQVTGRTYYVDSVKGRFTISLDNSKNTLYLQMNSLRAEDTAVYYCAAAPGCLLSALRSADYRNWGQGTLVTVSSGSGGGGSGGGGSGGGGSFEQVQLQQPGAELVKPGASVKMSCKASGYAFSSYWINWMKQKPGQGLEWIGQIYPGDGDTNYNGKFKGRATLTADTSSSTAYMQLSSLTSEDSAVYFCARSITTVVGCAMDYWGQGTSVTVSSTRIQNPDPAVYQLRDSKSSDKSVCLFTDFDSQTNVSQSKDSDVYITDKCVLDMRSMDFKSNSAVAWSNKSDFACANAFNNSIIPEDTFFPSPESSCDVKLVEKSFETDTNLNFQNLSVIGFRILLLKVAGFNLLMTLRLWSS

SEQ ID NO: 43723 - protein, 904 aa, synthetic construct
MALPVTALLLPLALLLHAARPEVQLVESGGGLVQAGGSLRLSCAASGRTFTMGWFRQAPGKEREFVAAISLSPTLAYYADSVKGRFTISRDNAKNTVVLQMNSLKPEDTALYYCAADRKSVMSIRPDYWGQGTQVTVSSGTGGGGSGGGGSGGGGSEFDIQMTQSPSSLSASVGDRVTITCKASDHINNWLAWYQQKPGQAPKLLIYGATTLETGVPSRFSGSGSGTDYTLTISSLQPEDFATYYCQQSWNTPWTFGQGTKLEIKRLEDLKNVFPPEVAVFEPSEAEISHTQKATLVCLATGFYPDHVELSWWVNGKEVHSGVCTDPQPLKEQPALNDSRYCLSSRLRVSATFWQNPRNHFRCQVQFYGLSENDEWTQDRAKPVTQIVSAEAWGRADCGFTSESYQQGVLSATILYEILLGKATLYAVLVSALVLMAMVKRKDSRGRAKRSGSGATNFSLLKQAGDVEENPGPTSTMDWIWRILFLVGAATGAHSGPQVQLVESGGGLVQPGGSLRLSCAASGNINSRNCMGWFRQAPGKGREGVAAIGQVTGRTYYVDSVKGRFTISLDNSKNTLYLQMNSLRAEDTAVYYCAAAPGCLLSALRSADYRNWGQGTLVTVSSGSGGGGSGGGGSGGGGSFEQVQLQQPGAELVKPGASVKMSCKASGYAFSSYWINWMKQKPGQGLEWIGQIYPGDGDTNYNGKFKGRATLTADTSSSTAYMQLSSLTSEDSAVYFCARSITTVVGCAMDYWGQGTSVTVSSTRIQNPDPAVYQLRDSKSSDKSVCLFTDFDSQTNVSQSKDSDVYITDKCVLDMRSMDFKSNSAVAWSNKSDFACANAFNNSIIPEDTFFPSPESSCDVKLVEKSFETDTNLNFQNLSVIGFRILLLKVAGFNLLMTLRLWSS

SEQ ID NO: 43724 - protein, 908 aa, synthetic construct
MALPVTALLLPLALLLHAARPQVQLQESGPGLVKPSQTLSLTCTVSGGSITTGEFYWNWFRQPPGKGLEWMGAIAASGSTTYSPSFESRTSISRDTSKNQFSLKLSSVTAADTAVYYCGRSFGVAAVTTGQNRGQGTLVTVSSGTGGGGSGGGGSGGGGSEFDIQMTQSPSSLSASVGDRVTITCKASDHINNWLAWYQQKPGQAPKLLIYGATTLETGVPSRFSGSGSGTDYTLTISSLQPEDFATYYCQQSWNTPWTFGQGTKLEIKRLEDLKNVFPPEVAVFEPSEAEISHTQKATLVCLATGFYPDHVELSWWVNGKEVHSGVCTDPQPLKEQPALNDSRYCLSSRLRVSATFWQNPRNHFRCQVQFYGLSENDEWTQDRAKPVTQIVSAEAWGRADCGFTSESYQQGVLSATILYEILLGKATLYAVLVSALVLMAMVKRKDSRGRAKRSGSGATNFSLLKQAGDVEENPGPTSTMDWIWRILFLVGAATGAHSGPQVQLVESGGGLVQPGGSLRLSCAASGNINSRNCMGWFRQAPGKGREGVAAIGQVTGRTYYVDSVKGRFTISLDNSKNTLYLQMNSLRAEDTAVYYCAAAPGCLLSALRSADYRNWGQGTLVTVSSGSGGGGSGGGGSGGGGSFEQVQLQQPGAELVKPGASVKMSCKASGYAFSSYWINWMKQKPGQGLEWIGQIYPGDGDTNYNGKFKGRATLTADTSSSTAYMQLSSLTSEDSAVYFCARSITTVVGCAMDYWGQGTSVTVSSTRIQNPDPAVYQLRDSKSSDKSVCLFTDFDSQTNVSQSKDSDVYITDKCVLDMRSMDFKSNSAVAWSNKSDFACANAFNNSIIPEDTFFPSPESSCDVKLVEKSFETDTNLNFQNLSVIGFRILLLKVAGFNLLMTLRLWSS

SEQ ID NO: 43725 - protein, 487 aa, synthetic construct
MALPVTALLLPLALLLHAARPDIQMTQSPSSLSASVGDRVTITCKASDHINNWLAWYQQKPGQAPKLLIYGATTLETGVPSRFSGSGSGTDYTLTISSLQPEDFATYYCQQSWNTPWTFGQGTKLEIKRGGGGSGGGGSGGGGSQVQLQQPGAELVKPGASVKMSCKASGYTFSSYWINWMKQKPGQGLEWIGQIYPGDGDTNYNGKFKGRATLTADTSSSTAYMQLSSLTSEDSAVYFCARSITTVVGCAMDYWGQGTSVTVSSTRKIEVMYPPPYLDNEKSNGTIIHVKGKHLCPSPLFPGPSKPFWVLVVVGGVLACYSLLVTVAFIIFWVRSKRSRLLHSDYMNMTPRRPGPTRKHYQPYAPPRDFAAYRSRVKFSRSADAPAYQQGQNQLYNELNLGRREEYDVLDKRRGRDPEMGGKPRRKNPQEGLYNELQKDKMAEAYSEIGMKGERRRGKGHDGLYQGLSTATKDTYDALHMQALPPR

SEQ ID NO: 43726 - protein, 493 aa, synthetic construct
MALPVTALLLPLALLLHAARPDIQMTQSPSSLSASVGDRVTITCKASDHINNWLAWYQQKPGQAPKLLIYGATTLETGVPSRFSGSGSGTDYTLTISSLQPEDFATYYCQQSWNTPWTFGQGTKLEIKRGGGGSGGGGSGGGGSQVQLQQPGAELVKPGASVKMSCKASGYTFSSYWINWMKQKPGQGLEWIGQIYPGDGDTNYNGKFKGRATLTADTSSSTAYMQLSSLTSEDSAVYFCARSITTVVGCAMDYWGQGTSVTVSSTRAKPTTTPAPRPPTPAPTIASQPLSLRPEACRPAAGGAVHTRGLDFACDIYIWAPLAGTCGVLLLSLVITLYCKRGRKKLLYIFKQPFMRPVQTTQEEDGCSCRFPEEEEGGCELRVKFSRSADAPAYQQGQNQLYNELNLGRREEYDVLDKRRGRDPEMGGKPRRKNPQEGLYNELQKDKMAEAYSEIGMKGERRRGKGHDGLYQGLSTATKDTYDALHMQALPPR

SEQ ID NO: 43727 - protein, 493 aa, synthetic construct
MALPVTALLLPLALLLHAARPQVQLQQPGAELVKPGASVKMSCKASGYTFSSYWINWMKQKPGQGLEWIGQIYPGDGDTNYNGKFKGRATLTADTSSSTAYMQLSSLTSEDSAVYFCARSITTVVGCAMDYWGQGTSVTVSSGGGGSGGGGSGGGGSDIQMTQSPSSLSASVGDRVTITCKASDHINNWLAWYQQKPGQAPKLLIYGATTLETGVPSRFSGSGSGTDYTLTISSLQPEDFATYYCQQSWNTPWTFGQGTKLEIKRTRAKPTTTPAPRPPTPAPTIASQPLSLRPEACRPAAGGAVHTRGLDFACDIYIWAPLAGTCGVLLLSLVITLYCKRGRKKLLYIFKQPFMRPVQTTQEEDGCSCRFPEEEEGGCELRVKFSRSADAPAYQQGQNQLYNELNLGRREEYDVLDKRRGRDPEMGGKPRRKNPQEGLYNELQKDKMAEAYSEIGMKGERRRGKGHDGLYQGLSTATKDTYDALHMQALPPR

SEQ ID NO: 43728 - protein, 626 aa, synthetic construct
MALPVTALLLPLALLLHAARPDIQMTQSPSSLSASVGDRVTITCKASDHINNWLAWYQQKPGQAPKLLIYGATTLETGVPSRFSGSGSGTDYTLTISSLQPEDFATYYCQQSWNTPWTFGQGTKLEIKRLEIQNPDPAVYQLRDSKSSDKSVCLFTDFDSQTNVSQSKDSDVYITDKCVLDMRSMDFKSNSAVAWSNKSDFACANAFNNSIIPEDTFFPSSDVPCDVKLVEKSFETDTNLNFQNLSVIGFRILLLKVAGFNLLMTLRLWSSRAKRSGSGVKQTLNFDLLKLAGDVESNPGPTSMDWIWRILFLVGAATGAHSFEQVQLQQPGAELVKPGASVKMSCKASGYTFSSYWINWMKQKPGQGLEWIGQIYPGDGDTNYNGKFKGRATLTADTSSSTAYMQLSSLTSEDSAVYFCARSITTVVGCAMDYWGQGTSVTVSSTREDLKNVFPPEVAVFEPSKAEIAHTQKATLVCLATGFYPDHVELSWWVNGKEVHSGVCTDPQPLKEQPALNDSRYCLSSRLRVSATFWQNPRNHFRCQVQFYGLSENDEWTQDRAKPVTQIVSAEAWGRADCGITSASYHQGVLSATILYEILLGKATLYAVLVSALVLMAMVKRKDSRG

SEQ ID NO: 43729 - protein, 622 aa, synthetic construct
MALPVTALLLPLALLLHAARPDIQMTQSPSSLSASVGDRVTITCKASDHINNWLAWYQQKPGQAPKLLIYGATTLETGVPSRFSGSGSGTDYTLTISSLQPEDFATYYCQQSWNTPWTFGQGTKLEIKRLEDLKNVFPPEVAVFEPSKAEIAHTQKATLVCLATGFYPDHVELSWWVNGKEVHSGVCTDPQPLKEQPALNDSRYCLSSRLRVSATFWQNPRNHFRCQVQFYGLSENDEWTQDRAKPVTQIVSAEAWGRADCGITSASYHQGVLSATILYEILLGKATLYAVLVSALVLMAMVKRKDSRGRAKRSGSGATNFSLLKQAGDVEENPGPTSMDWIWRILFLVGAATGAHSFEQVQLQQPGAELVKPGASVKMSCKASGYTFSSYWINWMKQKPGQGLEWIGQIYPGDGDTNYNGKFKGRATLTADTSSSTAYMQLSSLTSEDSAVYFCARSITTVVGCAMDYWGQGTSVTVSSTRIQNPDPAVYQLRDSKSSDKSVCLFTDFDSQTNVSQSKDSDVYITDKCVLDMRSMDFKSNSAVAWSNKSDFACANAFNNSIIPEDTFFPSSDVPCDVKLVEKSFETDTNLNFQNLSVIGFRILLLKVAGFNLLMTLRLWSS

SEQ ID NO: 43730 - protein, 622 aa, synthetic construct
MALPVTALLLPLALLLHAARPDIQMTQSPSSLSASVGDRVTITCKASDHINNWLAWYQQKPGQAPKLLIYGATTLETGVPSRFSGSGSGTDYTLTISSLQPEDFATYYCQQSWNTPWTFGQGTKLEIKRLEDLKNVFPPEVAVFEPSEAEISHTQKATLVCLATGFYPDHVELSWWVNGKEVHSGVCTDPQPLKEQPALNDSRYCLSSRLRVSATFWQNPRNHFRCQVQFYGLSENDEWTQDRAKPVTQIVSAEAWGRADCGFTSESYQQGVLSATILYEILLGKATLYAVLVSALVLMAMVKRKDSRGRAKRSGSGATNFSLLKQAGDVEENPGPTSMDWIWRILFLVGAATGAHSFEQVQLQQPGAELVKPGASVKMSCKASGYTFSSYWINWMKQKPGQGLEWIGQIYPGDGDTNYNGKFKGRATLTADTSSSTAYMQLSSLTSEDSAVYFCARSITTVVGCAMDYWGQGTSVTVSSTRIQNPDPAVYQLRDSKSSDKSVCLFTDFDSQTNVSQSKDSDVYITDKCVLDMRSMDFKSNSAVAWSNKSDFACANAFNNSIIPEDTFFPSPESSCDVKLVEKSFETDTNLNFQNLSVIGFRILLLKVAGFNLLMTLRLWSS

SEQ ID NO: 43731 - protein, 626 aa, synthetic construct
MALPVTALLLPLALLLHAARPDIQMTQSPSSLSASVGDRVTITCKASDHINNWLAWYQQKPGQAPKLLIYGATTLETGVPSRFSGSGSGTDYTLTISSLQPEDFATYYCQQSWNTPWTFGQGTKLEIKRLEIQNPDPAVYQLRDSKSSDKSVCLFTDFDSQTNVSQSKDSDVYITDKCVLDMRSMDFKSNSAVAWSNKSDFACANAFNNSIIPEDTFFPSPESSCDVKLVEKSFETDTNLNFQNLSVIGFRILLLKVAGFNLLMTLRLWSSRAKRSGSGVKQTLNFDLLKLAGDVESNPGPTSMDWIWRILFLVGAATGAHSFEQVQLQQPGAELVKPGASVKMSCKASGYTFSSYWINWMKQKPGQGLEWIGQIYPGDGDTNYNGKFKGRATLTADTSSSTAYMQLSSLTSEDSAVYFCARSITTVVGCAMDYWGQGTSVTVSSTREDLKNVFPPEVAVFEPSEAEISHTQKATLVCLATGFYPDHVELSWWVNGKEVHSGVCTDPQPLKEQPALNDSRYCLSSRLRVSATFWQNPRNHFRCQVQFYGLSENDEWTQDRAKPVTQIVSAEAWGRADCGFTSESYQQGVLSATILYEILLGKATLYAVLVSALVLMAMVKRKDSRG

SEQ ID NO: 43732 - protein, 638 aa, synthetic construct
MALPVTALLLPLALLLHAARPLEEDLKNVFPPEVAVFEPSKAEIAHTQKATLVCLATGFYPDHVELSWWVNGKEVHSGVCTDPQPLKEQPALNDSRYCLSSRLRVSATFWQNPRNHFRCQVQFYGLSENDEWTQDRAKPVTQIVSAEAWGRADCGITSASYHQGVLSATILYEILLGKATLYAVLVSALVLMAMVKRKDSRGRAKRSGSGATNFSLLKQAGDVEENPGPTSMALPVTALLLPLALLLHAARPDIQMTQSPSSLSASVGDRVTITCKASDHINNWLAWYQQKPGQAPKLLIYGATTLETGVPSRFSGSGSGTDYTLTISSLQPEDFATYYCQQSWNTPWTFGQGTKLEIKRGGGGSGGGGSGGGGSQVQLQQPGAELVKPGASVKMSCKASGYTFSSYWINWMKQKPGQGLEWIGQIYPGDGDTNYNGKFKGRATLTADTSSSTAYMQLSSLTSEDSAVYFCARSITTVVGCAMDYWGQGTSVTVSSTRIQNPDPAVYQLRDSKSSDKSVCLFTDFDSQTNVSQSKDSDVYITDKCVLDMRSMDFKSNSAVAWSNKSDFACANAFNNSIIPEDTFFPSSDVPCDVKLVEKSFETDTNLNFQNLSVIGFRILLLKVAGFNLLMTLRLWSS

SEQ ID NO: 43733 - protein, 645 aa, synthetic construct
MALPVTALLLPLALLLHAARPLEGSGDRPDPAVYQLRDSKSSDKSVCLFTDFDSQTNVSQSKDSDVYITDKCVLDMRSMDFKSNSAVAWSNKSDFACANAFNNSIIPEDTFFPSPESSCDVKLVEKSFETDTNLNFQNLSVIGFRILLLKVAGFNLLMTLRLWSSSSRAKRSGSGVKQTLNFDLLKLAGDVESNPGPTSMALPVTALLLPLALLLHAARPDIQMTQSPSSLSASVGDRVTITCKASDHINNWLAWYQQKPGQAPKLLIYGATTLETGVPSRFSGSGSGTDYTLTISSLQPEDFATYYCQQSWNTPWTFGQGTKLEIKRGGGGSGGGGSGGGGSQVQLQQPGAELVKPGASVKMSCKASGYTFSSYWINWMKQKPGQGLEWIGQIYPGDGDTNYNGKFKGRATLTADTSSSTAYMQLSSLTSEDSAVYFCARSITTVVGCAMDYWGQGTSVTVSSTREDLKNVFPPEVAVFEPSEAEISHTQKATLVCLATGFYPDHVELSWWVNGKEVHSGVCTDPQPLKEQPALNDSRYCLSSRLRVSATFWQNPRNHFRCQVQFYGLSENDEWTQDRAKPVTQIVSAEAWGRADCGFTSESYQQGVLSATILYEILLGKATLYAVLVSALVLMAMVKRKDSRG

SEQ ID NO: 43734 - protein, 622 aa, synthetic construct
MALPVTALLLPLALLLHAARPDIQMTQSPSSLSASVGDRVTITCKASDHINNWLAWYQQKPGQAPKLLIYGATTLETGVPSRFSGSGSGTDYTLTISSLQPEDFATYYCQQSWNTPWTFGQGTKLEIKRLEDLKNVFPPEVAVFEPSEAEISHTQKATLVCLATGFYPDHVELSWWVNGKEVHSGVSTDPQPLKEQPALNDSRYCLSSRLRVSATFWQNPRNHFRCQVQFYGLSENDEWTQDRAKPVTQIVSAEAWGRADCGFTSESYQQGVLSATILYEILLGKATLYAVLVSALVLMAMVKRKDSRGRAKRSGSGATNFSLLKQAGDVEENPGPTSMDWIWRILFLVGAATGAHSFEQVQLQQPGAELVKPGASVKMSCKASGYTFSSYWINWMKQKPGQGLEWIGQIYPGDGDTNYNGKFKGRATLTADTSSSTAYMQLSSLTSEDSAVYFCARSITTVVGCAMDYWGQGTSVTVSSTRIQNPDPAVYQLRDSKSSDKSVCLFTDFDSQTNVSQSKDSDVYITDKTVLDMRSMDFKSNSAVAWSNKSDFACANAFNNSIIPEDTFFPSPESSCDVKLVEKSFETDTNLNFQNLSVIGFRILLLKVAGFNLLMTLRLWSS

SEQ ID NO: 43735 - protein, 630 aa, synthetic construct
MALPVTALLLPLALLLHAARPDIQMTQSPSSLSASVGDRVTITCKASDHINNWLAWYQQKPGQAPKLLIYGATTLETGVPSRFSGSGSGTDYTLTISSLQPEDFATYYCQQSWNTPWTFGQGTKLEIKRLEDKQLDADVSPKPTIFLPSIAETKLQKAGTYLCLLEKFFPDVIKIHWQEKKSNTILGSQEGNTMKTNDTYMKFSWLTVPEKSLDKEHRCIVRHENNKNGVDQEIIFPPIKTDVITMDPKDNCSKDANDTLLLQLTNTSAYYMYLLLLLKSVVYFAIITCCLLRRTAFCCNGEKSRAKRSGSGATNFSLLKQAGDVEENPGPTSMDWIWRILFLVGAATGAHSFEQVQLQQPGAELVKPGASVKMSCKASGYTFSSYWINWMKQKPGQGLEWIGQIYPGDGDTNYNGKFKGRATLTADTSSSTAYMQLSSLTSEDSAVYFCARSITTVVGCAMDYWGQGTSVTVSSTRSQPHTKPSVFVMKNGTNVACLVKEFYPKDIRINLVSSKKITEFDPAIVISPSGKYNAVKLGKYEDSNSVTCSVQHDNKTVHSTDFEVKTDSTDHVKPKETENTKQPSKSCHKPKAIVHTEKVNMMSLTVLGLRMLFAKTVAVNFLLTAKLFFL

SEQ ID NO: 43736 - protein, 630 aa, synthetic construct
MALPVTALLLPLALLLHAARPDIQMTQSPSSLSASVGDRVTITCKASDHINNWLAWYQQKPGQAPKLLIYGATTLETGVPSRFSGSGSGTDYTLTISSLQPEDFATYYCQQSWNTPWTFGQGTKLEIKRLESQPHTKPSVFVMKNGTNVACLVKEFYPKDIRINLVSSKKITEFDPAIVISPSGKYNAVKLGKYEDSNSVTCSVQHDNKTVHSTDFEVKTDSTDHVKPKETENTKQPSKSCHKPKAIVHTEKVNMMSLTVLGLRMLFAKTVAVNFLLTAKLFFLRAKRSGSGATNFSLLKQAGDVEENPGPTSMDWIWRILFLVGAATGAHSFEQVQLQQPGAELVKPGASVKMSCKASGYTFSSYWINWMKQKPGQGLEWIGQIYPGDGDTNYNGKFKGRATLTADTSSSTAYMQLSSLTSEDSAVYFCARSITTVVGCAMDYWGQGTSVTVSSTRDKQLDADVSPKPTIFLPSIAETKLQKAGTYLCLLEKFFPDVIKIHWQEKKSNTILGSQEGNTMKTNDTYMKFSWLTVPEKSLDKEHRCIVRHENNKNGVDQEIIFPPIKTDVITMDPKDNCSKDANDTLLLQLTNTSAYYMYLLLLLKSVVYFAIITCCLLRRTAFCCNGEKS

SEQ ID NO: 43737 - protein, 645 aa, synthetic construct
MALPVTALLLPLALLLHAARPLEDKQLDADVSPKPTIFLPSIAETKLQKAGTYLCLLEKFFPDVIKIHWQEKKSNTILGSQEGNTMKTNDTYMKFSWLTVPEKSLDKEHRCIVRHENNKNGVDQEIIFPPIKTDVITMDPKDNCSKDANDTLLLQLTNTSAYYMYLLLLLKSVVYFAIITCCLLRRTAFCCNGEKSRAKRSGSGATNFSLLKQAGDVEENPGPTSMALPVTALLLPLALLLHAARPDIQMTQSPSSLSASVGDRVTITCKASDHINNWLAWYQQKPGQAPKLLIYGATTLETGVPSRFSGSGSGTDYTLTISSLQPEDFATYYCQQSWNTPWTFGQGTKLEIKRGGGGSGGGGSGGGGSQVQLQQPGAELVKPGASVKMSCKASGYTFSSYWINWMKQKPGQGLEWIGQIYPGDGDTNYNGKFKGRATLTADTSSSTAYMQLSSLTSEDSAVYFCARSITTVVGCAMDYWGQGTSVTVSSTRSQPHTKPSVFVMKNGTNVACLVKEFYPKDIRINLVSSKKITEFDPAIVISPSGKYNAVKLGKYEDSNSVTCSVQHDNKTVHSTDFEVKTDSTDHVKPKETENTKQPSKSCHKPKAIVHTEKVNMMSLTVLGLRMLFAKTVAVNFLLTAKLFFL

SEQ ID NO: 43738 - protein, 799 aa, synthetic construct
MALPVTALLLPLALLLHAARPDIQMTQSPSSLSASVGDRVTITCKASDHINNWLAWYQQKPGQAPKLLIYGATTLETGVPSRFSGSGSGTDYTLTISSLQPEDFATYYCQQSWNTPWTFGQGTKLEIKRGQPKANPTVTLFPPSSEELQANKATLVCLISDFYPGAVTVAWKADGSPVKAGVETTKPSKQSNNKYAASSYLSLTPEQWKSHRSYSCQVTHEGSTVEKTVAPTECSGSQSFGLLDPKLCYLLDGILFIYGVILTALFLRVKFSRSADAPAYQQGQNQLYNELNLGRREEYDVLDKRRGRDPEMGGKPQRRKNPQEGLYNELQKDKMAEAYSEIGMKGERRRGKGHDGLYQGLSTATKDTYDALHMQALPPRRAKRSGSGATNFSLLKQAGDVEENPGPTSMDWIWRILFLVGAATGAHSFEQVQLQQPGAELVKPGASVKMSCKASGYTFSSYWINWMKQKPGQGLEWIGQIYPGDGDTNYNGKFKGRATLTADTSSSTAYMQLSSLTSEDSAVYFCARSITTVVGCAMDYWGQGTSVTVSSASTKGPSVFPLAPSSKSTSGGTAALGCLVKDYFPEPVTVSWNSGALTSGVHTFPAVLQSSGLYSLSSVVTVPSSSLGTQTYICNVNHKPSNTKVDKRVEPKSCGTQSFGLLDPKLCYLLDGILFIYGVILTALFLRVKFSRSADAPAYQQGQNQLYNELNLGRREEYDVLDKRRGRDPEMGGKPQRRKNPQEGLYNELQKDKMAEAYSEIGMKGERRRGKGHDGLYQGLSTATKDTYDALHMQALPPR

SEQ ID NO: 43739 - protein, 818 aa, synthetic construct
MALPVTALLLPLALLLHAARPDIQMTQSPSSLSASVGDRVTITCKASDHINNWLAWYQQKPGQAPKLLIYGATTLETGVPSRFSGSGSGTDYTLTISSLQPEDFATYYCQQSWNTPWTFGQGTKLEIKRLEDLKNVFPPEVAVFEPSEAEISHTQKATLVCLATGFYPDHVELSWWVNGKEVHSGVSTDPQPLKEQPALNDSRYCLSSRLRVSATFWQNPRNHFRCQVQFYGLSENDEWTQDRAKPVTQIVSAEAWGRADCGSQSFGLLDPKLCYLLDGILFIYGVILTALFLRVKFSRSADAPAYQQGQNQLYNELNLGRREEYDVLDKRRGRDPEMGGKPQRRKNPQEGLYNELQKDKMAEAYSEIGMKGERRRGKGHDGLYQGLSTATKDTYDALHMQALPPRRAKRSGSGATNFSLLKQAGDVEENPGPTSMDWIWRILFLVGAATGAHSFEQVQLQQPGAELVKPGASVKMSCKASGYTFSSYWINWMKQKPGQGLEWIGQIYPGDGDTNYNGKFKGRATLTADTSSSTAYMQLSSLTSEDSAVYFCARSITTVVGCAMDYWGQGTSVTVSSTRIQNPDPAVYQLRDSKSSDKSVCLFTDFDSQTNVSQSKDSDVYITDKTVLDMRSMDFKSNSAVAWSNKSDFACANAFNNSIIPEDTFFPSPESSCGTQSFGLLDPKLCYLLDGILFIYGVILTALFLRVKFSRSADAPAYQQGQNQLYNELNLGRREEYDVLDKRRGRDPEMGGKPQRRKNPQEGLYNELQKDKMAEAYSEIGMKGERRRGKGHDGLYQGLSTATKDTYDALHMQALPPR

SEQ ID NO: 43740 - protein, 860 aa, synthetic construct
MALPVTALLLPLALLLHAARPDIQMTQSPSSLSASVGDRVTITCKASDHINNWLAWYQQKPGQAPKLLIYGATTLETGVPSRFSGSGSGTDYTLTISSLQPEDFATYYCQQSWNTPWTFGQGTKLEIKRLEEDLKNVFPPEVAVFEPSEAEISHTQKATLVCLATGFYPDHVELSWWVNGKEVHSGVSTDPQPLKEQPALNDSRYCLSSRLRVSATFWQNPRNHFRCQVQFYGLSENDEWTQDRAKPVTQIVSAEAWGRADCGSQSFGLLDPKLCYLLDGILFIYGVILTALFLRVKFSRSADAPAYQQGQNQLYNELNLGRREEYDVLDKRRGRDPEMGGKPQRRKNPQEGLYNELQKDKMAEAYSEIGMKGERRRGKGHDGLYQGLSTATKDTYDALHMQALPPRRAKRSGSGATNFSLLKQAGDVEENPGPTSMDWIWRILFLVGAATGAHSFEQVQLQQPGAELVKPGASVKMSCKASGYTFSSYWINWMKQKPGQGLEWIGQIYPGDGDTNYNGKFKGRATLTADTSSSTAYMQLSSLTSEDSAVYFCARSITTVVGCAMDYWGQGTSVTVSSTRIQNPDPAVYQLRDSKSSDKSVCLFTDFDSQTNVSQSKDSDVYITDKTVLDMRSMDFKSNSAVAWSNKSDFACANAFNNSIIPEDTFFPSPESSCGTQSFGLLDPKLCYLLDGILFIYGVILTALFLRSKRSRLLHSDYMNMTPRRPGPTRKHYQPYAPPRDFAAYRSRVKFSRSADAPAYQQGQNQLYNELNLGRREEYDVLDKRRGRDPEMGGKPQRRKNPQEGLYNELQKDKMAEAYSEIGMKGERRRGKGHDGLYQGLSTATKDTYDALHMQALPPR

SEQ ID NO: 43741 - protein, 903 aa, synthetic construct
MALPVTALLLPLALLLHAARPDIQMTQSPSSLSASVGDRVTITCKASDHINNWLAWYQQKPGQAPKLLIYGATTLETGVPSRFSGSGSGTDYTLTISSLQPEDFATYYCQQSWNTPWTFGQGTKLEIKRLEEDLKNVFPPEVAVFEPSEAEISHTQKATLVCLATGFYPDHVELSWWVNGKEVHSGVSTDPQPLKEQPALNDSRYCLSSRLRVSATFWQNPRNHFRCQVQFYGLSENDEWTQDRAKPVTQIVSAEAWGRADCGSQSFGLLDPKLCYLLDGILFIYGVILTALFLKRGRKKLLYIFKQPFMRPVQTTQEEDGCSCRFPEEEEGGCELRVKFSRSADAPAYQQGQNQLYNELNLGRREEYDVLDKRRGRDPEMGGKPQRRKNPQEGLYNELQKDKMAEAYSEIGMKGERRRGKGHDGLYQGLSTATKDTYDALHMQALPPRRAKRSGSGATNFSLLKQAGDVEENPGPTSMDWIWRILFLVGAATGAHSFEQVQLQQPGAELVKPGASVKMSCKASGYTFSSYWINWMKQKPGQGLEWIGQIYPGDGDTNYNGKFKGRATLTADTSSSTAYMQLSSLTSEDSAVYFCARSITTVVGCAMDYWGQGTSVTVSSTRIQNPDPAVYQLRDSKSSDKSVCLFTDFDSQTNVSQSKDSDVYITDKTVLDMRSMDFKSNSAVAWSNKSDFACANAFNNSIIPEDTFFPSPESSCGTQSFGLLDPKLCYLLDGILFIYGVILTALFLKRGRKKLLYIFKQPFMRPVQTTQEEDGCSCRFPEEEEGGCELRVKFSRSADAPAYQQGQNQLYNELNLGRREEYDVLDKRRGRDPEMGGKPQRRKNPQEGLYNELQKDKMAEAYSEIGMKGERRRGKGHDGLYQGLSTATKDTYDALHMQALPPR

SEQ ID NO: 43742 - protein, 590 aa, synthetic construct
MALPVTALLLPLALLLHAARPDIQMTQSPSSLSASVGDRVTITCKASDHINNWLAWYQQKPGQAPKLLIYGATTLETGVPSRFSGSGSGTDYTLTISSLQPEDFATYYCQQSWNTPWTFGQGTKLEIKRLEQSFGLLDPKLCYLLDGILFIYGVILTALFLRVKFSRSADAPAYQQGQNQLYNELNLGRREEYDVLDKRRGRDPEMGGKPQRRKNPQEGLYNELQKDKMAEAYSEIGMKGERRRGKGHDGLYQGLSTATKDTYDALHMQALPPRRAKRSGSGATNFSLLKQAGDVEENPGPTSMDWIWRILFLVGAATGAHSFEQVQLQQPGAELVKPGASVKMSCKASGYTFSSYWINWMKQKPGQGLEWIGQIYPGDGDTNYNGKFKGRATLTADTSSSTAYMQLSSLTSEDSAVYFCARSITTVVGCAMDYWGQGTSVTVSSTRQSFGLLDPKLCYLLDGILFIYGVILTALFLRVKFSRSADAPAYQQGQNQLYNELNLGRREEYDVLDKRRGRDPEMGGKPQRRKNPQEGLYNELQKDKMAEAYSEIGMKGERRRGKGHDGLYQGLSTATKDTYDALHMQALPPR

SEQ ID NO: 43743 - protein, 648 aa, synthetic construct
MALPVTALLLPLALLLHAARPDIQMTQSPSSLSASVGDRVTITCKASDHINNWLAWYQQKPGQAPKLLIYGATTLETGVPSRFSGSGSGTDYTLTISSLQPEDFATYYCQQSWNTPWTFGQGTKLEIKRLEGQPKANPTVTLFPPSSEELQANKATLVCLISDFYPGAVTVAWKADGSPVKAGVETTKPSKQSNNKYAASSYLSLTPEQWKSHRSYSCQVTHEGSTVEKTVAPTECSPIKTDVITMDPKDNCSKDANDTLLLQLTNTSAYYMYLLLLLKSVVYFAIITCCLLRRTAFCCNGEKSRAKRSGSGATNFSLLKQAGDVEENPGPTSMDWIWRILFLVGAATGAHSFEQVQLQQPGAELVKPGASVKMSCKASGYTFSSYWINWMKQKPGQGLEWIGQIYPGDGDTNYNGKFKGRATLTADTSSSTAYMQLSSLTSEDSAVYFCARSITTVVGCAMDYWGQGTSVTVSSTRASTKGPSVFPLAPSSKSTSGGTAALGCLVKDYFPEPVTVSWNSGALTSGVHTFPAVLQSSGLYSLSSVVTVPSSSLGTQTYICNVNHKPSNTKVDKRVEPKSCEVKTDSTDHVKPKETENTKQPSKSCHKPKAIVHTEKVNMMSLTVLGLRMLFAKTVAVNFLLTAKLFFL

SEQ ID NO: 43744 - protein, 626 aa, synthetic construct
MALPVTALLLPLALLLHAARPDIQMTQSPSSLSASVGDRVTITCKASDHINNWLAWYQQKPGQAPKLLIYGATTLETGVPSRFSGSGSGTDYTLTISSLQPEDFATYYCQQSWNTPWTFGQGTKLEIKRLEGQPKANPTVTLFPPSSEELQANKATLVCLISDFYPGAVTVAWKADGSPVKAGVETTKPSKQSNNKYAASSYLSLTPEQWKSHRSYSCQVTHEGSTVEKTVAPTECSGRADCGITSASYHQGVLSATILYEILLGKATLYAVLVSALVLMAMVKRKDSRGRAKRSGSGATNFSLLKQAGDVEENPGPTSMDWIWRILFLVGAATGAHSFEQVQLQQPGAELVKPGASVKMSCKASGYTFSSYWINWMKQKPGQGLEWIGQIYPGDGDTNYNGKFKGRATLTADTSSSTAYMQLSSLTSEDSAVYFCARSITTVVGCAMDYWGQGTSVTVSSTRASTKGPSVFPLAPSSKSTSGGTAALGCLVKDYFPEPVTVSWNSGALTSGVHTFPAVLQSSGLYSLSSVVTVPSSSLGTQTYICNVNHKPSNTKVDKRVEPKSCIPEDTFFPSSDVPCDVKLVEKSFETDTNLNFQNLSVIGFRILLLKVAGFNLLMTLRLWSS

SEQ ID NO: 43745 - protein, 626 aa, synthetic construct
MALPVTALLLPLALLLHAARPDIQMTQSPSSLSASVGDRVTITCKASDHINNWLAWYQQKPGQAPKLLIYGATTLETGVPSRFSGSGSGTDYTLTISSLQPEDFATYYCQQSWNTPWTFGQGTKLEIKRLEGQPKANPTVTLFPPSSEELQANKATLVCLISDFYPGAVTVAWKADGSPVKAGVETTKPSKQSNNKYAASSYLSLTPEQWKSHRSYSCQVTHEGSTVEKTVAPTECSGRADCGFTSESYQQGVLSATILYEILLGKATLYAVLVSALVLMAMVKRKDSRGRAKRSGSGATNFSLLKQAGDVEENPGPTSMDWIWRILFLVGAATGAHSFEQVQLQQPGAELVKPGASVKMSCKASGYTFSSYWINWMKQKPGQGLEWIGQIYPGDGDTNYNGKFKGRATLTADTSSSTAYMQLSSLTSEDSAVYFCARSITTVVGCAMDYWGQGTSVTVSSTRASTKGPSVFPLAPSSKSTSGGTAALGCLVKDYFPEPVTVSWNSGALTSGVHTFPAVLQSSGLYSLSSVVTVPSSSLGTQTYICNVNHKPSNTKVDKRVEPKSCIPEDTFFPSPESSCDVKLVEKSFETDTNLNFQNLSVIGFRILLLKVAGFNLLMTLRLWSS

SEQ ID NO: 43746 - protein, 452 aa, synthetic construct
MALPVTALLLPLALLLHAARPDIQMTQSPSSLSASVGDRVTITCKASDHINNWLAWYQQKPGQAPKLLIYGATTLETGVPSRFSGSGSGTDYTLTISSLQPEDFATYYCQQSWNTPWTFGQGTKLEIKRGGGGSGGGGSGGGGSQVQLQQPGAELVKPGASVKMSCKASGYTFSSYWINWMKQKPGQGLEWIGQIYPGDGDTNYNGKFKGRATLTADTSSSTAYMQLSSLTSEDSAVYFCARSITTVVGCAMDYWGQGTSVTVSSTRDGNEEMGGITQTPYKVSISGTTVILTCPQYPGSEILWQHNDKNIGGDEDDKNIGSDEDHLSLKEFSELEQSGYYVCYPRGSKPEDANFYLYLRARVCENCMEMDVMSVATIVIVDICITGGLLLLVYYWSKNRKAKAKPVTRGAGAGGRQRGQNKERPPPVPNPDYEPIRKGQRDLYSGLNQRRI

SEQ ID NO: 43747 - protein, 417 aa, synthetic construct
MALPVTALLLPLALLLHAARPDIQMTQSPSSLSASVGDRVTITCKASDHINNWLAWYQQKPGQAPKLLIYGATTLETGVPSRFSGSGSGTDYTLTISSLQPEDFATYYCQQSWNTPWTFGQGTKLEIKRGGGGSGGGGSGGGGSQVQLQQPGAELVKPGASVKMSCKASGYTFSSYWINWMKQKPGQGLEWIGQIYPGDGDTNYNGKFKGRATLTADTSSSTAYMQLSSLTSEDSAVYFCARSITTVVGCAMDYWGQGTSVTVSSTRFKIPIEELEDRVFVNCNTSITWVEGTVGTLLSDITRLDLGKRILDPRGIYRCNGTDIYKDKESTVQVHYRMCQSCVELDPATVAGIIVTDVIATLLLALGVFCFAGHETGRLSGAADTQALLRNDQVYQPLRDRDDAQYSHLGGNWARNK

SEQ ID NO: 43748 - protein, 427 aa, synthetic construct
MALPVTALLLPLALLLHAARPDIQMTQSPSSLSASVGDRVTITCKASDHINNWLAWYQQKPGQAPKLLIYGATTLETGVPSRFSGSGSGTDYTLTISSLQPEDFATYYCQQSWNTPWTFGQGTKLEIKRGGGGSGGGGSGGGGSQVQLQQPGAELVKPGASVKMSCKASGYTFSSYWINWMKQKPGQGLEWIGQIYPGDGDTNYNGKFKGRATLTADTSSSTAYMQLSSLTSEDSAVYFCARSITTVVGCAMDYWGQGTSVTVSSTRQSIKGNHLVKVYDYQEDGSVLLTCDAEAKNITWFKDGKMIGFLTEDKKKWNLGSNAKDPRGMYQCKGSQNKSKPLQVYYRMCQNCIELNAATISGFLFAEIVSIFVLAVGVYFIAGQDGVRQSRASDKQTLLPNDQLYQPLKDREDDQYSHLQGNQLRRN

SEQ ID NO: 43749 - protein, 410 aa, synthetic construct
MALPVTALLLPLALLLHAARPDIQMTQSPSSLSASVGDRVTITCKASDHINNWLAWYQQKPGQAPKLLIYGATTLETGVPSRFSGSGSGTDYTLTISSLQPEDFATYYCQQSWNTPWTFGQGTKLEIKRGGGGSGGGGSGGGGSQVQLQQPGAELVKPGASVKMSCKASGYTFSSYWINWMKQKPGQGLEWIGQIYPGDGDTNYNGKFKGRATLTADTSSSTAYMQLSSLTSEDSAVYFCARSITTVVGCAMDYWGQGTSVTVSSTRQSFGLLDPKLCYLLDGILFIYGVILTALFLRVKFSRSADAPAYQQGQNQLYNELNLGRREEYDVLDKRRGRDPEMGGKPQRRKNPQEGLYNELQKDKMAEAYSEIGMKGERRRGKGHDGLYQGLSTATKDTYDALHMQALPPR

SEQ ID NO: 43750 - protein, 505 aa, synthetic construct
MALPVTALLLPLALLLHAARPDIQMTQSPSSLSASVGDRVTITCKASDHINNWLAWYQQKPGQAPKLLIYGATTLETGVPSRFSGSGSGTDYTLTISSLQPEDFATYYCQQSWNTPWTFGQGTKLEIKRGGGGSGGGGSGGGGSQVQLQQPGAELVKPGASVKMSCKASGYTFSSYWINWMKQKPGQGLEWIGQIYPGDGDTNYNGKFKGRATLTADTSSSTAYMQLSSLTSEDSAVYFCARSITTVVGCAMDYWGQGTSVTVSSTRGMRTEDLPKAVVFLEPQWYRVLEKDSVTLKCQGAYSPEDNSTQWFHNESLISSQASSYFIDAATVDDSGEYRCQTNLSTLSDPVQLEVHIGWLLLQAPRWVFKEEDPIHLRCHSWKNTALHKVTYLQNGKGRKYFHHNSDFYIPKATLKDSGSYFCRGLVGSKNVSSETVNITITQGLAVPTISSFFPPGYQVSFCLVMVLLFAVDTGLYFSVKTNIRSSTRDWKDHKFKWRKDPQDK

SEQ ID NO: 43751 - protein, 480 aa, synthetic construct
MALPVTALLLPLALLLHAARPDIQMTQSPSSLSASVGDRVTITCKASDHINNWLAWYQQKPGQAPKLLIYGATTLETGVPSRFSGSGSGTDYTLTISSLQPEDFATYYCQQSWNTPWTFGQGTKLEIKRGGGGSGGGGSGGGGSQVQLQQPGAELVKPGASVKMSCKASGYTFSSYWINWMKQKPGQGLEWIGQIYPGDGDTNYNGKFKGRATLTADTSSSTAYMQLSSLTSEDSAVYFCARSITTVVGCAMDYWGQGTSVTVSSTRGMRTEDLPKAVVFLEPQWYRVLEKDSVTLKCQGAYSPEDNSTQWFHNESLISSQASSYFIDAATVDDSGEYRCQTNLSTLSDPVQLEVHIGWLLLQAPRWVFKEEDPIHLRCHSWKNTALHKVTYLQNGKGRKYFHHNSDFYIPKATLKDSGSYFCRGLVGSKNVSSETVNITITQGLAVPTISSFFPPGYQVSFCLVMVLLFAVDTGLYFSV

SEQ ID NO: 43752 - protein, 481 aa, synthetic construct
MALPVTALLLPLALLLHAARPDIQMTQSPSSLSASVGDRVTITCKASDHINNWLAWYQQKPGQAPKLLIYGATTLETGVPSRFSGSGSGTDYTLTISSLQPEDFATYYCQQSWNTPWTFGQGTKLEIKRGGGGSGGGGSGGGGSQVQLQQPGAELVKPGASVKMSCKASGYTFSSYWINWMKQKPGQGLEWIGQIYPGDGDTNYNGKFKGRATLTADTSSSTAYMQLSSLTSEDSAVYFCARSITTVVGCAMDYWGQGTSVTVSSTRGMRTEDLPKAVVFLEPQWYRVLEKDSVTLKCQGAYSPEDNSTQWFHNESLISSQASSYFIDAATVDDSGEYRCQTNLSTLSDPVQLEVHIGWLLLQAPRWVFKEEDPIHLRCHSWKNTALHKVTYLQNGKGRKYFHHNSDFYIPKATLKDSGSYFCRGLVGSKNVSSETVNITITQGLAVPTISSFFPPGYQVSFCLVMVLLFAVDTGLYFSVK

SEQ ID NO: 43753 - protein, 725 aa, synthetic construct
MALPVTALLLPLALLLHAARPDIQMTQSPSSLSASVGDRVTITCKASDHINNWLAWYQQKPGQAPKLLIYGATTLETGVPSRFSGSGSGTDYTLTISSLQPEDFATYYCQQSWNTPWTFGQGTKLEIKRLEGQPKANPTVTLFPPSSEELQANKATLVCLISDFYPGAVTVAWKADGSPVKAGVETTKPSKQSNNKYAASSYLSLTPEQWKSHRSYSCQVTHEGSTVEKTVAPTECSGSQSFGLLDPKLCYLLDGILFIYGVILTALFLRVKFSRSADAPAYQQGQNQLYNELNLGRREEYDVLDKRRGRDPEMGGKPQRRKNPQEGLYNELQKDKMAEAYSEIGMKGERRRGKGHDGLYQGLSTATKDTYDALHMQALPPRRAKRSGSGATNFSLLKQAGDVEENPGPTSMDWIWRILFLVGAATGAHSFEQVQLQQPGAELVKPGASVKMSCKASGYTFSSYWINWMKQKPGQGLEWIGQIYPGDGDTNYNGKFKGRATLTADTSSSTAYMQLSSLTSEDSAVYFCARSITTVVGCAMDYWGQGTSVTVSSTRASTKGPSVFPLAPSSKSTSGGTAALGCLVKDYFPEPVTVSWNSGALTSGVHTFPAVLQSSGLYSLSSVVTVPSSSLGTQTYICNVNHKPSNTKVDKRVEPKSCGTITQGLAVSTISSFFPPGYQVSFCLVMVLLFAVDTGLYFSVKTNIRSSTRDWKDHKFKWRKDPQDK

SEQ ID NO: 43754 - protein, 740 aa, synthetic construct
MALPVTALLLPLALLLHAARPDIQMTQSPSSLSASVGDRVTITCKASDHINNWLAWYQQKPGQAPKLLIYGATTLETGVPSRFSGSGSGTDYTLTISSLQPEDFATYYCQQSWNTPWTFGQGTKLEIKRLEDLKNVFPPEVAVFEPSEAEISHTQKATLVCLATGFYPDHVELSWWVNGKEVHSGVSTDPQPLKEQPALNDSRYCLSSRLRVSATFWQNPRNHFRCQVQFYGLSENDEWTQDRAKPVTQIVSAEAWGRADCGSQSFGLLDPKLCYLLDGILFIYGVILTALFLRVKFSRSADAPAYQQGQNQLYNELNLGRREEYDVLDKRRGRDPEMGGKPQRRKNPQEGLYNELQKDKMAEAYSEIGMKGERRRGKGHDGLYQGLSTATKDTYDALHMQALPPRRAKRSGSGATNFSLLKQAGDVEENPGPTSMDWIWRILFLVGAATGAHSFEQVQLQQPGAELVKPGASVKMSCKASGYTFSSYWINWMKQKPGQGLEWIGQIYPGDGDTNYNGKFKGRATLTADTSSSTAYMQLSSLTSEDSAVYFCARSITTVVGCAMDYWGQGTSVTVSSTRIQNPDPAVYQLRDSKSSDKSVCLFTDFDSQTNVSQSKDSDVYITDKTVLDMRSMDFKSNSAVAWSNKSDFACANAFNNSIIPEDTFFPSPESSCGTITQGLAVSTISSFFPPGYQVSFCLVMVLLFAVDTGLYFSVKTNIRSSTRDWKDHKFKWRKDPQDK

SEQ ID NO: 43755 - protein, 715 aa, synthetic construct
MALPVTALLLPLALLLHAARPDIQMTQSPSSLSASVGDRVTITCKASDHINNWLAWYQQKPGQAPKLLIYGATTLETGVPSRFSGSGSGTDYTLTISSLQPEDFATYYCQQSWNTPWTFGQGTKLEIKRLEDLKNVFPPEVAVFEPSEAEISHTQKATLVCLATGFYPDHVELSWWVNGKEVHSGVSTDPQPLKEQPALNDSRYCLSSRLRVSATFWQNPRNHFRCQVQFYGLSENDEWTQDRAKPVTQIVSAEAWGRADCGSQSFGLLDPKLCYLLDGILFIYGVILTALFLRVKFSRSADAPAYQQGQNQLYNELNLGRREEYDVLDKRRGRDPEMGGKPQRRKNPQEGLYNELQKDKMAEAYSEIGMKGERRRGKGHDGLYQGLSTATKDTYDALHMQALPPRRAKRSGSGATNFSLLKQAGDVEENPGPTSMDWIWRILFLVGAATGAHSFEQVQLQQPGAELVKPGASVKMSCKASGYTFSSYWINWMKQKPGQGLEWIGQIYPGDGDTNYNGKFKGRATLTADTSSSTAYMQLSSLTSEDSAVYFCARSITTVVGCAMDYWGQGTSVTVSSTRIQNPDPAVYQLRDSKSSDKSVCLFTDFDSQTNVSQSKDSDVYITDKTVLDMRSMDFKSNSAVAWSNKSDFACANAFNNSIIPEDTFFPSPESSCGTITQGLAVSTISSFFPPGYQVSFCLVMVLLFAVDTGLYFSV

SEQ ID NO: 43756 - protein, 716 aa, synthetic construct
MALPVTALLLPLALLLHAARPDIQMTQSPSSLSASVGDRVTITCKASDHINNWLAWYQQKPGQAPKLLIYGATTLETGVPSRFSGSGSGTDYTLTISSLQPEDFATYYCQQSWNTPWTFGQGTKLEIKRLEDLKNVFPPEVAVFEPSEAEISHTQKATLVCLATGFYPDHVELSWWVNGKEVHSGVSTDPQPLKEQPALNDSRYCLSSRLRVSATFWQNPRNHFRCQVQFYGLSENDEWTQDRAKPVTQIVSAEAWGRADCGSQSFGLLDPKLCYLLDGILFIYGVILTALFLRVKFSRSADAPAYQQGQNQLYNELNLGRREEYDVLDKRRGRDPEMGGKPQRRKNPQEGLYNELQKDKMAEAYSEIGMKGERRRGKGHDGLYQGLSTATKDTYDALHMQALPPRRAKRSGSGATNFSLLKQAGDVEENPGPTSMDWIWRILFLVGAATGAHSFEQVQLQQPGAELVKPGASVKMSCKASGYTFSSYWINWMKQKPGQGLEWIGQIYPGDGDTNYNGKFKGRATLTADTSSSTAYMQLSSLTSEDSAVYFCARSITTVVGCAMDYWGQGTSVTVSSTRIQNPDPAVYQLRDSKSSDKSVCLFTDFDSQTNVSQSKDSDVYITDKTVLDMRSMDFKSNSAVAWSNKSDFACANAFNNSIIPEDTFFPSPESSCGTITQGLAVSTISSFFPPGYQVSFCLVMVLLFAVDTGLYFSVK

SEQ ID NO: 43757 - protein, 717 aa, synthetic construct
MALPVTALLLPLALLLHAARPDIQMTQSPSSLSASVGDRVTITCKASDHINNWLAWYQQKPGQAPKLLIYGATTLETGVPSRFSGSGSGTDYTLTISSLQPEDFATYYCQQSWNTPWTFGQGTKLEIKRLEDLKNVFPPEVAVFEPSEAEISHTQKATLVCLATGFYPDHVELSWWVNGKEVHSGVSTDPQPLKEQPALNDSRYCLSSRLRVSATFWQNPRNHFRCQVQFYGLSENDEWTQDRAKPVTQIVSAEAWGRADCGSQSFGLLDPKLCYLLDGILFIYGVILTALFLRVKFSRSADAPAYQQGQNQLYNELNLGRREEYDVLDKRRGRDPEMGGKPQRRKNPQEGLYNELQKDKMAEAYSEIGMKGERRRGKGHDGLYQGLSTATKDTYDALHMQALPPRRAKRSGSGATNFSLLKQAGDVEENPGPTSMDWIWRILFLVGAATGAHSFEQVQLQQPGAELVKPGASVKMSCKASGYTFSSYWINWMKQKPGQGLEWIGQIYPGDGDTNYNGKFKGRATLTADTSSSTAYMQLSSLTSEDSAVYFCARSITTVVGCAMDYWGQGTSVTVSSTRIQNPDPAVYQLRDSKSSDKSVCLFTDFDSQTNVSQSKDSDVYITDKTVLDMRSMDFKSNSAVAWSNKSDFACANAFNNSIIPEDTFFPSPESSCGTITQGLAVSTISSFFPPGYQVSFCLVMVLLFAVDTGLYFSVKT

SEQ ID NO: 43758 - protein, 653 aa, synthetic construct
MALPVTALLLPLALLLHAARPDIQMTQSPSSLSASVGDRVTITCKASDHINNWLAWYQQKPGQAPKLLIYGATTLETGVPSRFSGSGSGTDYTLTISSLQPEDFATYYCQQSWNTPWTFGQGTKLEIKRLEGQPKANPTVTLFPPSSEELQANKATLVCLISDFYPGAVTVAWKADGSPVKAGVETTKPSKQSNNKYAASSYLSLTPEQWKSHRSYSCQVTHEGSTVEKTVAPTECSGSLGEPQLCYILDAILFLYGIVLTLLYCRLKIQVRKAAITSYEKSDGVYTGLSTRNQETYETLKHEKPPQRAKRSGSGATNFSLLKQAGDVEENPGPTSMDWIWRILFLVGAATGAHSFEQVQLQQPGAELVKPGASVKMSCKASGYTFSSYWINWMKQKPGQGLEWIGQIYPGDGDTNYNGKFKGRATLTADTSSSTAYMQLSSLTSEDSAVYFCARSITTVVGCAMDYWGQGTSVTVSSTRASTKGPSVFPLAPSSKSTSGGTAALGCLVKDYFPEPVTVSWNSGALTSGVHTFPAVLQSSGLYSLSSVVTVPSSSLGTQTYICNVNHKPSNTKVDKRVEPKSCGTLGEPQLCYILDAILFLYGIVLTLLYCRLKIQVRKAAITSYEKSDGVYTGLSTRNQETYETLKHEKPPQ

SEQ ID NO: 43759 - protein, 623 aa, synthetic construct
MALPVTALLLPLALLLHAARPDIQMTQSPSSLSASVGDRVTITCKASDHINNWLAWYQQKPGQAPKLLIYGATTLETGVPSRFSGSGSGTDYTLTISSLQPEDFATYYCQQSWNTPWTFGQGTKLEIKRLEDLKNVFPPEVAVFEPSEAEISHTQKATLVCLATGFYPDHVELSWWVNGKEVHSGVCTDPQPLKEQPALNDSRYCLSSRLRVSATFWQNPRNHFRCQVQFYGLSENDEWTQDRAKPVTQIVSAEAWGRADCGFTSESYQQGVLSAYYMYLLLLLKSVVYFAIITCCLLRRTAFCCNGEKSRAKRSGSGATNFSLLKQAGDVEENPGPTSMDWIWRILFLVGAATGAHSFEQVQLQQPGAELVKPGASVKMSCKASGYTFSSYWINWMKQKPGQGLEWIGQIYPGDGDTNYNGKFKGRATLTADTSSSTAYMQLSSLTSEDSAVYFCARSITTVVGCAMDYWGQGTSVTVSSTRIQNPDPAVYQLRDSKSSDKSVCLFTDFDSQTNVSQSKDSDVYITDKCVLDMRSMDFKSNSAVAWSNKSDFACANAFNNSIIPEDTFFPSPESSCDVKLVEKSFETDTNLNFQNLSVIGFRILLLKVAGFNLLMTLRLWSS

SEQ ID NO: 43760 - protein, 629 aa, synthetic construct
MALPVTALLLPLALLLHAARPDIQMTQSPSSLSASVGDRVTITCKASDHINNWLAWYQQKPGQAPKLLIYGATTLETGVPSRFSGSGSGTDYTLTISSLQPEDFATYYCQQSWNTPWTFGQGTKLEIKRLEDKQLDADVSPKPTIFLPSIAETKLQKAGTYLCLLEKFFPDVIKIHWQEKKSNTILGSQEGNTMKTNDTYMKFSWLTVPEKSLDKEHRCIVRHENNKNGVDQEIIFPPIKTDVITMDPKDNCSKDANDTLLLQLTNTSAYYMYEILLGKATLYAVLVSALVLMAMVKRKDSRGRAKRSGSGATNFSLLKQAGDVEENPGPTSMDWIWRILFLVGAATGAHSFEQVQLQQPGAELVKPGASVKMSCKASGYTFSSYWINWMKQKPGQGLEWIGQIYPGDGDTNYNGKFKGRATLTADTSSSTAYMQLSSLTSEDSAVYFCARSITTVVGCAMDYWGQGTSVTVSSTRSQPHTKPSVFVMKNGTNVACLVKEFYPKDIRINLVSSKKITEFDPAIVISPSGKYNAVKLGKYEDSNSVTCSVQHDNKTVHSTDFEVKTDSTDHVKPKETENTKQPSKSCHKPKAIVHTEKVNMMSLTVIGFRILLLKVAGFNLLMTLRLWSS

SEQ ID NO: 43761 - protein, 629 aa, synthetic construct
MALPVTALLLPLALLLHAARPDIQMTQSPSSLSASVGDRVTITCKASDHINNWLAWYQQKPGQAPKLLIYGATTLETGVPSRFSGSGSGTDYTLTISSLQPEDFATYYCQQSWNTPWTFGQGTKLEIKRLEDKQLDADVSPKPTIFLPSIAETKLQKAGTYLCLLEKFFPDVIKIHWQEKKSNTILGSQEGNTMKTNDTYMKFSWLTVPEKSLDKEHRCIVRHENNKNGVDQEIIFPPIKTDVITMDPKDNCSKDANDTLLLQLTNTSATILYEILLGKATLYAVLVSALVLMAMVKRKDSRGRAKRSGSGATNFSLLKQAGDVEENPGPTSMDWIWRILFLVGAATGAHSFEQVQLQQPGAELVKPGASVKMSCKASGYTFSSYWINWMKQKPGQGLEWIGQIYPGDGDTNYNGKFKGRATLTADTSSSTAYMQLSSLTSEDSAVYFCARSITTVVGCAMDYWGQGTSVTVSSTRSQPHTKPSVFVMKNGTNVACLVKEFYPKDIRINLVSSKKITEFDPAIVISPSGKYNAVKLGKYEDSNSVTCSVQHDNKTVHSTDFEVKTDSTDHVKPKETENTKQPSKSCHKPKAIVHTEKVNMMSLTVIGFRILLLKVAGFNLLMTLRLWSS

SEQ ID NO: 43762 - protein, 629 aa, synthetic construct
MALPVTALLLPLALLLHAARPDIQMTQSPSSLSASVGDRVTITCKASDHINNWLAWYQQKPGQAPKLLIYGATTLETGVPSRFSGSGSGTDYTLTISSLQPEDFATYYCQQSWNTPWTFGQGTKLEIKRLEDKQLDADVSPKPTIFLPSIAETKLQKAGTYLCLLEKFFPDVIKIHWQEKKSNTILGSQEGNTMKTNDTYMKFSWLTVPEKSLDKEHRCIVRHENNKNGVDQEIIFPPIKTDVITMDPKDNCSKDANDTLLLQLTNTSAYYMYEILLGKATLYAVLVSALVLMAMVKRKDSRGRAKRSGSGATNFSLLKQAGDVEENPGPTSMDWIWRILFLVGAATGAHSFEQVQLQQPGAELVKPGASVKMSCKASGYTFSSYWINWMKQKPGQGLEWIGQIYPGDGDTNYNGKFKGRATLTADTSSSTAYMQLSSLTSEDSAVYFCARSITTVVGCAMDYWGQGTSVTVSSTRSQPHTKPSVFVMKNGTNVACLVKEFYPKDIRINLVSSKKITEFDPAIVISPSGKYNAVKLGKYEDSNSVTCSVQHDNKTVHSTDFEVKTDSTDHVKPKETENTKQPSKSCHKPKAIVHTEKVNMMSLTVLGFRILLLKVAGFNLLMTLRLWSS

SEQ ID NO: 43763 - protein, 629 aa, synthetic construct
MALPVTALLLPLALLLHAARPDIQMTQSPSSLSASVGDRVTITCKASDHINNWLAWYQQKPGQAPKLLIYGATTLETGVPSRFSGSGSGTDYTLTISSLQPEDFATYYCQQSWNTPWTFGQGTKLEIKRLEDKQLDADVSPKPTIFLPSIAETKLQKAGTYLCLLEKFFPDVIKIHWQEKKSNTILGSQEGNTMKTNDTYMKFSWLTVPEKSLDKEHRCIVRHENNKNGVDQEIIFPPIKTDVITMDPKDNCSKDANDTLLLQLTNTSATILYEILLGKATLYAVLVSALVLMAMVKRKDSRGRAKRSGSGATNFSLLKQAGDVEENPGPTSMDWIWRILFLVGAATGAHSFEQVQLQQPGAELVKPGASVKMSCKASGYTFSSYWINWMKQKPGQGLEWIGQIYPGDGDTNYNGKFKGRATLTADTSSSTAYMQLSSLTSEDSAVYFCARSITTVVGCAMDYWGQGTSVTVSSTRSQPHTKPSVFVMKNGTNVACLVKEFYPKDIRINLVSSKKITEFDPAIVISPSGKYNAVKLGKYEDSNSVTCSVQHDNKTVHSTDFEVKTDSTDHVKPKETENTKQPSKSCHKPKAIVHTEKVNMMSLTVLGFRILLLKVAGFNLLMTLRLWSS

SEQ ID NO: 43764 - protein, 623 aa, synthetic construct
MALPVTALLLPLALLLHAARPDIQMTQSPSSLSASVGDRVTITCKASDHINNWLAWYQQKPGQAPKLLIYGATTLETGVPSRFSGSGSGTDYTLTISSLQPEDFATYYCQQSWNTPWTFGQGTKLEIKRLEDLKNVFPPEVAVFEPSEAEISHTQKATLVCLATGFYPDHVELSWWVNGKEVHSGVCTDPQPLKEQPALNDSRYCLSSRLRVSATFWQNPRNHFRCQVQFYGLSENDEWTQDRAKPVTQIVSAEAWGRADCGFTSESYQQGVLSATILYLLLLLKSVVYFAIITCCLLRRTAFCCNGEKSRAKRSGSGATNFSLLKQAGDVEENPGPTSMDWIWRILFLVGAATGAHSFEQVQLQQPGAELVKPGASVKMSCKASGYTFSSYWINWMKQKPGQGLEWIGQIYPGDGDTNYNGKFKGRATLTADTSSSTAYMQLSSLTSEDSAVYFCARSITTVVGCAMDYWGQGTSVTVSSTRIQNPDPAVYQLRDSKSSDKSVCLFTDFDSQTNVSQSKDSDVYITDKCVLDMRSMDFKSNSAVAWSNKSDFACANAFNNSIIPEDTFFPSPESSCDVKLVEKSFETDTNLNFQNLSVIGLRMLFAKTVAVNFLLTAKLFFL

SEQ ID NO: 43765 - protein, 652 aa, synthetic construct
MALPVTALLLPLALLLHAARPDIQMTQSPSSLSASVGDRVTITCKASDHINNWLAWYQQKPGQAPKLLIYGATTLETGVPSRFSGSGSGTDYTLTISSLQPEDFATYYCQQSWNTPWTFGQGTKLEIKRLEDLKNVFPPEVAVFEPSEAEISHTQKATLVCLATGFYPDHVELSWWVNGKEVHSGVSTDPQPLKEQPALNDSRYCLSSRLRVSATFWQNPRNHFRCQVQFYGLSENDEWTQDRAKPVTQIVSAEAWGRADCGSSKDANDTLLLQLTNTSAYYMYLLLLLKSVVYFAIITCCLLRRTAFCCNGEKSRAKRSGSGATNFSLLKQAGDVEENPGPTSMDWIWRILFLVGAATGAHSFEQVQLQQPGAELVKPGASVKMSCKASGYTFSSYWINWMKQKPGQGLEWIGQIYPGDGDTNYNGKFKGRATLTADTSSSTAYMQLSSLTSEDSAVYFCARSITTVVGCAMDYWGQGTSVTVSSTRIQNPDPAVYQLRDSKSSDKSVCLFTDFDSQTNVSQSKDSDVYITDKTVLDMRSMDFKSNSAVAWSNKSDFACANAFNNSIIPEDTFFPSPESSCGTEVKTDSTDHVKPKETENTKQPSKSCHKPKAIVHTEKVNMMSLTVLGLRMLFAKTVAVNFLLTAKLFFL

SEQ ID NO: 43766 - protein, 622 aa, synthetic construct
MALPVTALLLPLALLLHAARPDIQMTQSPSSLSASVGDRVTITCKASDHINNWLAWYQQKPGQAPKLLIYGATTLETGVPSRFSGSGSGTDYTLTISSLQPEDFATYYCQQSWNTPWTFGQGTKLEIKRLEDLKNVFPPEVAVFEPSEAEISHTQKATLVCLATGFYPDHVELSWWVNGKEVHSGVCTDPQPLKEQPALNDSRYCLSSRLRVSATFWQNPRNHFRCQVQFYGLSENDEWTQDRAKPVTQIVSAEAWGRADCDVKLVEKSFETDTNLNFQNLSVIGFRILLLKVAGFNLLMTLRLWSSRAKRSGSGATNFSLLKQAGDVEENPGPTSMDWIWRILFLVGAATGAHSFEQVQLQQPGAELVKPGASVKMSCKASGYTFSSYWINWMKQKPGQGLEWIGQIYPGDGDTNYNGKFKGRATLTADTSSSTAYMQLSSLTSEDSAVYFCARSITTVVGCAMDYWGQGTSVTVSSTRIQNPDPAVYQLRDSKSSDKSVCLFTDFDSQTNVSQSKDSDVYITDKCVLDMRSMDFKSNSAVAWSNKSDFACANAFNNSIIPEDTFFPSPESSCGFTSESYQQGVLSATILYEILLGKATLYAVLVSALVLMAMVKRKDSRG

SEQ ID NO: 43767 - protein, 622 aa, synthetic construct
MALPVTALLLPLALLLHAARPDIQMTQSPSSLSASVGDRVTITCKASDHINNWLAWYQQKPGQAPKLLIYGATTLETGVPSRFSGSGSGTDYTLTISSLQPEDFATYYCQQSWNTPWTFGQGTKLEIKRLEDLKNVFPPEVAVFEPSEAEISHTQKATLVCLATGFYPDHVELSWWVNGKEVHSGVCTDPQPLKEQPALNDSRYCLSSRLRVSATFWQNPRNHFRCQVQFYGLSENDEWTQDRAKPVTQIVSAEAWGRADCGFTSESYQQGVLSATNLSVIGFRILLLKVAGFNLLMTLRLWSSRAKRSGSGATNFSLLKQAGDVEENPGPTSMDWIWRILFLVGAATGAHSFEQVQLQQPGAELVKPGASVKMSCKASGYTFSSYWINWMKQKPGQGLEWIGQIYPGDGDTNYNGKFKGRATLTADTSSSTAYMQLSSLTSEDSAVYFCARSITTVVGCAMDYWGQGTSVTVSSTRIQNPDPAVYQLRDSKSSDKSVCLFTDFDSQTNVSQSKDSDVYITDKCVLDMRSMDFKSNSAVAWSNKSDFACANAFNNSIIPEDTFFPSPESSCDVKLVEKSFETDTNLNFQILYEILLGKATLYAVLVSALVLMAMVKRKDSRG

SEQ ID NO: 43768 - protein, 622 aa, synthetic construct; identical to SEQ ID NO: 43766

SEQ ID NO: 43769 - protein, 622 aa, synthetic construct; identical to SEQ ID NO: 43767

SEQ ID NO: 43770 - protein, 622 aa, synthetic construct; identical to SEQ ID NO: 43766

SEQ ID NO: 43771 - protein, 625 aa, synthetic construct
MALPVTALLLPLALLLHAARPDIQMTQSPSSLSASVGDRVTITCKASDHINNWLAWYQQKPGQAPKLLIYGATTLETGVPSRFSGSGSGTDYTLTISSLQPEDFATYYCQQSWNTPWTFGQGTKLEIKRLEADVSPKPTIFLPSIAETKLQKAGTYLCLLEKFFPDVIKIHWQEKKSNTILGSQEGNTMKTNDTYMKFSWLTVPEKSLDKEHRCIVRHENNKNGVDQEIIFPPIKTDVITMDPKDNCSKDANDTLLLQLTNTSAYYMYLLLLLKSVVYFAIITCCLLRRTAFCCNGEKSRAKRSGSGATNFSLLKQAGDVEENPGPTSMDWIWRILFLVGAATGAHSFEQVQLQQPGAELVKPGASVKMSCKASGYTFSSYWINWMKQKPGQGLEWIGQIYPGDGDTNYNGKFKGRATLTADTSSSTAYMQLSSLTSEDSAVYFCARSITTVVGCAMDYWGQGTSVTVSSTRSQPHTKPSVFVMKNGTNVACLVKEFYPKDIRINLVSSKKITEFDPAIVISPSGKYNAVKLGKYEDSNSVTCSVQHDNKTVHSTDFEVKTDSTDHVKPKETENTKQPSKSCHKPKAIVHTEKVNMMSLTVIGFRILLLKVAGFNLLMTLRLWSS

SEQ ID NO: 43772 - protein, 625 aa, synthetic construct
MALPVTALLLPLALLLHAARPDIQMTQSPSSLSASVGDRVTITCKASDHINNWLAWYQQKPGQAPKLLIYGATTLETGVPSRFSGSGSGTDYTLTISSLQPEDFATYYCQQSWNTPWTFGQGTKLEIKRLEADVSPKPTIFLPSIAETKLQKAGTYLCLLEKFFPDVIKIHWQEKKSNTILGSQEGNTMKTNDTYMKFSWLTVPEKSLDKEHRCIVRHENNKNGVDQEIIFPPIKTDVITMDPKDNCSKDANDTLLLQLTNTSAYYMYLLLLLKSVVYFAIITCCLLRRTAFCCNGEKSRAKRSGSGATNFSLLKQAGDVEENPGPTSMDWIWRILFLVGAATGAHSFEQVQLQQPGAELVKPGASVKMSCKASGYTFSSYWINWMKQKPGQGLEWIGQIYPGDGDTNYNGKFKGRATLTADTSSSTAYMQLSSLTSEDSAVYFCARSITTVVGCAMDYWGQGTSVTVSSTRSQPHTKPSVFVMKNGTNVACLVKEFYPKDIRINLVSSKKITEFDPAIVISPSGKYNAVKLGKYEDSNSVTCSVQHDNKTVHSTDFEVKTDSTDHVKPKETENTKQPSKSCHKPKAIVHTEKVNMMSLTVLGFRILLLKVAGFNLLMTLRLWSS

SEQ ID NO: 43773 - protein, 622 aa, synthetic construct; identical to SEQ ID NO: 43766

SEQ ID NO: 43774 - protein, 626 aa, synthetic construct
MALPVTALLLPLALLLHAARPDIQMTQSPSSLSASVGDRVTITCKASDHINNWLAWYQQKPGQAPKLLIYGATTLETGVPSRFSGSGSGTDYTLTISSLQPEDFATYYCQQSWNTPWTFGQGTKLEIKRLEIQNPDPAVYQLRDSKSSDKSVCLFTDFDSQTNVSQSKDSDVYITDKCVLDMRSMDFKSNSAVAWSNKSDFACANAFNNSIIPEDTFFPSPESSCGFTSESYQQGVLSATILYEILLGKATLYAVLVSALVLMAMVKRKDSRGRAKRSGSGVKQTLNFDLLKLAGDVESNPGPTSMDWIWRILFLVGAATGAHSFEQVQLQQPGAELVKPGASVKMSCKASGYTFSSYWINWMKQKPGQGLEWIGQIYPGDGDTNYNGKFKGRATLTADTSSSTAYMQLSSLTSEDSAVYFCARSITTVVGCAMDYWGQGTSVTVSSTREDLKNVFPPEVAVFEPSEAEISHTQKATLVCLATGFYPDHVELSWWVNGKEVHSGVCTDPQPLKEQPALNDSRYCLSSRLRVSATFWQNPRNHFRCQVQFYGLSENDEWTQDRAKPVTQIVSAEAWGRADCDVKLVEKSFETDTNLNFQNLSVIGFRILLLKVAGFNLLMTLRLWSS

SEQ ID NO: 43775 - protein, 757 aa, synthetic construct
MALPVTALLLPLALLLHAARPEVQLVESGGGLVQPGGSLRLSCAASGFSFSDFWMSWVRQAPGKGLEWVATISQAGSEKDYVDSVKGRFTISRDNAKKSLYLQMNSLRAEDTAVYYCASGVYSFDYRGQGTLVTVSSGTGGGGSGGGGSGGGGSEFDIQMTQSPSSLSASVGDRVTITCKASDHINNWLAWYQQKPGQAPKLLIYGATTLETGVPSRFSGSGSGTDYTLTISSLQPEDFATYYCQQSWNTPWTFGQGTKLEIKRLEDLKNVFPPEVAVFEPSEAEISHTQKATLVCLATGFYPDHVELSWWVNGKEVHSGVCTDPQPLKEQPALNDSRYCLSSRLRVSATFWQNPRNHFRCQVQFYGLSENDEWTQDRAKPVTQIVSAEAWGRADCDVKLVEKSFETDTNLNFQNLSVIGFRILLLKVAGFNLLMTLRLWSSRAKRSGSGATNFSLLKQAGDVEENPGPTSMDWIWRILFLVGAATGAHSFEQVQLQQPGAELVKPGASVKMSCKASGYTFSSYWINWMKQKPGQGLEWIGQIYPGDGDTNYNGKFKGRATLTADTSSSTAYMQLSSLTSEDSAVYFCARSITTVVGCAMDYWGQGTSVTVSSTRIQNPDPAVYQLRDSKSSDKSVCLFTDFDSQTNVSQSKDSDVYITDKCVLDMRSMDFKSNSAVAWSNKSDFACANAFNNSIIPEDTFFPSPESSCGFTSESYQQGVLSATILYEILLGKATLYAVLVSALVLMAMVKRKDSRG

SEQ ID NO: 43776 - protein, 761 aa, synthetic construct
MALPVTALLLPLALLLHAARPEVQLVESGGGLVQPGGSLRLSCAASGFSFSDFWMSWVRQAPGKGLEWVATISQAGSEKDYVDSVKGRFTISRDNAKKSLYLQMNSLRAEDTAVYYCASGVYSFDYRGQGTLVTVSSGTGGGGSGGGGSGGGGSEFDIQMTQSPSSLSASVGDRVTITCKASDHINNWLAWYQQKPGQAPKLLIYGATTLETGVPSRFSGSGSGTDYTLTISSLQPEDFATYYCQQSWNTPWTFGQGTKLEIKRLEIQNPDPAVYQLRDSKSSDKSVCLFTDFDSQTNVSQSKDSDVYITDKCVLDMRSMDFKSNSAVAWSNKSDFACANAFNNSIIPEDTFFPSPESSCGFTSESYQQGVLSATILYEILLGKATLYAVLVSALVLMAMVKRKDSRGRAKRSGSGVKQTLNFDLLKLAGDVESNPGPTSMDWIWRILFLVGAATGAHSFEQVQLQQPGAELVKPGASVKMSCKASGYTFSSYWINWMKQKPGQGLEWIGQIYPGDGDTNYNGKFKGRATLTADTSSSTAYMQLSSLTSEDSAVYFCARSITTVVGCAMDYWGQGTSVTVSSTREDLKNVFPPEVAVFEPSEAEISHTQKATLVCLATGFYPDHVELSWWVNGKEVHSGVCTDPQPLKEQPALNDSRYCLSSRLRVSATFWQNPRNHFRCQVQFYGLSENDEWTQDRAKPVTQIVSAEAWGRADCDVKLVEKSFETDTNLNFQNLSVIGFRILLLKVAGFNLLMTLRLWSS

SEQ ID NO: 43777 - protein, 894 aa, synthetic construct
MALPVTALLLPLALLLHAARPEVQLVESGGGLVQPGGSLRLSCAASGFSFSDFWMSWVRQAPGKGLEWVATISQAGSEKDYVDSVKGRFTISRDNAKKSLYLQMNSLRAEDTAVYYCASGVYSFDYRGQGTLVTVSSGTGGGGSGGGGSGGGGSEFDIQMTQSPSSLSASVGDRVTITCKASDHINNWLAWYQQKPGQAPKLLIYGATTLETGVPSRFSGSGSGTDYTLTISSLQPEDFATYYCQQSWNTPWTFGQGTKLEIKRLEDLKNVFPPEVAVFEPSEAEISHTQKATLVCLATGFYPDHVELSWWVNGKEVHSGVCTDPQPLKEQPALNDSRYCLSSRLRVSATFWQNPRNHFRCQVQFYGLSENDEWTQDRAKPVTQIVSAEAWGRADCDVKLVEKSFETDTNLNFQNLSVIGFRILLLKVAGFNLLMTLRLWSSRAKRSGSGATNFSLLKQAGDVEENPGPTSMDWIWRILFLVGAATGAHSGPQLQLQESGPGLVKPSETLSLTCTVSGDSISSGDYYWGWIRQPPGKGLEWIGHIYYSGVTYYNPSLKSRVTISVDTSRNQFSLKLSSVTAADTAVYYCTREDSSNWRSRGQGTLVTVSSGSGGGGSGGGGSGGGGSFEQVQLQQPGAELVKPGASVKMSCKASGYTFSSYWINWMKQKPGQGLEWIGQIYPGDGDTNYNGKFKGRATLTADTSSSTAYMQLSSLTSEDSAVYFCARSITTVVGCAMDYWGQGTSVTVSSTRIQNPDPAVYQLRDSKSSDKSVCLFTDFDSQTNVSQSKDSDVYITDKCVLDMRSMDFKSNSAVAWSNKSDFACANAFNNSIIPEDTFFPSPESSCGFTSESYQQGVLSATILYEILLGKATLYAVLVSALVLMAMVKRKDSRG

SEQ ID NO: 43778 - protein, 898 aa, synthetic construct
MALPVTALLLPLALLLHAARPEVQLVESGGGLVQPGGSLRLSCAASGFSFSDFWMSWVRQAPGKGLEWVATISQAGSEKDYVDSVKGRFTISRDNAKKSLYLQMNSLRAEDTAVYYCASGVYSFDYRGQGTLVTVSSGTGGGGSGGGGSGGGGSEFDIQMTQSPSSLSASVGDRVTITCKASDHINNWLAWYQQKPGQAPKLLIYGATTLETGVPSRFSGSGSGTDYTLTISSLQPEDFATYYCQQSWNTPWTFGQGTKLEIKRLEIQNPDPAVYQLRDSKSSDKSVCLFTDFDSQTNVSQSKDSDVYITDKCVLDMRSMDFKSNSAVAWSNKSDFACANAFNNSIIPEDTFFPSPESSCGFTSESYQQGVLSATILYEILLGKATLYAVLVSALVLMAMVKRKDSRGRAKRSGSGVKQTLNFDLLKLAGDVESNPGPTSMDWIWRILFLVGAATGAHSGPQLQLQESGPGLVKPSETLSLTCTVSGDSISSGDYYWGWIRQPPGKGLEWIGHIYYSGVTYYNPSLKSRVTISVDTSRNQFSLKLSSVTAADTAVYYCTREDSSNWRSRGQGTLVTVSSGSGGGGSGGGGSGGGGSFEQVQLQQPGAELVKPGASVKMSCKASGYTFSSYWINWMKQKPGQGLEWIGQIYPGDGDTNYNGKFKGRATLTADTSSSTAYMQLSSLTSEDSAVYFCARSITTVVGCAMDYWGQGTSVTVSSTREDLKNVFPPEVAVFEPSEAEISHTQKATLVCLATGFYPDHVELSWWVNGKEVHSGVCTDPQPLKEQPALNDSRYCLSSRLRVSATFWQNPRNHFRCQVQFYGLSENDEWTQDRAKPVTQIVSAEAWGRADCDVKLVEKSFETDTNLNFQNLSVIGFRILLLKVAGFNLLMTLRLWSS

SEQ ID NO: 43779 - protein, 692 aa, synthetic construct
MALPVTALLLPLALLLHAARPDIQMTQSPSSLSASVGDRVTITCKASDHINNWLAWYQQKPGQAPKLLIYGATTLETGVPSRFSGSGSGTDYTLTISSLQPEDFATYYCQQSWNTPWTFGQGTKLEIKRLEDLKNVFPPEVAVFEPSEAEISHTQKATLVCLATGFYPDHVELSWWVNGKEVHSGVCTDPQPLKEQPALNDSRYCLSSRLRVSATFWQNPRNHFRCQVQFYGLSENDEWTQDRAKPVTQIVSAEAWGRADCDVKLVEKSFETDTNLNFQNLSVIGFRILLLKVAGFNLLMTLRLWSSRAKRSGSGATNFSLLKQAGDVEENPGPTSMDWIWRILFLVGAATGAHSGPMDPDLEIRAAFLRQRNTALRTEVAELEQEVQRLENEVSQYETRYGPLGGGKGSGGGGSGGGGSGGGGSFEQVQLQQPGAELVKPGASVKMSCKASGYTFSSYWINWMKQKPGQGLEWIGQIYPGDGDTNYNGKFKGRATLTADTSSSTAYMQLSSLTSEDSAVYFCARSITTVVGCAMDYWGQGTSVTVSSTRIQNPDPAVYQLRDSKSSDKSVCLFTDFDSQTNVSQSKDSDVYITDKCVLDMRSMDFKSNSAVAWSNKSDFACANAFNNSIIPEDTFFPSPESSCGFTSESYQQGVLSATILYEILLGKATLYAVLVSALVLMAMVKRKDSRG

SEQ ID NO: 43780 - protein, 696 aa, synthetic construct
MALPVTALLLPLALLLHAARPDIQMTQSPSSLSASVGDRVTITCKASDHINNWLAWYQQKPGQAPKLLIYGATTLETGVPSRFSGSGSGTDYTLTISSLQPEDFATYYCQQSWNTPWTFGQGTKLEIKRLEIQNPDPAVYQLRDSKSSDKSVCLFTDFDSQTNVSQSKDSDVYITDKCVLDMRSMDFKSNSAVAWSNKSDFACANAFNNSIIPEDTFFPSPESSCGFTSESYQQGVLSATILYEILLGKATLYAVLVSALVLMAMVKRKDSRGRAKRSGSGVKQTLNFDLLKLAGDVESNPGPTSMDWIWRILFLVGAATGAHSGPMDPDLEIRAAFLRQRNTALRTEVAELEQEVQRLENEVSQYETRYGPLGGGKGSGGGGSGGGGSGGGGSFEQVQLQQPGAELVKPGASVKMSCKASGYTFSSYWINWMKQKPGQGLEWIGQIYPGDGDTNYNGKFKGRATLTADTSSSTAYMQLSSLTSEDSAVYFCARSITTVVGCAMDYWGQGTSVTVSSTREDLKNVFPPEVAVFEPSEAEISHTQKATLVCLATGFYPDHVELSWWVNGKEVHSGVCTDPQPLKEQPALNDSRYCLSSRLRVSATFWQNPRNHFRCQVQFYGLSENDEWTQDRAKPVTQIVSAEAWGRADCDVKLVEKSFETDTNLNFQNLSVIGFRILLLKVAGFNLLMTLRLWSS

SEQ ID NO: 43781 - protein, 669 aa, synthetic construct
MALPVTALLLPLALLLHAARPDIQMTQSPSSLSASVGDRVTITCKASDHINNWLAWYQQKPGQAPKLLIYGATTLETGVPSRFSGSGSGTDYTLTISSLQPEDFATYYCQQSWNTPWTFGQGTKLEIKRLEDLKNVFPPEVAVFEPSEAEISHTQKATLVCLATGFYPDHVELSWWVNGKEVHSGVCTDPQPLKEQPALNDSRYCLSSRLRVSATFWQNPRNHFRCQVQFYGLSENDEWTQDRAKPVTQIVSAEAWGRADCDVKLVEKSFETDTNLNFQNLSVIGFRILLLKVAGFNLLMTLRLWSSRAKRSGSGATNFSLLKQAGDVEENPGPTSMDWIWRILFLVGAATGAHSGPEVAALEKEVAALEKEVAALEKEVAALEKGSGGGGSGGGGSGGGGSFEQVQLQQPGAELVKPGASVKMSCKASGYTFSSYWINWMKQKPGQGLEWIGQIYPGDGDTNYNGKFKGRATLTADTSSSTAYMQLSSLTSEDSAVYFCARSITTVVGCAMDYWGQGTSVTVSSTRIQNPDPAVYQLRDSKSSDKSVCLFTDFDSQTNVSQSKDSDVYITDKCVLDMRSMDFKSNSAVAWSNKSDFACANAFNNSIIPEDTFFPSPESSCGFTSESYQQGVLSATILYEILLGKATLYAVLVSALVLMAMVKRKDSRG

SEQ ID NO: 43782 - protein, 673 aa, synthetic construct
MALPVTALLLPLALLLHAARPDIQMTQSPSSLSASVGDRVTITCKASDHINNWLAWYQQKPGQAPKLLIYGATTLETGVPSRFSGSGSGTDYTLTISSLQPEDFATYYCQQSWNTPWTFGQGTKLEIKRLEIQNPDPAVYQLRDSKSSDKSVCLFTDFDSQTNVSQSKDSDVYITDKCVLDMRSMDFKSNSAVAWSNKSDFACANAFNNSIIPEDTFFPSPESSCGFTSESYQQGVLSATILYEILLGKATLYAVLVSALVLMAMVKRKDSRGRAKRSGSGVKQTLNFDLLKLAGDVESNPGPTSMDWIWRILFLVGAATGAHSGPEVAALEKEVAALEKEVAALEKEVAALEKGSGGGGSGGGGSGGGGSFEQVQLQQPGAELVKPGASVKMSCKASGYTFSSYWINWMKQKPGQGLEWIGQIYPGDGDTNYNGKFKGRATLTADTSSSTAYMQLSSLTSEDSAVYFCARSITTVVGCAMDYWGQGTSVTVSSTREDLKNVFPPEVAVFEPSEAEISHTQKATLVCLATGFYPDHVELSWWVNGKEVHSGVCTDPQPLKEQPALNDSRYCLSSRLRVSATFWQNPRNHFRCQVQFYGLSENDEWTQDRAKPVTQIVSAEAWGRADCDVKLVEKSFETDTNLNFQNLSVIGFRILLLKVAGFNLLMTLRLWSS

SEQ ID NO: 43783 - protein, 759 aa, synthetic construct
MALPVTALLLPLALLLHAARPDIQMTQSPSSLSASVGDRVTITCKASDHINNWLAWYQQKPGQAPKLLIYGATTLETGVPSRFSGSGSGTDYTLTISSLQPEDFATYYCQQSWNTPWTFGQGTKLEIKRLEDLKNVFPPEVAVFEPSEAEISHTQKATLVCLATGFYPDHVELSWWVNGKEVHSGVCTDPQPLKEQPALNDSRYCLSSRLRVSATFWQNPRNHFRCQVQFYGLSENDEWTQDRAKPVTQIVSAEAWGRADCDVKLVEKSFETDTNLNFQNLSVIGFRILLLKVAGFNLLMTLRLWSSRAKRSGSGATNFSLLKQAGDVEENPGPTSMDWIWRILFLVGAATGAHSGPQVQLQESGGGLAQAGGSLRLSCAASGRTFSMGWFRQAPGKEREFVAAITYSGGSPYYASSVRGRFTISRDNAKNTVYLQMNSLKPEDTAVYYCAANPTYGSDWNAENWGQGTQVTVSSGSGGGGSGGGGSGGGGSFEQVQLQQPGAELVKPGASVKMSCKASGYTFSSYWINWMKQKPGQGLEWIGQIYPGDGDTNYNGKFKGRATLTADTSSSTAYMQLSSLTSEDSAVYFCARSITTVVGCAMDYWGQGTSVTVSSTRIQNPDPAVYQLRDSKSSDKSVCLFTDFDSQTNVSQSKDSDVYITDKCVLDMRSMDFKSNSAVAWSNKSDFACANAFNNSIIPEDTFFPSPESSCGFTSESYQQGVLSATILYEILLGKATLYAVLVSALVLMAMVKRKDSRG

SEQ ID NO: 43784 - protein, 763 aa, synthetic construct
MALPVTALLLPLALLLHAARPDIQMTQSPSSLSASVGDRVTITCKASDHINNWLAWYQQKPGQAPKLLIYGATTLETGVPSRFSGSGSGTDYTLTISSLQPEDFATYYCQQSWNTPWTFGQGTKLEIKRLEIQNPDPAVYQLRDSKSSDKSVCLFTDFDSQTNVSQSKDSDVYITDKCVLDMRSMDFKSNSAVAWSNKSDFACANAFNNSIIPEDTFFPSPESSCGFTSESYQQGVLSATILYEILLGKATLYAVLVSALVLMAMVKRKDSRGRAKRSGSGVKQTLNFDLLKLAGDVESNPGPTSMDWIWRILFLVGAATGAHSGPQVQLQESGGGLAQAGGSLRLSCAASGRTFSMGWFRQAPGKEREFVAAITYSGGSPYYASSVRGRFTISRDNAKNTVYLQMNSLKPEDTAVYYCAANPTYGSDWNAENWGQGTQVTVSSGSGGGGSGGGGSGGGGSFEQVQLQQPGAELVKPGASVKMSCKASGYTFSSYWINWMKQKPGQGLEWIGQIYPGDGDTNYNGKFKGRATLTADTSSSTAYMQLSSLTSEDSAVYFCARSITTVVGCAMDYWGQGTSVTVSSTREDLKNVFPPEVAVFEPSEAEISHTQKATLVCLATGFYPDHVELSWWVNGKEVHSGVCTDPQPLKEQPALNDSRYCLSSRLRVSATFWQNPRNHFRCQVQFYGLSENDEWTQDRAKPVTQIVSAEAWGRADCDVKLVEKSFETDTNLNFQNLSVIGFRILLLKVAGFNLLMTLRLWSS

SEQ ID NO: 43785 - protein, 765 aa, synthetic construct
MALPVTALLLPLALLLHAARPEVQLVESGGSLVQPGGSLRLSCAASGFTFDDYAMSWVRQVPGKGLEWVSSINWSGTHTDYADSVKGRFTISRNNANNTLYLQMNSLKSEDTAVYYCAKNWRDAGTTWFEKSGSAGQGTQVTVSSGTGGGGSGGGGSGGGGSEFDIQMTQSPSSLSASVGDRVTITCKASDHINNWLAWYQQKPGQAPKLLIYGATTLETGVPSRFSGSGSGTDYTLTISSLQPEDFATYYCQQSWNTPWTFGQGTKLEIKRLEDLKNVFPPEVAVFEPSEAEISHTQKATLVCLATGFYPDHVELSWWVNGKEVHSGVCTDPQPLKEQPALNDSRYCLSSRLRVSATFWQNPRNHFRCQVQFYGLSENDEWTQDRAKPVTQIVSAEAWGRADCDVKLVEKSFETDTNLNFQNLSVIGFRILLLKVAGFNLLMTLRLWSSRAKRSGSGATNFSLLKQAGDVEENPGPTSMDWIWRILFLVGAATGAHSFEQVQLQQPGAELVKPGASVKMSCKASGYTFSSYWINWMKQKPGQGLEWIGQIYPGDGDTNYNGKFKGRATLTADTSSSTAYMQLSSLTSEDSAVYFCARSITTVVGCAMDYWGQGTSVTVSSTRIQNPDPAVYQLRDSKSSDKSVCLFTDFDSQTNVSQSKDSDVYITDKCVLDMRSMDFKSNSAVAWSNKSDFACANAFNNSIIPEDTFFPSPESSCGFTSESYQQGVLSATILYEILLGKATLYAVLVSALVLMAMVKRKDSRG

SEQ ID NO: 43786 - protein, 769 aa, synthetic construct
MALPVTALLLPLALLLHAARPEVQLVESGGSLVQPGGSLRLSCAASGFTFDDYAMSWVRQVPGKGLEWVSSINWSGTHTDYADSVKGRFTISRNNANNTLYLQMNSLKSEDTAVYYCAKNWRDAGTTWFEKSGSAGQGTQVTVSSGTGGGGSGGGGSGGGGSEFDIQMTQSPSSLSASVGDRVTITCKASDHINNWLAWYQQKPGQAPKLLIYGATTLETGVPSRFSGSGSGTDYTLTISSLQPEDFATYYCQQSWNTPWTFGQGTKLEIKRLEIQNPDPAVYQLRDSKSSDKSVCLFTDFDSQTNVSQSKDSDVYITDKCVLDMRSMDFKSNSAVAWSNKSDFACANAFNNSIIPEDTFFPSPESSCGFTSESYQQGVLSATILYEILLGKATLYAVLVSALVLMAMVKRKDSRGRAKRSGSGVKQTLNFDLLKLAGDVESNPGPTSMDWIWRILFLVGAATGAHSFEQVQLQQPGAELVKPGASVKMSCKASGYTFSSYWINWMKQKPGQGLEWIGQIYPGDGDTNYNGKFKGRATLTADTSSSTAYMQLSSLTSEDSAVYFCARSITTVVGCAMDYWGQGTSVTVSSTREDLKNVFPPEVAVFEPSEAEISHTQKATLVCLATGFYPDHVELSWWVNGKEVHSGVCTDPQPLKEQPALNDSRYCLSSRLRVSATFWQNPRNHFRCQVQFYGLSENDEWTQDRAKPVTQIVSAEAWGRADCDVKLVEKSFETDTNLNFQNLSVIGFRILLLKVAGFNLLMTLRLWSS

SEQ ID NO: 43787 - protein, 763 aa, synthetic construct
MALPVTALLLPLALLLHAARPEVQLLESGGGLVQPGGSLRLSCAASGFIFSSYAMSWVRQAPGKGQEWVSGVSGTGVNTYYADSVKGRFTISRDNSKNTLYLQMNSLRAEDTAVYYCASGKGWDSGSWYEDYRGQGTLVTVSSGTGGGGSGGGGSGGGGSEFDIQMTQSPSSLSASVGDRVTITCKASDHINNWLAWYQQKPGQAPKLLIYGATTLETGVPSRFSGSGSGTDYTLTISSLQPEDFATYYCQQSWNTPWTFGQGTKLEIKRLEDLKNVFPPEVAVFEPSEAEISHTQKATLVCLATGFYPDHVELSWWVNGKEVHSGVCTDPQPLKEQPALNDSRYCLSSRLRVSATFWQNPRNHFRCQVQFYGLSENDEWTQDRAKPVTQIVSAEAWGRADCDVKLVEKSFETDTNLNFQNLSVIGFRILLLKVAGFNLLMTLRLWSSRAKRSGSGATNFSLLKQAGDVEENPGPTSMDWIWRILFLVGAATGAHSFEQVQLQQPGAELVKPGASVKMSCKASGYTFSSYWINWMKQKPGQGLEWIGQIYPGDGDTNYNGKFKGRATLTADTSSSTAYMQLSSLTSEDSAVYFCARSITTVVGCAMDYWGQGTSVTVSSTRIQNPDPAVYQLRDSKSSDKSVCLFTDFDSQTNVSQSKDSDVYITDKCVLDMRSMDFKSNSAVAWSNKSDFACANAFNNSIIPEDTFFPSPESSCGFTSESYQQGVLSATILYEILLGKATLYAVLVSALVLMAMVKRKDSRG

SEQ ID NO: 43788 - protein, 767 aa, synthetic construct
MALPVTALLLPLALLLHAARPEVQLLESGGGLVQPGGSLRLSCAASGFIFSSYAMSWVRQAPGKGQEWVSGVSGTGVNTYYADSVKGRFTISRDNSKNTLYLQMNSLRAEDTAVYYCASGKGWDSGSWYEDYRGQGTLVTVSSGTGGGGSGGGGSGGGGSEFDIQMTQSPSSLSASVGDRVTITCKASDHINNWLAWYQQKPGQAPKLLIYGATTLETGVPSRFSGSGSGTDYTLTISSLQPEDFATYYCQQSWNTPWTFGQGTKLEIKRLEIQNPDPAVYQLRDSKSSDKSVCLFTDFDSQTNVSQSKDSDVYITDKCVLDMRSMDFKSNSAVAWSNKSDFACANAFNNSIIPEDTFFPSPESSCGFTSESYQQGVLSATILYEILLGKATLYAVLVSALVLMAMVKRKDSRGRAKRSGSGVKQTLNFDLLKLAGDVESNPGPTSMDWIWRILFLVGAATGAHSFEQVQLQQPGAELVKPGASVKMSCKASGYTFSSYWINWMKQKPGQGLEWIGQIYPGDGDTNYNGKFKGRATLTADTSSSTAYMQLSSLTSEDSAVYFCARSITTVVGCAMDYWGQGTSVTVSSTREDLKNVFPPEVAVFEPSEAEISHTQKATLVCLATGFYPDHVELSWWVNGKEVHSGVCTDPQPLKEQPALNDSRYCLSSRLRVSATFWQNPRNHFRCQVQFYGLSENDEWTQDRAKPVTQIVSAEAWGRADCDVKLVEKSFETDTNLNFQNLSVIGFRILLLKVAGFNLLMTLRLWSS

SEQ ID NO: 43789 - protein, 731 aa, synthetic construct
MALPVTALLLPLALLLHAARPMLPAPKNLVVSRITEDSARLSWTAPDAAFDSFPIRYIETLIWGEAIWLDVPGSERSYDLTGLKPGTEYAVVITGVKGGRFSSPLVASFTTGTGGGGSGGGGSGGGGSEFDIQMTQSPSSLSASVGDRVTITCKASDHINNWLAWYQQKPGQAPKLLIYGATTLETGVPSRFSGSGSGTDYTLTISSLQPEDFATYYCQQSWNTPWTFGQGTKLEIKRLEDLKNVFPPEVAVFEPSEAEISHTQKATLVCLATGFYPDHVELSWWVNGKEVHSGVCTDPQPLKEQPALNDSRYCLSSRLRVSATFWQNPRNHFRCQVQFYGLSENDEWTQDRAKPVTQIVSAEAWGRADCDVKLVEKSFETDTNLNFQNLSVIGFRILLLKVAGFNLLMTLRLWSSRAKRSGSGATNFSLLKQAGDVEENPGPTSMDWIWRILFLVGAATGAHSFEQVQLQQPGAELVKPGASVKMSCKASGYTFSSYWINWMKQKPGQGLEWIGQIYPGDGDTNYNGKFKGRATLTADTSSSTAYMQLSSLTSEDSAVYFCARSITTVVGCAMDYWGQGTSVTVSSTRIQNPDPAVYQLRDSKSSDKSVCLFTDFDSQTNVSQSKDSDVYITDKCVLDMRSMDFKSNSAVAWSNKSDFACANAFNNSIIPEDTFFPSPESSCGFTSESYQQGVLSATILYEILLGKATLYAVLVSALVLMAMVKRKDSRG

SEQ ID NO: 43790 - protein, 735 aa, synthetic construct
MALPVTALLLPLALLLHAARPMLPAPKNLVVSRITEDSARLSWTAPDAAFDSFPIRYIETLIWGEAIWLDVPGSERSYDLTGLKPGTEYAVVITGVKGGRFSSPLVASFTTGTGGGGSGGGGSGGGGSEFDIQMTQSPSSLSASVGDRVTITCKASDHINNWLAWYQQKPGQAPKLLIYGATTLETGVPSRFSGSGSGTDYTLTISSLQPEDFATYYCQQSWNTPWTFGQGTKLEIKRLEIQNPDPAVYQLRDSKSSDKSVCLFTDFDSQTNVSQSKDSDVYITDKCVLDMRSMDFKSNSAVAWSNKSDFACANAFNNSIIPEDTFFPSPESSCGFTSESYQQGVLSATILYEILLGKATLYAVLVSALVLMAMVKRKDSRGRAKRSGSGVKQTLNFDLLKLAGDVESNPGPTSMDWIWRILFLVGAATGAHSFEQVQLQQPGAELVKPGASVKMSCKASGYTFSSYWINWMKQKPGQGLEWIGQIYPGDGDTNYNGKFKGRATLTADTSSSTAYMQLSSLTSEDSAVYFCARSITTVVGCAMDYWGQGTSVTVSSTREDLKNVFPPEVAVFEPSEAEISHTQKATLVCLATGFYPDHVELSWWVNGKEVHSGVCTDPQPLKEQPALNDSRYCLSSRLRVSATFWQNPRNHFRCQVQFYGLSENDEWTQDRAKPVTQIVSAEAWGRADCDVKLVEKSFETDTNLNFQNLSVIGFRILLLKVAGFNLLMTLRLWSS

SEQ ID NO: 43791 - protein, 760 aa, synthetic construct
MALPVTALLLPLALLLHAARPEVQLVESGGGLVQPGGSLRLSCAASGFNIKDTCIGWVRRAPGKEEELVAKICKYSGHTRYADSVKGRFTISADTSKNTAYLQMNSLRAEDTAVYYCAAVSVRDGHYNYWGQGTTVTVSSGTGGGGSGGGGSGGGGSEFDIQMTQSPSSLSASVGDRVTITCKASDHINNWLAWYQQKPGQAPKLLIYGATTLETGVPSRFSGSGSGTDYTLTISSLQPEDFATYYCQQSWNTPWTFGQGTKLEIKRLEDLKNVFPPEVAVFEPSEAEISHTQKATLVCLATGFYPDHVELSWWVNGKEVHSGVCTDPQPLKEQPALNDSRYCLSSRLRVSATFWQNPRNHFRCQVQFYGLSENDEWTQDRAKPVTQIVSAEAWGRADCDVKLVEKSFETDTNLNFQNLSVIGFRILLLKVAGFNLLMTLRLWSSRAKRSGSGATNFSLLKQAGDVEENPGPTSMDWIWRILFLVGAATGAHSFEQVQLQQPGAELVKPGASVKMSCKASGYTFSSYWINWMKQKPGQGLEWIGQIYPGDGDTNYNGKFKGRATLTADTSSSTAYMQLSSLTSEDSAVYFCARSITTVVGCAMDYWGQGTSVTVSSTRIQNPDPAVYQLRDSKSSDKSVCLFTDFDSQTNVSQSKDSDVYITDKCVLDMRSMDFKSNSAVAWSNKSDFACANAFNNSIIPEDTFFPSPESSCGFTSESYQQGVLSATILYEILLGKATLYAVLVSALVLMAMVKRKDSRG

SEQ ID NO: 43792 - protein, 764 aa, synthetic construct
MALPVTALLLPLALLLHAARPEVQLVESGGGLVQPGGSLRLSCAASGFNIKDTCIGWVRRAPGKEEELVAKICKYSGHTRYADSVKGRFTISADTSKNTAYLQMNSLRAEDTAVYYCAAVSVRDGHYNYWGQGTTVTVSSGTGGGGSGGGGSGGGGSEFDIQMTQSPSSLSASVGDRVTITCKASDHINNWLAWYQQKPGQAPKLLIYGATTLETGVPSRFSGSGSGTDYTLTISSLQPEDFATYYCQQSWNTPWTFGQGTKLEIKRLEIQNPDPAVYQLRDSKSSDKSVCLFTDFDSQTNVSQSKDSDVYITDKCVLDMRSMDFKSNSAVAWSNKSDFACANAFNNSIIPEDTFFPSPESSCGFTSESYQQGVLSATILYEILLGKATLYAVLVSALVLMAMVKRKDSRGRAKRSGSGVKQTLNFDLLKLAGDVESNPGPTSMDWIWRILFLVGAATGAHSFEQVQLQQPGAELVKPGASVKMSCKASGYTFSSYWINWMKQKPGQGLEWIGQIYPGDGDTNYNGKFKGRATLTADTSSSTAYMQLSSLTSEDSAVYFCARSITTVVGCAMDYWGQGTSVTVSSTREDLKNVFPPEVAVFEPSEAEISHTQKATLVCLATGFYPDHVELSWWVNGKEVHSGVCTDPQPLKEQPALNDSRYCLSSRLRVSATFWQNPRNHFRCQVQFYGLSENDEWTQDRAKPVTQIVSAEAWGRADCDVKLVEKSFETDTNLNFQNLSVIGFRILLLKVAGFNLLMTLRLWSS

SEQ ID NO: 43793 - protein, 1131 aa, synthetic construct
MALPVTALLLPLALLLHAARPEVQLVESGGGLVQAGGSLRLSCAASGRTFSMGWFRQAPGKEREFVAAITYSGGSPYYADSVKGRFTISRDNAKNTVYLQMNSLKPEDTAVYYCAANPTYGSDWNAENWGQGTQVTVSSGTGGGGSGGGGSGGGGSEFDIQMTQSPSSLSASVGDRVTITCKASDHINNWLAWYQQKPGQAPKLLIYGATTLETGVPSRFSGSGSGTDYTLTISSLQPEDFATYYCQQSWNTPWTFGQGTKLEIKRLEDLKNVFPPEVAVFEPSEAEISHTQKATLVCLATGFYPDHVELSWWVNGKEVHSGVCTDPQPLKEQPALNDSRYCLSSRLRVSATFWQNPRNHFRCQVQFYGLSENDEWTQDRAKPVTQIVSAEAWGRADCDVKLVEKSFETDTNLNFQNLSVIGFRILLLKVAGFNLLMTLRLWSSRAKRSGSGATNFSLLKQAGDVEENPGPTSATMDWIWRILFLVGAATGAHSGPEVQLVESGGGLVQAGGSLRLSCAASGRTFTMGWFRQAPGKEREFVAAISLSPTLAYYADSVKGRFTISRDNAKNTVVLQMNSLKPEDTALYYCAADRKSVMSIRPDYWGQGTQVTVSSGSGGGGSGGGGSGGGGSFEQVQLQQPGAELVKPGASVKMSCKASGYTFSSYWINWMKQKPGQGLEWIGQIYPGDGDTNYNGKFKGRATLTADTSSSTAYMQLSSLTSEDSAVYFCARSITTVVGCAMDYWGQGTSVTVSSTRIQNPDPAVYQLRDSKSSDKSVCLFTDFDSQTNVSQSKDSDVYITDKCVLDMRSMDFKSNSAVAWSNKSDFACANAFNNSIIPEDTFFPSPESSCGFTSESYQQGVLSATILYEILLGKATLYAVLVSALVLMAMVKRKDSRGRAKRSGSGVKQTLNFDLLKLAGDVESNPGPSRGHMTEYKPTVRLATRDDVPRAVRTLAAAFADYPATRHTVDPDRHIERVTELQELFLTRVGLDIGKVWVADDGAAVAVWTTPESVEAGAVFAEIGPRMAELSGSRLAAQQQMEGLLAPHRPKEPAWFLATVGVSPDHQGKGLGSAVVLPGVEAAERAGVPAFLETSAPRNLPFYERLGFTVTADVEVPEGPRTWCMTRKPGA

SEQ ID NO: 43794 - protein, 769 aa, synthetic construct
MALPVTALLLPLALLLHAARPEVQLVESGGGLVQPGGSLRLSCAASGFASDYYIIGWFRQAPGKEREGVSCISSRYANTNYADSVKGRFTISRDNAKNTVYLQMNSLKPEDTAVYYCAADTRRYTCPDIATMHRNFDSWGQGTLVTVSSGTGGGGSGGGGSGGGGSEFDIQMTQSPSSLSASVGDRVTITCKASDHINNWLAWYQQKPGQAPKLLIYGATTLETGVPSRFSGSGSGTDYTLTISSLQPEDFATYYCQQSWNTPWTFGQGTKLEIKRLEDLKNVFPPEVAVFEPSEAEISHTQKATLVCLATGFYPDHVELSWWVNGKEVHSGVCTDPQPLKEQPALNDSRYCLSSRLRVSATFWQNPRNHFRCQVQFYGLSENDEWTQDRAKPVTQIVSAEAWGRADCDVKLVEKSFETDTNLNFQNLSVIGFRILLLKVAGFNLLMTLRLWSSRAKRSGSGATNFSLLKQAGDVEENPGPTSMDWIWRILFLVGAATGAHSFEQVQLQQPGAELVKPGASVKMSCKASGYTFSSYWINWMKQKPGQGLEWIGQIYPGDGDTNYNGKFKGRATLTADTSSSTAYMQLSSLTSEDSAVYFCARSITTVVGCAMDYWGQGTSVTVSSTRIQNPDPAVYQLRDSKSSDKSVCLFTDFDSQTNVSQSKDSDVYITDKCVLDMRSMDFKSNSAVAWSNKSDFACANAFNNSIIPEDTFFPSPESSCGFTSESYQQGVLSATILYEILLGKATLYAVLVSALVLMAMVKRKDSRG

SEQ ID NO: 43795 - protein, 769 aa, synthetic construct
MALPVTALLLPLALLLHAARPEVQLVESGGGLVQPGGSLRLSCEASGFASDDYIIGWFRQAPGKEREGVSCISSKYANTVYTDSVKGRFRLSRGTAKNTVYLQMSALKPEDTAVYYCAMDSRRVTCPEISTMHRNFDSWGQGTLVTVSSGTGGGGSGGGGSGGGGSEFDIQMTQSPSSLSASVGDRVTITCKASDHINNWLAWYQQKPGQAPKLLIYGATTLETGVPSRFSGSGSGTDYTLTISSLQPEDFATYYCQQSWNTPWTFGQGTKLEIKRLEDLKNVFPPEVAVFEPSEAEISHTQKATLVCLATGFYPDHVELSWWVNGKEVHSGVCTDPQPLKEQPALNDSRYCLSSRLRVSATFWQNPRNHFRCQVQFYGLSENDEWTQDRAKPVTQIVSAEAWGRADCDVKLVEKSFETDTNLNFQNLSVIGFRILLLKVAGFNLLMTLRLWSSRAKRSGSGATNFSLLKQAGDVEENPGPTSMDWIWRILFLVGAATGAHSFEQVQLQQPGAELVKPGASVKMSCKASGYTFSSYWINWMKQKPGQGLEWIGQIYPGDGDTNYNGKFKGRATLTADTSSSTAYMQLSSLTSEDSAVYFCARSITTVVGCAMDYWGQGTSVTVSSTRIQNPDPAVYQLRDSKSSDKSVCLFTDFDSQTNVSQSKDSDVYITDKCVLDMRSMDFKSNSAVAWSNKSDFACANAFNNSIIPEDTFFPSPESSCGFTSESYQQGVLSATILYEILLGKATLYAVLVSALVLMAMVKRKDSRG

SEQ ID NO: 43796 - protein, 769 aa, synthetic construct
MALPVTALLLPLALLLHAARPEVQLVESGGGLVQPGGSLRLSCAASGFASDYYIIGWFRQAPGKEREGVSCISSRYANTNYADSVKGRFTISRDNAKNTVYLQMNSLKPEDTAVYYCAADTRRYTCPDIATMHRNFDSWGQGTLVTVSSGTGGGGSGGGGSGGGGSEFDIQMTQSPSSLSASVGDRVTITCKASDHINNWLAWYQQKPGQAPKLLIYGATTLETGVPSRFSGSGSGTDYTLTISSLQPEDFATYYCQQSWNTPWTFGQGTKLEIKRLEIQNPDPAVYQLRDSKSSDKSVCLFTDFDSQTNVSQSKDSDVYITDKCVLDMRSMDFKSNSAVAWSNKSDFACANAFNNSIIPEDTFFPSPESSCGFTSESYQQGVLSATILYEILLGKATLYAVLVSALVLMAMVKRKDSRGRAKRSGSGATNFSLLKQAGDVEENPGPTSMDWIWRILFLVGAATGAHSFEQVQLQQPGAELVKPGASVKMSCKASGYTFSSYWINWMKQKPGQGLEWIGQIYPGDGDTNYNGKFKGRATLTADTSSSTAYMQLSSLTSEDSAVYFCARSITTVVGCAMDYWGQGTSVTVSSTRDLKNVFPPEVAVFEPSEAEISHTQKATLVCLATGFYPDHVELSWWVNGKEVHSGVCTDPQPLKEQPALNDSRYCLSSRLRVSATFWQNPRNHFRCQVQFYGLSENDEWTQDRAKPVTQIVSAEAWGRADCDVKLVEKSFETDTNLNFQNLSVIGFRILLLKVAGFNLLMTLRLWSS

SEQ ID NO: 43797 - protein, 769 aa, synthetic construct
MALPVTALLLPLALLLHAARPEVQLVESGGGLVQPGGSLRLSCEASGFASDDYIIGWFRQAPGKEREGVSCISSKYANTVYTDSVKGRFRLSRGTAKNTVYLQMSALKPEDTAVYYCAMDSRRVTCPEISTMHRNFDSWGQGTLVTVSSGTGGGGSGGGGSGGGGSEFDIQMTQSPSSLSASVGDRVTITCKASDHINNWLAWYQQKPGQAPKLLIYGATTLETGVPSRFSGSGSGTDYTLTISSLQPEDFATYYCQQSWNTPWTFGQGTKLEIKRLEIQNPDPAVYQLRDSKSSDKSVCLFTDFDSQTNVSQSKDSDVYITDKCVLDMRSMDFKSNSAVAWSNKSDFACANAFNNSIIPEDTFFPSPESSCGFTSESYQQGVLSATILYEILLGKATLYAVLVSALVLMAMVKRKDSRGRAKRSGSGATNFSLLKQAGDVEENPGPTSMDWIWRILFLVGAATGAHSFEQVQLQQPGAELVKPGASVKMSCKASGYTFSSYWINWMKQKPGQGLEWIGQIYPGDGDTNYNGKFKGRATLTADTSSSTAYMQLSSLTSEDSAVYFCARSITTVVGCAMDYWGQGTSVTVSSTRDLKNVFPPEVAVFEPSEAEISHTQKATLVCLATGFYPDHVELSWWVNGKEVHSGVCTDPQPLKEQPALNDSRYCLSSRLRVSATFWQNPRNHFRCQVQFYGLSENDEWTQDRAKPVTQIVSAEAWGRADCDVKLVEKSFETDTNLNFQNLSVIGFRILLLKVAGFNLLMTLRLWSS

SEQ ID NO: 43798 - protein, 760 aa, synthetic construct
MALPVTALLLPLALLLHAARPQVKLEESGGGLVQPGESLRLSCSASGSIFKVFRVFAMSWYRQGPGKQRELVASISSGETTTYAESVKGRFTISRDNAKNTAYLQMDSLKPEDTAVYYCNADHTFTGDFWGQGTQVTVSSGTGGGGSGGGGSGGGGSEFDIQMTQSPSSLSASVGDRVTITCKASDHINNWLAWYQQKPGQAPKLLIYGATTLETGVPSRFSGSGSGTDYTLTISSLQPEDFATYYCQQSWNTPWTFGQGTKLEIKRLEIQNPDPAVYQLRDSKSSDKSVCLFTDFDSQTNVSQSKDSDVYITDKCVLDMRSMDFKSNSAVAWSNKSDFACANAFNNSIIPEDTFFPSPESSCGFTSESYQQGVLSATILYEILLGKATLYAVLVSALVLMAMVKRKDSRGRAKRSGSGATNFSLLKQAGDVEENPGPTSMDWIWRILFLVGAATGAHSFEQVQLQQPGAELVKPGASVKMSCKASGYTFSSYWINWMKQKPGQGLEWIGQIYPGDGDTNYNGKFKGRATLTADTSSSTAYMQLSSLTSEDSAVYFCARSITTVVGCAMDYWGQGTSVTVSSTRDLKNVFPPEVAVFEPSEAEISHTQKATLVCLATGFYPDHVELSWWVNGKEVHSGVCTDPQPLKEQPALNDSRYCLSSRLRVSATFWQNPRNHFRCQVQFYGLSENDEWTQDRAKPVTQIVSAEAWGRADCDVKLVEKSFETDTNLNFQNLSVIGFRILLLKVAGFNLLMTLRLWSS

SEQ ID NO: 43799 - protein, 761 aa, synthetic construct
MALPVTALLLPLALLLHAARPDIQMTQSPSSLSASVGDRVTITCKASDHINNWLAWYQQKPGQAPKLLIYGATTLETGVPSRFSGSGSGTDYTLTISSLQPEDFATYYCQQSWNTPWTFGQGTKLEIKRLEDLKNVFPPEVAVFEPSEAEISHTQKATLVCLATGFYPDHVELSWWVNGKEVHSGVCTDPQPLKEQPALNDSRYCLSSRLRVSATFWQNPRNHFRCQVQFYGLSENDEWTQDRAKPVTQIVSAEAWGRADCDVKLVEKSFETDTNLNFQNLSVIGFRILLLKVAGFNLLMTLRLWSSRAKRSGSGATNFSLLKQAGDVEENPGPTSATMDWIWRILFLVGAATGAHSGPEVQLVESGGGLVQAGGSLRLSCAASGRTFSMGWFRQAPGKEREFVAAITYSGGSPYYADSVKGRFTISRDNAKNTVYLQMNSLKPEDTAVYYCAANPTYGSDWNAENWGQGTQVTVSSGSGGGGSGGGGSGGGGSFEQVQLQQPGAELVKPGASVKMSCKASGYTFSSYWINWMKQKPGQGLEWIGQIYPGDGDTNYNGKFKGRATLTADTSSSTAYMQLSSLTSEDSAVYFCARSITTVVGCAMDYWGQGTSVTVSSTRIQNPDPAVYQLRDSKSSDKSVCLFTDFDSQTNVSQSKDSDVYITDKCVLDMRSMDFKSNSAVAWSNKSDFACANAFNNSIIPEDTFFPSPESSCGFTSESYQQGVLSATILYEILLGKATLYAVLVSALVLMAMVKRKDSRG

SEQ ID NO: 43800 - protein, 762 aa, synthetic construct
MALPVTALLLPLALLLHAARPDIQMTQSPSSLSASVGDRVTITCKASDHINNWLAWYQQKPGQAPKLLIYGATTLETGVPSRFSGSGSGTDYTLTISSLQPEDFATYYCQQSWNTPWTFGQGTKLEIKRLEDLKNVFPPEVAVFEPSEAEISHTQKATLVCLATGFYPDHVELSWWVNGKEVHSGVCTDPQPLKEQPALNDSRYCLSSRLRVSATFWQNPRNHFRCQVQFYGLSENDEWTQDRAKPVTQIVSAEAWGRADCDVKLVEKSFETDTNLNFQNLSVIGFRILLLKVAGFNLLMTLRLWSSRAKRSGSGATNFSLLKQAGDVEENPGPTSATMDWIWRILFLVGAATGAHSGPEVQLVESGGGLVQPGGSLRLSCAASGSIFGFNDMAWYRQAPGKQRELVALISRVGVTSSADSVKGRFTISRVNAKDTVYLQMNSLKPEDTAVYYCYMDQRLDGSTLAYWGQGTQVTVSSGSGGGGSGGGGSGGGGSFEQVQLQQPGAELVKPGASVKMSCKASGYTFSSYWINWMKQKPGQGLEWIGQIYPGDGDTNYNGKFKGRATLTADTSSSTAYMQLSSLTSEDSAVYFCARSITTVVGCAMDYWGQGTSVTVSSTRIQNPDPAVYQLRDSKSSDKSVCLFTDFDSQTNVSQSKDSDVYITDKCVLDMRSMDFKSNSAVAWSNKSDFACANAFNNSIIPEDTFFPSPESSCGFTSESYQQGVLSATILYEILLGKATLYAVLVSALVLMAMVKRKDSRG

SEQ ID NO: 43801 - protein, 758 aa, synthetic construct
MALPVTALLLPLALLLHAARPDIQMTQSPSSLSASVGDRVTITCKASDHINNWLAWYQQKPGQAPKLLIYGATTLETGVPSRFSGSGSGTDYTLTISSLQPEDFATYYCQQSWNTPWTFGQGTKLEIKRLEDLKNVFPPEVAVFEPSEAEISHTQKATLVCLATGFYPDHVELSWWVNGKEVHSGVCTDPQPLKEQPALNDSRYCLSSRLRVSATFWQNPRNHFRCQVQFYGLSENDEWTQDRAKPVTQIVSAEAWGRADCDVKLVEKSFETDTNLNFQNLSVIGFRILLLKVAGFNLLMTLRLWSSRAKRSGSGATNFSLLKQAGDVEENPGPTSATMDWIWRILFLVGAATGAHSGPEVQLVESGGGLVQAGGSLRLSCAASGSVFSGNVMGWYRQAPGKEREWVAAIASGGSIYYRDSVKGRFTISRDNAKNTVYLQMNSLKPEDTAVYYCNSHPPTLPYWGLGTQVTVSSGSGGGGSGGGGSGGGGSFEQVQLQQPGAELVKPGASVKMSCKASGYTFSSYWINWMKQKPGQGLEWIGQIYPGDGDTNYNGKFKGRATLTADTSSSTAYMQLSSLTSEDSAVYFCARSITTVVGCAMDYWGQGTSVTVSSTRIQNPDPAVYQLRDSKSSDKSVCLFTDFDSQTNVSQSKDSDVYITDKCVLDMRSMDFKSNSAVAWSNKSDFACANAFNNSIIPEDTFFPSPESSCGFTSESYQQGVLSATILYEILLGKATLYAVLVSALVLMAMVKRKDSRG

SEQ ID NO: 43802 - protein, 756 aa, synthetic construct
MALPVTALLLPLALLLHAARPDIQMTQSPSSLSASVGDRVTITCKASDHINNWLAWYQQKPGQAPKLLIYGATTLETGVPSRFSGSGSGTDYTLTISSLQPEDFATYYCQQSWNTPWTFGQGTKLEIKRLEDLKNVFPPEVAVFEPSEAEISHTQKATLVCLATGFYPDHVELSWWVNGKEVHSGVCTDPQPLKEQPALNDSRYCLSSRLRVSATFWQNPRNHFRCQVQFYGLSENDEWTQDRAKPVTQIVSAEAWGRADCDVKLVEKSFETDTNLNFQNLSVIGFRILLLKVAGFNLLMTLRLWSSRAKRSGSGATNFSLLKQAGDVEENPGPTSATMDWIWRILFLVGAATGAHSGPEVQLLESGGGLVQPGGSLRLSCAASGFSFSSYALSWVRQAPGKGLEWVSSIGENDGTTDYADAVKGRFTISRDNSKNTLYLQMNSLRVEDTAVYYCVKDGIHWGQGTLVTVSSGSGGGGSGGGGSGGGGSFEQVQLQQPGAELVKPGASVKMSCKASGYTFSSYWINWMKQKPGQGLEWIGQIYPGDGDTNYNGKFKGRATLTADTSSSTAYMQLSSLTSEDSAVYFCARSITTVVGCAMDYWGQGTSVTVSSTRIQNPDPAVYQLRDSKSSDKSVCLFTDFDSQTNVSQSKDSDVYITDKCVLDMRSMDFKSNSAVAWSNKSDFACANAFNNSIIPEDTFFPSPESSCGFTSESYQQGVLSATILYEILLGKATLYAVLVSALVLMAMVKRKDSRG

SEQ ID NO: 43803 - protein, 1125 aa, synthetic construct
MGPRLLFWALLCLLGTGPVEAGVTQSPTHLIKTRGQQATLRCSPISGHTSVYWYQQALGLGLQFLLWYDEGEERNRGNFPPRFSGRQFPNYSSELNVNALELEDSALYLCASSLGGPRGLAGLRGDEQFFGPGTRLTVLEGTGGGGSGGGEFDIQMTQSPSSLSASVGDRVTITCKASDHINNWLAWYQQKPGQAPKLLIYGATTLETGVPSRFSGSGSGTDYTLTISSLQPEDFATYYCQQSWNTPWTFGQGTKLEIKRLEDLKNVFPPEVAVFEPSEAEISHTQKATLVCLATGFYPDHVELSWWVNGKEVHSGVCTDPQPLKEQPALNDSRYCLSSRLRVSATFWQNPRNHFRCQVQFYGLSENDEWTQDRAKPVTQIVSAEAWGRADCDVKLVEKSFETDTNLNFQNLSVIGFRILLLKVAGFNLLMTLRLWSSRAKRSGSGATNFSLLKQAGDVEENPGPTSATMDWIWRILFLVGAATGAHSGPEVQLVESGGGLVQAGGSLRLSCAASGRTFSMGWFRQAPGKEREFVAAITYSGGSPYYADSVKGRFTISRDNAKNTVYLQMNSLKPEDTAVYYCAANPTYGSDWNAENWGQGTQVTVSSGSGGGGSGGGGSGGGGSFEQVQLQQPGAELVKPGASVKMSCKASGYTFSSYWINWMKQKPGQGLEWIGQIYPGDGDTNYNGKFKGRATLTADTSSSTAYMQLSSLTSEDSAVYFCARSITTVVGCAMDYWGQGTSVTVSSTRIQNPDPAVYQLRDSKSSDKSVCLFTDFDSQTNVSQSKDSDVYITDKCVLDMRSMDFKSNSAVAWSNKSDFACANAFNNSIIPEDTFFPSPESSCGFTSESYQQGVLSATILYEILLGKATLYAVLVSALVLMAMVKRKDSRGRAKRSGSGVKQTLNFDLLKLAGDVESNPGPSRGHMTEYKPTVRLATRDDVPRAVRTLAAAFADYPATRHTVDPDRHIERVTELQELFLTRVGLDIGKVWVADDGAAVAVWTTPESVEAGAVFAEIGPRMAELSGSRLAAQQQMEGLLAPHRPKEPAWFLATVGVSPDHQGKGLGSAVVLPGVEAAERAGVPAFLETSAPRNLPFYERLGFTVTADVEVPEGPRTWCMTRKPGA

SEQ ID NO: 43804 - protein, 1124 aa, synthetic construct
MGPRLLFWALLCLLGTGPVEAGVTQSPTHLIKTRGQQATLRCSPISGHTSVYWYQQALGLGLQFLLWYDEGEERNRGNFPPRFSGRQFPNYSSELNVNALELEDSALYLCASSLGGDELGADGNEQFFGPGTRLTVLEGTGGGGSGGGSEFDIQMTQSPSSLSASVGDRVTITCKASDHINNWLAWYQQKPGQAPKLLIYGATTLETGVPSRFSGSGSGTDYTLTISSLQPEDFATYYCQQSWNTPWTFGQGTKLEIKRLEDLKNVFPPEVAVFEPSEAEISHTQKATLVCLATGFYPDHVELSWWVNGKEVHSGVCTDPQPLKEQPALNDSRYCLSSRLRVSATFWQNPRNHFRCQVQFYGLSENDEWTQDRAKPVTQIVSAEAWGRADCDVKLVEKSFETDTNLNFQNLSVIGFRILLLKVAGFNLLMTLRLWSSRAKRSGSGATNFSLLKQAGDVEENPGPTSATMDWIWRILFLVGAATGAHSGPEVQLVESGGGLVQAGGSLRLSCAASGRTFSMGWFRQAPGKEREFVAAITYSGGSPYYADSVKGRFTISRDNAKNTVYLQMNSLKPEDTAVYYCAANPTYGSDWNAENWGQGTQVTVSSGSGGGGSGGGGSGGGGSFEQVQLQQPGAELVKPGASVKMSCKASGYTFSSYWINWMKQKPGQGLEWIGQIYPGDGDTNYNGKFKGRATLTADTSSSTAYMQLSSLTSEDSAVYFCARSITTVVGCAMDYWGQGTSVTVSSTRIQNPDPAVYQLRDSKSSDKSVCLFTDFDSQTNVSQSKDSDVYITDKCVLDMRSMDFKSNSAVAWSNKSDFACANAFNNSIIPEDTFFPSPESSCGFTSESYQQGVLSATILYEILLGKATLYAVLVSALVLMAMVKRKDSRGRAKRSGSGVKQTLNFDLLKLAGDVESNPGPSRGHMTEYKPTVRLATRDDVPRAVRTLAAAFADYPATRHTVDPDRHIERVTELQELFLTRVGLDIGKVWVADDGAAVAVWTTPESVEAGAVFAEIGPRMAELSGSRLAAQQQMEGLLAPHRPKEPAWFLATVGVSPDHQGKGLGSAVVLPGVEAAERAGVPAFLETSAPRNLPFYERLGFTVTADVEVPEGPRTWCMTRKPGA

SEQ ID NO: 43805 - protein, 949 aa, synthetic construct
MALPVTALLLPLALLLHAARPDIQMTQSPSSLSASVGDRVTITCKASDHINNWLAWYQQKPGQAPKLLIYGATTLETGVPSRFSGSGSGTDYTLTISSLQPEDFATYYCQQSWNTPWTFGQGTKLEIKRLEDLKNVFPPEVAVFEPSEAEISHTQKATLVCLATGFYPDHVELSWWVNGKEVHSGVCTDPQPLKEQPALNDSRYCLSSRLRVSATFWQNPRNHFRCQVQFYGLSENDEWTQDRAKPVTQIVSAEAWGRADCDVKLVEKSFETDTNLNFQNLSVIGFRILLLKVAGFNLLMTLRLWSSRAKRSGSGATNFSLLKQAGDVEENPGPTSATMDWIWRILFLVGAATGAHSGPMGSWLEFYHRLNAIDSRLWALGGSEAELAAFEKEIAAFESELQAYKGKGNPEVESLRDHAAHIREWLQAYRHNGSGGGGSGGGGSGGGGSFEQVQLQQPGAELVKPGASVKMSCKASGYTFSSYWINWMKQKPGQGLEWIGQIYPGDGDTNYNGKFKGRATLTADTSSSTAYMQLSSLTSEDSAVYFCARSITTVVGCAMDYWGQGTSVTVSSTRIQNPDPAVYQLRDSKSSDKSVCLFTDFDSQTNVSQSKDSDVYITDKCVLDMRSMDFKSNSAVAWSNKSDFACANAFNNSIIPEDTFFPSPESSCGFTSESYQQGVLSATILYEILLGKATLYAVLVSALVLMAMVKRKDSRGRAKRSGSGVKQTLNFDLLKLAGDVESNPGPSRGHMTEYKPTVRLATRDDVPRAVRTLAAAFADYPATRHTVDPDRHIERVTELQELFLTRVGLDIGKVWVADDGAAVAVWTTPESVEAGAVFAEIGPRMAELSGSRLAAQQQMEGLLAPHRPKEPAWFLATVGVSPDHQGKGLGSAVVLPGVEAAERAGVPAFLETSAPRNLPFYERLGFTVTADVEVPEGPRTWCMTRKPGA

SEQ ID NO: 43806 - protein, 949 aa, synthetic construct
MALPVTALLLPLALLLHAARPACMGSWFEFYDRLNAIDARLWALGGSEAELAAFEKEIAAFESELQAYKGKGNPEVENLRVHAAAIREWLQAYRHNGTGGGGSGGGGSGGGGSEFDIQMTQSPSSLSASVGDRVTITCKASDHINNWLAWYQQKPGQAPKLLIYGATTLETGVPSRFSGSGSGTDYTLTISSLQPEDFATYYCQQSWNTPWTFGQGTKLEIKRLEDLKNVFPPEVAVFEPSEAEISHTQKATLVCLATGFYPDHVELSWWVNGKEVHSGVCTDPQPLKEQPALNDSRYCLSSRLRVSATFWQNPRNHFRCQVQFYGLSENDEWTQDRAKPVTQIVSAEAWGRADCDVKLVEKSFETDTNLNFQNLSVIGFRILLLKVAGFNLLMTLRLWSSRAKRSGSGATNFSLLKQAGDVEENPGPTSMDWIWRILFLVGAATGAHSFEQVQLQQPGAELVKPGASVKMSCKASGYTFSSYWINWMKQKPGQGLEWIGQIYPGDGDTNYNGKFKGRATLTADTSSSTAYMQLSSLTSEDSAVYFCARSITTVVGCAMDYWGQGTSVTVSSTRIQNPDPAVYQLRDSKSSDKSVCLFTDFDSQTNVSQSKDSDVYITDKCVLDMRSMDFKSNSAVAWSNKSDFACANAFNNSIIPEDTFFPSPESSCGFTSESYQQGVLSATILYEILLGKATLYAVLVSALVLMAMVKRKDSRGRAKRSGSGVKQTLNFDLLKLAGDVESNPGPSRGHMTEYKPTVRLATRDDVPRAVRTLAAAFADYPATRHTVDPDRHIERVTELQELFLTRVGLDIGKVWVADDGAAVAVWTTPESVEAGAVFAEIGPRMAELSGSRLAAQQQMEGLLAPHRPKEPAWFLATVGVSPDHQGKGLGSAVVLPGVEAAERAGVPAFLETSAPRNLPFYERLGFTVTADVEVPEGPRTWCMTRKPGA

SEQ ID NO: 43807 - protein, 1066 aa, synthetic construct
MALPVTALLLPLALLLHAARPACMDPDLEIRAAFLRQRNTALRTEVAELEQEVQRLENEVSQYETRYGPLGGGKGTGGGGSGGGGSGGGGSEFDIQMTQSPSSLSASVGDRVTITCKASDHINNWLAWYQQKPGQAPKLLIYGATTLETGVPSRFSGSGSGTDYTLTISSLQPEDFATYYCQQSWNTPWTFGQGTKLEIKRLEDLKNVFPPEVAVFEPSEAEISHTQKATLVCLATGFYPDHVELSWWVNGKEVHSGVCTDPQPLKEQPALNDSRYCLSSRLRVSATFWQNPRNHFRCQVQFYGLSENDEWTQDRAKPVTQIVSAEAWGRADCDVKLVEKSFETDTNLNFQNLSVIGFRILLLKVAGFNLLMTLRLWSSRAKRSGSGATNFSLLKQAGDVEENPGPTSATMDWIWRILFLVGAATGAHSGPEVQLVESGGGLVQAGGSLRLSCAASGRTFSMGWFRQAPGKEREFVAAITYSGGSPYYADSVKGRFTISRDNAKNTVYLQMNSLKPEDTAVYYCAANPTYGSDWNAENWGQGTQVTVSSGSGGGGSGGGGSGGGGSFEQVQLQQPGAELVKPGASVKMSCKASGYTFSSYWINWMKQKPGQGLEWIGQIYPGDGDTNYNGKFKGRATLTADTSSSTAYMQLSSLTSEDSAVYFCARSITTVVGCAMDYWGQGTSVTVSSTRIQNPDPAVYQLRDSKSSDKSVCLFTDFDSQTNVSQSKDSDVYITDKCVLDMRSMDFKSNSAVAWSNKSDFACANAFNNSIIPEDTFFPSPESSCGFTSESYQQGVLSATILYEILLGKATLYAVLVSALVLMAMVKRKDSRGRAKRSGSGVKQTLNFDLLKLAGDVESNPGPSRGHMTEYKPTVRLATRDDVPRAVRTLAAAFADYPATRHTVDPDRHIERVTELQELFLTRVGLDIGKVWVADDGAAVAVWTTPESVEAGAVFAEIGPRMAELSGSRLAAQQQMEGLLAPHRPKEPAWFLATVGVSPDHQGKGLGSAVVLPGVEAAERAGVPAFLETSAPRNLPFYERLGFTVTADVEVPEGPRTWCMTRKPGA

SEQ ID NO: 43808 - protein, 949 aa, synthetic construct
MALPVTALLLPLALLLHAARPDIQMTQSPSSLSASVGDRVTITCKASDHINNWLAWYQQKPGQAPKLLIYGATTLETGVPSRFSGSGSGTDYTLTISSLQPEDFATYYCQQSWNTPWTFGQGTKLEIKRLEDLKNVFPPEVAVFEPSEAEISHTQKATLVCLATGFYPDHVELSWWVNGKEVHSGVCTDPQPLKEQPALNDSRYCLSSRLRVSATFWQNPRNHFRCQVQFYGLSENDEWTQDRAKPVTQIVSAEAWGRADCDVKLVEKSFETDTNLNFQNLSVIGFRILLLKVAGFNLLMTLRLWSSRAKRSGSGATNFSLLKQAGDVEENPGPTSATMDWIWRILFLVGAATGAHSGPMGSWSEFYDRLHAIHHRLYALGGSEAELAAFEKEIAAFESELQAYKGKGNPEVEALRDTAAFIRTRLQAYRHNGSGGGGSGGGGSGGGGSFEQVQLQQPGAELVKPGASVKMSCKASGYTFSSYWINWMKQKPGQGLEWIGQIYPGDGDTNYNGKFKGRATLTADTSSSTAYMQLSSLTSEDSAVYFCARSITTVVGCAMDYWGQGTSVTVSSTRIQNPDPAVYQLRDSKSSDKSVCLFTDFDSQTNVSQSKDSDVYITDKCVLDMRSMDFKSNSAVAWSNKSDFACANAFNNSIIPEDTFFPSPESSCGFTSESYQQGVLSATILYEILLGKATLYAVLVSALVLMAMVKRKDSRGRAKRSGSGVKQTLNFDLLKLAGDVESNPGPSRGHMTEYKPTVRLATRDDVPRAVRTLAAAFADYPATRHTVDPDRHIERVTELQELFLTRVGLDIGKVWVADDGAAVAVWTTPESVEAGAVFAEIGPRMAELSGSRLAAQQQMEGLLAPHRPKEPAWFLATVGVSPDHQGKGLGSAVVLPGVEAAERAGVPAFLETSAPRNLPFYERLGFTVTADVEVPEGPRTWCMTRKPGA

SEQ ID NO: 43809 - protein, 1159 aa, synthetic construct
MALPVTALLLPLALLLHAARPDIQMTQSPSSLSASVGDRVTITCKASDHINNWLAWYQQKPGQAPKLLIYGATTLETGVPSRFSGSGSGTDYTLTISSLQPEDFATYYCQQSWNTPWTFGQGTKLEIKRLEDLKNVFPPEVAVFEPSEAEISHTQKATLVCLATGFYPDHVELSWWVNGKEVHSGVCTDPQPLKEQPALNDSRYCLSSRLRVSATFWQNPRNHFRCQVQFYGLSENDEWTQDRAKPVTQIVSAEAWGRADCDVKLVEKSFETDTNLNFQNLSVIGFRILLLKVAGFNLLMTLRLWSSRAKRSGSGATNFSLLKQAGDVEENPGPTSTMDWIWRILFLVGAATGAHSLFNQEVQIPLTESYCGPCPKNWICYKNNCYQFFDESKNWYESQASCMSQNASLLKVYSKEDQDLLKLVKSAHWMGLVHIPTNGSWQWEDGSILSPNLLTIIEMQKGDCALYASSFKGYIENCSTPNTYICMQRTVSGGGGSGGGGSGGGGDLFNQEVQIPLTESYCGPCPKNWICYKNNCYQFFDESKNWYESQASCMSQNASLLKVYSKEDQDLLKLVKSAHWMGLVHIPTNGSWQWEDGSILSPNLLTIIEMQKGDCALYASSFKGYIENCSTPNTYICMQRTVGSGGGGSGGGGSGGGGSFEQVQLQQPGAELVKPGASVKMSCKASGYTFSSYWINWMKQKPGQGLEWIGQIYPGDGDTNYNGKFKGRATLTADTSSSTAYMQLSSLTSEDSAVYFCARSITTVVGCAMDYWGQGTSVTVSSTRIQNPDPAVYQLRDSKSSDKSVCLFTDFDSQTNVSQSKDSDVYITDKCVLDMRSMDFKSNSAVAWSNKSDFACANAFNNSIIPEDTFFPSPESSCGFTSESYQQGVLSATILYEILLGKATLYAVLVSALVLMAMVKRKDSRGRAKRSGSGVKQTLNFDLLKLAGDVESNPGPSRGHMTEYKPTVRLATRDDVPRAVRTLAAAFADYPATRHTVDPDRHIERVTELQELFLTRVGLDIGKVWVADDGAAVAVWTTPESVEAGAVFAEIGPRMAELSGSRLAAQQQMEGLLAPHRPKEPAWFLATVGVSPDHQGKGLGSAVVLPGVEAAERAGVPAFLETSAPRNLPFYERLGFTVTADVEVPEGPRTWCMTRKPGA

SEQ ID NO: 43810 - protein, 622 aa, synthetic construct; identical to SEQ ID NO: 43767

SEQ ID NO: 43811 - protein, 626 aa, synthetic construct
MALPVTALLLPLALLLHAARPDIQMTQSPSSLSASVGDRVTITCKASDHINNWLAWYQQKPGQAPKLLIYGATTLETGVPSRFSGSGSGTDYTLTISSLQPEDFATYYCQQSWNTPWTFGQGTKLEIKRLEIQNPDPAVYQLRDSKSSDKSVCLFTDFDSQTNVSQSKDSDVYITDKCVLDMRSMDFKSNSAVAWSNKSDFACANAFNNSIIPEDTFFPSPESSCDVKLVEKSFETDTNLNFQILYEILLGKATLYAVLVSALVLMAMVKRKDSRGRAKRSGSGVKQTLNFDLLKLAGDVESNPGPTSMDWIWRILFLVGAATGAHSFEQVQLQQPGAELVKPGASVKMSCKASGYTFSSYWINWMKQKPGQGLEWIGQIYPGDGDTNYNGKFKGRATLTADTSSSTAYMQLSSLTSEDSAVYFCARSITTVVGCAMDYWGQGTSVTVSSTREDLKNVFPPEVAVFEPSEAEISHTQKATLVCLATGFYPDHVELSWWVNGKEVHSGVCTDPQPLKEQPALNDSRYCLSSRLRVSATFWQNPRNHFRCQVQFYGLSENDEWTQDRAKPVTQIVSAEAWGRADCGFTSESYQQGVLSATNLSVIGFRILLLKVAGFNLLMTLRLWSS

SEQ ID NO: 43812 - protein, 757 aa, synthetic construct
MALPVTALLLPLALLLHAARPEVQLVESGGGLVQPGGSLRLSCAASGFSFSDFWMSWVRQAPGKGLEWVATISQAGSEKDYVDSVKGRFTISRDNAKKSLYLQMNSLRAEDTAVYYCASGVYSFDYRGQGTLVTVSSGTGGGGSGGGGSGGGGSEFDIQMTQSPSSLSASVGDRVTITCKASDHINNWLAWYQQKPGQAPKLLIYGATTLETGVPSRFSGSGSGTDYTLTISSLQPEDFATYYCQQSWNTPWTFGQGTKLEIKRLEDLKNVFPPEVAVFEPSEAEISHTQKATLVCLATGFYPDHVELSWWVNGKEVHSGVCTDPQPLKEQPALNDSRYCLSSRLRVSATFWQNPRNHFRCQVQFYGLSENDEWTQDRAKPVTQIVSAEAWGRADCGFTSESYQQGVLSATNLSVIGFRILLLKVAGFNLLMTLRLWSSRAKRSGSGATNFSLLKQAGDVEENPGPTSMDWIWRILFLVGAATGAHSFEQVQLQQPGAELVKPGASVKMSCKASGYTFSSYWINWMKQKPGQGLEWIGQIYPGDGDTNYNGKFKGRATLTADTSSSTAYMQLSSLTSEDSAVYFCARSITTVVGCAMDYWGQGTSVTVSSTRIQNPDPAVYQLRDSKSSDKSVCLFTDFDSQTNVSQSKDSDVYITDKCVLDMRSMDFKSNSAVAWSNKSDFACANAFNNSIIPEDTFFPSPESSCDVKLVEKSFETDTNLNFQILYEILLGKATLYAVLVSALVLMAMVKRKDSRG

SEQ ID NO: 43813 - protein, 761 aa, synthetic construct
MALPVTALLLPLALLLHAARPEVQLVESGGGLVQPGGSLRLSCAASGFSFSDFWMSWVRQAPGKGLEWVATISQAGSEKDYVDSVKGRFTISRDNAKKSLYLQMNSLRAEDTAVYYCASGVYSFDYRGQGTLVTVSSGTGGGGSGGGGSGGGGSEFDIQMTQSPSSLSASVGDRVTITCKASDHINNWLAWYQQKPGQAPKLLIYGATTLETGVPSRFSGSGSGTDYTLTISSLQPEDFATYYCQQSWNTPWTFGQGTKLEIKRLEIQNPDPAVYQLRDSKSSDKSVCLFTDFDSQTNVSQSKDSDVYITDKCVLDMRSMDFKSNSAVAWSNKSDFACANAFNNSIIPEDTFFPSPESSCDVKLVEKSFETDTNLNFQILYEILLGKATLYAVLVSALVLMAMVKRKDSRGRAKRSGSGVKQTLNFDLLKLAGDVESNPGPTSMDWIWRILFLVGAATGAHSFEQVQLQQPGAELVKPGASVKMSCKASGYTFSSYWINWMKQKPGQGLEWIGQIYPGDGDTNYNGKFKGRATLTADTSSSTAYMQLSSLTSEDSAVYFCARSITTVVGCAMDYWGQGTSVTVSSTREDLKNVFPPEVAVFEPSEAEISHTQKATLVCLATGFYPDHVELSWWVNGKEVHSGVCTDPQPLKEQPALNDSRYCLSSRLRVSATFWQNPRNHFRCQVQFYGLSENDEWTQDRAKPVTQIVSAEAWGRADCGFTSESYQQGVLSATNLSVIGFRILLLKVAGFNLLMTLRLWSS

SEQ ID NO: 43814 - protein, 894 aa, synthetic construct
MALPVTALLLPLALLLHAARPEVQLVESGGGLVQPGGSLRLSCAASGFSFSDFWMSWVRQAPGKGLEWVATISQAGSEKDYVDSVKGRFTISRDNAKKSLYLQMNSLRAEDTAVYYCASGVYSFDYRGQGTLVTVSSGTGGGGSGGGGSGGGGSEFDIQMTQSPSSLSASVGDRVTITCKASDHINNWLAWYQQKPGQAPKLLIYGATTLETGVPSRFSGSGSGTDYTLTISSLQPEDFATYYCQQSWNTPWTFGQGTKLEIKRLEDLKNVFPPEVAVFEPSEAEISHTQKATLVCLATGFYPDHVELSWWVNGKEVHSGVCTDPQPLKEQPALNDSRYCLSSRLRVSATFWQNPRNHFRCQVQFYGLSENDEWTQDRAKPVTQIVSAEAWGRADCGFTSESYQQGVLSATNLSVIGFRILLLKVAGFNLLMTLRLWSSRAKRSGSGATNFSLLKQAGDVEENPGPTSMDWIWRILFLVGAATGAHSGPQLQLQESGPGLVKPSETLSLTCTVSGDSISSGDYYWGWIRQPPGKGLEWIGHIYYSGVTYYNPSLKSRVTISVDTSRNQFSLKLSSVTAADTAVYYCTREDSSNWRSRGQGTLVTVSSGSGGGGSGGGGSGGGGSFEQVQLQQPGAELVKPGASVKMSCKASGYTFSSYWINWMKQKPGQGLEWIGQIYPGDGDTNYNGKFKGRATLTADTSSSTAYMQLSSLTSEDSAVYFCARSITTVVGCAMDYWGQGTSVTVSSTRIQNPDPAVYQLRDSKSSDKSVCLFTDFDSQTNVSQSKDSDVYITDKCVLDMRSMDFKSNSAVAWSNKSDFACANAFNNSIIPEDTFFPSPESSCDVKLVEKSFETDTNLNFQILYEILLGKATLYAVLVSALVLMAMVKRKDSRG

SEQ ID NO: 43815 - protein, 898 aa, synthetic construct
MALPVTALLLPLALLLHAARPEVQLVESGGGLVQPGGSLRLSCAASGFSFSDFWMSWVRQAPGKGLEWVATISQAGSEKDYVDSVKGRFTISRDNAKKSLYLQMNSLRAEDTAVYYCASGVYSFDYRGQGTLVTVSSGTGGGGSGGGGSGGGGSEFDIQMTQSPSSLSASVGDRVTITCKASDHINNWLAWYQQKPGQAPKLLIYGATTLETGVPSRFSGSGSGTDYTLTISSLQPEDFATYYCQQSWNTPWTFGQGTKLEIKRLEIQNPDPAVYQLRDSKSSDKSVCLFTDFDSQTNVSQSKDSDVYITDKCVLDMRSMDFKSNSAVAWSNKSDFACANAFNNSIIPEDTFFPSPESSCDVKLVEKSFETDTNLNFQILYEILLGKATLYAVLVSALVLMAMVKRKDSRGRAKRSGSGVKQTLNFDLLKLAGDVESNPGPTSMDWIWRILFLVGAATGAHSGPQLQLQESGPGLVKPSETLSLTCTVSGDSISSGDYYWGWIRQPPGKGLEWIGHIYYSGVTYYNPSLKSRVTISVDTSRNQFSLKLSSVTAADTAVYYCTREDSSNWRSRGQGTLVTVSSGSGGGGSGGGGSGGGGSFEQVQLQQPGAELVKPGASVKMSCKASGYTFSSYWINWMKQKPGQGLEWIGQIYPGDGDTNYNGKFKGRATLTADTSSSTAYMQLSSLTSEDSAVYFCARSITTVVGCAMDYWGQGTSVTVSSTREDLKNVFPPEVAVFEPSEAEISHTQKATLVCLATGFYPDHVELSWWVNGKEVHSGVCTDPQPLKEQPALNDSRYCLSSRLRVSATFWQNPRNHFRCQVQFYGLSENDEWTQDRAKPVTQIVSAEAWGRADCGFTSESYQQGVLSATNLSVIGFRILLLKVAGFNLLMTLRLWSS

SEQ ID NO: 43816 - protein, 726 aa, synthetic construct
MALPVTALLLPLALLLHAARPDIQMTQSPSSLSASVGDRVTITCKASDHINNWLAWYQQKPGQAPKLLIYGATTLETGVPSRFSGSGSGTDYTLTISSLQPEDFATYYCQQSWNTPWTFGQGTKLEIKRLEDLKNVFPPEVAVFEPSEAEISHTQKATLVCLATGFYPDHVELSWWVNGKEVHSGVCTDPQPLKEQPALNDSRYCLSSRLRVSATFWQNPRNHFRCQVQFYGLSENDEWTQDRAKPVTQIVSAEAWGRADDVIKIHWQEKKSNTILGSQEGNTMKTNDTYMKFSWLTVPEKSLDKEHRCIVRHENNKNGVDQEIIFPPIKTDVITMDPKDNCSKDANDTLLLQLTNTSAYYMYLLLLLKSVVYFAIITCCLLMAMVKRKDSRGRAKRSGSGATNFSLLKQAGDVEENPGPTSMDWIWRILFLVGAATGAHSFEQVQLQQPGAELVKPGASVKMSCKASGYTFSSYWINWMKQKPGQGLEWIGQIYPGDGDTNYNGKFKGRATLTADTSSSTAYMQLSSLTSEDSAVYFCARSITTVVGCAMDYWGQGTSVTVSSTRIQNPDPAVYQLRDSKSSDKSVCLFTDFDSQTNVSQSKDSDVYITDKCVLDMRSMDFKSNSAVAWSNKSDFACANAFNNSIIPEDTFFPSPESSDSTDHVKPKETENTKQPSKSCHKPKAIVHTEKVNMMSLTVLGLRMLFAKTVAVNFLLTAKLFFLLTA

SEQ ID NO: 43817 - protein, 730 aa, synthetic construct
MALPVTALLLPLALLLHAARPDIQMTQSPSSLSASVGDRVTITCKASDHINNWLAWYQQKPGQAPKLLIYGATTLETGVPSRFSGSGSGTDYTLTISSLQPEDFATYYCQQSWNTPWTFGQGTKLEIKRLEIQNPDPAVYQLRDSKSSDKSVCLFTDFDSQTNVSQSKDSDVYITDKCVLDMRSMDFKSNSAVAWSNKSDFACANAFNNSIIPEDTFFPSPESSDSTDHVKPKETENTKQPSKSCHKPKAIVHTEKVNMMSLTVLGLRMLFAKTVAVNFLLTAKLFFLLTARAKRSGSGVKQTLNFDLLKLAGDVESNPGPTSMDWIWRILFLVGAATGAHSFEQVQLQQPGAELVKPGASVKMSCKASGYTFSSYWINWMKQKPGQGLEWIGQIYPGDGDTNYNGKFKGRATLTADTSSSTAYMQLSSLTSEDSAVYFCARSITTVVGCAMDYWGQGTSVTVSSTREDLKNVFPPEVAVFEPSEAEISHTQKATLVCLATGFYPDHVELSWWVNGKEVHSGVCTDPQPLKEQPALNDSRYCLSSRLRVSATFWQNPRNHFRCQVQFYGLSENDEWTQDRAKPVTQIVSAEAWGRADDVIKIHWQEKKSNTILGSQEGNTMKTNDTYMKFSWLTVPEKSLDKEHRCIVRHENNKNGVDQEIIFPPIKTDVITMDPKDNCSKDANDTLLLQLTNTSAYYMYLLLLLKSVVYFAIITCCLLMAMVKRKDSRG

SEQ ID NO: 43818 - protein, 861 aa, synthetic construct
MALPVTALLLPLALLLHAARPEVQLVESGGGLVQPGGSLRLSCAASGFSFSDFWMSWVRQAPGKGLEWVATISQAGSEKDYVDSVKGRFTISRDNAKKSLYLQMNSLRAEDTAVYYCASGVYSFDYRGQGTLVTVSSGTGGGGSGGGGSGGGGSEFDIQMTQSPSSLSASVGDRVTITCKASDHINNWLAWYQQKPGQAPKLLIYGATTLETGVPSRFSGSGSGTDYTLTISSLQPEDFATYYCQQSWNTPWTFGQGTKLEIKRLEDLKNVFPPEVAVFEPSEAEISHTQKATLVCLATGFYPDHVELSWWVNGKEVHSGVCTDPQPLKEQPALNDSRYCLSSRLRVSATFWQNPRNHFRCQVQFYGLSENDEWTQDRAKPVTQIVSAEAWGRADDVIKIHWQEKKSNTILGSQEGNTMKTNDTYMKFSWLTVPEKSLDKEHRCIVRHENNKNGVDQEIIFPPIKTDVITMDPKDNCSKDANDTLLLQLTNTSAYYMYLLLLLKSVVYFAIITCCLLMAMVKRKDSRGRAKRSGSGATNFSLLKQAGDVEENPGPTSMDWIWRILFLVGAATGAHSFEQVQLQQPGAELVKPGASVKMSCKASGYTFSSYWINWMKQKPGQGLEWIGQIYPGDGDTNYNGKFKGRATLTADTSSSTAYMQLSSLTSEDSAVYFCARSITTVVGCAMDYWGQGTSVTVSSTRIQNPDPAVYQLRDSKSSDKSVCLFTDFDSQTNVSQSKDSDVYITDKCVLDMRSMDFKSNSAVAWSNKSDFACANAFNNSIIPEDTFFPSPESSDSTDHVKPKETENTKQPSKSCHKPKAIVHTEKVNMMSLTVLGLRMLFAKTVAVNFLLTAKLFFLLTA

SEQ ID NO: 43819 - protein, 865 aa, synthetic construct
MALPVTALLLPLALLLHAARPEVQLVESGGGLVQPGGSLRLSCAASGFSFSDFWMSWVRQAPGKGLEWVATISQAGSEKDYVDSVKGRFTISRDNAKKSLYLQMNSLRAEDTAVYYCASGVYSFDYRGQGTLVTVSSGTGGGGSGGGGSGGGGSEFDIQMTQSPSSLSASVGDRVTITCKASDHINNWLAWYQQKPGQAPKLLIYGATTLETGVPSRFSGSGSGTDYTLTISSLQPEDFATYYCQQSWNTPWTFGQGTKLEIKRLEIQNPDPAVYQLRDSKSSDKSVCLFTDFDSQTNVSQSKDSDVYITDKCVLDMRSMDFKSNSAVAWSNKSDFACANAFNNSIIPEDTFFPSPESSDSTDHVKPKETENTKQPSKSCHKPKAIVHTEKVNMMSLTVLGLRMLFAKTVAVNFLLTAKLFFLLTARAKRSGSGVKQTLNFDLLKLAGDVESNPGPTSMDWIWRILFLVGAATGAHSFEQVQLQQPGAELVKPGASVKMSCKASGYTFSSYWINWMKQKPGQGLEWIGQIYPGDGDTNYNGKFKGRATLTADTSSSTAYMQLSSLTSEDSAVYFCARSITTVVGCAMDYWGQGTSVTVSSTREDLKNVFPPEVAVFEPSEAEISHTQKATLVCLATGFYPDHVELSWWVNGKEVHSGVCTDPQPLKEQPALNDSRYCLSSRLRVSATFWQNPRNHFRCQVQFYGLSENDEWTQDRAKPVTQIVSAEAWGRADDVIKIHWQEKKSNTILGSQEGNTMKTNDTYMKFSWLTVPEKSLDKEHRCIVRHENNKNGVDQEIIFPPIKTDVITMDPKDNCSKDANDTLLLQLTNTSAYYMYLLLLLKSVVYFAIITCCLLMAMVKRKDSRG

SEQ ID NO: 43820 - protein, 998 aa, synthetic construct
MALPVTALLLPLALLLHAARPEVQLVESGGGLVQPGGSLRLSCAASGFSFSDFWMSWVRQAPGKGLEWVATISQAGSEKDYVDSVKGRFTISRDNAKKSLYLQMNSLRAEDTAVYYCASGVYSFDYRGQGTLVTVSSGTGGGGSGGGGSGGGGSEFDIQMTQSPSSLSASVGDRVTITCKASDHINNWLAWYQQKPGQAPKLLIYGATTLETGVPSRFSGSGSGTDYTLTISSLQPEDFATYYCQQSWNTPWTFGQGTKLEIKRLEDLKNVFPPEVAVFEPSEAEISHTQKATLVCLATGFYPDHVELSWWVNGKEVHSGVCTDPQPLKEQPALNDSRYCLSSRLRVSATFWQNPRNHFRCQVQFYGLSENDEWTQDRAKPVTQIVSAEAWGRADDVIKIHWQEKKSNTILGSQEGNTMKTNDTYMKFSWLTVPEKSLDKEHRCIVRHENNKNGVDQEIIFPPIKTDVITMDPKDNCSKDANDTLLLQLTNTSAYYMYLLLLLKSVVYFAIITCCLLMAMVKRKDSRGRAKRSGSGATNFSLLKQAGDVEENPGPTSMDWIWRILFLVGAATGAHSGPQLQLQESGPGLVKPSETLSLTCTVSGDSISSGDYYWGWIRQPPGKGLEWIGHIYYSGVTYYNPSLKSRVTISVDTSRNQFSLKLSSVTAADTAVYYCTREDSSNWRSRGQGTLVTVSSGSGGGGSGGGGSGGGGSFEQVQLQQPGAELVKPGASVKMSCKASGYTFSSYWINWMKQKPGQGLEWIGQIYPGDGDTNYNGKFKGRATLTADTSSSTAYMQLSSLTSEDSAVYFCARSITTVVGCAMDYWGQGTSVTVSSTRIQNPDPAVYQLRDSKSSDKSVCLFTDFDSQTNVSQSKDSDVYITDKCVLDMRSMDFKSNSAVAWSNKSDFACANAFNNSIIPEDTFFPSPESSDSTDHVKPKETENTKQPSKSCHKPKAIVHTEKVNMMSLTVLGLRMLFAKTVAVNFLLTAKLFFLLTA

SEQ ID NO: 43821 - protein, 1002 aa, synthetic construct
MALPVTALLLPLALLLHAARPEVQLVESGGGLVQPGGSLRLSCAASGFSFSDFWMSWVRQAPGKGLEWVATISQAGSEKDYVDSVKGRFTISRDNAKKSLYLQMNSLRAEDTAVYYCASGVYSFDYRGQGTLVTVSSGTGGGGSGGGGSGGGGSEFDIQMTQSPSSLSASVGDRVTITCKASDHINNWLAWYQQKPGQAPKLLIYGATTLETGVPSRFSGSGSGTDYTLTISSLQPEDFATYYCQQSWNTPWTFGQGTKLEIKRLEIQNPDPAVYQLRDSKSSDKSVCLFTDFDSQTNVSQSKDSDVYITDKCVLDMRSMDFKSNSAVAWSNKSDFACANAFNNSIIPEDTFFPSPESSDSTDHVKPKETENTKQPSKSCHKPKAIVHTEKVNMMSLTVLGLRMLFAKTVAVNFLLTAKLFFLLTARAKRSGSGVKQTLNFDLLKLAGDVESNPGPTSMDWIWRILFLVGAATGAHSGPQLQLQESGPGLVKPSETLSLTCTVSGDSISSGDYYWGWIRQPPGKGLEWIGHIYYSGVTYYNPSLKSRVTISVDTSRNQFSLKLSSVTAADTAVYYCTREDSSNWRSRGQGTLVTVSSGSGGGGSGGGGSGGGGSFEQVQLQQPGAELVKPGASVKMSCKASGYTFSSYWINWMKQKPGQGLEWIGQIYPGDGDTNYNGKFKGRATLTADTSSSTAYMQLSSLTSEDSAVYFCARSITTVVGCAMDYWGQGTSVTVSSTREDLKNVFPPEVAVFEPSEAEISHTQKATLVCLATGFYPDHVELSWWVNGKEVHSGVCTDPQPLKEQPALNDSRYCLSSRLRVSATFWQNPRNHFRCQVQFYGLSENDEWTQDRAKPVTQIVSAEAWGRADDVIKIHWQEKKSNTILGSQEGNTMKTNDTYMKFSWLTVPEKSLDKEHRCIVRHENNKNGVDQEIIFPPIKTDVITMDPKDNCSKDANDTLLLQLTNTSAYYMYLLLLLKSVVYFAIITCCLLMAMVKRKDSRG

SEQ ID NO: 43822 - protein, 724 aa, synthetic construct
MALPVTALLLPLALLLHAARPDIQMTQSPSSLSASVGDRVTITCKASDHINNWLAWYQQKPGQAPKLLIYGATTLETGVPSRFSGSGSGTDYTLTISSLQPEDFATYYCQQSWNTPWTFGQGTKLEIKRLEDLKNVFPPEVAVFEPSEAEISHTQKATLVCLATGFYPDHVELSWWVNGKEVHSGVCTDPQPLKEQPALNDSRYCLSSRLRVSATFWQNPRNHFRCQVQFYGLSENDEWTQDRAKPVTQIVSAEAWGRADDVIKIHWQEKKSNTILGSQEGNTMKTNDTYMKFSWLTVPEKSLDKEHRCIVRHENNKNGVDQEIIFPPIKTDVITMDPKDNCSKDANDTLLLQLTNTSAYYMYLLLLLKSVVYFAIITCCLLRRTAFCCNGEKSRAKRSGSGATNFSLLKQAGDVEENPGPTSMDWIWRILFLVGAATGAHSFEQVQLQQPGAELVKPGASVKMSCKASGYTFSSYWINWMKQKPGQGLEWIGQIYPGDGDTNYNGKFKGRATLTADTSSSTAYMQLSSLTSEDSAVYFCARSITTVVGCAMDYWGQGTSVTVSSTRIQNPDPAVYQLRDSKSSDKSVCLFTDFDSQTNVSQSKDSDVYITDKCVLDMRSMDFKSNSAVAWSNKSDFACANAFNNSIIPEDTFFPSPESSDSTDHVKPKETENTKQPSKSCHKPKAIVHTEKVNMMSLTVLGLRMLFAKTVAVNFLLTAKLFFL

SEQ ID NO: 43823 - protein, 728 aa, synthetic construct
MALPVTALLLPLALLLHAARPDIQMTQSPSSLSASVGDRVTITCKASDHINNWLAWYQQKPGQAPKLLIYGATTLETGVPSRFSGSGSGTDYTLTISSLQPEDFATYYCQQSWNTPWTFGQGTKLEIKRLEIQNPDPAVYQLRDSKSSDKSVCLFTDFDSQTNVSQSKDSDVYITDKCVLDMRSMDFKSNSAVAWSNKSDFACANAFNNSIIPEDTFFPSPESSDSTDHVKPKETENTKQPSKSCHKPKAIVHTEKVNMMSLTVLGLRMLFAKTVAVNFLLTAKLFFLRAKRSGSGVKQTLNFDLLKLAGDVESNPGPTSMDWIWRILFLVGAATGAHSFEQVQLQQPGAELVKPGASVKMSCKASGYTFSSYWINWMKQKPGQGLEWIGQIYPGDGDTNYNGKFKGRATLTADTSSSTAYMQLSSLTSEDSAVYFCARSITTVVGCAMDYWGQGTSVTVSSTREDLKNVFPPEVAVFEPSEAEISHTQKATLVCLATGFYPDHVELSWWVNGKEVHSGVCTDPQPLKEQPALNDSRYCLSSRLRVSATFWQNPRNHFRCQVQFYGLSENDEWTQDRAKPVTQIVSAEAWGRADDVIKIHWQEKKSNTILGSQEGNTMKTNDTYMKFSWLTVPEKSLDKEHRCIVRHENNKNGVDQEIIFPPIKTDVITMDPKDNCSKDANDTLLLQLTNTSAYYMYLLLLLKSVVYFAIITCCLLRRTAFCCNGEKS

SEQ ID NO: 43824 - protein, 859 aa, synthetic construct
MALPVTALLLPLALLLHAARPEVQLVESGGGLVQPGGSLRLSCAASGFSFSDFWMSWVRQAPGKGLEWVATISQAGSEKDYVDSVKGRFTISRDNAKKSLYLQMNSLRAEDTAVYYCASGVYSFDYRGQGTLVTVSSGTGGGGSGGGGSGGGGSEFDIQMTQSPSSLSASVGDRVTITCKASDHINNWLAWYQQKPGQAPKLLIYGATTLETGVPSRFSGSGSGTDYTLTISSLQPEDFATYYCQQSWNTPWTFGQGTKLEIKRLEDLKNVFPPEVAVFEPSEAEISHTQKATLVCLATGFYPDHVELSWWVNGKEVHSGVCTDPQPLKEQPALNDSRYCLSSRLRVSATFWQNPRNHFRCQVQFYGLSENDEWTQDRAKPVTQIVSAEAWGRADDVIKIHWQEKKSNTILGSQEGNTMKTNDTYMKFSWLTVPEKSLDKEHRCIVRHENNKNGVDQEIIFPPIKTDVITMDPKDNCSKDANDTLLLQLTNTSAYYMYLLLLLKSVVYFAIITCCLLRRTAFCCNGEKSRAKRSGSGATNFSLLKQAGDVEENPGPTSMDWIWRILFLVGAATGAHSFEQVQLQQPGAELVKPGASVKMSCKASGYTFSSYWINWMKQKPGQGLEWIGQIYPGDGDTNYNGKFKGRATLTADTSSSTAYMQLSSLTSEDSAVYFCARSITTVVGCAMDYWGQGTSVTVSSTRIQNPDPAVYQLRDSKSSDKSVCLFTDFDSQTNVSQSKDSDVYITDKCVLDMRSMDFKSNSAVAWSNKSDFACANAFNNSIIPEDTFFPSPESSDSTDHVKPKETENTKQPSKSCHKPKAIVHTEKVNMMSLTVLGLRMLFAKTVAVNFLLTAKLFFL

SEQ ID NO: 43825 - protein, 996 aa, synthetic construct
MALPVTALLLPLALLLHAARPEVQLVESGGGLVQPGGSLRLSCAASGFSFSDFWMSWVRQAPGKGLEWVATISQAGSEKDYVDSVKGRFTISRDNAKKSLYLQMNSLRAEDTAVYYCASGVYSFDYRGQGTLVTVSSGTGGGGSGGGGSGGGGSEFDIQMTQSPSSLSASVGDRVTITCKASDHINNWLAWYQQKPGQAPKLLIYGATTLETGVPSRFSGSGSGTDYTLTISSLQPEDFATYYCQQSWNTPWTFGQGTKLEIKRLEDLKNVFPPEVAVFEPSEAEISHTQKATLVCLATGFYPDHVELSWWVNGKEVHSGVCTDPQPLKEQPALNDSRYCLSSRLRVSATFWQNPRNHFRCQVQFYGLSENDEWTQDRAKPVTQIVSAEAWGRADDVIKIHWQEKKSNTILGSQEGNTMKTNDTYMKFSWLTVPEKSLDKEHRCIVRHENNKNGVDQEIIFPPIKTDVITMDPKDNCSKDANDTLLLQLTNTSAYYMYLLLLLKSVVYFAIITCCLLRRTAFCCNGEKSRAKRSGSGATNFSLLKQAGDVEENPGPTSMDWIWRILFLVGAATGAHSGPQLQLQESGPGLVKPSETLSLTCTVSGDSISSGDYYWGWIRQPPGKGLEWIGHIYYSGVTYYNPSLKSRVTISVDTSRNQFSLKLSSVTAADTAVYYCTREDSSNWRSRGQGTLVTVSSGSGGGGSGGGGSGGGGSFEQVQLQQPGAELVKPGASVKMSCKASGYTFSSYWINWMKQKPGQGLEWIGQIYPGDGDTNYNGKFKGRATLTADTSSSTAYMQLSSLTSEDSAVYFCARSITTVVGCAMDYWGQGTSVTVSSTRIQNPDPAVYQLRDSKSSDKSVCLFTDFDSQTNVSQSKDSDVYITDKCVLDMRSMDFKSNSAVAWSNKSDFACANAFNNSIIPEDTFFPSPESSDSTDHVKPKETENTKQPSKSCHKPKAIVHTEKVNMMSLTVLGLRMLFAKTVAVNFLLTAKLFFL

SEQ ID NO: 43826 - protein, 622 aa, synthetic construct
MALPVTALLLPLALLLHAARPDIQMTQSPSSLSASVGDRVTITCKASDHINNWLAWYQQKPGQAPKLLIYGATTLETGVPSRFSGSGSGTDYTLTISSLQPEDFATYYCQQSWNTPWTFGQGTKLEIKRLEDLKNVFPPEVAVFEPSEAEISHTQKATLVCLATGFYPDHVELSWWVNGKEVHSGVSTDPQPLKEQPALNDSRYCLSSRLRVSATFWQNPRNHFRCQVQFYGLSENDEWTQDRAKPVTQIVSAEAWGRADCDVKLVEKSFETDTNLNFQNLSVIGFRILLLKVAGFNLLMTLRLWSSRAKRSGSGATNFSLLKQAGDVEENPGPTSMDWIWRILFLVGAATGAHSFEQVQLQQPGAELVKPGASVKMSCKASGYTFSSYWINWMKQKPGQGLEWIGQIYPGDGDTNYNGKFKGRATLTADTSSSTAYMQLSSLTSEDSAVYFCARSITTVVGCAMDYWGQGTSVTVSSTRIQNPDPAVYQLRDSKSSDKSVCLFTDFDSQTNVSQSKDSDVYITDKTVLDMRSMDFKSNSAVAWSNKSDFACANAFNNSIIPEDTFFPSPESSCGFTSESYQQGVLSATILYEILLGKATLYAVLVSALVLMAMVKRKDSRG

SEQ ID NO: 43827 - protein, 622 aa, synthetic construct
MALPVTALLLPLALLLHAARPDIQMTQSPSSLSASVGDRVTITCKASDHINNWLAWYQQKPGQAPKLLIYGATTLETGVPSRFSGSGSGTDYTLTISSLQPEDFATYYCQQSWNTPWTFGQGTKLEIKRLEDLKNVFPPEVAVFEPSEAEISHTQKATLVCLATGFYPDHVELSWWVNGKEVHSGVSTDPQPLKEQPALNDSRYCLSSRLRVSATFWQNPRNHFRCQVQFYGLSENDEWTQDRAKPVTQIVSAEAWGRADCGFTSESYQQGVLSATNLSVIGFRILLLKVAGFNLLMTLRLWSSRAKRSGSGATNFSLLKQAGDVEENPGPTSMDWIWRILFLVGAATGAHSFEQVQLQQPGAELVKPGASVKMSCKASGYTFSSYWINWMKQKPGQGLEWIGQIYPGDGDTNYNGKFKGRATLTADTSSSTAYMQLSSLTSEDSAVYFCARSITTVVGCAMDYWGQGTSVTVSSTRIQNPDPAVYQLRDSKSSDKSVCLFTDFDSQTNVSQSKDSDVYITDKTVLDMRSMDFKSNSAVAWSNKSDFACANAFNNSIIPEDTFFPSPESSCDVKLVEKSFETDTNLNFQILYEILLGKATLYAVLVSALVLMAMVKRKDSRG

SEQ ID NO: 43828 - protein, 726 aa, synthetic construct
MALPVTALLLPLALLLHAARPDIQMTQSPSSLSASVGDRVTITCKASDHINNWLAWYQQKPGQAPKLLIYGATTLETGVPSRFSGSGSGTDYTLTISSLQPEDFATYYCQQSWNTPWTFGQGTKLEIKRLEDLKNVFPPEVAVFEPSEAEISHTQKATLVCLATGFYPDHVELSWWVNGKEVHSGVSTDPQPLKEQPALNDSRYCLSSRLRVSATFWQNPRNHFRCQVQFYGLSENDEWTQDRAKPVTQIVSAEAWGRADDVIKIHWQEKKSNTILGSQEGNTMKTNDTYMKFSWLTVPEKSLDKEHRCIVRHENNKNGVDQEIIFPPIKTDVITMDPKDNCSKDANDTLLLQLTNTSAYYMYLLLLLKSVVYFAIITCCLLMAMVKRKDSRGRAKRSGSGATNFSLLKQAGDVEENPGPTSMDWIWRILFLVGAATGAHSFEQVQLQQPGAELVKPGASVKMSCKASGYTFSSYWINWMKQKPGQGLEWIGQIYPGDGDTNYNGKFKGRATLTADTSSSTAYMQLSSLTSEDSAVYFCARSITTVVGCAMDYWGQGTSVTVSSTRIQNPDPAVYQLRDSKSSDKSVCLFTDFDSQTNVSQSKDSDVYITDKTVLDMRSMDFKSNSAVAWSNKSDFACANAFNNSIIPEDTFFPSPESSDSTDHVKPKETENTKQPSKSCHKPKAIVHTEKVNMMSLTVLGLRMLFAKTVAVNFLLTAKLFFLLTA

SEQ ID NO: 43829 - protein, 724 aa, synthetic construct
MALPVTALLLPLALLLHAARPDIQMTQSPSSLSASVGDRVTITCKASDHINNWLAWYQQKPGQAPKLLIYGATTLETGVPSRFSGSGSGTDYTLTISSLQPEDFATYYCQQSWNTPWTFGQGTKLEIKRLEDLKNVFPPEVAVFEPSEAEISHTQKATLVCLATGFYPDHVELSWWVNGKEVHSGVSTDPQPLKEQPALNDSRYCLSSRLRVSATFWQNPRNHFRCQVQFYGLSENDEWTQDRAKPVTQIVSAEAWGRADDVIKIHWQEKKSNTILGSQEGNTMKTNDTYMKFSWLTVPEKSLDKEHRCIVRHENNKNGVDQEIIFPPIKTDVITMDPKDNCSKDANDTLLLQLTNTSAYYMYLLLLLKSVVYFAIITCCLLRRTAFCCNGEKSRAKRSGSGATNFSLLKQAGDVEENPGPTSMDWIWRILFLVGAATGAHSFEQVQLQQPGAELVKPGASVKMSCKASGYTFSSYWINWMKQKPGQGLEWIGQIYPGDGDTNYNGKFKGRATLTADTSSSTAYMQLSSLTSEDSAVYFCARSITTVVGCAMDYWGQGTSVTVSSTRIQNPDPAVYQLRDSKSSDKSVCLFTDFDSQTNVSQSKDSDVYITDKTVLDMRSMDFKSNSAVAWSNKSDFACANAFNNSIIPEDTFFPSPESSDSTDHVKPKETENTKQPSKSCHKPKAIVHTEKVNMMSLTVLGLRMLFAKTVAVNFLLTAKLFFL

SEQ ID NO: 43830 - protein, 867 aa, synthetic construct
MALPVTALLLPLALLLHAARPLEEDLKNVFPPEVAVFEPSEAEISHTQKATLVCLATGFYPDHVELSWWVNGKEVHSGVCTDPQPLKEQPALNDSRYCLSSRLRVSATFWQNPRNHFRCQVQFYGLSENDEWTQDRAKPVTQIVSAEAWGRADCGFTSESYQQGVLSATNLSVIGFRILLLKVAGFNLLMTLRLWSSRAKRSGSGATNFSLLKQAGDVEENPGPTSMALPVTALLLPLALLLHAARPDIQMTQSPSSLSASVGDRVTITCKASDHINNWLAWYQQKPGQAPKLLIYGATTLETGVPSRFSGSGSGTDYTLTISSLQPEDFATYYCQQSWNTPWTFGQGTKLEIKRGGGGSGGGGSGGGGSQVQLQQPGAELVKPGASVKMSCKASGYTFSSYWINWMKQKPGQGLEWIGQIYPGDGDTNYNGKFKGRATLTADTSSSTAYMQLSSLTSEDSAVYFCARSITTVVGCAMDYWGQGTSVTVSSTRIQNPDPAVYQLRDSKSSDKSVCLFTDFDSQTNVSQSKDSDVYITDKCVLDMRSMDFKSNSAVAWSNKSDFACANAFNNSIIPEDTFFPSPESSCDVKLVEKSFETDTNLNFQILYEVIGFRILLLKVAGFNLLMTLRLWSSRAKRSGSGVKQTLNFDLLKLAGDVESNPGPSRGHMTEYKPTVRLATRDDVPRAVRTLAAAFADYPATRHTVDPDRHIERVTELQELFLTRVGLDIGKVWVADDGAAVAVWTTPESVEAGAVFAEIGPRMAELSGSRLAAQQQMEGLLAPHRPKEPAWFLATVGVSPDHQGKGLGSAVVLPGVEAAERAGVPAFLETSAPRNLPFYERLGFTVTADVEVPEGPRTWCMTRKPGA

SEQ ID NO: 43831 - protein, 867 aa, synthetic construct
MALPVTALLLPLALLLHAARPLEIQNPDPAVYQLRDSKSSDKSVCLFTDFDSQTNVSQSKDSDVYITDKCVLDMRSMDFKSNSAVAWSNKSDFACANAFNNSIIPEDTFFPSPESSCDVKLVEKSFETDTNLNFQILYEVIGFRILLLKVAGFNLLMTLRLWSSRAKRSGSGATNFSLLKQAGDVEENPGPTSMALPVTALLLPLALLLHAARPDIQMTQSPSSLSASVGDRVTITCKASDHINNWLAWYQQKPGQAPKLLIYGATTLETGVPSRFSGSGSGTDYTLTISSLQPEDFATYYCQQSWNTPWTFGQGTKLEIKRGGGGSGGGGSGGGGSQVQLQQPGAELVKPGASVKMSCKASGYTFSSYWINWMKQKPGQGLEWIGQIYPGDGDTNYNGKFKGRATLTADTSSSTAYMQLSSLTSEDSAVYFCARSITTVVGCAMDYWGQGTSVTVSSTREDLKNVFPPEVAVFEPSEAEISHTQKATLVCLATGFYPDHVELSWWVNGKEVHSGVCTDPQPLKEQPALNDSRYCLSSRLRVSATFWQNPRNHFRCQVQFYGLSENDEWTQDRAKPVTQIVSAEAWGRADCGFTSESYQQGVLSATNLSVIGFRILLLKVAGFNLLMTLRLWSSRAKRSGSGVKQTLNFDLLKLAGDVESNPGPSRGHMTEYKPTVRLATRDDVPRAVRTLAAAFADYPATRHTVDPDRHIERVTELQELFLTRVGLDIGKVWVADDGAAVAVWTTPESVEAGAVFAEIGPRMAELSGSRLAAQQQMEGLLAPHRPKEPAWFLATVGVSPDHQGKGLGSAVVLPGVEAAERAGVPAFLETSAPRNLPFYERLGFTVTADVEVPEGPRTWCMTRKPGA

SEQ ID NO: 43832 - protein, 867 aa, synthetic construct; identical to SEQ ID NO: 43830

SEQ ID NO: 43833 - protein, 975 aa, synthetic construct
MALPVTALLLPLALLLHAARPLEEDLKNVFPPEVAVFEPSEAEISHTQKATLVCLATGFYPDHVELSWWVNGKEVHSGVSTDPQPLKEQPALNDSRYCLSSRLRVSATFWQNPRNHFRCQVQFYGLSENDEWTQDRAKPVTQIVSAEAWGRADDVIKIHWQEKKSNTILGSQEGNTMKTNDTYMKFSWLTVPEKSLDKEHRCIVRHENNKNGVDQEIIFPPIKTDVITMDPKDNCSKDANDTLLLQLTNTSAYYMYLLLLLKSVVYFAIITCCLLMAMVKRKDSRGRAKRSGSGATNFSLLKQAGDVEENPGPTSMALPVTALLLPLALLLHAARPDIQMTQSPSSLSASVGDRVTITCKASDHINNWLAWYQQKPGQAPKLLIYGATTLETGVPSRFSGSGSGTDYTLTISSLQPEDFATYYCQQSWNTPWTFGQGTKLEIKRGGGGSGGGGSGGGGSQVQLQQPGAELVKPGASVKMSCKASGYTFSSYWINWMKQKPGQGLEWIGQIYPGDGDTNYNGKFKGRATLTADTSSSTAYMQLSSLTSEDSAVYFCARSITTVVGCAMDYWGQGTSVTVSSTRIQNPDPAVYQLRDSKSSDKSVCLFTDFDSQTNVSQSKDSDVYITDKTVLDMRSMDFKSNSAVAWSNKSDFACANAFNNSIIPEDTFFPSPESSDSTDHVKPKETENTKQPSKSCHKPKAIVHTEKVNMMSLTVLGLRMLFAKTVAVNFLLTAKLFFLLTARAKRSGSGVKQTLNFDLLKLAGDVESNPGPSRGHMTEYKPTVRLATRDDVPRAVRTLAAAFADYPATRHTVDPDRHIERVTELQELFLTRVGLDIGKVWVADDGAAVAVWTTPESVEAGAVFAEIGPRMAELSGSRLAAQQQMEGLLAPHRPKEPAWFLATVGVSPDHQGKGLGSAVVLPGVEAAERAGVPAFLETSAPRNLPFYERLGFTVTADVEVPEGPRTWCMTRKPGA

SEQ ID NO: 43834 - protein, 975 aa, synthetic construct
MALPVTALLLPLALLLHAARPLEIQNPDPAVYQLRDSKSSDKSVCLFTDFDSQTNVSQSKDSDVYITDKTVLDMRSMDFKSNSAVAWSNKSDFACANAFNNSIIPEDTFFPSPESSDSTDHVKPKETENTKQPSKSCHKPKAIVHTEKVNMMSLTVLGLRMLFAKTVAVNFLLTAKLFFLLTARAKRSGSGATNFSLLKQAGDVEENPGPTSMALPVTALLLPLALLLHAARPDIQMTQSPSSLSASVGDRVTITCKASDHINNWLAWYQQKPGQAPKLLIYGATTLETGVPSRFSGSGSGTDYTLTISSLQPEDFATYYCQQSWNTPWTFGQGTKLEIKRGGGGSGGGGSGGGGSQVQLQQPGAELVKPGASVKMSCKASGYTFSSYWINWMKQKPGQGLEWIGQIYPGDGDTNYNGKFKGRATLTADTSSSTAYMQLSSLTSEDSAVYFCARSITTVVGCAMDYWGQGTSVTVSSTREDLKNVFPPEVAVFEPSEAEISHTQKATLVCLATGFYPDHVELSWWVNGKEVHSGVSTDPQPLKEQPALNDSRYCLSSRLRVSATFWQNPRNHFRCQVQFYGLSENDEWTQDRAKPVTQIVSAEAWGRADDVIKIHWQEKKSNTILGSQEGNTMKTNDTYMKFSWLTVPEKSLDKEHRCIVRHENNKNGVDQEIIFPPIKTDVITMDPKDNCSKDANDTLLLQLTNTSAYYMYLLLLLKSVVYFAIITCCLLMAMVKRKDSRGRAKRSGSGVKQTLNFDLLKLAGDVESNPGPSRGHMTEYKPTVRLATRDDVPRAVRTLAAAFADYPATRHTVDPDRHIERVTELQELFLTRVGLDIGKVWVADDGAAVAVWTTPESVEAGAVFAEIGPRMAELSGSRLAAQQQMEGLLAPHRPKEPAWFLATVGVSPDHQGKGLGSAVVLPGVEAAERAGVPAFLETSAPRNLPFYERLGFTVTADVEVPEGPRTWCMTRKPGA

SEQ ID NO: 43835 - protein, 973 aa, synthetic construct
MALPVTALLLPLALLLHAARPLEEDLKNVFPPEVAVFEPSEAEISHTQKATLVCLATGFYPDHVELSWWVNGKEVHSGVCTDPQPLKEQPALNDSRYCLSSRLRVSATFWQNPRNHFRCQVQFYGLSENDEWTQDRAKPVTQIVSAEAWGRADDVIKIHWQEKKSNTILGSQEGNTMKTNDTYMKFSWLTVPEKSLDKEHRCIVRHENNKNGVDQEIIFPPIKTDVITMDPKDNCSKDANDTLLLQLTNTSAYYMYLLLLLKSVVYFAIITCCLLRRTAFCCNGEKSRAKRSGSGATNFSLLKQAGDVEENPGPTSMALPVTALLLPLALLLHAARPDIQMTQSPSSLSASVGDRVTITCKASDHINNWLAWYQQKPGQAPKLLIYGATTLETGVPSRFSGSGSGTDYTLTISSLQPEDFATYYCQQSWNTPWTFGQGTKLEIKRGGGGSGGGGSGGGGSQVQLQQPGAELVKPGASVKMSCKASGYTFSSYWINWMKQKPGQGLEWIGQIYPGDGDTNYNGKFKGRATLTADTSSSTAYMQLSSLTSEDSAVYFCARSITTVVGCAMDYWGQGTSVTVSSTRIQNPDPAVYQLRDSKSSDKSVCLFTDFDSQTNVSQSKDSDVYITDKCVLDMRSMDFKSNSAVAWSNKSDFACANAFNNSIIPEDTFFPSPESSDSTDHVKPKETENTKQPSKSCHKPKAIVHTEKVNMMSLTVLGLRMLFAKTVAVNFLLTAKLFFLRAKRSGSGVKQTLNFDLLKLAGDVESNPGPSRGHMTEYKPTVRLATRDDVPRAVRTLAAAFADYPATRHTVDPDRHIERVTELQELFLTRVGLDIGKVWVADDGAAVAVWTTPESVEAGAVFAEIGPRMAELSGSRLAAQQQMEGLLAPHRPKEPAWFLATVGVSPDHQGKGLGSAVVLPGVEAAERAGVPAFLETSAPRNLPFYERLGFTVTADVEVPEGPRTWCMTRKPGA

SEQ ID NO: 43836 - protein, 973 aa, synthetic construct
MALPVTALLLPLALLLHAARPLEIQNPDPAVYQLRDSKSSDKSVCLFTDFDSQTNVSQSKDSDVYITDKCVLDMRSMDFKSNSAVAWSNKSDFACANAFNNSIIPEDTFFPSPESSDSTDHVKPKETENTKQPSKSCHKPKAIVHTEKVNMMSLTVLGLRMLFAKTVAVNFLLTAKLFFLRAKRSGSGATNFSLLKQAGDVEENPGPTSMALPVTALLLPLALLLHAARPDIQMTQSPSSLSASVGDRVTITCKASDHINNWLAWYQQKPGQAPKLLIYGATTLETGVPSRFSGSGSGTDYTLTISSLQPEDFATYYCQQSWNTPWTFGQGTKLEIKRGGGGSGGGGSGGGGSQVQLQQPGAELVKPGASVKMSCKASGYTFSSYWINWMKQKPGQGLEWIGQIYPGDGDTNYNGKFKGRATLTADTSSSTAYMQLSSLTSEDSAVYFCARSITTVVGCAMDYWGQGTSVTVSSTREDLKNVFPPEVAVFEPSEAEISHTQKATLVCLATGFYPDHVELSWWVNGKEVHSGVCTDPQPLKEQPALNDSRYCLSSRLRVSATFWQNPRNHFRCQVQFYGLSENDEWTQDRAKPVTQIVSAEAWGRADDVIKIHWQEKKSNTILGSQEGNTMKTNDTYMKFSWLTVPEKSLDKEHRCIVRHENNKNGVDQEIIFPPIKTDVITMDPKDNCSKDANDTLLLQLTNTSAYYMYLLLLLKSVVYFAIITCCLLRRTAFCCNGEKSRAKRSGSGVKQTLNFDLLKLAGDVESNPGPSRGHMTEYKPTVRLATRDDVPRAVRTLAAAFADYPATRHTVDPDRHIERVTELQELFLTRVGLDIGKVWVADDGAAVAVWTTPESVEAGAVFAEIGPRMAELSGSRLAAQQQMEGLLAPHRPKEPAWFLATVGVSPDHQGKGLGSAVVLPGVEAAERAGVPAFLETSAPRNLPFYERLGFTVTADVEVPEGPRTWCMTRKPGA

SEQ ID NO: 43837 - protein, 973 aa, synthetic construct
MALPVTALLLPLALLLHAARPLEEDLKNVFPPEVAVFEPSEAEISHTQKATLVCLATGFYPDHVELSWWVNGKEVHSGVSTDPQPLKEQPALNDSRYCLSSRLRVSATFWQNPRNHFRCQVQFYGLSENDEWTQDRAKPVTQIVSAEAWGRADDVIKIHWQEKKSNTILGSQEGNTMKTNDTYMKFSWLTVPEKSLDKEHRCIVRHENNKNGVDQEIIFPPIKTDVITMDPKDNCSKDANDTLLLQLTNTSAYYMYLLLLLKSVVYFAIITCCLLRRTAFCCNGEKSRAKRSGSGATNFSLLKQAGDVEENPGPTSMALPVTALLLPLALLLHAARPDIQMTQSPSSLSASVGDRVTITCKASDHINNWLAWYQQKPGQAPKLLIYGATTLETGVPSRFSGSGSGTDYTLTISSLQPEDFATYYCQQSWNTPWTFGQGTKLEIKRGGGGSGGGGSGGGGSQVQLQQPGAELVKPGASVKMSCKASGYTFSSYWINWMKQKPGQGLEWIGQIYPGDGDTNYNGKFKGRATLTADTSSSTAYMQLSSLTSEDSAVYFCARSITTVVGCAMDYWGQGTSVTVSSTRIQNPDPAVYQLRDSKSSDKSVCLFTDFDSQTNVSQSKDSDVYITDKTVLDMRSMDFKSNSAVAWSNKSDFACANAFNNSIIPEDTFFPSPESSDSTDHVKPKETENTKQPSKSCHKPKAIVHTEKVNMMSLTVLGLRMLFAKTVAVNFLLTAKLFFLRAKRSGSGVKQTLNFDLLKLAGDVESNPGPSRGHMTEYKPTVRLATRDDVPRAVRTLAAAFADYPATRHTVDPDRHIERVTELQELFLTRVGLDIGKVWVADDGAAVAVWTTPESVEAGAVFAEIGPRMAELSGSRLAAQQQMEGLLAPHRPKEPAWFLATVGVSPDHQGKGLGSAVVLPGVEAAERAGVPAFLETSAPRNLPFYERLGFTVTADVEVPEGPRTWCMTRKPGA

SEQ ID NO: 43838 - protein, 973 aa, synthetic construct
MALPVTALLLPLALLLHAARPLEIQNPDPAVYQLRDSKSSDKSVCLFTDFDSQTNVSQSKDSDVYITDKTVLDMRSMDFKSNSAVAWSNKSDFACANAFNNSIIPEDTFFPSPESSDSTDHVKPKETENTKQPSKSCHKPKAIVHTEKVNMMSLTVLGLRMLFAKTVAVNFLLTAKLFFLRAKRSGSGATNFSLLKQAGDVEENPGPTSMALPVTALLLPLALLLHAARPDIQMTQSPSSLSASVGDRVTITCKASDHINNWLAWYQQKPGQAPKLLIYGATTLETGVPSRFSGSGSGTDYTLTISSLQPEDFATYYCQQSWNTPWTFGQGTKLEIKRGGGGSGGGGSGGGGSQVQLQQPGAELVKPGASVKMSCKASGYTFSSYWINWMKQKPGQGLEWIGQIYPGDGDTNYNGKFKGRATLTADTSSSTAYMQLSSLTSEDSAVYFCARSITTVVGCAMDYWGQGTSVTVSSTREDLKNVFPPEVAVFEPSEAEISHTQKATLVCLATGFYPDHVELSWWVNGKEVHSGVSTDPQPLKEQPALNDSRYCLSSRLRVSATFWQNPRNHFRCQVQFYGLSENDEWTQDRAKPVTQIVSAEAWGRADDVIKIHWQEKKSNTILGSQEGNTMKTNDTYMKFSWLTVPEKSLDKEHRCIVRHENNKNGVDQEIIFPPIKTDVITMDPKDNCSKDANDTLLLQLTNTSAYYMYLLLLLKSVVYFAIITCCLLRRTAFCCNGEKSRAKRSGSGVKQTLNFDLLKLAGDVESNPGPSRGHMTEYKPTVRLATRDDVPRAVRTLAAAFADYPATRHTVDPDRHIERVTELQELFLTRVGLDIGKVWVADDGAAVAVWTTPESVEAGAVFAEIGPRMAELSGSRLAAQQQMEGLLAPHRPKEPAWFLATVGVSPDHQGKGLGSAVVLPGVEAAERAGVPAFLETSAPRNLPFYERLGFTVTADVEVPEGPRTWCMTRKPGA

SEQ ID NO: 43839 - protein, 871 aa, synthetic construct
MALPVTALLLPLALLLHAARPLEEDLKNVFPPEVAVFEPSKAEIAHTQKATLVCLATGFYPDHVELSWWVNGKEVHSGVCTDPQPLKEQPALNDSRYCLSSRLRVSATFWQNPRNHFRCQVQFYGLSENDEWTQDRAKPVTQIVSAEAWGRADCGITSASYHQGVLSATILYEILLGKATLYAVLVSALVLMAMVKRKDSRGRAKRSGSGATNFSLLKQAGDVEENPGPTSMALPVTALLLPLALLLHAARPDIQMTQSPSSLSASVGDRVTITCKASDHINNWLAWYQQKPGQAPKLLIYGATTLETGVPSRFSGSGSGTDYTLTISSLQPEDFATYYCQQSWNTPWTFGQGTKLEIKRGGGGSGGGGSGGGGSQVQLQQPGAELVKPGASVKMSCKASGYTFSSYWINWMKQKPGQGLEWIGQIYPGDGDTNYNGKFKGRATLTADTSSSTAYMQLSSLTSEDSAVYFCARSITTVVGCAMDYWGQGTSVTVSSTRIQNPDPAVYQLRDSKSSDKSVCLFTDFDSQTNVSQSKDSDVYITDKCVLDMRSMDFKSNSAVAWSNKSDFACANAFNNSIIPEDTFFPSSDVPCDVKLVEKSFETDTNLNFQNLSVIGFRILLLKVAGFNLLMTLRLWSSRAKRSGSGVKQTLNFDLLKLAGDVESNPGPSRGHMTEYKPTVRLATRDDVPRAVRTLAAAFADYPATRHTVDPDRHIERVTELQELFLTRVGLDIGKVWVADDGAAVAVWTTPESVEAGAVFAEIGPRMAELSGSRLAAQQQMEGLLAPHRPKEPAWFLATVGVSPDHQGKGLGSAVVLPGVEAAERAGVPAFLETSAPRNLPFYERLGFTVTADVEVPEGPRTWCMTRKPGA

SEQ ID NO: 43840 - protein, 871 aa, synthetic construct
MALPVTALLLPLALLLHAARPLEIQNPDPAVYQLRDSKSSDKSVCLFTDFDSQTNVSQSKDSDVYITDKCVLDMRSMDFKSNSAVAWSNKSDFACANAFNNSIIPEDTFFPSSDVPCDVKLVEKSFETDTNLNFQNLSVIGFRILLLKVAGFNLLMTLRLWSSRAKRSGSGATNFSLLKQAGDVEENPGPTSMALPVTALLLPLALLLHAARPDIQMTQSPSSLSASVGDRVTITCKASDHINNWLAWYQQKPGQAPKLLIYGATTLETGVPSRFSGSGSGTDYTLTISSLQPEDFATYYCQQSWNTPWTFGQGTKLEIKRGGGGSGGGGSGGGGSQVQLQQPGAELVKPGASVKMSCKASGYTFSSYWINWMKQKPGQGLEWIGQIYPGDGDTNYNGKFKGRATLTADTSSSTAYMQLSSLTSEDSAVYFCARSITTVVGCAMDYWGQGTSVTVSSTREDLKNVFPPEVAVFEPSKAEIAHTQKATLVCLATGFYPDHVELSWWVNGKEVHSGVCTDPQPLKEQPALNDSRYCLSSRLRVSATFWQNPRNHFRCQVQFYGLSENDEWTQDRAKPVTQIVSAEAWGRADCGITSASYHQGVLSATILYEILLGKATLYAVLVSALVLMAMVKRKDSRGRAKRSGSGVKQTLNFDLLKLAGDVESNPGPSRGHMTEYKPTVRLATRDDVPRAVRTLAAAFADYPATRHTVDPDRHIERVTELQELFLTRVGLDIGKVWVADDGAAVAVWTTPESVEAGAVFAEIGPRMAELSGSRLAAQQQMEGLLAPHRPKEPAWFLATVGVSPDHQGKGLGSAVVLPGVEAAERAGVPAFLETSAPRNLPFYERLGFTVTADVEVPEGPRTWCMTRKPGA

SEQ ID NO: 43841 - protein, 764 aa, synthetic construct
MALPVTALLLPLALLLHAARPLEQSFGLLDPKLCYLLDGILFIYGVILTALFLRVKFSRSADAPAYQQGQNQLYNELNLGRREEYDVLDKRRGRDPEMGGKPQRRKNPQEGLYNELQKDKMAEAYSEIGMKGERRRGKGHDGLYQGLSTATKDTYDALHMQALPPRRAKRSGSGATNFSLLKQAGDVEENPGPTSMALPVTALLLPLALLLHAARPDIQMTQSPSSLSASVGDRVTITCKASDHINNWLAWYQQKPGQAPKLLIYGATTLETGVPSRFSGSGSGTDYTLTISSLQPEDFATYYCQQSWNTPWTFGQGTKLEIKRGGGGSGGGGSGGGGSQVQLQQPGAELVKPGASVKMSCKASGYTFSSYWINWMKQKPGQGLEWIGQIYPGDGDTNYNGKFKGRATLTADTSSSTAYMQLSSLTSEDSAVYFCARSITTVVGCAMDYWGQGTSVTVSSTRELGEPQLCYILDAILFLYGIVLTLLYCRLKIQVRKAAITSYEKSDGVYTGLSTRNQETYETLKHEKPPQRAKRSGSGVKQTLNFDLLKLAGDVESNPGPSRGHMTEYKPTVRLATRDDVPRAVRTLAAAFADYPATRHTVDPDRHIERVTELQELFLTRVGLDIGKVWVADDGAAVAVWTTPESVEAGAVFAEIGPRMAELSGSRLAAQQQMEGLLAPHRPKEPAWFLATVGVSPDHQGKGLGSAVVLPGVEAAERAGVPAFLETSAPRNLPFYERLGFTVTADVEVPEGPRTWCMTRKPGA

SEQ ID NO: 43842 - protein, 975 aa, synthetic construct; identical to SEQ ID NO: 43833

SEQ ID NO: 43843 - protein, 975 aa, synthetic construct; identical to SEQ ID NO: 43834

SEQ ID NO: 43844 - protein, 974 aa, synthetic construct
MALPVTALLLPLALLLHAARPLEEEDLKNVFPPEVAVFEPSEAEISHTQKATLVCLATGFYPDHVELSWWVNGKEVHSGVCTDPQPLKEQPALNDSRYCLSSRLRVSATFWQNPRNHFRCQVQFYGLSENDEWTQDRAKPVTQIVSAEAWGRADDVIKIHWQEKKSNTILGSQEGNTMKTNDTYMKFSWLTVPEKSLDKEHRCIVRHENNKNGVDQEIIFPPIKTDVITMDPKDNCSKDANDTLLLQLTNTSAYYMYLLLLLKSVVYFAIITCCLLRRTAFCCNGEKSRAKRSGSGATNFSLLKQAGDVEENPGPTSMALPVTALLLPLALLLHAARPDIQMTQSPSSLSASVGDRVTITCKASDHINNWLAWYQQKPGQAPKLLIYGATTLETGVPSRFSGSGSGTDYTLTISSLQPEDFATYYCQQSWNTPWTFGQGTKLEIKRGGGGSGGGGSGGGGSQVQLQQPGAELVKPGASVKMSCKASGYTFSSYWINWMKQKPGQGLEWIGQIYPGDGDTNYNGKFKGRATLTADTSSSTAYMQLSSLTSEDSAVYFCARSITTVVGCAMDYWGQGTSVTVSSTRIQNPDPAVYQLRDSKSSDKSVCLFTDFDSQTNVSQSKDSDVYITDKCVLDMRSMDFKSNSAVAWSNKSDFACANAFNNSIIPEDTFFPSPESSDSTDHVKPKETENTKQPSKSCHKPKAIVHTEKVNMMSLTVLGLRMLFAKTVAVNFLLTAKLFFLRAKRSGSGVKQTLNFDLLKLAGDVESNPGPSRGHMTEYKPTVRLATRDDVPRAVRTLAAAFADYPATRHTVDPDRHIERVTELQELFLTRVGLDIGKVWVADDGAAVAVWTTPESVEAGAVFAEIGPRMAELSGSRLAAQQQMEGLLAPHRPKEPAWFLATVGVSPDHQGKGLGSAVVLPGVEAAERAGVPAFLETSAPRNLPFYERLGFTVTADVEVPEGPRTWCMTRKPGA

SEQ ID NO: 43845 - protein, 974 aa, synthetic construct
MALPVTALLLPLALLLHAARPLEIQNPDPAVYQLRDSKSSDKSVCLFTDFDSQTNVSQSKDSDVYITDKCVLDMRSMDFKSNSAVAWSNKSDFACANAFNNSIIPEDTFFPSPESSDSTDHVKPKETENTKQPSKSCHKPKAIVHTEKVNMMSLTVLGLRMLFAKTVAVNFLLTAKLFFLRAKRSGSGATNFSLLKQAGDVEENPGPTSMALPVTALLLPLALLLHAARPDIQMTQSPSSLSASVGDRVTITCKASDHINNWLAWYQQKPGQAPKLLIYGATTLETGVPSRFSGSGSGTDYTLTISSLQPEDFATYYCQQSWNTPWTFGQGTKLEIKRGGGGSGGGGSGGGGSQVQLQQPGAELVKPGASVKMSCKASGYTFSSYWINWMKQKPGQGLEWIGQIYPGDGDTNYNGKFKGRATLTADTSSSTAYMQLSSLTSEDSAVYFCARSITTVVGCAMDYWGQGTSVTVSSTREEDLKNVFPPEVAVFEPSEAEISHTQKATLVCLATGFYPDHVELSWWVNGKEVHSGVCTDPQPLKEQPALNDSRYCLSSRLRVSATFWQNPRNHFRCQVQFYGLSENDEWTQDRAKPVTQIVSAEAWGRADDVIKIHWQEKKSNTILGSQEGNTMKTNDTYMKFSWLTVPEKSLDKEHRCIVRHENNKNGVDQEIIFPPIKTDVITMDPKDNCSKDANDTLLLQLTNTSAYYMYLLLLLKSVVYFAIITCCLLRRTAFCCNGEKSRAKRSGSGVKQTLNFDLLKLAGDVESNPGPSRGHMTEYKPTVRLATRDDVPRAVRTLAAAFADYPATRHTVDPDRHIERVTELQELFLTRVGLDIGKVWVADDGAAVAVWTTPESVEAGAVFAEIGPRMAELSGSRLAAQQQMEGLLAPHRPKEPAWFLATVGVSPDHQGKGLGSAVVLPGVEAAERAGVPAFLETSAPRNLPFYERLGFTVTADVEVPEGPRTWCMTRKPGA

SEQ ID NO: 43846 - protein, 871 aa, synthetic construct
MALPVTALLLPLALLLHAARPLEEDLKNVFPPEVAVFEPSEAEISHTQKATLVCLATGFYPDHVELSWWVNGKEVHSGVSTDPQPLKEQPALNDSRYCLSSRLRVSATFWQNPRNHFRCQVQFYGLSENDEWTQDRAKPVTQIVSAEAWGRADCGFTSESYQQGVLSATNLSVIGFRILLLKVAGFNLLMTLRLWSSRAKRSGSGATNFSLLKQAGDVEENPGPTSMALPVTALLLPLALLLHAARPDIQMTQSPSSLSASVGDRVTITCKASDHINNWLAWYQQKPGQAPKLLIYGATTLETGVPSRFSGSGSGTDYTLTISSLQPEDFATYYCQQSWNTPWTFGQGTKLEIKRGGGGSGGGGSGGGGSQVQLQQPGAELVKPGASVKMSCKASGYTFSSYWINWMKQKPGQGLEWIGQIYPGDGDTNYNGKFKGRATLTADTSSSTAYMQLSSLTSEDSAVYFCARSITTVVGCAMDYWGQGTSVTVSSTRIQNPDPAVYQLRDSKSSDKSVCLFTDFDSQTNVSQSKDSDVYITDKTVLDMRSMDFKSNSAVAWSNKSDFACANAFNNSIIPEDTFFPSPESSCDVKLVEKSFETDTNLNFQILYEILLGKATLYAVLVSALVLMAMVKRKDSRGRAKRSGSGVKQTLNFDLLKLAGDVESNPGPSRGHMTEYKPTVRLATRDDVPRAVRTLAAAFADYPATRHTVDPDRHIERVTELQELFLTRVGLDIGKVWVADDGAAVAVWTTPESVEAGAVFAEIGPRMAELSGSRLAAQQQMEGLLAPHRPKEPAWFLATVGVSPDHQGKGLGSAVVLPGVEAAERAGVPAFLETSAPRNLPFYERLGFTVTADVEVPEGPRTWCMTRKPGA

SEQ ID NO: 43847 - protein, 871 aa, synthetic construct
MALPVTALLLPLALLLHAARPLEIQNPDPAVYQLRDSKSSDKSVCLFTDFDSQTNVSQSKDSDVYITDKTVLDMRSMDFKSNSAVAWSNKSDFACANAFNNSIIPEDTFFPSPESSCDVKLVEKSFETDTNLNFQILYEILLGKATLYAVLVSALVLMAMVKRKDSRGRAKRSGSGATNFSLLKQAGDVEENPGPTSMALPVTALLLPLALLLHAARPDIQMTQSPSSLSASVGDRVTITCKASDHINNWLAWYQQKPGQAPKLLIYGATTLETGVPSRFSGSGSGTDYTLTISSLQPEDFATYYCQQSWNTPWTFGQGTKLEIKRGGGGSGGGGSGGGGSQVQLQQPGAELVKPGASVKMSCKASGYTFSSYWINWMKQKPGQGLEWIGQIYPGDGDTNYNGKFKGRATLTADTSSSTAYMQLSSLTSEDSAVYFCARSITTVVGCAMDYWGQGTSVTVSSTREDLKNVFPPEVAVFEPSEAEISHTQKATLVCLATGFYPDHVELSWWVNGKEVHSGVSTDPQPLKEQPALNDSRYCLSSRLRVSATFWQNPRNHFRCQVQFYGLSENDEWTQDRAKPVTQIVSAEAWGRADCGFTSESYQQGVLSATNLSVIGFRILLLKVAGFNLLMTLRLWSSRAKRSGSGVKQTLNFDLLKLAGDVESNPGPSRGHMTEYKPTVRLATRDDVPRAVRTLAAAFADYPATRHTVDPDRHIERVTELQELFLTRVGLDIGKVWVADDGAAVAVWTTPESVEAGAVFAEIGPRMAELSGSRLAAQQQMEGLLAPHRPKEPAWFLATVGVSPDHQGKGLGSAVVLPGVEAAERAGVPAFLETSAPRNLPFYERLGFTVTADVEVPEGPRTWCMTRKPGA

SEQ ID NO: 43848 - protein, 871 aa, synthetic construct
MALPVTALLLPLALLLHAARPLEEDLKNVFPPEVAVFEPSEAEISHTQKATLVCLATGFYPDHVELSWWVNGKEVHSGVCTDPQPLKEQPALNDSRYCLSSRLRVSATFWQNPRNHFRCQVQFYGLSENDEWTQDRAKPVTQIVSAEAWGRADCDVKLVEKSFETDTNLNFQNLSVIGFRILLLKVAGFNLLMTLRLWSSRAKRSGSGATNFSLLKQAGDVEENPGPTSMALPVTALLLPLALLLHAARPDIQMTQSPSSLSASVGDRVTITCKASDHINNWLAWYQQKPGQAPKLLIYGATTLETGVPSRFSGSGSGTDYTLTISSLQPEDFATYYCQQSWNTPWTFGQGTKLEIKRGGGGSGGGGSGGGGSQVQLQQPGAELVKPGASVKMSCKASGYTFSSYWINWMKQKPGQGLEWIGQIYPGDGDTNYNGKFKGRATLTADTSSSTAYMQLSSLTSEDSAVYFCARSITTVVGCAMDYWGQGTSVTVSSTRIQNPDPAVYQLRDSKSSDKSVCLFTDFDSQTNVSQSKDSDVYITDKCVLDMRSMDFKSNSAVAWSNKSDFACANAFNNSIIPEDTFFPSPESSCGFTSESYQQGVLSATILYEILLGKATLYAVLVSALVLMAMVKRKDSRGRAKRSGSGVKQTLNFDLLKLAGDVESNPGPSRGHMTEYKPTVRLATRDDVPRAVRTLAAAFADYPATRHTVDPDRHIERVTELQELFLTRVGLDIGKVWVADDGAAVAVWTTPESVEAGAVFAEIGPRMAELSGSRLAAQQQMEGLLAPHRPKEPAWFLATVGVSPDHQGKGLGSAVVLPGVEAAERAGVPAFLETSAPRNLPFYERLGFTVTADVEVPEGPRTWCMTRKPGA

SEQ ID NO: 43849 - protein, 871 aa, synthetic construct
MALPVTALLLPLALLLHAARPLEEDLKNVFPPEVAVFEPSEAEISHTQKATLVCLATGFYPDHVELSWWVNGKEVHSGVSTDPQPLKEQPALNDSRYCLSSRLRVSATFWQNPRNHFRCQVQFYGLSENDEWTQDRAKPVTQIVSAEAWGRADCDVKLVEKSFETDTNLNFQNLSVIGFRILLLKVAGFNLLMTLRLWSSRAKRSGSGATNFSLLKQAGDVEENPGPTSMALPVTALLLPLALLLHAARPDIQMTQSPSSLSASVGDRVTITCKASDHINNWLAWYQQKPGQAPKLLIYGATTLETGVPSRFSGSGSGTDYTLTISSLQPEDFATYYCQQSWNTPWTFGQGTKLEIKRGGGGSGGGGSGGGGSQVQLQQPGAELVKPGASVKMSCKASGYTFSSYWINWMKQKPGQGLEWIGQIYPGDGDTNYNGKFKGRATLTADTSSSTAYMQLSSLTSEDSAVYFCARSITTVVGCAMDYWGQGTSVTVSSTRIQNPDPAVYQLRDSKSSDKSVCLFTDFDSQTNVSQSKDSDVYITDKTVLDMRSMDFKSNSAVAWSNKSDFACANAFNNSIIPEDTFFPSPESSCGFTSESYQQGVLSATILYEILLGKATLYAVLVSALVLMAMVKRKDSRGRAKRSGSGVKQTLNFDLLKLAGDVESNPGPSRGHMTEYKPTVRLATRDDVPRAVRTLAAAFADYPATRHTVDPDRHIERVTELQELFLTRVGLDIGKVWVADDGAAVAVWTTPESVEAGAVFAEIGPRMAELSGSRLAAQQQMEGLLAPHRPKEPAWFLATVGVSPDHQGKGLGSAVVLPGVEAAERAGVPAFLETSAPRNLPFYERLGFTVTADVEVPEGPRTWCMTRKPGA

SEQ ID NO: 43850 - protein, 974 aa, synthetic construct
MALPVTALLLPLALLLHAARPLEEEDLKNVFPPEVAVFEPSEAEISHTQKATLVCLATGFYPDHVELSWWVNGKEVHSGVSTDPQPLKEQPALNDSRYCLSSRLRVSATFWQNPRNHFRCQVQFYGLSENDEWTQDRAKPVTQIVSAEAWGRADDVIKIHWQEKKSNTILGSQEGNTMKTNDTYMKFSWLTVPEKSLDKEHRCIVRHENNKNGVDQEIIFPPIKTDVITMDPKDNCSKDANDTLLLQLTNTSAYYMYLLLLLKSVVYFAIITCCLLRRTAFCCNGEKSRAKRSGSGATNFSLLKQAGDVEENPGPTSMALPVTALLLPLALLLHAARPDIQMTQSPSSLSASVGDRVTITCKASDHINNWLAWYQQKPGQAPKLLIYGATTLETGVPSRFSGSGSGTDYTLTISSLQPEDFATYYCQQSWNTPWTFGQGTKLEIKRGGGGSGGGGSGGGGSQVQLQQPGAELVKPGASVKMSCKASGYTFSSYWINWMKQKPGQGLEWIGQIYPGDGDTNYNGKFKGRATLTADTSSSTAYMQLSSLTSEDSAVYFCARSITTVVGCAMDYWGQGTSVTVSSTRIQNPDPAVYQLRDSKSSDKSVCLFTDFDSQTNVSQSKDSDVYITDKTVLDMRSMDFKSNSAVAWSNKSDFACANAFNNSIIPEDTFFPSPESSDSTDHVKPKETENTKQPSKSCHKPKAIVHTEKVNMMSLTVLGLRMLFAKTVAVNFLLTAKLFFLRAKRSGSGVKQTLNFDLLKLAGDVESNPGPSRGHMTEYKPTVRLATRDDVPRAVRTLAAAFADYPATRHTVDPDRHIERVTELQELFLTRVGLDIGKVWVADDGAAVAVWTTPESVEAGAVFAEIGPRMAELSGSRLAAQQQMEGLLAPHRPKEPAWFLATVGVSPDHQGKGLGSAVVLPGVEAAERAGVPAFLETSAPRNLPFYERLGFTVTADVEVPEGPRTWCMTRKPGA

SEQ ID NO: 43851 - protein, 871 aa, synthetic construct
MALPVTALLLPLALLLHAARPLEEDLKNVFPPEVAVFEPSEAEISHTQKATLVCLATGFYPDHVELSWWVNGKEVHSGVCTDPQPLKEQPALNDSRYCLSSRLRVSATFWQNPRNHFRCQVQFYGLSENDEWTQDRAKPVTQIVSAEAWGRADCGFTSESYQQGVLSATNLSVIGFRILLLKVAGFNLLMTLRLWSSRAKRSGSGATNFSLLKQAGDVEENPGPTSMALPVTALLLPLALLLHAARPDIQMTQSPSSLSASVGDRVTITCKASDHINNWLAWYQQKPGQAPKLLIYGATTLETGVPSRFSGSGSGTDYTLTISSLQPEDFATYYCQQSWNTPWTFGQGTKLEIKRGGGGSGGGGSGGGGSQVQLQQPGAELVKPGASVKMSCKASGYTFSSYWINWMKQKPGQGLEWIGQIYPGDGDTNYNGKFKGRATLTADTSSSTAYMQLSSLTSEDSAVYFCARSITTVVGCAMDYWGQGTSVTVSSTRIQNPDPAVYQLRDSKSSDKSVCLFTDFDSQTNVSQSKDSDVYITDKCVLDMRSMDFKSNSAVAWSNKSDFACANAFNNSIIPEDTFFPSPESSCDVKLVEKSFETDTNLNFQILYEILLGKATLYAVLVSALVLMAMVKRKDSRGRAKRSGSGVKQTLNFDLLKLAGDVESNPGPSRGHMTEYKPTVRLATRDDVPRAVRTLAAAFADYPATRHTVDPDRHIERVTELQELFLTRVGLDIGKVWVADDGAAVAVWTTPESVEAGAVFAEIGPRMAELSGSRLAAQQQMEGLLAPHRPKEPAWFLATVGVSPDHQGKGLGSAVVLPGVEAAERAGVPAFLETSAPRNLPFYERLGFTVTADVEVPEGPRTWCMTRKPGA

SEQ ID NO: 43852 - protein, 900 aa, synthetic construct
MALPVTALLLPLALLLHAARPLEEEDLKNVFPPEVAVFEPSEAEISHTQKATLVCLATGFYPDHVELSWWVNGKEVHSGVCTDPQPLKEQPALNDSRYCLSSRLRVSATFWQNPRNHFRCQVQFYGLSENDEWTQDRAKPVTQIVSAEAWGRADCGFTSESYQQGVLSATNLSVIGFRILLLKVAGFNLLMTLRLWSSRAKRSGSGATNFSLLKQAGDVEENPGPTSMALPVTALLLPLALLLHAARPDIQMTQSPSSLSASVGDRVTITCKASDHINNWLAWYQQKPGQAPKLLIYGATTLETGVPSRFSGSGSGTDYTLTISSLQPEDFATYYCQQSWNTPWTFGQGTKLEIKRGGGGSGGGGSGGGGSQVQLQQPGAELVKPGASVKMSCKASGYTFSSYWINWMKQKPGQGLEWIGQIYPGDGDTNYNGKFKGRATLTADTSSSTAYMQLSSLTSEDSAVYFCARSITTVVGCAMDYWGQGTSVTVSSTRGQPKANPTVTLFPPSSEELQANKATLVCLISDFYPGAVTVAWKADGSPVKAGVETTKPSKQSNNKYAASSYLSLTPEQWKSHRSYSCQVTHEGSTVEKTVAPTECSPIKTDVITMDPKDNCSKDANDTLLLQLTNTSAYYMYLLLLLKSVVYFAIITCCLLRRTAFCCNGEKSRAKRSGSGVKQTLNFDLLKLAGDVESNPGPSRGHMTEYKPTVRLATRDDVPRAVRTLAAAFADYPATRHTVDPDRHIERVTELQELFLTRVGLDIGKVWVADDGAAVAVWTTPESVEAGAVFAEIGPRMAELSGSRLAAQQQMEGLLAPHRPKEPAWFLATVGVSPDHQGKGLGSAVVLPGVEAAERAGVPAFLETSAPRNLPFYERLGFTVTADVEVPEGPRTWCMTRKPGA

SEQ ID NO: 43853 - protein, 900 aa, synthetic construct
MALPVTALLLPLALLLHAARPLEGQPKANPTVTLFPPSSEELQANKATLVCLISDFYPGAVTVAWKADGSPVKAGVETTKPSKQSNNKYAASSYLSLTPEQWKSHRSYSCQVTHEGSTVEKTVAPTECSPIKTDVITMDPKDNCSKDANDTLLLQLTNTSAYYMYLLLLLKSVVYFAIITCCLLRRTAFCCNGEKSRAKRSGSGATNFSLLKQAGDVEENPGPTSMALPVTALLLPLALLLHAARPDIQMTQSPSSLSASVGDRVTITCKASDHINNWLAWYQQKPGQAPKLLIYGATTLETGVPSRFSGSGSGTDYTLTISSLQPEDFATYYCQQSWNTPWTFGQGTKLEIKRGGGGSGGGGSGGGGSQVQLQQPGAELVKPGASVKMSCKASGYTFSSYWINWMKQKPGQGLEWIGQIYPGDGDTNYNGKFKGRATLTADTSSSTAYMQLSSLTSEDSAVYFCARSITTVVGCAMDYWGQGTSVTVSSTREEDLKNVFPPEVAVFEPSEAEISHTQKATLVCLATGFYPDHVELSWWVNGKEVHSGVCTDPQPLKEQPALNDSRYCLSSRLRVSATFWQNPRNHFRCQVQFYGLSENDEWTQDRAKPVTQIVSAEAWGRADCGFTSESYQQGVLSATNLSVIGFRILLLKVAGFNLLMTLRLWSSRAKRSGSGVKQTLNFDLLKLAGDVESNPGPSRGHMTEYKPTVRLATRDDVPRAVRTLAAAFADYPATRHTVDPDRHIERVTELQELFLTRVGLDIGKVWVADDGAAVAVWTTPESVEAGAVFAEIGPRMAELSGSRLAAQQQMEGLLAPHRPKEPAWFLATVGVSPDHQGKGLGSAVVLPGVEAAERAGVPAFLETSAPRNLPFYERLGFTVTADVEVPEGPRTWCMTRKPGA

SEQ ID NO: 43854 - protein, 897 aa, synthetic construct
MALPVTALLLPLALLLHAARPLEEASTKGPSVFPLAPSSKSTSGGTAALGCLVKDYFPEPVTVSWNSGALTSGVHTFPAVLQSSGLYSLSSVVTVPSSSLGTQTYICNVNHKPSNTKVDKRVEPKSCPIKTDVITMDPKDNCSKDANDTLLLQLTNTSAYYMYLLLLLKSVVYFAIITCCLLRRTAFCCNGEKSRAKRSGSGATNFSLLKQAGDVEENPGPTSMALPVTALLLPLALLLHAARPDIQMTQSPSSLSASVGDRVTITCKASDHINNWLAWYQQKPGQAPKLLIYGATTLETGVPSRFSGSGSGTDYTLTISSLQPEDFATYYCQQSWNTPWTFGQGTKLEIKRGGGGSGGGGSGGGGSQVQLQQPGAELVKPGASVKMSCKASGYTFSSYWINWMKQKPGQGLEWIGQIYPGDGDTNYNGKFKGRATLTADTSSSTAYMQLSSLTSEDSAVYFCARSITTVVGCAMDYWGQGTSVTVSSTRGQPKANPTVTLFPPSSEELQANKATLVCLISDFYPGAVTVAWKADGSPVKAGVETTKPSKQSNNKYAASSYLSLTPEQWKSHRSYSCQVTHEGSTVEKTVAPTECSEVKTDSTDHVKPKETENTKQPSKSCHKPKAIVHTEKVNMMSLTVLGLRMLFAKTVAVNFLLTAKLFFLRAKRSGSGVKQTLNFDLLKLAGDVESNPGPSRGHMTEYKPTVRLATRDDVPRAVRTLAAAFADYPATRHTVDPDRHIERVTELQELFLTRVGLDIGKVWVADDGAAVAVWTTPESVEAGAVFAEIGPRMAELSGSRLAAQQQMEGLLAPHRPKEPAWFLATVGVSPDHQGKGLGSAVVLPGVEAAERAGVPAFLETSAPRNLPFYERLGFTVTADVEVPEGPRTWCMTRKPGA

SEQ ID NO: 43855 - protein, 875 aa, synthetic construct
MALPVTALLLPLALLLHAARPLEEASTKGPSVFPLAPSSKSTSGGTAALGCLVKDYFPEPVTVSWNSGALTSGVHTFPAVLQSSGLYSLSSVVTVPSSSLGTQTYICNVNHKPSNTKVDKRVEPKSCGRADCGFTSESYQQGVLSATILYEILLGKATLYAVLVSALVLMAMVKRKDSRGRAKRSGSGATNFSLLKQAGDVEENPGPTSMALPVTALLLPLALLLHAARPDIQMTQSPSSLSASVGDRVTITCKASDHINNWLAWYQQKPGQAPKLLIYGATTLETGVPSRFSGSGSGTDYTLTISSLQPEDFATYYCQQSWNTPWTFGQGTKLEIKRGGGGSGGGGSGGGGSQVQLQQPGAELVKPGASVKMSCKASGYTFSSYWINWMKQKPGQGLEWIGQIYPGDGDTNYNGKFKGRATLTADTSSSTAYMQLSSLTSEDSAVYFCARSITTVVGCAMDYWGQGTSVTVSSTRGQPKANPTVTLFPPSSEELQANKATLVCLISDFYPGAVTVAWKADGSPVKAGVETTKPSKQSNNKYAASSYLSLTPEQWKSHRSYSCQVTHEGSTVEKTVAPTECSIPEDTFFPSPESSCDVKLVEKSFETDTNLNFQNLSVIGFRILLLKVAGFNLLMTLRLWSSRAKRSGSGVKQTLNFDLLKLAGDVESNPGPSRGHMTEYKPTVRLATRDDVPRAVRTLAAAFADYPATRHTVDPDRHIERVTELQELFLTRVGLDIGKVWVADDGAAVAVWTTPESVEAGAVFAEIGPRMAELSGSRLAAQQQMEGLLAPHRPKEPAWFLATVGVSPDHQGKGLGSAVVLPGVEAAERAGVPAFLETSAPRNLPFYERLGFTVTADVEVPEGPRTWCMTRKPGA

SEQ ID NO: 43856 - protein, 875 aa, synthetic construct
MALPVTALLLPLALLLHAARPLEEASTKGPSVFPLAPSSKSTSGGTAALGCLVKDYFPEPVTVSWNSGALTSGVHTFPAVLQSSGLYSLSSVVTVPSSSLGTQTYICNVNHKPSNTKVDKRVEPKSCIPEDTFFPSPESSCDVKLVEKSFETDTNLNFQNLSVIGFRILLLKVAGFNLLMTLRLWSSRAKRSGSGATNFSLLKQAGDVEENPGPTSMALPVTALLLPLALLLHAARPDIQMTQSPSSLSASVGDRVTITCKASDHINNWLAWYQQKPGQAPKLLIYGATTLETGVPSRFSGSGSGTDYTLTISSLQPEDFATYYCQQSWNTPWTFGQGTKLEIKRGGGGSGGGGSGGGGSQVQLQQPGAELVKPGASVKMSCKASGYTFSSYWINWMKQKPGQGLEWIGQIYPGDGDTNYNGKFKGRATLTADTSSSTAYMQLSSLTSEDSAVYFCARSITTVVGCAMDYWGQGTSVTVSSTRGQPKANPTVTLFPPSSEELQANKATLVCLISDFYPGAVTVAWKADGSPVKAGVETTKPSKQSNNKYAASSYLSLTPEQWKSHRSYSCQVTHEGSTVEKTVAPTECSGRADCGFTSESYQQGVLSATILYEILLGKATLYAVLVSALVLMAMVKRKDSRGRAKRSGSGVKQTLNFDLLKLAGDVESNPGPSRGHMTEYKPTVRLATRDDVPRAVRTLAAAFADYPATRHTVDPDRHIERVTELQELFLTRVGLDIGKVWVADDGAAVAVWTTPESVEAGAVFAEIGPRMAELSGSRLAAQQQMEGLLAPHRPKEPAWFLATVGVSPDHQGKGLGSAVVLPGVEAAERAGVPAFLETSAPRNLPFYERLGFTVTADVEVPEGPRTWCMTRKPGA

SEQ ID NO: 43857 - protein, 622 aa, synthetic construct
MALPVTALLLPLALLLHAARPDIQMTQSPSSLSASVGDRVTITCKASDHINNWLAWYQQKPGQAPKLLIYGATTLETGVPSRFSGSGSGTDYTLTISSLQPEDFATYYCQQSWNTPWTFGQGTKLEIKRLEDLKNVFPPEVAVFEPSEAEISHTQKATLVCLATGFYPDHVELSWWVNGKEVHSGVCTDPQPLKEQPALNDSRYCLSSRLRVSATFWQNPRNHFRCQVQFYGLSENDEWTQDRAKPVTQIVSAEAWGRADSGFTSESYQQGVLSATILYEILLGKATLYAVLVSALVLMAMVKRKDSRGRAKRSGSGATNFSLLKQAGDVEENPGPTSMDWIWRILFLVGAATGAHSFEQVQLQQPGAELVKPGASVKMSCKASGYTFSSYWINWMKQKPGQGLEWIGQIYPGDGDTNYNGKFKGRATLTADTSSSTAYMQLSSLTSEDSAVYFCARSITTVVGCAMDYWGQGTSVTVSSTRIQNPDPAVYQLRDSKSSDKSVCLFTDFDSQTNVSQSKDSDVYITDKCVLDMRSMDFKSNSAVAWSNKSDFACANAFNNSIIPEDTFFPSPESSSDVKLVEKSFETDTNLNFQNLSVIGFRILLLKVAGFNLLMTLRLWSS

SEQ ID NO: 43858 - protein, 901 aa, synthetic construct
MALPVTALLLPLALLLHAARPEVQLLESGGGLVQPGGSLRLSCAASGRTFSMGWYRQAPGKGLEFVSAITYSGGSPYYADSVKGRFTISRDNSKNTVYLQMNSLRAEDTAVYYCAANPTYGSDWNAENWGQGTLVTVSSGTGGGGSGGGGSGGGGSEFDIQMTQSPSSLSASVGDRVTITCKASDHINNWLAWYQQKPGQAPKLLIYGATTLETGVPSRFSGSGSGTDYTLTISSLQPEDFATYYCQQSWNTPWTFGQGTKLEIKRLEIQNPDPAVYQLRDSKSSDKSVCLFTDFDSQTNVSQSKDSDVYITDKCVLDMRSMDFKSNSAVAWSNKSDFACANAFNNSIIPEDTFFPSSDVPCDVKLVEKSFETDTNLNFQNLSVIGFRILLLKVAGFNLLMTLRLWSSRAKRSGSGVKQTLNFDLLKLAGDVESNPGPTSTMDWIWRILFLVGAATGTHSGPEVQLVESGGGLVQPGGSLRLSCAASGRTFTMGWYRQAPGKEREFVAAISLSPTLAYYADSVKGRFTISRDNSKNTVVLQMNSLRAEDTALYYCAADRKSVMSIRPDYWGQGTLVTVSSGSGGGGSGGGGSGGGGSFEQVQLQQPGAELVKPGASVKMSCKASGYTFSSYWINWMKQKPGQGLEWIGQIYPGDGDTNYNGKFKGRATLTADTSSSTAYMQLSSLTSEDSAVYFCARSITTVVGCAMDYWGQGTSVTVSSTREDLKNVFPPEVAVFEPSKAEIAHTQKATLVCLATGFYPDHVELSWWVNGKEVHSGVCTDPQPLKEQPALNDSRYCLSSRLRVSATFWQNPRNHFRCQVQFYGLSENDEWTQDRAKPVTQIVSAEAWGRADCGITSASYHQGVLSATILYEILLGKATLYAVLVSALVLMAMVKRKDSRG

SEQ ID NO: 43859 - protein, 901 aa, synthetic construct
MALPVTALLLPLALLLHAARPEVQLVESGGGLVQAGGSLRLSCAASGRTFSMGWFRQAPGKEREFVAAITYSGGSPYYADSVKGRFTISRDNAKNTVYLQMNSLKPEDTAVYYCAANPTYGSDWNAENWGQGTQVTVSSGTGGGGSGGGGSGGGGSEFDIQMTQSPSSLSASVGDRVTITCKASDHINNWLAWYQQKPGQAPKLLIYGATTLETGVPSRFSGSGSGTDYTLTISSLQPEDFATYYCQQSWNTPWTFGQGTKLEIKRLEIQNPDPAVYQLRDSKSSDKSVCLFTDFDSQTNVSQSKDSDVYITDKCVLDMRSMDFKSNSAVAWSNKSDFACANAFNNSIIPEDTFFPSSDVPCDVKLVEKSFETDTNLNFQNLSVIGFRILLLKVAGFNLLMTLRLWSSRAKRSGSGVKQTLNFDLLKLAGDVESNPGPTSTMDWIWRILFLVGAATGAHSGPEVQLVESGGGLVQPGGSLRLSCAASGRTFTMGWYRQAPGKEREFVAAISLSPTLAYYADSVKGRFTISRDNSKNTVVLQMNSLRAEDTALYYCAADRKSVMSIRPDYWGQGTLVTVSSGSGGGGSGGGGSGGGGSFEQVQLQQPGAELVKPGASVKMSCKASGYTFSSYWINWMKQKPGQGLEWIGQIYPGDGDTNYNGKFKGRATLTADTSSSTAYMQLSSLTSEDSAVYFCARSITTVVGCAMDYWGQGTSVTVSSTREDLKNVFPPEVAVFEPSKAEIAHTQKATLVCLATGFYPDHVELSWWVNGKEVHSGVCTDPQPLKEQPALNDSRYCLSSRLRVSATFWQNPRNHFRCQVQFYGLSENDEWTQDRAKPVTQIVSAEAWGRADCGITSASYHQGVLSATILYEILLGKATLYAVLVSALVLMAMVKRKDSRG

SEQ ID NO: 43860 - protein, 898 aa, synthetic construct
MALPVTALLLPLALLLHAARPEVQLVESGGGLVQAGGSLRLSCAASGRTFSMGWFRQAPGKEREFVAAITYSGGSPYYADSVKGRFTISRDNAKNTVYLQMNSLKPEDTAVYYCAANPTYGSDWNAENWGQGTQVTVSSGTGGGGSGGGGSGGGGSEFDIQMTQSPSSLSASVGDRVTITCKASDHINNWLAWYQQKPGQAPKLLIYGATTLETGVPSRFSGSGSGTDYTLTISSLQPEDFATYYCQQSWNTPWTFGQGTKLEIKRLEDLKNVFPPEVAVFEPSEAEISHTQKATLVCLATGFYPDHVELSWWVNGKEVHSGVCTDPQPLKEQPALNDSRYCLSSRLRVSATFWQNPRNHFRCQVQFYGLSENDEWTQDRAKPVTQIVSAEAWGRADCGFTSESYQQGVLSATILYEILLGKATLYAVLVSALVLMAMVKRKDSRGRAKRSGSGATNFSLLKQAGDVEENPGPTSATMDWIWRILFLVGAATGAHSGPEVQLVESGGGLVQAGGSLRLSCAASGRTFTMGWFRQAPGKEREFVAAISLSPTLAYYADSVKGRFTISRDNAKNTVVLQMNSLKPEDTALYYCAADRKSVMSIRPDYWGQGTQVTVSSGSGGGGSGGGGSGGGGSFEQVQLQQPGAELVKPGASVKMSCKASGYTFSSYWINWMKQKPGQGLEWIGQIYPGDGDTNYNGKFKGRATLTADTSSSTAYMQLSSLTSEDSAVYFCARSITTVVGCAMDYWGQGTSVTVSSTRIQNPDPAVYQLRDSKSSDKSVCLFTDFDSQTNVSQSKDSDVYITDKCVLDMRSMDFKSNSAVAWSNKSDFACANAFNNSIIPEDTFFPSPESSCDVKLVEKSFETDTNLNFQNLSVIGFRILLLKVAGFNLLMTLRLWSS

SEQ ID NO: 43861 - protein, 769 aa, synthetic construct
MALPVTALLLPLALLLHAARPEVQLVESGGGLVQPGGSLRLSCEASGFASDDYIIGWFRQAPGKEREGVSCISSKYANTVYTDSVKGRFRLSRGTAKNTVYLQMSALKPEDTAVYYCAMDSRRVTCPEISTMHRNFDSWGQGTLVTVSSGTGGGGSGGGGSGGGGSEFDIQMTQSPSSLSASVGDRVTITCKASDHINNWLAWYQQKPGQAPKLLIYGATTLETGVPSRFSGSGSGTDYTLTISSLQPEDFATYYCQQSWNTPWTFGQGTKLEIKRLEDLKNVFPPEVAVFEPSKAEIAHTQKATLVCLATGFYPDHVELSWWVNGKEVHSGVCTDPQPLKEQPALNDSRYCLSSRLRVSATFWQNPRNHFRCQVQFYGLSENDEWTQDRAKPVTQIVSAEAWGRADCGITSASYHQGVLSATILYEILLGKATLYAVLVSALVLMAMVKRKDSRGRAKRSGSGATNFSLLKQAGDVEENPGPTSMDWIWRILFLVGAATGAHSFEQVQLQQPGAELVKPGASVKMSCKASGYTFSSYWINWMKQKPGQGLEWIGQIYPGDGDTNYNGKFKGRATLTADTSSSTAYMQLSSLTSEDSAVYFCARSITTVVGCAMDYWGQGTSVTVSSTRIQNPDPAVYQLRDSKSSDKSVCLFTDFDSQTNVSQSKDSDVYITDKCVLDMRSMDFKSNSAVAWSNKSDFACANAFNNSIIPEDTFFPSSDVPCDVKLVEKSFETDTNLNFQNLSVIGFRILLLKVAGFNLLMTLRLWSS

SEQ ID NO: 43862 - protein, 760 aa, synthetic construct
MALPVTALLLPLALLLHAARPDIQMTQSPSSLSASVGDRVTITCKASDHINNWLAWYQQKPGQAPKLLIYGATTLETGVPSRFSGSGSGTDYTLTISSLQPEDFATYYCQQSWNTPWTFGQGTKLEIKRLEDLKNVFPPEVAVFEPSEAEISHTQKATLVCLATGFYPDHVELSWWVNGKEVHSGVCTDPQPLKEQPALNDSRYCLSSRLRVSATFWQNPRNHFRCQVQFYGLSENDEWTQDRAKPVTQIVSAEAWGRADCGFTSESYQQGVLSATILYEILLGKATLYAVLVSALVLMAMVKRKDSRGRAKRSGSGATNFSLLKQAGDVEENPGPTSTMDWIWRILFLVGAATGAHSGPEVQLVESGGGLVQPGGSLRLSCAASGRTFTMGWYRQAPGKEREFVAAISLSPTLAYYADSVKGRFTISRDNSKNTVVLQMNSLRAEDTALYYCAADRKSVMSIRPDYWGQGTLVTVSSGSGGGGSGGGGSGGGGSFEQVQLQQPGAELVKPGASVKMSCKASGYTFSSYWINWMKQKPGQGLEWIGQIYPGDGDTNYNGKFKGRATLTADTSSSTAYMQLSSLTSEDSAVYFCARSITTVVGCAMDYWGQGTSVTVSSTRIQNPDPAVYQLRDSKSSDKSVCLFTDFDSQTNVSQSKDSDVYITDKCVLDMRSMDFKSNSAVAWSNKSDFACANAFNNSIIPEDTFFPSPESSCDVKLVEKSFETDTNLNFQNLSVIGFRILLLKVAGFNLLMTLRLWSS

SEQ ID NO: 43863 - protein, 767 aa, synthetic construct
MALPVTALLLPLALLLHAARPDIQMTQSPSSLSASVGDRVTITCKASDHINNWLAWYQQKPGQAPKLLIYGATTLETGVPSRFSGSGSGTDYTLTISSLQPEDFATYYCQQSWNTPWTFGQGTKLEIKRLEDLKNVFPPEVAVFEPSEAEISHTQKATLVCLATGFYPDHVELSWWVNGKEVHSGVCTDPQPLKEQPALNDSRYCLSSRLRVSATFWQNPRNHFRCQVQFYGLSENDEWTQDRAKPVTQIVSAEAWGRADCGFTSESYQQGVLSATILYEILLGKATLYAVLVSALVLMAMVKRKDSRGRAKRSGSGATNFSLLKQAGDVEENPGPTSTMDWIWRILFLVGAATGAHSGPQVQLVESGGGLVQPGGSLRLSCAASGNINSRNCMGWFRQAPGKGREGVAAIGQVTGRTYYVDSVKGRFTISLDNSKNTLYLQMNSLRAEDTAVYYCAAAPGCLLSALRSADYRNWGQGTLVTVSSGSGGGGSGGGGSGGGGSFEQVQLQQPGAELVKPGASVKMSCKASGYTFSSYWINWMKQKPGQGLEWIGQIYPGDGDTNYNGKFKGRATLTADTSSSTAYMQLSSLTSEDSAVYFCARSITTVVGCAMDYWGQGTSVTVSSTRIQNPDPAVYQLRDSKSSDKSVCLFTDFDSQTNVSQSKDSDVYITDKCVLDMRSMDFKSNSAVAWSNKSDFACANAFNNSIIPEDTFFPSPESSCDVKLVEKSFETDTNLNFQNLSVIGFRILLLKVAGFNLLMTLRLWSS

SEQ ID NO: 43864 - protein, 767 aa, synthetic construct
MALPVTALLLPLALLLHAARPDIQMTQSPSSLSASVGDRVTITCKASDHINNWLAWYQQKPGQAPKLLIYGATTLETGVPSRFSGSGSGTDYTLTISSLQPEDFATYYCQQSWNTPWTFGQGTKLEIKRLEDLKNVFPPEVAVFEPSEAEISHTQKATLVCLATGFYPDHVELSWWVNGKEVHSGVCTDPQPLKEQPALNDSRYCLSSRLRVSATFWQNPRNHFRCQVQFYGLSENDEWTQDRAKPVTQIVSAEAWGRADCGFTSESYQQGVLSATILYEILLGKATLYAVLVSALVLMAMVKRKDSRGRAKRSGSGATNFSLLKQAGDVEENPGPTSTMDWIWRILFLVGAATGAHSGPQVQLVESGGGSVQAGGSLRLSCGASGNISSRNCMGWFRQAPGKEREGVAAIGQVTGRSYYVDSVKGRFTISLDNAKNTLYLQMNTLKPEDTAMYYCAAAPGCLLSALRSADYRNWGQGTQVTVSSGSGGGGSGGGGSGGGGSFEQVQLQQPGAELVKPGASVKMSCKASGYTFSSYWINWMKQKPGQGLEWIGQIYPGDGDTNYNGKFKGRATLTADTSSSTAYMQLSSLTSEDSAVYFCARSITTVVGCAMDYWGQGTSVTVSSTRIQNPDPAVYQLRDSKSSDKSVCLFTDFDSQTNVSQSKDSDVYITDKCVLDMRSMDFKSNSAVAWSNKSDFACANAFNNSIIPEDTFFPSPESSCDVKLVEKSFETDTNLNFQNLSVIGFRILLLKVAGFNLLMTLRLWSS

SEQ ID NO: 43865 - protein, 908 aa, synthetic construct
MALPVTALLLPLALLLHAARPEVQLVESGGGLVQAGGSLRLSCAASGRTFSMGWFRQAPGKEREFVAAITYSGGSPYYADSVKGRFTISRDNAKNTVYLQMNSLKPEDTAVYYCAANPTYGSDWNAENWGQGTQVTVSSGTGGGGSGGGGSGGGGSEFDIQMTQSPSSLSASVGDRVTITCKASDHINNWLAWYQQKPGQAPKLLIYGATTLETGVPSRFSGSGSGTDYTLTISSLQPEDFATYYCQQSWNTPWTFGQGTKLEIKRLEIQNPDPAVYQLRDSKSSDKSVCLFTDFDSQTNVSQSKDSDVYITDKCVLDMRSMDFKSNSAVAWSNKSDFACANAFNNSIIPEDTFFPSSDVPCDVKLVEKSFETDTNLNFQNLSVIGFRILLLKVAGFNLLMTLRLWSSRAKRSGSGVKQTLNFDLLKLAGDVESNPGPTSTMDWIWRILFLVGAATGAHSGPQVQLVESGGGSVQAGGSLRLSCGASGNISSRNCMGWFRQAPGKEREGVAAIGQVTGRSYYVDSVKGRFTISLDNAKNTLYLQMNTLKPEDTAMYYCAAAPGCLLSALRSADYRNWGQGTQVTVSSGSGGGGSGGGGSGGGGSFEQVQLQQPGAELVKPGASVKMSCKASGYTFSSYWINWMKQKPGQGLEWIGQIYPGDGDTNYNGKFKGRATLTADTSSSTAYMQLSSLTSEDSAVYFCARSITTVVGCAMDYWGQGTSVTVSSTREDLKNVFPPEVAVFEPSKAEIAHTQKATLVCLATGFYPDHVELSWWVNGKEVHSGVCTDPQPLKEQPALNDSRYCLSSRLRVSATFWQNPRNHFRCQVQFYGLSENDEWTQDRAKPVTQIVSAEAWGRADCGITSASYHQGVLSATILYEILLGKATLYAVLVSALVLMAMVKRKDSRG

SEQ ID NO: 43866 - protein, 905 aa, synthetic construct
MALPVTALLLPLALLLHAARPQVQLVESGGGSVQAGGSLRLSCGASGNISSRNCMGWFRQAPGKEREGVAAIGQVTGRSYYVDSVKGRFTISLDNAKNTLYLQMNTLKPEDTAMYYCAAAPGCLLSALRSADYRNWGQGTQVTVSSGTGGGGSGGGGSGGGGSEFDIQMTQSPSSLSASVGDRVTITCKASDHINNWLAWYQQKPGQAPKLLIYGATTLETGVPSRFSGSGSGTDYTLTISSLQPEDFATYYCQQSWNTPWTFGQGTKLEIKRLEDLKNVFPPEVAVFEPSEAEISHTQKATLVCLATGFYPDHVELSWWVNGKEVHSGVCTDPQPLKEQPALNDSRYCLSSRLRVSATFWQNPRNHFRCQVQFYGLSENDEWTQDRAKPVTQIVSAEAWGRADCGFTSESYQQGVLSATILYEILLGKATLYAVLVSALVLMAMVKRKDSRGRAKRSGSGATNFSLLKQAGDVEENPGPTSATMDWIWRILFLVGAATGAHSGPEVQLVESGGGLVQAGGSLRLSCAASGRTFTMGWFRQAPGKEREFVAAISLSPTLAYYADSVKGRFTISRDNAKNTVVLQMNSLKPEDTALYYCAADRKSVMSIRPDYWGQGTQVTVSSGSGGGGSGGGGSGGGGSFEQVQLQQPGAELVKPGASVKMSCKASGYTFSSYWINWMKQKPGQGLEWIGQIYPGDGDTNYNGKFKGRATLTADTSSSTAYMQLSSLTSEDSAVYFCARSITTVVGCAMDYWGQGTSVTVSSTRIQNPDPAVYQLRDSKSSDKSVCLFTDFDSQTNVSQSKDSDVYITDKCVLDMRSMDFKSNSAVAWSNKSDFACANAFNNSIIPEDTFFPSPESSCDVKLVEKSFETDTNLNFQNLSVIGFRILLLKVAGFNLLMTLRLWSS

SEQ ID NO: 43867 - protein, 768 aa, synthetic construct
MALPVTALLLPLALLLHAARPQVQLVESGGGSVQAGGSLRLSCGASGNISSRNCMGWFRQAPGKEREGVAAIGQVTGRSYYVDSVKGRFTISLDNAKNTLYLQMNTLKPEDTAMYYCAAAPGCLLSALRSADYRNWGQGTQVTVSSGTGGGGSGGGGSGGGGSEFDIQMTQSPSSLSASVGDRVTITCKASDHINNWLAWYQQKPGQAPKLLIYGATTLETGVPSRFSGSGSGTDYTLTISSLQPEDFATYYCQQSWNTPWTFGQGTKLEIKRLEDLKNVFPPEVAVFEPSEAEISHTQKATLVCLATGFYPDHVELSWWVNGKEVHSGVCTDPQPLKEQPALNDSRYCLSSRLRVSATFWQNPRNHFRCQVQFYGLSENDEWTQDRAKPVTQIVSAEAWGRADCGFTSESYQQGVLSATILYEILLGKATLYAVLVSALVLMAMVKRKDSRGRAKRSGSGATNFSLLKQAGDVEENPGPTSATMDWIWRILFLVGAATGAHSFEQVQLQQPGAELVKPGASVKMSCKASGYTFSSYWINWMKQKPGQGLEWIGQIYPGDGDTNYNGKFKGRATLTADTSSSTAYMQLSSLTSEDSAVYFCARSITTVVGCAMDYWGQGTSVTVSSTRIQNPDPAVYQLRDSKSSDKSVCLFTDFDSQTNVSQSKDSDVYITDKCVLDMRSMDFKSNSAVAWSNKSDFACANAFNNSIIPEDTFFPSPESSCDVKLVEKSFETDTNLNFQNLSVIGFRILLLKVAGFNLLMTLRLWSS

SEQ ID NO: 43868 - protein, 768 aa, synthetic construct
MALPVTALLLPLALLLHAARPQVQLVESGGGVVQPGGSLRLSCAASGLSFSTYTVAWFRQAPGKGLEGVAAIPYTSQHMVYTDSVRGRFTISRDNSKNTLYLQMNSLRAEDTAVYYCATDRRPGTSMLAINGYNRWGQGTTVTVSSGTGGGGSGGGGSGGGGSEFDIQMTQSPSSLSASVGDRVTITCKASDHINNWLAWYQQKPGQAPKLLIYGATTLETGVPSRFSGSGSGTDYTLTISSLQPEDFATYYCQQSWNTPWTFGQGTKLEIKRLEDLKNVFPPEVAVFEPSEAEISHTQKATLVCLATGFYPDHVELSWWVNGKEVHSGVCTDPQPLKEQPALNDSRYCLSSRLRVSATFWQNPRNHFRCQVQFYGLSENDEWTQDRAKPVTQIVSAEAWGRADCGFTSESYQQGVLSATILYEILLGKATLYAVLVSALVLMAMVKRKDSRGRAKRSGSGATNFSLLKQAGDVEENPGPTSATMDWIWRILFLVGAATGAHSFEQVQLQQPGAELVKPGASVKMSCKASGYTFSSYWINWMKQKPGQGLEWIGQIYPGDGDTNYNGKFKGRATLTADTSSSTAYMQLSSLTSEDSAVYFCARSITTVVGCAMDYWGQGTSVTVSSTRIQNPDPAVYQLRDSKSSDKSVCLFTDFDSQTNVSQSKDSDVYITDKCVLDMRSMDFKSNSAVAWSNKSDFACANAFNNSIIPEDTFFPSPESSCDVKLVEKSFETDTNLNFQNLSVIGFRILLLKVAGFNLLMTLRLWSS

SEQ ID NO: 43869 - protein, 767 aa, synthetic construct
MALPVTALLLPLALLLHAARPDIQMTQSPSSLSASVGDRVTITCKASDHINNWLAWYQQKPGQAPKLLIYGATTLETGVPSRFSGSGSGTDYTLTISSLQPEDFATYYCQQSWNTPWTFGQGTKLEIKRLEDLKNVFPPEVAVFEPSEAEISHTQKATLVCLATGFYPDHVELSWWVNGKEVHSGVCTDPQPLKEQPALNDSRYCLSSRLRVSATFWQNPRNHFRCQVQFYGLSENDEWTQDRAKPVTQIVSAEAWGRADCGFTSESYQQGVLSATILYEILLGKATLYAVLVSALVLMAMVKRKDSRGRAKRSGSGATNFSLLKQAGDVEENPGPTSTMDWIWRILFLVGAATGAHSGPQVQLVESGGGVVQPGGSLRLSCAASGLSFSTYTVAWFRQAPGKGLEGVAAIPYTSQHMVYTDSVRGRFTISRDNSKNTLYLQMNSLRAEDTAVYYCATDRRPGTSMLAINGYNRWGQGTTVTVSSGSGGGGSGGGGSGGGGSFEQVQLQQPGAELVKPGASVKMSCKASGYTFSSYWINWMKQKPGQGLEWIGQIYPGDGDTNYNGKFKGRATLTADTSSSTAYMQLSSLTSEDSAVYFCARSITTVVGCAMDYWGQGTSVTVSSTRIQNPDPAVYQLRDSKSSDKSVCLFTDFDSQTNVSQSKDSDVYITDKCVLDMRSMDFKSNSAVAWSNKSDFACANAFNNSIIPEDTFFPSPESSCDVKLVEKSFETDTNLNFQNLSVIGFRILLLKVAGFNLLMTLRLWSS

SEQ ID NO: 43870 - protein, 769 aa, synthetic construct
MALPVTALLLPLALLLHAARPDIQMTQSPSSLSASVGDRVTITCKASDHINNWLAWYQQKPGQAPKLLIYGATTLETGVPSRFSGSGSGTDYTLTISSLQPEDFATYYCQQSWNTPWTFGQGTKLEIKRLEDLKNVFPPEVAVFEPSEAEISHTQKATLVCLATGFYPDHVELSWWVNGKEVHSGVCTDPQPLKEQPALNDSRYCLSSRLRVSATFWQNPRNHFRCQVQFYGLSENDEWTQDRAKPVTQIVSAEAWGRADCGFTSESYQQGVLSATILYEILLGKATLYAVLVSALVLMAMVKRKDSRGRAKRSGSGATNFSLLKQAGDVEENPGPTSTMDWIWRILFLVGAATGAHSGPEVQLVESGGGSVQAGGSLRLSCAASGYTYSINCMGWFRQAPGKEREGVAAISTGGGRTDYRDSVKGRFTISQDNAKNTVYLQMNSLKPEDTAMYYCAGKTTYPGYGCGLGRSAYNYWGQGTQVTVSSGSGGGGSGGGGSGGGGSFEQVQLQQPGAELVKPGASVKMSCKASGYTFSSYWINWMKQKPGQGLEWIGQIYPGDGDTNYNGKFKGRATLTADTSSSTAYMQLSSLTSEDSAVYFCARSITTVVGCAMDYWGQGTSVTVSSTRIQNPDPAVYQLRDSKSSDKSVCLFTDFDSQTNVSQSKDSDVYITDKCVLDMRSMDFKSNSAVAWSNKSDFACANAFNNSIIPEDTFFPSPESSCDVKLVEKSFETDTNLNFQNLSVIGFRILLLKVAGFNLLMTLRLWSS

SEQ ID NO: 43871 - protein, 622 aa, synthetic construct
MALPVTALLLPLALLLHAARPDIQMTQSPSSLSASVGDRVTITCKASDHINNWLAWYQQKPGQAPKLLIYGATTLETGVPSRFSGSGSGTDYTLTISSLQPEDFATYYCQQSWNTPWTFGQGTKLEIKRLEDLKHVFPPEVAVFEPSDAEIWHTQKATLVCLATGFYPDHVELSWWVNGKEVHSGVSTDPQPLKEQPALNDSRYCLSSRLRVSATFWQNPRNHFRCQVQFYGLSENDEWTQDRAKPVTQIVSAEAWGRADCGFTSESYQQGVLSATILYEILLGKATLYAVLVSALVLMAMVKRKDSRGRAKRSGSGATNFSLLKQAGDVEENPGPTSMDWIWRILFLVGAATGAHSFEQVQLQQPGAELVKPGASVKMSCKASGYTFSSYWINWMKQKPGQGLEWIGQIYPGDGDTNYNGKFKGRATLTADTSSSTAYMQLSSLTSEDSAVYFCARSITTVVGCAMDYWGQGTSVTVSSTRIQNPDPAVYQLRDSKSSDKSVCLFTDFDSQTNVSQSKDSDVYITDKTVLDMRSMDFKSNSAVAWSSKSDFACANAFNNSIIPEDTFFPSPEMACDVKLVEKSFETDTNLNFQNLLVIWLRILLLKVAGFNLLMTLRLWSS

SEQ ID NO: 43872 - protein, 622 aa, synthetic construct
MALPVTALLLPLALLLHAARPDIQMTQSPSSLSASVGDRVTITCKASDHINNWLAWYQQKPGQAPKLLIYGATTLETGVPSRFSGSGSGTDYTLTISSLQPEDFATYYCQQSWNTPWTFGQGTKLEIKRLEDLKHVFPPEVAVFEPSDAEIWHTQKATLVCLATGFYPDHVELSWWVNGKEVHSGVSTDPQPLKEQPALNDSRYCLSSRLRVSATFWQNPRNHFRCQVQFYGLSENDEWTQDRAKPVTQIVSAEAWGRADCGFTSESYQQGVLSATILYEILLGKATLYAVLVSALVLMAMVKRKDSRGRAKRSGSGATNFSLLKQAGDVEENPGPTSMDWIWRILFLVGAATGAHSFEQVQLQQPGAELVKPGASVKMSCKASGYTFSSYWINWMKQKPGQGLEWIGQIYPGDGDTNYNGKFKGRATLTADTSSSTAYMQLSSLTSEDSAVYFCARSITTVVGCAMDYWGQGTSVTVSSTRIQNPDPAVYQLRDSKSSDKSVCLFTDFDSQTNVSQSKDSDVYITDKTVLDMRSMDFKSNSAVAWSTKSDFACANAFNNSIIPEDTFFPSPEVVCDVKLVEKSFETDTNLNFQNLVVIGARILLLKVAGFNLLMTLRLWSS

SEQ ID NO: 43873 - protein, 622 aa, synthetic construct
MALPVTALLLPLALLLHAARPDIQMTQSPSSLSASVGDRVTITCKASDHINNWLAWYQQKPGQAPKLLIYGATTLETGVPSRFSGSGSGTDYTLTISSLQPEDFATYYCQQSWNTPWTFGQGTKLEIKRLEDLKNVFPPEVAVFEPSKAEISRTQKATLVCLATGFYPPHVELSWWVNGKEVHDGVCTDPQPLKEQPALNDSRYCLSSRLRVSATFWQNPRNHFRCQVQFYGLSENDEWTQDRAKPVTQIVSAEAWGRADCGFTSESYQQGVLSATILYEILLGKATLYAVLVSALVLMAMVKRKDSRGRAKRSGSGATNFSLLKQAGDVEENPGPTSMDWIWRILFLVGAATGAHSFEQVQLQQPGAELVKPGASVKMSCKASGYTFSSYWINWMKQKPGQGLEWIGQIYPGDGDTNYNGKFKGRATLTADTSSSTAYMQLSSLTSEDSAVYFCARSITTVVGCAMDYWGQGTSVTVSSTRIQNPDPAVYQLRDSKSSDKFVCLFTDFDSQINVSQSKDSDVYITDKCVLDMRSMDFKSNSAVAWSNKSDFTCANAFNNSIIPEDTFFPSPESSCDVKLVEKSFETDTNLNFQNLSVIGFRILLLKVAGFNLLMTLRLWSS

SEQ ID NO: 43874 - protein, 764 aa, synthetic construct
MALPVTALLLPLALLLHAARPDIQMTQSPSSLSASVGDRVTITCKASDHINNWLAWYQQKPGQAPKLLIYGATTLETGVPSRFSGSGSGTDYTLTISSLQPEDFATYYCQQSWNTPWTFGQGTKLEIKRLEDLKNVFPPEVAVFEPSEAEISHTQKATLVCLATGFYPDHVELSWWVNGKEVHSGVCTDPQPLKEQPALNDSRYCLSSRLRVSATFWQNPRNHFRCQVQFYGLSENDEWTQDRAKPVTQIVSAEAWGRADCGFTSESYQQGVLSATILYEILLGKATLYAVLVSALVLMAMVKRKDSRGRAKRSGSGATNFSLLKQAGDVEENPGPTSTMDWIWRILFLVGAATGAHSGPQVQLQESGPGLVKPSQTLSLTCTVSGASITTGEYYWNWFRQPPGKGLEWMGAIAASGSTTYSPSFESRTSISRDTSKNQFSLKLSSVTAADTAVYYCGRSFGVAAVTTGQNRGQGTLVTVSSGSGGGGSGGGGSGGGGSFEQVQLQQPGAELVKPGASVKMSCKASGYTFSSYWINWMKQKPGQGLEWIGQIYPGDGDTNYNGKFKGRATLTADTSSSTAYMQLSSLTSEDSAVYFCARSITTVVGCAMDYWGQGTSVTVSSTRIQNPDPAVYQLRDSKSSDKSVCLFTDFDSQTNVSQSKDSDVYITDKCVLDMRSMDFKSNSAVAWSNKSDFACANAFNNSIIPEDTFFPSPESSCDVKLVEKSFETDTNLNFQNLSVIGFRILLLKVAGFNLLMTLRLWSS

SEQ ID NO: 43875 - protein, 905 aa, synthetic construct
MALPVTALLLPLALLLHAARPQVQLQESGPGLVKPSQTLSLTCTVSGGSITTGEFYWNWFRQPPGKGLEWMGAIAASGSTTYSPSFESRTSISRDTSKNQFSLKLSSVTAADTAVYYCGRSFGVAAVTTGQNRGQGTLVTVSSGTGGGGSGGGGSGGGGSEFDIQMTQSPSSLSASVGDRVTITCKASDHINNWLAWYQQKPGQAPKLLIYGATTLETGVPSRFSGSGSGTDYTLTISSLQPEDFATYYCQQSWNTPWTFGQGTKLEIKRLEIQNPDPAVYQLRDSKSSDKSVCLFTDFDSQTNVSQSKDSDVYITDKCVLDMRSMDFKSNSAVAWSNKSDFACANAFNNSIIPEDTFFPSSDVPCDVKLVEKSFETDTNLNFQNLSVIGFRILLLKVAGFNLLMTLRLWSSRAKRSGSGVKQTLNFDLLKLAGDVESNPGPTSTMDWIWRILFLVGAATGAHSGPEVQLVESGGGLVQPGGSLRLSCAASGRTFTMGWYRQAPGKEREFVAAISLSPTLAYYADSVKGRFTISRDNSKNTVVLQMNSLRAEDTALYYCAADRKSVMSIRPDYWGQGTLVTVSSGSGGGGSGGGGSGGGGSFEQVQLQQPGAELVKPGASVKMSCKASGYTFSSYWINWMKQKPGQGLEWIGQIYPGDGDTNYNGKFKGRATLTADTSSSTAYMQLSSLTSEDSAVYFCARSITTVVGCAMDYWGQGTSVTVSSTREDLKNVFPPEVAVFEPSKAEIAHTQKATLVCLATGFYPDHVELSWWVNGKEVHSGVCTDPQPLKEQPALNDSRYCLSSRLRVSATFWQNPRNHFRCQVQFYGLSENDEWTQDRAKPVTQIVSAEAWGRADCGITSASYHQGVLSATILYEILLGKATLYAVLVSALVLMAMVKRKDSRG

SEQ ID NO: 43876 - protein, 768 aa, synthetic construct
MALPVTALLLPLALLLHAARPQVQLQESGPGLVKPSQTLSLTCTVSGGSITTGEFYWNWFRQPPGKGLEWMGAIAASGSTTYSPSFESRTSISRDTSKNQFSLKLSSVTAADTAVYYCGRSFGVAAVTTGQNRGQGTLVTVSSGTGGGGSGGGGSGGGGSEFDIQMTQSPSSLSASVGDRVTITCKASDHINNWLAWYQQKPGQAPKLLIYGATTLETGVPSRFSGSGSGTDYTLTISSLQPEDFATYYCQQSWNTPWTFGQGTKLEIKRLEIQNPDPAVYQLRDSKSSDKSVCLFTDFDSQTNVSQSKDSDVYITDKCVLDMRSMDFKSNSAVAWSNKSDFACANAFNNSIIPEDTFFPSSDVPCDVKLVEKSFETDTNLNFQNLSVIGFRILLLKVAGFNLLMTLRLWSSRAKRSGSGVKQTLNFDLLKLAGDVESNPGPTSTMDWIWRILFLVGAATGAHSFEQVQLQQPGAELVKPGASVKMSCKASGYTFSSYWINWMKQKPGQGLEWIGQIYPGDGDTNYNGKFKGRATLTADTSSSTAYMQLSSLTSEDSAVYFCARSITTVVGCAMDYWGQGTSVTVSSTREDLKNVFPPEVAVFEPSKAEIAHTQKATLVCLATGFYPDHVELSWWVNGKEVHSGVCTDPQPLKEQPALNDSRYCLSSRLRVSATFWQNPRNHFRCQVQFYGLSENDEWTQDRAKPVTQIVSAEAWGRADCGITSASYHQGVLSATILYEILLGKATLYAVLVSALVLMAMVKRKDSRG

SEQ ID NO: 43877 - protein, 901 aa, synthetic construct
MALPVTALLLPLALLLHAARPEVQLVESGGGLVQAGGSLRLSCAASGRTFSMGWFRQAPGKEREFVAAITYSGGSPYYADSVKGRFTISRDNAKNTVYLQMNSLKPEDTAVYYCAANPTYGSDWNAENWGQGTQVTVSSGTGGGGSGGGGSGGGGSEFDIQMTQSPSSLSASVGDRVTITCKASDHINNWLAWYQQKPGQAPKLLIYGATTLETGVPSRFSGSGSGTDYTLTISSLQPEDFATYYCQQSWNTPWTFGQGTKLEIKRLEDLKNVFPPEVAVFEPSEAEISHTQKATLVCLATGFYPDHVELSWWVNGKEVHSGVCTDPQPLKEQPALNDSRYCLSSRLRVSATFWQNPRNHFRCQVQFYGLSENDEWTQDRAKPVTQIVSAEAWGRADCGFTSESYQQGVLSATILYEILLGKATLYAVLVSALVLMAMVKRKDSRGRAKRSGSGATNFSLLKQAGDVEENPGPTSTMDWIWRILFLVGAATGAHSGPQVQLQESGPGLVKPSQTLSLTCTVSGASITTGEYYWNWFRQPPGKGLEWMGAIAASGSTTYSPSFESRTSISRDTSKNQFSLKLSSVTAADTAVYYCGRSFGVAAVTTGQNRGQGTLVTVSSGSGGGGSGGGGSGGGGSFEQVQLQQPGAELVKPGASVKMSCKASGYTFSSYWINWMKQKPGQGLEWIGQIYPGDGDTNYNGKFKGRATLTADTSSSTAYMQLSSLTSEDSAVYFCARSITTVVGCAMDYWGQGTSVTVSSTRIQNPDPAVYQLRDSKSSDKSVCLFTDFDSQTNVSQSKDSDVYITDKCVLDMRSMDFKSNSAVAWSNKSDFACANAFNNSIIPEDTFFPSPESSCDVKLVEKSFETDTNLNFQNLSVIGFRILLLKVAGFNLLMTLRLWSS

SEQ ID NO: 43878 - protein, 908 aa, synthetic construct
MALPVTALLLPLALLLHAARPEVQLVESGGGLVQAGGSLRLSCAASGRTFSMGWFRQAPGKEREFVAAITYSGGSPYYADSVKGRFTISRDNAKNTVYLQMNSLKPEDTAVYYCAANPTYGSDWNAENWGQGTQVTVSSGTGGGGSGGGGSGGGGSEFDIQMTQSPSSLSASVGDRVTITCKASDHINNWLAWYQQKPGQAPKLLIYGATTLETGVPSRFSGSGSGTDYTLTISSLQPEDFATYYCQQSWNTPWTFGQGTKLEIKRLEIQNPDPAVYQLRDSKSSDKSVCLFTDFDSQTNVSQSKDSDVYITDKCVLDMRSMDFKSNSAVAWSNKSDFACANAFNNSIIPEDTFFPSSDVPCDVKLVEKSFETDTNLNFQNLSVIGFRILLLKVAGFNLLMTLRLWSSRAKRSGSGVKQTLNFDLLKLAGDVESNPGPTSTMDWIWRILFLVGAATGAHSGPQVQLVESGGGLVQPGGSLRLSCAASGNINSRNCMGWFRQAPGKGREGVAAIGQVTGRTYYVDSVKGRFTISLDNSKNTLYLQMNSLRAEDTAVYYCAAAPGCLLSALRSADYRNWGQGTLVTVSSGSGGGGSGGGGSGGGGSFEQVQLQQPGAELVKPGASVKMSCKASGYTFSSYWINWMKQKPGQGLEWIGQIYPGDGDTNYNGKFKGRATLTADTSSSTAYMQLSSLTSEDSAVYFCARSITTVVGCAMDYWGQGTSVTVSSTREDLKNVFPPEVAVFEPSKAEIAHTQKATLVCLATGFYPDHVELSWWVNGKEVHSGVCTDPQPLKEQPALNDSRYCLSSRLRVSATFWQNPRNHFRCQVQFYGLSENDEWTQDRAKPVTQIVSAEAWGRADCGITSASYHQGVLSATILYEILLGKATLYAVLVSALVLMAMVKRKDSRG

SEQ ID NO: 43879 - protein, 904 aa, synthetic construct
MALPVTALLLPLALLLHAARPEVQLVESGGGLVQAGGSLRLSCAASGRTFSMGWFRQAPGKEREFVAAITYSGGSPYYADSVKGRFTISRDNAKNTVYLQMNSLKPEDTAVYYCAANPTYGSDWNAENWGQGTQVTVSSGTGGGGSGGGGSGGGGSEFDIQMTQSPSSLSASVGDRVTITCKASDHINNWLAWYQQKPGQAPKLLIYGATTLETGVPSRFSGSGSGTDYTLTISSLQPEDFATYYCQQSWNTPWTFGQGTKLEIKRLEDLKNVFPPEVAVFEPSEAEISHTQKATLVCLATGFYPDHVELSWWVNGKEVHSGVCTDPQPLKEQPALNDSRYCLSSRLRVSATFWQNPRNHFRCQVQFYGLSENDEWTQDRAKPVTQIVSAEAWGRADCGFTSESYQQGVLSATILYEILLGKATLYAVLVSALVLMAMVKRKDSRGRAKRSGSGATNFSLLKQAGDVEENPGPTSTMDWIWRILFLVGAATGAHSGPQVQLVESGGGLVQPGGSLRLSCAASGNINSRNCMGWFRQAPGKGREGVAAIGQVTGRTYYVDSVKGRFTISLDNSKNTLYLQMNSLRAEDTAVYYCAAAPGCLLSALRSADYRNWGQGTLVTVSSGSGGGGSGGGGSGGGGSFEQVQLQQPGAELVKPGASVKMSCKASGYTFSSYWINWMKQKPGQGLEWIGQIYPGDGDTNYNGKFKGRATLTADTSSSTAYMQLSSLTSEDSAVYFCARSITTVVGCAMDYWGQGTSVTVSSTRIQNPDPAVYQLRDSKSSDKSVCLFTDFDSQTNVSQSKDSDVYITDKCVLDMRSMDFKSNSAVAWSNKSDFACANAFNNSIIPEDTFFPSPESSCDVKLVEKSFETDTNLNFQNLSVIGFRILLLKVAGFNLLMTLRLWSS

SEQ ID NO: 43880 - protein, 904 aa, synthetic construct
MALPVTALLLPLALLLHAARPEVQLVESGGGLVQAGGSLRLSCAASGRTFTMGWFRQAPGKEREFVAAISLSPTLAYYADSVKGRFTISRDNAKNTVVLQMNSLKPEDTALYYCAADRKSVMSIRPDYWGQGTQVTVSSGTGGGGSGGGGSGGGGSEFDIQMTQSPSSLSASVGDRVTITCKASDHINNWLAWYQQKPGQAPKLLIYGATTLETGVPSRFSGSGSGTDYTLTISSLQPEDFATYYCQQSWNTPWTFGQGTKLEIKRLEDLKNVFPPEVAVFEPSEAEISHTQKATLVCLATGFYPDHVELSWWVNGKEVHSGVCTDPQPLKEQPALNDSRYCLSSRLRVSATFWQNPRNHFRCQVQFYGLSENDEWTQDRAKPVTQIVSAEAWGRADCGFTSESYQQGVLSATILYEILLGKATLYAVLVSALVLMAMVKRKDSRGRAKRSGSGATNFSLLKQAGDVEENPGPTSTMDWIWRILFLVGAATGAHSGPQVQLVESGGGLVQPGGSLRLSCAASGNINSRNCMGWFRQAPGKGREGVAAIGQVTGRTYYVDSVKGRFTISLDNSKNTLYLQMNSLRAEDTAVYYCAAAPGCLLSALRSADYRNWGQGTLVTVSSGSGGGGSGGGGSGGGGSFEQVQLQQPGAELVKPGASVKMSCKASGYTFSSYWINWMKQKPGQGLEWIGQIYPGDGDTNYNGKFKGRATLTADTSSSTAYMQLSSLTSEDSAVYFCARSITTVVGCAMDYWGQGTSVTVSSTRIQNPDPAVYQLRDSKSSDKSVCLFTDFDSQTNVSQSKDSDVYITDKCVLDMRSMDFKSNSAVAWSNKSDFACANAFNNSIIPEDTFFPSPESSCDVKLVEKSFETDTNLNFQNLSVIGFRILLLKVAGFNLLMTLRLWSS

SEQ ID NO: 43881 - protein, 908 aa, synthetic construct
MALPVTALLLPLALLLHAARPQVQLQESGPGLVKPSQTLSLTCTVSGGSITTGEFYWNWFRQPPGKGLEWMGAIAASGSTTYSPSFESRTSISRDTSKNQFSLKLSSVTAADTAVYYCGRSFGVAAVTTGQNRGQGTLVTVSSGTGGGGSGGGGSGGGGSEFDIQMTQSPSSLSASVGDRVTITCKASDHINNWLAWYQQKPGQAPKLLIYGATTLETGVPSRFSGSGSGTDYTLTISSLQPEDFATYYCQQSWNTPWTFGQGTKLEIKRLEDLKNVFPPEVAVFEPSEAEISHTQKATLVCLATGFYPDHVELSWWVNGKEVHSGVCTDPQPLKEQPALNDSRYCLSSRLRVSATFWQNPRNHFRCQVQFYGLSENDEWTQDRAKPVTQIVSAEAWGRADCGFTSESYQQGVLSATILYEILLGKATLYAVLVSALVLMAMVKRKDSRGRAKRSGSGATNFSLLKQAGDVEENPGPTSTMDWIWRILFLVGAATGAHSGPQVQLVESGGGLVQPGGSLRLSCAASGNINSRNCMGWFRQAPGKGREGVAAIGQVTGRTYYVDSVKGRFTISLDNSKNTLYLQMNSLRAEDTAVYYCAAAPGCLLSALRSADYRNWGQGTLVTVSSGSGGGGSGGGGSGGGGSFEQVQLQQPGAELVKPGASVKMSCKASGYTFSSYWINWMKQKPGQGLEWIGQIYPGDGDTNYNGKFKGRATLTADTSSSTAYMQLSSLTSEDSAVYFCARSITTVVGCAMDYWGQGTSVTVSSTRIQNPDPAVYQLRDSKSSDKSVCLFTDFDSQTNVSQSKDSDVYITDKCVLDMRSMDFKSNSAVAWSNKSDFACANAFNNSIIPEDTFFPSPESSCDVKLVEKSFETDTNLNFQNLSVIGFRILLLKVAGFNLLMTLRLWSS

SEQ ID NO: 43882 - protein, 487 aa, synthetic construct
MALPVTALLLPLALLLHAARPDIQMTQSPSSLSASVGDRVTITCKASDHINNWLAWYQQKPGQAPKLLIYGATTLETGVPSRFSGSGSGTDYTLTISSLQPEDFATYYCQQSWNTPWTFGQGTKLEIKRGGGGSGGGGSGGGGSQVQLQQPGAELVKPGASVKMSCKASGYAFSSSWINWMKQKPGQGLEWIGQIYPGDGDTNYNGKFKGRATLTADTSSSTAYMQLSSLTSEDSAVYFCARSITTVVGCAMDYWGQGTSVTVSSTRKIEVMYPPPYLDNEKSNGTIIHVKGKHLCPSPLFPGPSKPFWVLVVVGGVLACYSLLVTVAFIIFWVRSKRSRLLHSDYMNMTPRRPGPTRKHYQPYAPPRDFAAYRSRVKFSRSADAPAYQQGQNQLYNELNLGRREEYDVLDKRRGRDPEMGGKPRRKNPQEGLYNELQKDKMAEAYSEIGMKGERRRGKGHDGLYQGLSTATKDTYDALHMQALPPR

SEQ ID NO: 43883 - protein, 493 aa, synthetic construct
MALPVTALLLPLALLLHAARPDIQMTQSPSSLSASVGDRVTITCKASDHINNWLAWYQQKPGQAPKLLIYGATTLETGVPSRFSGSGSGTDYTLTISSLQPEDFATYYCQQSWNTPWTFGQGTKLEIKRGGGGSGGGGSGGGGSQVQLQQPGAELVKPGASVKMSCKASGYAFSSSWINWMKQKPGQGLEWIGQIYPGDGDTNYNGKFKGRATLTADTSSSTAYMQLSSLTSEDSAVYFCARSITTVVGCAMDYWGQGTSVTVSSTRAKPTTTPAPRPPTPAPTIASQPLSLRPEACRPAAGGAVHTRGLDFACDIYIWAPLAGTCGVLLLSLVITLYCKRGRKKLLYIFKQPFMRPVQTTQEEDGCSCRFPEEEEGGCELRVKFSRSADAPAYQQGQNQLYNELNLGRREEYDVLDKRRGRDPEMGGKPRRKNPQEGLYNELQKDKMAEAYSEIGMKGERRRGKGHDGLYQGLSTATKDTYDALHMQALPPR

SEQ ID NO: 43884 - protein, 493 aa, synthetic construct
MALPVTALLLPLALLLHAARPQVQLQQPGAELVKPGASVKMSCKASGYAFSSSWINWMKQKPGQGLEWIGQIYPGDGDTNYNGKFKGRATLTADTSSSTAYMQLSSLTSEDSAVYFCARSITTVVGCAMDYWGQGTSVTVSSGGGGSGGGGSGGGGSDIQMTQSPSSLSASVGDRVTITCKASDHINNWLAWYQQKPGQAPKLLIYGATTLETGVPSRFSGSGSGTDYTLTISSLQPEDFATYYCQQSWNTPWTFGQGTKLEIKRTRAKPTTTPAPRPPTPAPTIASQPLSLRPEACRPAAGGAVHTRGLDFACDIYIWAPLAGTCGVLLLSLVITLYCKRGRKKLLYIFKQPFMRPVQTTQEEDGCSCRFPEEEEGGCELRVKFSRSADAPAYQQGQNQLYNELNLGRREEYDVLDKRRGRDPEMGGKPRRKNPQEGLYNELQKDKMAEAYSEIGMKGERRRGKGHDGLYQGLSTATKDTYDALHMQALPPR

SEQ ID NO: 43885 - protein, 626 aa, synthetic construct
MALPVTALLLPLALLLHAARPDIQMTQSPSSLSASVGDRVTITCKASDHINNWLAWYQQKPGQAPKLLIYGATTLETGVPSRFSGSGSGTDYTLTISSLQPEDFATYYCQQSWNTPWTFGQGTKLEIKRLEIQNPDPAVYQLRDSKSSDKSVCLFTDFDSQTNVSQSKDSDVYITDKCVLDMRSMDFKSNSAVAWSNKSDFACANAFNNSIIPEDTFFPSSDVPCDVKLVEKSFETDTNLNFQNLSVIGFRILLLKVAGFNLLMTLRLWSSRAKRSGSGVKQTLNFDLLKLAGDVESNPGPTSMDWIWRILFLVGAATGAHSFEQVQLQQPGAELVKPGASVKMSCKASGYAFSSSWINWMKQKPGQGLEWIGQIYPGDGDTNYNGKFKGRATLTADTSSSTAYMQLSSLTSEDSAVYFCARSITTVVGCAMDYWGQGTSVTVSSTREDLKNVFPPEVAVFEPSKAEIAHTQKATLVCLATGFYPDHVELSWWVNGKEVHSGVCTDPQPLKEQPALNDSRYCLSSRLRVSATFWQNPRNHFRCQVQFYGLSENDEWTQDRAKPVTQIVSAEAWGRADCGITSASYHQGVLSATILYEILLGKATLYAVLVSALVLMAMVKRKDSRG

SEQ ID NO: 43886 - protein, 622 aa, synthetic construct
MALPVTALLLPLALLLHAARPDIQMTQSPSSLSASVGDRVTITCKASDHINNWLAWYQQKPGQAPKLLIYGATTLETGVPSRFSGSGSGTDYTLTISSLQPEDFATYYCQQSWNTPWTFGQGTKLEIKRLEDLKNVFPPEVAVFEPSKAEIAHTQKATLVCLATGFYPDHVELSWWVNGKEVHSGVCTDPQPLKEQPALNDSRYCLSSRLRVSATFWQNPRNHFRCQVQFYGLSENDEWTQDRAKPVTQIVSAEAWGRADCGITSASYHQGVLSATILYEILLGKATLYAVLVSALVLMAMVKRKDSRGRAKRSGSGATNFSLLKQAGDVEENPGPTSMDWIWRILFLVGAATGAHSFEQVQLQQPGAELVKPGASVKMSCKASGYAFSSSWINWMKQKPGQGLEWIGQIYPGDGDTNYNGKFKGRATLTADTSSSTAYMQLSSLTSEDSAVYFCARSITTVVGCAMDYWGQGTSVTVSSTRIQNPDPAVYQLRDSKSSDKSVCLFTDFDSQTNVSQSKDSDVYITDKCVLDMRSMDFKSNSAVAWSNKSDFACANAFNNSIIPEDTFFPSSDVPCDVKLVEKSFETDTNLNFQNLSVIGFRILLLKVAGFNLLMTLRLWSS

SEQ ID NO: 43887 - protein, 622 aa, synthetic construct
MALPVTALLLPLALLLHAARPDIQMTQSPSSLSASVGDRVTITCKASDHINNWLAWYQQKPGQAPKLLIYGATTLETGVPSRFSGSGSGTDYTLTISSLQPEDFATYYCQQSWNTPWTFGQGTKLEIKRLEDLKNVFPPEVAVFEPSEAEISHTQKATLVCLATGFYPDHVELSWWVNGKEVHSGVCTDPQPLKEQPALNDSRYCLSSRLRVSATFWQNPRNHFRCQVQFYGLSENDEWTQDRAKPVTQIVSAEAWGRADCGFTSESYQQGVLSATILYEILLGKATLYAVLVSALVLMAMVKRKDSRGRAKRSGSGATNFSLLKQAGDVEENPGPTSMDWIWRILFLVGAATGAHSFEQVQLQQPGAELVKPGASVKMSCKASGYAFSSSWINWMKQKPGQGLEWIGQIYPGDGDTNYNGKFKGRATLTADTSSSTAYMQLSSLTSEDSAVYFCARSITTVVGCAMDYWGQGTSVTVSSTRIQNPDPAVYQLRDSKSSDKSVCLFTDFDSQTNVSQSKDSDVYITDKCVLDMRSMDFKSNSAVAWSNKSDFACANAFNNSIIPEDTFFPSPESSCDVKLVEKSFETDTNLNFQNLSVIGFRILLLKVAGFNLLMTLRLWSS

SEQ ID NO: 43888 - protein, 626 aa, synthetic construct
MALPVTALLLPLALLLHAARPDIQMTQSPSSLSASVGDRVTITCKASDHINNWLAWYQQKPGQAPKLLIYGATTLETGVPSRFSGSGSGTDYTLTISSLQPEDFATYYCQQSWNTPWTFGQGTKLEIKRLEIQNPDPAVYQLRDSKSSDKSVCLFTDFDSQTNVSQSKDSDVYITDKCVLDMRSMDFKSNSAVAWSNKSDFACANAFNNSIIPEDTFFPSPESSCDVKLVEKSFETDTNLNFQNLSVIGFRILLLKVAGFNLLMTLRLWSSRAKRSGSGVKQTLNFDLLKLAGDVESNPGPTSMDWIWRILFLVGAATGAHSFEQVQLQQPGAELVKPGASVKMSCKASGYAFSSSWINWMKQKPGQGLEWIGQIYPGDGDTNYNGKFKGRATLTADTSSSTAYMQLSSLTSEDSAVYFCARSITTVVGCAMDYWGQGTSVTVSSTREDLKNVFPPEVAVFEPSEAEISHTQKATLVCLATGFYPDHVELSWWVNGKEVHSGVCTDPQPLKEQPALNDSRYCLSSRLRVSATFWQNPRNHFRCQVQFYGLSENDEWTQDRAKPVTQIVSAEAWGRADCGFTSESYQQGVLSATILYEILLGKATLYAVLVSALVLMAMVKRKDSRG

SEQ ID NO: 43889 - protein, 638 aa, synthetic construct
MALPVTALLLPLALLLHAARPLEEDLKNVFPPEVAVFEPSKAEIAHTQKATLVCLATGFYPDHVELSWWVNGKEVHSGVCTDPQPLKEQPALNDSRYCLSSRLRVSATFWQNPRNHFRCQVQFYGLSENDEWTQDRAKPVTQIVSAEAWGRADCGITSASYHQGVLSATILYEILLGKATLYAVLVSALVLMAMVKRKDSRGRAKRSGSGATNFSLLKQAGDVEENPGPTSMALPVTALLLPLALLLHAARPDIQMTQSPSSLSASVGDRVTITCKASDHINNWLAWYQQKPGQAPKLLIYGATTLETGVPSRFSGSGSGTDYTLTISSLQPEDFATYYCQQSWNTPWTFGQGTKLEIKRGGGGSGGGGSGGGGSQVQLQQPGAELVKPGASVKMSCKASGYAFSSSWINWMKQKPGQGLEWIGQIYPGDGDTNYNGKFKGRATLTADTSSSTAYMQLSSLTSEDSAVYFCARSITTVVGCAMDYWGQGTSVTVSSTRIQNPDPAVYQLRDSKSSDKSVCLFTDFDSQTNVSQSKDSDVYITDKCVLDMRSMDFKSNSAVAWSNKSDFACANAFNNSIIPEDTFFPSSDVPCDVKLVEKSFETDTNLNFQNLSVIGFRILLLKVAGFNLLMTLRLWSS

SEQ ID NO: 43890 - protein, 645 aa, synthetic construct
MALPVTALLLPLALLLHAARPLEGSGDRPDPAVYQLRDSKSSDKSVCLFTDFDSQTNVSQSKDSDVYITDKCVLDMRSMDFKSNSAVAWSNKSDFACANAFNNSIIPEDTFFPSPESSCDVKLVEKSFETDTNLNFQNLSVIGFRILLLKVAGFNLLMTLRLWSSSSRAKRSGSGVKQTLNFDLLKLAGDVESNPGPTSMALPVTALLLPLALLLHAARPDIQMTQSPSSLSASVGDRVTITCKASDHINNWLAWYQQKPGQAPKLLIYGATTLETGVPSRFSGSGSGTDYTLTISSLQPEDFATYYCQQSWNTPWTFGQGTKLEIKRGGGGSGGGGSGGGGSQVQLQQPGAELVKPGASVKMSCKASGYAFSSSWINWMKQKPGQGLEWIGQIYPGDGDTNYNGKFKGRATLTADTSSSTAYMQLSSLTSEDSAVYFCARSITTVVGCAMDYWGQGTSVTVSSTREDLKNVFPPEVAVFEPSEAEISHTQKATLVCLATGFYPDHVELSWWVNGKEVHSGVCTDPQPLKEQPALNDSRYCLSSRLRVSATFWQNPRNHFRCQVQFYGLSENDEWTQDRAKPVTQIVSAEAWGRADCGFTSESYQQGVLSATILYEILLGKATLYAVLVSALVLMAMVKRKDSRG

SEQ ID NO: 43891 - protein, 622 aa, synthetic construct
MALPVTALLLPLALLLHAARPDIQMTQSPSSLSASVGDRVTITCKASDHINNWLAWYQQKPGQAPKLLIYGATTLETGVPSRFSGSGSGTDYTLTISSLQPEDFATYYCQQSWNTPWTFGQGTKLEIKRLEDLKNVFPPEVAVFEPSEAEISHTQKATLVCLATGFYPDHVELSWWVNGKEVHSGVSTDPQPLKEQPALNDSRYCLSSRLRVSATFWQNPRNHFRCQVQFYGLSENDEWTQDRAKPVTQIVSAEAWGRADCGFTSESYQQGVLSATILYEILLGKATLYAVLVSALVLMAMVKRKDSRGRAKRSGSGATNFSLLKQAGDVEENPGPTSMDWIWRILFLVGAATGAHSFEQVQLQQPGAELVKPGASVKMSCKASGYAFSSSWINWMKQKPGQGLEWIGQIYPGDGDTNYNGKFKGRATLTADTSSSTAYMQLSSLTSEDSAVYFCARSITTVVGCAMDYWGQGTSVTVSSTRIQNPDPAVYQLRDSKSSDKSVCLFTDFDSQTNVSQSKDSDVYITDKTVLDMRSMDFKSNSAVAWSNKSDFACANAFNNSIIPEDTFFPSPESSCDVKLVEKSFETDTNLNFQNLSVIGFRILLLKVAGFNLLMTLRLWSS

SEQ ID NO: 43892 - protein, 630 aa, synthetic construct
MALPVTALLLPLALLLHAARPDIQMTQSPSSLSASVGDRVTITCKASDHINNWLAWYQQKPGQAPKLLIYGATTLETGVPSRFSGSGSGTDYTLTISSLQPEDFATYYCQQSWNTPWTFGQGTKLEIKRLEDKQLDADVSPKPTIFLPSIAETKLQKAGTYLCLLEKFFPDVIKIHWQEKKSNTILGSQEGNTMKTNDTYMKFSWLTVPEKSLDKEHRCIVRHENNKNGVDQEIIFPPIKTDVITMDPKDNCSKDANDTLLLQLTNTSAYYMYLLLLLKSVVYFAIITCCLLRRTAFCCNGEKSRAKRSGSGATNFSLLKQAGDVEENPGPTSMDWIWRILFLVGAATGAHSFEQVQLQQPGAELVKPGASVKMSCKASGYAFSSSWINWMKQKPGQGLEWIGQIYPGDGDTNYNGKFKGRATLTADTSSSTAYMQLSSLTSEDSAVYFCARSITTVVGCAMDYWGQGTSVTVSSTRSQPHTKPSVFVMKNGTNVACLVKEFYPKDIRINLVSSKKITEFDPAIVISPSGKYNAVKLGKYEDSNSVTCSVQHDNKTVHSTDFEVKTDSTDHVKPKETENTKQPSKSCHKPKAIVHTEKVNMMSLTVLGLRMLFAKTVAVNFLLTAKLFFL

SEQ ID NO: 43893 - protein, 630 aa, synthetic construct
MALPVTALLLPLALLLHAARPDIQMTQSPSSLSASVGDRVTITCKASDHINNWLAWYQQKPGQAPKLLIYGATTLETGVPSRFSGSGSGTDYTLTISSLQPEDFATYYCQQSWNTPWTFGQGTKLEIKRLESQPHTKPSVFVMKNGTNVACLVKEFYPKDIRINLVSSKKITEFDPAIVISPSGKYNAVKLGKYEDSNSVTCSVQHDNKTVHSTDFEVKTDSTDHVKPKETENTKQPSKSCHKPKAIVHTEKVNMMSLTVLGLRMLFAKTVAVNFLLTAKLFFLRAKRSGSGATNFSLLKQAGDVEENPGPTSMDWIWRILFLVGAATGAHSFEQVQLQQPGAELVKPGASVKMSCKASGYAFSSSWINWMKQKPGQGLEWIGQIYPGDGDTNYNGKFKGRATLTADTSSSTAYMQLSSLTSEDSAVYFCARSITTVVGCAMDYWGQGTSVTVSSTRDKQLDADVSPKPTIFLPSIAETKLQKAGTYLCLLEKFFPDVIKIHWQEKKSNTILGSQEGNTMKTNDTYMKFSWLTVPEKSLDKEHRCIVRHENNKNGVDQEIIFPPIKTDVITMDPKDNCSKDANDTLLLQLTNTSAYYMYLLLLLKSVVYFAIITCCLLRRTAFCCNGEKS

SEQ ID NO: 43894 - protein, 645 aa, synthetic construct
MALPVTALLLPLALLLHAARPLEDKQLDADVSPKPTIFLPSIAETKLQKAGTYLCLLEKFFPDVIKIHWQEKKSNTILGSQEGNTMKTNDTYMKFSWLTVPEKSLDKEHRCIVRHENNKNGVDQEIIFPPIKTDVITMDPKDNCSKDANDTLLLQLTNTSAYYMYLLLLLKSVVYFAIITCCLLRRTAFCCNGEKSRAKRSGSGATNFSLLKQAGDVEENPGPTSMALPVTALLLPLALLLHAARPDIQMTQSPSSLSASVGDRVTITCKASDHINNWLAWYQQKPGQAPKLLIYGATTLETGVPSRFSGSGSGTDYTLTISSLQPEDFATYYCQQSWNTPWTFGQGTKLEIKRGGGGSGGGGSGGGGSQVQLQQPGAELVKPGASVKMSCKASGYAFSSSWINWMKQKPGQGLEWIGQIYPGDGDTNYNGKFKGRATLTADTSSSTAYMQLSSLTSEDSAVYFCARSITTVVGCAMDYWGQGTSVTVSSTRSQPHTKPSVFVMKNGTNVACLVKEFYPKDIRINLVSSKKITEFDPAIVISPSGKYNAVKLGKYEDSNSVTCSVQHDNKTVHSTDFEVKTDSTDHVKPKETENTKQPSKSCHKPKAIVHTEKVNMMSLTVLGLRMLFAKTVAVNFLLTAKLFFL

SEQ ID NO: 43895 - protein, 799 aa, synthetic construct
MALPVTALLLPLALLLHAARPDIQMTQSPSSLSASVGDRVTITCKASDHINNWLAWYQQKPGQAPKLLIYGATTLETGVPSRFSGSGSGTDYTLTISSLQPEDFATYYCQQSWNTPWTFGQGTKLEIKRGQPKANPTVTLFPPSSEELQANKATLVCLISDFYPGAVTVAWKADGSPVKAGVETTKPSKQSNNKYAASSYLSLTPEQWKSHRSYSCQVTHEGSTVEKTVAPTECSGSQSFGLLDPKLCYLLDGILFIYGVILTALFLRVKFSRSADAPAYQQGQNQLYNELNLGRREEYDVLDKRRGRDPEMGGKPQRRKNPQEGLYNELQKDKMAEAYSEIGMKGERRRGKGHDGLYQGLSTATKDTYDALHMQALPPRRAKRSGSGATNFSLLKQAGDVEENPGPTSMDWIWRILFLVGAATGAHSFEQVQLQQPGAELVKPGASVKMSCKASGYAFSSSWINWMKQKPGQGLEWIGQIYPGDGDTNYNGKFKGRATLTADTSSSTAYMQLSSLTSEDSAVYFCARSITTVVGCAMDYWGQGTSVTVSSASTKGPSVFPLAPSSKSTSGGTAALGCLVKDYFPEPVTVSWNSGALTSGVHTFPAVLQSSGLYSLSSVVTVPSSSLGTQTYICNVNHKPSNTKVDKRVEPKSCGTQSFGLLDPKLCYLLDGILFIYGVILTALFLRVKFSRSADAPAYQQGQNQLYNELNLGRREEYDVLDKRRGRDPEMGGKPQRRKNPQEGLYNELQKDKMAEAYSEIGMKGERRRGKGHDGLYQGLSTATKDTYDALHMQALPPR

SEQ ID NO: 43896 - protein, 818 aa, synthetic construct
MALPVTALLLPLALLLHAARPDIQMTQSPSSLSASVGDRVTITCKASDHINNWLAWYQQKPGQAPKLLIYGATTLETGVPSRFSGSGSGTDYTLTISSLQPEDFATYYCQQSWNTPWTFGQGTKLEIKRLEDLKNVFPPEVAVFEPSEAEISHTQKATLVCLATGFYPDHVELSWWVNGKEVHSGVSTDPQPLKEQPALNDSRYCLSSRLRVSATFWQNPRNHFRCQVQFYGLSENDEWTQDRAKPVTQIVSAEAWGRADCGSQSFGLLDPKLCYLLDGILFIYGVILTALFLRVKFSRSADAPAYQQGQNQLYNELNLGRREEYDVLDKRRGRDPEMGGKPQRRKNPQEGLYNELQKDKMAEAYSEIGMKGERRRGKGHDGLYQGLSTATKDTYDALHMQALPPRRAKRSGSGATNFSLLKQAGDVEENPGPTSMDWIWRILFLVGAATGAHSFEQVQLQQPGAELVKPGASVKMSCKASGYAFSSSWINWMKQKPGQGLEWIGQIYPGDGDTNYNGKFKGRATLTADTSSSTAYMQLSSLTSEDSAVYFCARSITTVVGCAMDYWGQGTSVTVSSTRIQNPDPAVYQLRDSKSSDKSVCLFTDFDSQTNVSQSKDSDVYITDKTVLDMRSMDFKSNSAVAWSNKSDFACANAFNNSIIPEDTFFPSPESSCGTQSFGLLDPKLCYLLDGILFIYGVILTALFLRVKFSRSADAPAYQQGQNQLYNELNLGRREEYDVLDKRRGRDPEMGGKPQRRKNPQEGLYNELQKDKMAEAYSEIGMKGERRRGKGHDGLYQGLSTATKDTYDALHMQALPPR

SEQ ID NO: 43897 - protein, 860 aa, synthetic construct
MALPVTALLLPLALLLHAARPDIQMTQSPSSLSASVGDRVTITCKASDHINNWLAWYQQKPGQAPKLLIYGATTLETGVPSRFSGSGSGTDYTLTISSLQPEDFATYYCQQSWNTPWTFGQGTKLEIKRLEEDLKNVFPPEVAVFEPSEAEISHTQKATLVCLATGFYPDHVELSWWVNGKEVHSGVSTDPQPLKEQPALNDSRYCLSSRLRVSATFWQNPRNHFRCQVQFYGLSENDEWTQDRAKPVTQIVSAEAWGRADCGSQSFGLLDPKLCYLLDGILFIYGVILTALFLRVKFSRSADAPAYQQGQNQLYNELNLGRREEYDVLDKRRGRDPEMGGKPQRRKNPQEGLYNELQKDKMAEAYSEIGMKGERRRGKGHDGLYQGLSTATKDTYDALHMQALPPRRAKRSGSGATNFSLLKQAGDVEENPGPTSMDWIWRILFLVGAATGAHSFEQVQLQQPGAELVKPGASVKMSCKASGYAFSSSWINWMKQKPGQGLEWIGQIYPGDGDTNYNGKFKGRATLTADTSSSTAYMQLSSLTSEDSAVYFCARSITTVVGCAMDYWGQGTSVTVSSTRIQNPDPAVYQLRDSKSSDKSVCLFTDFDSQTNVSQSKDSDVYITDKTVLDMRSMDFKSNSAVAWSNKSDFACANAFNNSIIPEDTFFPSPESSCGTQSFGLLDPKLCYLLDGILFIYGVILTALFLRSKRSRLLHSDYMNMTPRRPGPTRKHYQPYAPPRDFAAYRSRVKFSRSADAPAYQQGQNQLYNELNLGRREEYDVLDKRRGRDPEMGGKPQRRKNPQEGLYNELQKDKMAEAYSEIGMKGERRRGKGHDGLYQGLSTATKDTYDALHMQALPPR

SEQ ID NO: 43898 - protein, 903 aa, synthetic construct
MALPVTALLLPLALLLHAARPDIQMTQSPSSLSASVGDRVTITCKASDHINNWLAWYQQKPGQAPKLLIYGATTLETGVPSRFSGSGSGTDYTLTISSLQPEDFATYYCQQSWNTPWTFGQGTKLEIKRLEEDLKNVFPPEVAVFEPSEAEISHTQKATLVCLATGFYPDHVELSWWVNGKEVHSGVSTDPQPLKEQPALNDSRYCLSSRLRVSATFWQNPRNHFRCQVQFYGLSENDEWTQDRAKPVTQIVSAEAWGRADCGSQSFGLLDPKLCYLLDGILFIYGVILTALFLKRGRKKLLYIFKQPFMRPVQTTQEEDGCSCRFPEEEEGGCELRVKFSRSADAPAYQQGQNQLYNELNLGRREEYDVLDKRRGRDPEMGGKPQRRKNPQEGLYNELQKDKMAEAYSEIGMKGERRRGKGHDGLYQGLSTATKDTYDALHMQALPPRRAKRSGSGATNFSLLKQAGDVEENPGPTSMDWIWRILFLVGAATGAHSFEQVQLQQPGAELVKPGASVKMSCKASGYAFSSSWINWMKQKPGQGLEWIGQIYPGDGDTNYNGKFKGRATLTADTSSSTAYMQLSSLTSEDSAVYFCARSITTVVGCAMDYWGQGTSVTVSSTRIQNPDPAVYQLRDSKSSDKSVCLFTDFDSQTNVSQSKDSDVYITDKTVLDMRSMDFKSNSAVAWSNKSDFACANAFNNSIIPEDTFFPSPESSCGTQSFGLLDPKLCYLLDGILFIYGVILTALFLKRGRKKLLYIFKQPFMRPVQTTQEEDGCSCRFPEEEEGGCELRVKFSRSADAPAYQQGQNQLYNELNLGRREEYDVLDKRRGRDPEMGGKPQRRKNPQEGLYNELQKDKMAEAYSEIGMKGERRRGKGHDGLYQGLSTATKDTYDALHMQALPPR

SEQ ID NO: 43899 - protein, 590 aa, synthetic construct
MALPVTALLLPLALLLHAARPDIQMTQSPSSLSASVGDRVTITCKASDHINNWLAWYQQKPGQAPKLLIYGATTLETGVPSRFSGSGSGTDYTLTISSLQPEDFATYYCQQSWNTPWTFGQGTKLEIKRLEQSFGLLDPKLCYLLDGILFIYGVILTALFLRVKFSRSADAPAYQQGQNQLYNELNLGRREEYDVLDKRRGRDPEMGGKPQRRKNPQEGLYNELQKDKMAEAYSEIGMKGERRRGKGHDGLYQGLSTATKDTYDALHMQALPPRRAKRSGSGATNFSLLKQAGDVEENPGPTSMDWIWRILFLVGAATGAHSFEQVQLQQPGAELVKPGASVKMSCKASGYAFSSSWINWMKQKPGQGLEWIGQIYPGDGDTNYNGKFKGRATLTADTSSSTAYMQLSSLTSEDSAVYFCARSITTVVGCAMDYWGQGTSVTVSSTRQSFGLLDPKLCYLLDGILFIYGVILTALFLRVKFSRSADAPAYQQGQNQLYNELNLGRREEYDVLDKRRGRDPEMGGKPQRRKNPQEGLYNELQKDKMAEAYSEIGMKGERRRGKGHDGLYQGLSTATKDTYDALHMQALPPR

SEQ ID NO: 43900 - protein, 648 aa, synthetic construct
MALPVTALLLPLALLLHAARPDIQMTQSPSSLSASVGDRVTITCKASDHINNWLAWYQQKPGQAPKLLIYGATTLETGVPSRFSGSGSGTDYTLTISSLQPEDFATYYCQQSWNTPWTFGQGTKLEIKRLEGQPKANPTVTLFPPSSEELQANKATLVCLISDFYPGAVTVAWKADGSPVKAGVETTKPSKQSNNKYAASSYLSLTPEQWKSHRSYSCQVTHEGSTVEKTVAPTECSPIKTDVITMDPKDNCSKDANDTLLLQLTNTSAYYMYLLLLLKSVVYFAIITCCLLRRTAFCCNGEKSRAKRSGSGATNFSLLKQAGDVEENPGPTSMDWIWRILFLVGAATGAHSFEQVQLQQPGAELVKPGASVKMSCKASGYAFSSSWINWMKQKPGQGLEWIGQIYPGDGDTNYNGKFKGRATLTADTSSSTAYMQLSSLTSEDSAVYFCARSITTVVGCAMDYWGQGTSVTVSSTRASTKGPSVFPLAPSSKSTSGGTAALGCLVKDYFPEPVTVSWNSGALTSGVHTFPAVLQSSGLYSLSSVVTVPSSSLGTQTYICNVNHKPSNTKVDKRVEPKSCEVKTDSTDHVKPKETENTKQPSKSCHKPKAIVHTEKVNMMSLTVLGLRMLFAKTVAVNFLLTAKLFFL

SEQ ID NO: 43901 - protein, 626 aa, synthetic construct
MALPVTALLLPLALLLHAARPDIQMTQSPSSLSASVGDRVTITCKASDHINNWLAWYQQKPGQAPKLLIYGATTLETGVPSRFSGSGSGTDYTLTISSLQPEDFATYYCQQSWNTPWTFGQGTKLEIKRLEGQPKANPTVTLFPPSSEELQANKATLVCLISDFYPGAVTVAWKADGSPVKAGVETTKPSKQSNNKYAASSYLSLTPEQWKSHRSYSCQVTHEGSTVEKTVAPTECSGRADCGITSASYHQGVLSATILYEILLGKATLYAVLVSALVLMAMVKRKDSRGRAKRSGSGATNFSLLKQAGDVEENPGPTSMDWIWRILFLVGAATGAHSFEQVQLQQPGAELVKPGASVKMSCKASGYAFSSSWINWMKQKPGQGLEWIGQIYPGDGDTNYNGKFKGRATLTADTSSSTAYMQLSSLTSEDSAVYFCARSITTVVGCAMDYWGQGTSVTVSSTRASTKGPSVFPLAPSSKSTSGGTAALGCLVKDYFPEPVTVSWNSGALTSGVHTFPAVLQSSGLYSLSSVVTVPSSSLGTQTYICNVNHKPSNTKVDKRVEPKSCIPEDTFFPSSDVPCDVKLVEKSFETDTNLNFQNLSVIGFRILLLKVAGFNLLMTLRLWSS

SEQ ID NO: 43902 - protein, 626 aa, synthetic construct
MALPVTALLLPLALLLHAARPDIQMTQSPSSLSASVGDRVTITCKASDHINNWLAWYQQKPGQAPKLLIYGATTLETGVPSRFSGSGSGTDYTLTISSLQPEDFATYYCQQSWNTPWTFGQGTKLEIKRLEGQPKANPTVTLFPPSSEELQANKATLVCLISDFYPGAVTVAWKADGSPVKAGVETTKPSKQSNNKYAASSYLSLTPEQWKSHRSYSCQVTHEGSTVEKTVAPTECSGRADCGFTSESYQQGVLSATILYEILLGKATLYAVLVSALVLMAMVKRKDSRGRAKRSGSGATNFSLLKQAGDVEENPGPTSMDWIWRILFLVGAATGAHSFEQVQLQQPGAELVKPGASVKMSCKASGYAFSSSWINWMKQKPGQGLEWIGQIYPGDGDTNYNGKFKGRATLTADTSSSTAYMQLSSLTSEDSAVYFCARSITTVVGCAMDYWGQGTSVTVSSTRASTKGPSVFPLAPSSKSTSGGTAALGCLVKDYFPEPVTVSWNSGALTSGVHTFPAVLQSSGLYSLSSVVTVPSSSLGTQTYICNVNHKPSNTKVDKRVEPKSCIPEDTFFPSPESSCDVKLVEKSFETDTNLNFQNLSVIGFRILLLKVAGFNLLMTLRLWSS

SEQ ID NO: 43903 - protein, 452 aa, synthetic construct
MALPVTALLLPLALLLHAARPDIQMTQSPSSLSASVGDRVTITCKASDHINNWLAWYQQKPGQAPKLLIYGATTLETGVPSRFSGSGSGTDYTLTISSLQPEDFATYYCQQSWNTPWTFGQGTKLEIKRGGGGSGGGGSGGGGSQVQLQQPGAELVKPGASVKMSCKASGYAFSSSWINWMKQKPGQGLEWIGQIYPGDGDTNYNGKFKGRATLTADTSSSTAYMQLSSLTSEDSAVYFCARSITTVVGCAMDYWGQGTSVTVSSTRDGNEEMGGITQTPYKVSISGTTVILTCPQYPGSEILWQHNDKNIGGDEDDKNIGSDEDHLSLKEFSELEQSGYYVCYPRGSKPEDANFYLYLRARVCENCMEMDVMSVATIVIVDICITGGLLLLVYYWSKNRKAKAKPVTRGAGAGGRQRGQNKERPPPVPNPDYEPIRKGQRDLYSGLNQRRI

SEQ ID NO: 43904 - protein, 417 aa, synthetic construct
MALPVTALLLPLALLLHAARPDIQMTQSPSSLSASVGDRVTITCKASDHINNWLAWYQQKPGQAPKLLIYGATTLETGVPSRFSGSGSGTDYTLTISSLQPEDFATYYCQQSWNTPWTFGQGTKLEIKRGGGGSGGGGSGGGGSQVQLQQPGAELVKPGASVKMSCKASGYAFSSSWINWMKQKPGQGLEWIGQIYPGDGDTNYNGKFKGRATLTADTSSSTAYMQLSSLTSEDSAVYFCARSITTVVGCAMDYWGQGTSVTVSSTRFKIPIEELEDRVFVNCNTSITWVEGTVGTLLSDITRLDLGKRILDPRGIYRCNGTDIYKDKESTVQVHYRMCQSCVELDPATVAGIIVTDVIATLLLALGVFCFAGHETGRLSGAADTQALLRNDQVYQPLRDRDDAQYSHLGGNWARNK

SEQ ID NO: 43905 - protein, 427 aa, synthetic construct
MALPVTALLLPLALLLHAARPDIQMTQSPSSLSASVGDRVTITCKASDHINNWLAWYQQKPGQAPKLLIYGATTLETGVPSRFSGSGSGTDYTLTISSLQPEDFATYYCQQSWNTPWTFGQGTKLEIKRGGGGSGGGGSGGGGSQVQLQQPGAELVKPGASVKMSCKASGYAFSSSWINWMKQKPGQGLEWIGQIYPGDGDTNYNGKFKGRATLTADTSSSTAYMQLSSLTSEDSAVYFCARSITTVVGCAMDYWGQGTSVTVSSTRQSIKGNHLVKVYDYQEDGSVLLTCDAEAKNITWFKDGKMIGFLTEDKKKWNLGSNAKDPRGMYQCKGSQNKSKPLQVYYRMCQNCIELNAATISGFLFAEIVSIFVLAVGVYFIAGQDGVRQSRASDKQTLLPNDQLYQPLKDREDDQYSHLQGNQLRRN

SEQ ID NO: 43906 - protein, 410 aa, synthetic construct
MALPVTALLLPLALLLHAARPDIQMTQSPSSLSASVGDRVTITCKASDHINNWLAWYQQKPGQAPKLLIYGATTLETGVPSRFSGSGSGTDYTLTISSLQPEDFATYYCQQSWNTPWTFGQGTKLEIKRGGGGSGGGGSGGGGSQVQLQQPGAELVKPGASVKMSCKASGYAFSSSWINWMKQKPGQGLEWIGQIYPGDGDTNYNGKFKGRATLTADTSSSTAYMQLSSLTSEDSAVYFCARSITTVVGCAMDYWGQGTSVTVSSTRQSFGLLDPKLCYLLDGILFIYGVILTALFLRVKFSRSADAPAYQQGQNQLYNELNLGRREEYDVLDKRRGRDPEMGGKPQRRKNPQEGLYNELQKDKMAEAYSEIGMKGERRRGKGHDGLYQGLSTATKDTYDALHMQALPPR

SEQ ID NO: 43907 - protein, 505 aa, synthetic construct
MALPVTALLLPLALLLHAARPDIQMTQSPSSLSASVGDRVTITCKASDHINNWLAWYQQKPGQAPKLLIYGATTLETGVPSRFSGSGSGTDYTLTISSLQPEDFATYYCQQSWNTPWTFGQGTKLEIKRGGGGSGGGGSGGGGSQVQLQQPGAELVKPGASVKMSCKASGYAFSSSWINWMKQKPGQGLEWIGQIYPGDGDTNYNGKFKGRATLTADTSSSTAYMQLSSLTSEDSAVYFCARSITTVVGCAMDYWGQGTSVTVSSTRGMRTEDLPKAVVFLEPQWYRVLEKDSVTLKCQGAYSPEDNSTQWFHNESLISSQASSYFIDAATVDDSGEYRCQTNLSTLSDPVQLEVHIGWLLLQAPRWVFKEEDPIHLRCHSWKNTALHKVTYLQNGKGRKYFHHNSDFYIPKATLKDSGSYFCRGLVGSKNVSSETVNITITQGLAVPTISSFFPPGYQVSFCLVMVLLFAVDTGLYFSVKTNIRSSTRDWKDHKFKWRKDPQDK

SEQ ID NO: 43908 - protein, 480 aa, synthetic construct
MALPVTALLLPLALLLHAARPDIQMTQSPSSLSASVGDRVTITCKASDHINNWLAWYQQKPGQAPKLLIYGATTLETGVPSRFSGSGSGTDYTLTISSLQPEDFATYYCQQSWNTPWTFGQGTKLEIKRGGGGSGGGGSGGGGSQVQLQQPGAELVKPGASVKMSCKASGYAFSSSWINWMKQKPGQGLEWIGQIYPGDGDTNYNGKFKGRATLTADTSSSTAYMQLSSLTSEDSAVYFCARSITTVVGCAMDYWGQGTSVTVSSTRGMRTEDLPKAVVFLEPQWYRVLEKDSVTLKCQGAYSPEDNSTQWFHNESLISSQASSYFIDAATVDDSGEYRCQTNLSTLSDPVQLEVHIGWLLLQAPRWVFKEEDPIHLRCHSWKNTALHKVTYLQNGKGRKYFHHNSDFYIPKATLKDSGSYFCRGLVGSKNVSSETVNITITQGLAVPTISSFFPPGYQVSFCLVMVLLFAVDTGLYFSV

SEQ ID NO: 43909 - protein, 481 aa, synthetic construct
MALPVTALLLPLALLLHAARPDIQMTQSPSSLSASVGDRVTITCKASDHINNWLAWYQQKPGQAPKLLIYGATTLETGVPSRFSGSGSGTDYTLTISSLQPEDFATYYCQQSWNTPWTFGQGTKLEIKRGGGGSGGGGSGGGGSQVQLQQPGAELVKPGASVKMSCKASGYAFSSSWINWMKQKPGQGLEWIGQIYPGDGDTNYNGKFKGRATLTADTSSSTAYMQLSSLTSEDSAVYFCARSITTVVGCAMDYWGQGTSVTVSSTRGMRTEDLPKAVVFLEPQWYRVLEKDSVTLKCQGAYSPEDNSTQWFHNESLISSQASSYFIDAATVDDSGEYRCQTNLSTLSDPVQLEVHIGWLLLQAPRWVFKEEDPIHLRCHSWKNTALHKVTYLQNGKGRKYFHHNSDFYIPKATLKDSGSYFCRGLVGSKNVSSETVNITITQGLAVPTISSFFPPGYQVSFCLVMVLLFAVDTGLYFSVK

SEQ ID NO: 43910 - protein, 725 aa, synthetic construct
MALPVTALLLPLALLLHAARPDIQMTQSPSSLSASVGDRVTITCKASDHINNWLAWYQQKPGQAPKLLIYGATTLETGVPSRFSGSGSGTDYTLTISSLQPEDFATYYCQQSWNTPWTFGQGTKLEIKRLEGQPKANPTVTLFPPSSEELQANKATLVCLISDFYPGAVTVAWKADGSPVKAGVETTKPSKQSNNKYAASSYLSLTPEQWKSHRSYSCQVTHEGSTVEKTVAPTECSGSQSFGLLDPKLCYLLDGILFIYGVILTALFLRVKFSRSADAPAYQQGQNQLYNELNLGRREEYDVLDKRRGRDPEMGGKPQRRKNPQEGLYNELQKDKMAEAYSEIGMKGERRRGKGHDGLYQGLSTATKDTYDALHMQALPPRRAKRSGSGATNFSLLKQAGDVEENPGPTSMDWIWRILFLVGAATGAHSFEQVQLQQPGAELVKPGASVKMSCKASGYAFSSSWINWMKQKPGQGLEWIGQIYPGDGDTNYNGKFKGRATLTADTSSSTAYMQLSSLTSEDSAVYFCARSITTVVGCAMDYWGQGTSVTVSSTRASTKGPSVFPLAPSSKSTSGGTAALGCLVKDYFPEPVTVSWNSGALTSGVHTFPAVLQSSGLYSLSSVVTVPSSSLGTQTYICNVNHKPSNTKVDKRVEPKSCGTITQGLAVSTISSFFPPGYQVSFCLVMVLLFAVDTGLYFSVKTNIRSSTRDWKDHKFKWRKDPQDK

SEQ ID NO: 43911 - protein, 740 aa, synthetic construct
MALPVTALLLPLALLLHAARPDIQMTQSPSSLSASVGDRVTITCKASDHINNWLAWYQQKPGQAPKLLIYGATTLETGVPSRFSGSGSGTDYTLTISSLQPEDFATYYCQQSWNTPWTFGQGTKLEIKRLEDLKNVFPPEVAVFEPSEAEISHTQKATLVCLATGFYPDHVELSWWVNGKEVHSGVSTDPQPLKEQPALNDSRYCLSSRLRVSATFWQNPRNHFRCQVQFYGLSENDEWTQDRAKPVTQIVSAEAWGRADCGSQSFGLLDPKLCYLLDGILFIYGVILTALFLRVKFSRSADAPAYQQGQNQLYNELNLGRREEYDVLDKRRGRDPEMGGKPQRRKNPQEGLYNELQKDKMAEAYSEIGMKGERRRGKGHDGLYQGLSTATKDTYDALHMQALPPRRAKRSGSGATNFSLLKQAGDVEENPGPTSMDWIWRILFLVGAATGAHSFEQVQLQQPGAELVKPGASVKMSCKASGYAFSSSWINWMKQKPGQGLEWIGQIYPGDGDTNYNGKFKGRATLTADTSSSTAYMQLSSLTSEDSAVYFCARSITTVVGCAMDYWGQGTSVTVSSTRIQNPDPAVYQLRDSKSSDKSVCLFTDFDSQTNVSQSKDSDVYITDKTVLDMRSMDFKSNSAVAWSNKSDFACANAFNNSIIPEDTFFPSPESSCGTITQGLAVSTISSFFPPGYQVSFCLVMVLLFAVDTGLYFSVKTNIRSSTRDWKDHKFKWRKDPQDK

SEQ ID NO: 43912 - protein, 715 aa, synthetic construct
MALPVTALLLPLALLLHAARPDIQMTQSPSSLSASVGDRVTITCKASDHINNWLAWYQQKPGQAPKLLIYGATTLETGVPSRFSGSGSGTDYTLTISSLQPEDFATYYCQQSWNTPWTFGQGTKLEIKRLEDLKNVFPPEVAVFEPSEAEISHTQKATLVCLATGFYPDHVELSWWVNGKEVHSGVSTDPQPLKEQPALNDSRYCLSSRLRVSATFWQNPRNHFRCQVQFYGLSENDEWTQDRAKPVTQIVSAEAWGRADCGSQSFGLLDPKLCYLLDGILFIYGVILTALFLRVKFSRSADAPAYQQGQNQLYNELNLGRREEYDVLDKRRGRDPEMGGKPQRRKNPQEGLYNELQKDKMAEAYSEIGMKGERRRGKGHDGLYQGLSTATKDTYDALHMQALPPRRAKRSGSGATNFSLLKQAGDVEENPGPTSMDWIWRILFLVGAATGAHSFEQVQLQQPGAELVKPGASVKMSCKASGYAFSSSWINWMKQKPGQGLEWIGQIYPGDGDTNYNGKFKGRATLTADTSSSTAYMQLSSLTSEDSAVYFCARSITTVVGCAMDYWGQGTSVTVSSTRIQNPDPAVYQLRDSKSSDKSVCLFTDFDSQTNVSQSKDSDVYITDKTVLDMRSMDFKSNSAVAWSNKSDFACANAFNNSIIPEDTFFPSPESSCGTITQGLAVSTISSFFPPGYQVSFCLVMVLLFAVDTGLYFSV

SEQ ID NO: 43913 - protein, 716 aa, synthetic construct
MALPVTALLLPLALLLHAARPDIQMTQSPSSLSASVGDRVTITCKASDHINNWLAWYQQKPGQAPKLLIYGATTLETGVPSRFSGSGSGTDYTLTISSLQPEDFATYYCQQSWNTPWTFGQGTKLEIKRLEDLKNVFPPEVAVFEPSEAEISHTQKATLVCLATGFYPDHVELSWWVNGKEVHSGVSTDPQPLKEQPALNDSRYCLSSRLRVSATFWQNPRNHFRCQVQFYGLSENDEWTQDRAKPVTQIVSAEAWGRADCGSQSFGLLDPKLCYLLDGILFIYGVILTALFLRVKFSRSADAPAYQQGQNQLYNELNLGRREEYDVLDKRRGRDPEMGGKPQRRKNPQEGLYNELQKDKMAEAYSEIGMKGERRRGKGHDGLYQGLSTATKDTYDALHMQALPPRRAKRSGSGATNFSLLKQAGDVEENPGPTSMDWIWRILFLVGAATGAHSFEQVQLQQPGAELVKPGASVKMSCKASGYAFSSSWINWMKQKPGQGLEWIGQIYPGDGDTNYNGKFKGRATLTADTSSSTAYMQLSSLTSEDSAVYFCARSITTVVGCAMDYWGQGTSVTVSSTRIQNPDPAVYQLRDSKSSDKSVCLFTDFDSQTNVSQSKDSDVYITDKTVLDMRSMDFKSNSAVAWSNKSDFACANAFNNSIIPEDTFFPSPESSCGTITQGLAVSTISSFFPPGYQVSFCLVMVLLFAVDTGLYFSVK

SEQ ID NO: 43914 - protein, 717 aa, synthetic construct
MALPVTALLLPLALLLHAARPDIQMTQSPSSLSASVGDRVTITCKASDHINNWLAWYQQKPGQAPKLLIYGATTLETGVPSRFSGSGSGTDYTLTISSLQPEDFATYYCQQSWNTPWTFGQGTKLEIKRLEDLKNVFPPEVAVFEPSEAEISHTQKATLVCLATGFYPDHVELSWWVNGKEVHSGVSTDPQPLKEQPALNDSRYCLSSRLRVSATFWQNPRNHFRCQVQFYGLSENDEWTQDRAKPVTQIVSAEAWGRADCGSQSFGLLDPKLCYLLDGILFIYGVILTALFLRVKFSRSADAPAYQQGQNQLYNELNLGRREEYDVLDKRRGRDPEMGGKPQRRKNPQEGLYNELQKDKMAEAYSEIGMKGERRRGKGHDGLYQGLSTATKDTYDALHMQALPPRRAKRSGSGATNFSLLKQAGDVEENPGPTSMDWIWRILFLVGAATGAHSFEQVQLQQPGAELVKPGASVKMSCKASGYAFSSSWINWMKQKPGQGLEWIGQIYPGDGDTNYNGKFKGRATLTADTSSSTAYMQLSSLTSEDSAVYFCARSITTVVGCAMDYWGQGTSVTVSSTRIQNPDPAVYQLRDSKSSDKSVCLFTDFDSQTNVSQSKDSDVYITDKTVLDMRSMDFKSNSAVAWSNKSDFACANAFNNSIIPEDTFFPSPESSCGTITQGLAVSTISSFFPPGYQVSFCLVMVLLFAVDTGLYFSVKT

SEQ ID NO: 43915 - protein, 653 aa, synthetic construct
MALPVTALLLPLALLLHAARPDIQMTQSPSSLSASVGDRVTITCKASDHINNWLAWYQQKPGQAPKLLIYGATTLETGVPSRFSGSGSGTDYTLTISSLQPEDFATYYCQQSWNTPWTFGQGTKLEIKRLEGQPKANPTVTLFPPSSEELQANKATLVCLISDFYPGAVTVAWKADGSPVKAGVETTKPSKQSNNKYAASSYLSLTPEQWKSHRSYSCQVTHEGSTVEKTVAPTECSGSLGEPQLCYILDAILFLYGIVLTLLYCRLKIQVRKAAITSYEKSDGVYTGLSTRNQETYETLKHEKPPQRAKRSGSGATNFSLLKQAGDVEENPGPTSMDWIWRILFLVGAATGAHSFEQVQLQQPGAELVKPGASVKMSCKASGYAFSSSWINWMKQKPGQGLEWIGQIYPGDGDTNYNGKFKGRATLTADTSSSTAYMQLSSLTSEDSAVYFCARSITTVVGCAMDYWGQGTSVTVSSTRASTKGPSVFPLAPSSKSTSGGTAALGCLVKDYFPEPVTVSWNSGALTSGVHTFPAVLQSSGLYSLSSVVTVPSSSLGTQTYICNVNHKPSNTKVDKRVEPKSCGTLGEPQLCYILDAILFLYGIVLTLLYCRLKIQVRKAAITSYEKSDGVYTGLSTRNQETYETLKHEKPPQ

SEQ ID NO: 43916 - protein, 623 aa, synthetic construct
MALPVTALLLPLALLLHAARPDIQMTQSPSSLSASVGDRVTITCKASDHINNWLAWYQQKPGQAPKLLIYGATTLETGVPSRFSGSGSGTDYTLTISSLQPEDFATYYCQQSWNTPWTFGQGTKLEIKRLEDLKNVFPPEVAVFEPSEAEISHTQKATLVCLATGFYPDHVELSWWVNGKEVHSGVCTDPQPLKEQPALNDSRYCLSSRLRVSATFWQNPRNHFRCQVQFYGLSENDEWTQDRAKPVTQIVSAEAWGRADCGFTSESYQQGVLSAYYMYLLLLLKSVVYFAIITCCLLRRTAFCCNGEKSRAKRSGSGATNFSLLKQAGDVEENPGPTSMDWIWRILFLVGAATGAHSFEQVQLQQPGAELVKPGASVKMSCKASGYAFSSSWINWMKQKPGQGLEWIGQIYPGDGDTNYNGKFKGRATLTADTSSSTAYMQLSSLTSEDSAVYFCARSITTVVGCAMDYWGQGTSVTVSSTRIQNPDPAVYQLRDSKSSDKSVCLFTDFDSQTNVSQSKDSDVYITDKCVLDMRSMDFKSNSAVAWSNKSDFACANAFNNSIIPEDTFFPSPESSCDVKLVEKSFETDTNLNFQNLSVIGFRILLLKVAGFNLLMTLRLWSS

SEQ ID NO: 43917 - protein, 629 aa, synthetic construct
MALPVTALLLPLALLLHAARPDIQMTQSPSSLSASVGDRVTITCKASDHINNWLAWYQQKPGQAPKLLIYGATTLETGVPSRFSGSGSGTDYTLTISSLQPEDFATYYCQQSWNTPWTFGQGTKLEIKRLEDKQLDADVSPKPTIFLPSIAETKLQKAGTYLCLLEKFFPDVIKIHWQEKKSNTILGSQEGNTMKTNDTYMKFSWLTVPEKSLDKEHRCIVRHENNKNGVDQEIIFPPIKTDVITMDPKDNCSKDANDTLLLQLTNTSAYYMYEILLGKATLYAVLVSALVLMAMVKRKDSRGRAKRSGSGATNFSLLKQAGDVEENPGPTSMDWIWRILFLVGAATGAHSFEQVQLQQPGAELVKPGASVKMSCKASGYAFSSSWINWMKQKPGQGLEWIGQIYPGDGDTNYNGKFKGRATLTADTSSSTAYMQLSSLTSEDSAVYFCARSITTVVGCAMDYWGQGTSVTVSSTRSQPHTKPSVFVMKNGTNVACLVKEFYPKDIRINLVSSKKITEFDPAIVISPSGKYNAVKLGKYEDSNSVTCSVQHDNKTVHSTDFEVKTDSTDHVKPKETENTKQPSKSCHKPKAIVHTEKVNMMSLTVIGFRILLLKVAGFNLLMTLRLWSS

SEQ ID NO: 43918 - protein, 629 aa, synthetic construct
MALPVTALLLPLALLLHAARPDIQMTQSPSSLSASVGDRVTITCKASDHINNWLAWYQQKPGQAPKLLIYGATTLETGVPSRFSGSGSGTDYTLTISSLQPEDFATYYCQQSWNTPWTFGQGTKLEIKRLEDKQLDADVSPKPTIFLPSIAETKLQKAGTYLCLLEKFFPDVIKIHWQEKKSNTILGSQEGNTMKTNDTYMKFSWLTVPEKSLDKEHRCIVRHENNKNGVDQEIIFPPIKTDVITMDPKDNCSKDANDTLLLQLTNTSATILYEILLGKATLYAVLVSALVLMAMVKRKDSRGRAKRSGSGATNFSLLKQAGDVEENPGPTSMDWIWRILFLVGAATGAHSFEQVQLQQPGAELVKPGASVKMSCKASGYAFSSSWINWMKQKPGQGLEWIGQIYPGDGDTNYNGKFKGRATLTADTSSSTAYMQLSSLTSEDSAVYFCARSITTVVGCAMDYWGQGTSVTVSSTRSQPHTKPSVFVMKNGTNVACLVKEFYPKDIRINLVSSKKITEFDPAIVISPSGKYNAVKLGKYEDSNSVTCSVQHDNKTVHSTDFEVKTDSTDHVKPKETENTKQPSKSCHKPKAIVHTEKVNMMSLTVIGFRILLLKVAGFNLLMTLRLWSS

SEQ ID NO: 43919 - protein, 629 aa, synthetic construct
MALPVTALLLPLALLLHAARPDIQMTQSPSSLSASVGDRVTITCKASDHINNWLAWYQQKPGQAPKLLIYGATTLETGVPSRFSGSGSGTDYTLTISSLQPEDFATYYCQQSWNTPWTFGQGTKLEIKRLEDKQLDADVSPKPTIFLPSIAETKLQKAGTYLCLLEKFFPDVIKIHWQEKKSNTILGSQEGNTMKTNDTYMKFSWLTVPEKSLDKEHRCIVRHENNKNGVDQEIIFPPIKTDVITMDPKDNCSKDANDTLLLQLTNTSAYYMYEILLGKATLYAVLVSALVLMAMVKRKDSRGRAKRSGSGATNFSLLKQAGDVEENPGPTSMDWIWRILFLVGAATGAHSFEQVQLQQPGAELVKPGASVKMSCKASGYAFSSSWINWMKQKPGQGLEWIGQIYPGDGDTNYNGKFKGRATLTADTSSSTAYMQLSSLTSEDSAVYFCARSITTVVGCAMDYWGQGTSVTVSSTRSQPHTKPSVFVMKNGTNVACLVKEFYPKDIRINLVSSKKITEFDPAIVISPSGKYNAVKLGKYEDSNSVTCSVQHDNKTVHSTDFEVKTDSTDHVKPKETENTKQPSKSCHKPKAIVHTEKVNMMSLTVLGFRILLLKVAGFNLLMTLRLWSS

SEQ ID NO: 43920 - protein, 629 aa, synthetic construct
MALPVTALLLPLALLLHAARPDIQMTQSPSSLSASVGDRVTITCKASDHINNWLAWYQQKPGQAPKLLIYGATTLETGVPSRFSGSGSGTDYTLTISSLQPEDFATYYCQQSWNTPWTFGQGTKLEIKRLEDKQLDADVSPKPTIFLPSIAETKLQKAGTYLCLLEKFFPDVIKIHWQEKKSNTILGSQEGNTMKTNDTYMKFSWLTVPEKSLDKEHRCIVRHENNKNGVDQEIIFPPIKTDVITMDPKDNCSKDANDTLLLQLTNTSATILYEILLGKATLYAVLVSALVLMAMVKRKDSRGRAKRSGSGATNFSLLKQAGDVEENPGPTSMDWIWRILFLVGAATGAHSFEQVQLQQPGAELVKPGASVKMSCKASGYAFSSSWINWMKQKPGQGLEWIGQIYPGDGDTNYNGKFKGRATLTADTSSSTAYMQLSSLTSEDSAVYFCARSITTVVGCAMDYWGQGTSVTVSSTRSQPHTKPSVFVMKNGTNVACLVKEFYPKDIRINLVSSKKITEFDPAIVISPSGKYNAVKLGKYEDSNSVTCSVQHDNKTVHSTDFEVKTDSTDHVKPKETENTKQPSKSCHKPKAIVHTEKVNMMSLTVLGFRILLLKVAGFNLLMTLRLWSS

SEQ ID NO: 43921 - protein, 623 aa, synthetic construct
MALPVTALLLPLALLLHAARPDIQMTQSPSSLSASVGDRVTITCKASDHINNWLAWYQQKPGQAPKLLIYGATTLETGVPSRFSGSGSGTDYTLTISSLQPEDFATYYCQQSWNTPWTFGQGTKLEIKRLEDLKNVFPPEVAVFEPSEAEISHTQKATLVCLATGFYPDHVELSWWVNGKEVHSGVCTDPQPLKEQPALNDSRYCLSSRLRVSATFWQNPRNHFRCQVQFYGLSENDEWTQDRAKPVTQIVSAEAWGRADCGFTSESYQQGVLSATILYLLLLLKSVVYFAIITCCLLRRTAFCCNGEKSRAKRSGSGATNFSLLKQAGDVEENPGPTSMDWIWRILFLVGAATGAHSFEQVQLQQPGAELVKPGASVKMSCKASGYAFSSSWINWMKQKPGQGLEWIGQIYPGDGDTNYNGKFKGRATLTADTSSSTAYMQLSSLTSEDSAVYFCARSITTVVGCAMDYWGQGTSVTVSSTRIQNPDPAVYQLRDSKSSDKSVCLFTDFDSQTNVSQSKDSDVYITDKCVLDMRSMDFKSNSAVAWSNKSDFACANAFNNSIIPEDTFFPSPESSCDVKLVEKSFETDTNLNFQNLSVIGLRMLFAKTVAVNFLLTAKLFFL

SEQ ID NO: 43922 - protein, 652 aa, synthetic construct
MALPVTALLLPLALLLHAARPDIQMTQSPSSLSASVGDRVTITCKASDHINNWLAWYQQKPGQAPKLLIYGATTLETGVPSRFSGSGSGTDYTLTISSLQPEDFATYYCQQSWNTPWTFGQGTKLEIKRLEDLKNVFPPEVAVFEPSEAEISHTQKATLVCLATGFYPDHVELSWWVNGKEVHSGVSTDPQPLKEQPALNDSRYCLSSRLRVSATFWQNPRNHFRCQVQFYGLSENDEWTQDRAKPVTQIVSAEAWGRADCGSSKDANDTLLLQLTNTSAYYMYLLLLLKSVVYFAIITCCLLRRTAFCCNGEKSRAKRSGSGATNFSLLKQAGDVEENPGPTSMDWIWRILFLVGAATGAHSFEQVQLQQPGAELVKPGASVKMSCKASGYAFSSSWINWMKQKPGQGLEWIGQIYPGDGDTNYNGKFKGRATLTADTSSSTAYMQLSSLTSEDSAVYFCARSITTVVGCAMDYWGQGTSVTVSSTRIQNPDPAVYQLRDSKSSDKSVCLFTDFDSQTNVSQSKDSDVYITDKTVLDMRSMDFKSNSAVAWSNKSDFACANAFNNSIIPEDTFFPSPESSCGTEVKTDSTDHVKPKETENTKQPSKSCHKPKAIVHTEKVNMMSLTVLGLRMLFAKTVAVNFLLTAKLFFL

SEQ ID NO: 43923 - protein, 622 aa, synthetic construct
MALPVTALLLPLALLLHAARPDIQMTQSPSSLSASVGDRVTITCKASDHINNWLAWYQQKPGQAPKLLIYGATTLETGVPSRFSGSGSGTDYTLTISSLQPEDFATYYCQQSWNTPWTFGQGTKLEIKRLEDLKNVFPPEVAVFEPSEAEISHTQKATLVCLATGFYPDHVELSWWVNGKEVHSGVCTDPQPLKEQPALNDSRYCLSSRLRVSATFWQNPRNHFRCQVQFYGLSENDEWTQDRAKPVTQIVSAEAWGRADCDVKLVEKSFETDTNLNFQNLSVIGFRILLLKVAGFNLLMTLRLWSSRAKRSGSGATNFSLLKQAGDVEENPGPTSMDWIWRILFLVGAATGAHSFEQVQLQQPGAELVKPGASVKMSCKASGYAFSSSWINWMKQKPGQGLEWIGQIYPGDGDTNYNGKFKGRATLTADTSSSTAYMQLSSLTSEDSAVYFCARSITTVVGCAMDYWGQGTSVTVSSTRIQNPDPAVYQLRDSKSSDKSVCLFTDFDSQTNVSQSKDSDVYITDKCVLDMRSMDFKSNSAVAWSNKSDFACANAFNNSIIPEDTFFPSPESSCGFTSESYQQGVLSATILYEILLGKATLYAVLVSALVLMAMVKRKDSRG

SEQ ID NO: 43924 - protein, 622 aa, synthetic construct
MALPVTALLLPLALLLHAARPDIQMTQSPSSLSASVGDRVTITCKASDHINNWLAWYQQKPGQAPKLLIYGATTLETGVPSRFSGSGSGTDYTLTISSLQPEDFATYYCQQSWNTPWTFGQGTKLEIKRLEDLKNVFPPEVAVFEPSEAEISHTQKATLVCLATGFYPDHVELSWWVNGKEVHSGVCTDPQPLKEQPALNDSRYCLSSRLRVSATFWQNPRNHFRCQVQFYGLSENDEWTQDRAKPVTQIVSAEAWGRADCGFTSESYQQGVLSATNLSVIGFRILLLKVAGFNLLMTLRLWSSRAKRSGSGATNFSLLKQAGDVEENPGPTSMDWIWRILFLVGAATGAHSFEQVQLQQPGAELVKPGASVKMSCKASGYAFSSSWINWMKQKPGQGLEWIGQIYPGDGDTNYNGKFKGRATLTADTSSSTAYMQLSSLTSEDSAVYFCARSITTVVGCAMDYWGQGTSVTVSSTRIQNPDPAVYQLRDSKSSDKSVCLFTDFDSQTNVSQSKDSDVYITDKCVLDMRSMDFKSNSAVAWSNKSDFACANAFNNSIIPEDTFFPSPESSCDVKLVEKSFETDTNLNFQILYEILLGKATLYAVLVSALVLMAMVKRKDSRG

SEQ ID NO: 43925 - protein, 622 aa, synthetic construct; identical to SEQ ID NO: 43923

SEQ ID NO: 43926 - protein, 622 aa, synthetic construct; identical to SEQ ID NO: 43924

SEQ ID NO: 43927 - protein, 622 aa, synthetic construct; identical to SEQ ID NO: 43923

SEQ ID NO: 43928 - protein, 625 aa, synthetic construct
MALPVTALLLPLALLLHAARPDIQMTQSPSSLSASVGDRVTITCKASDHINNWLAWYQQKPGQAPKLLIYGATTLETGVPSRFSGSGSGTDYTLTISSLQPEDFATYYCQQSWNTPWTFGQGTKLEIKRLEADVSPKPTIFLPSIAETKLQKAGTYLCLLEKFFPDVIKIHWQEKKSNTILGSQEGNTMKTNDTYMKFSWLTVPEKSLDKEHRCIVRHENNKNGVDQEIIFPPIKTDVITMDPKDNCSKDANDTLLLQLTNTSAYYMYLLLLLKSVVYFAIITCCLLRRTAFCCNGEKSRAKRSGSGATNFSLLKQAGDVEENPGPTSMDWIWRILFLVGAATGAHSFEQVQLQQPGAELVKPGASVKMSCKASGYAFSSSWINWMKQKPGQGLEWIGQIYPGDGDTNYNGKFKGRATLTADTSSSTAYMQLSSLTSEDSAVYFCARSITTVVGCAMDYWGQGTSVTVSSTRSQPHTKPSVFVMKNGTNVACLVKEFYPKDIRINLVSSKKITEFDPAIVISPSGKYNAVKLGKYEDSNSVTCSVQHDNKTVHSTDFEVKTDSTDHVKPKETENTKQPSKSCHKPKAIVHTEKVNMMSLTVIGFRILLLKVAGFNLLMTLRLWSS

SEQ ID NO: 43929 - protein, 625 aa, synthetic construct
MALPVTALLLPLALLLHAARPDIQMTQSPSSLSASVGDRVTITCKASDHINNWLAWYQQKPGQAPKLLIYGATTLETGVPSRFSGSGSGTDYTLTISSLQPEDFATYYCQQSWNTPWTFGQGTKLEIKRLEADVSPKPTIFLPSIAETKLQKAGTYLCLLEKFFPDVIKIHWQEKKSNTILGSQEGNTMKTNDTYMKFSWLTVPEKSLDKEHRCIVRHENNKNGVDQEIIFPPIKTDVITMDPKDNCSKDANDTLLLQLTNTSAYYMYLLLLLKSVVYFAIITCCLLRRTAFCCNGEKSRAKRSGSGATNFSLLKQAGDVEENPGPTSMDWIWRILFLVGAATGAHSFEQVQLQQPGAELVKPGASVKMSCKASGYAFSSSWINWMKQKPGQGLEWIGQIYPGDGDTNYNGKFKGRATLTADTSSSTAYMQLSSLTSEDSAVYFCARSITTVVGCAMDYWGQGTSVTVSSTRSQPHTKPSVFVMKNGTNVACLVKEFYPKDIRINLVSSKKITEFDPAIVISPSGKYNAVKLGKYEDSNSVTCSVQHDNKTVHSTDFEVKTDSTDHVKPKETENTKQPSKSCHKPKAIVHTEKVNMMSLTVLGFRILLLKVAGFNLLMTLRLWSS

SEQ ID NO: 43930 - protein, 622 aa, synthetic construct; identical to SEQ ID NO: 43923

SEQ ID NO: 43931 - protein, 626 aa, synthetic construct
MALPVTALLLPLALLLHAARPDIQMTQSPSSLSASVGDRVTITCKASDHINNWLAWYQQKPGQAPKLLIYGATTLETGVPSRFSGSGSGTDYTLTISSLQPEDFATYYCQQSWNTPWTFGQGTKLEIKRLEIQNPDPAVYQLRDSKSSDKSVCLFTDFDSQTNVSQSKDSDVYITDKCVLDMRSMDFKSNSAVAWSNKSDFACANAFNNSIIPEDTFFPSPESSCGFTSESYQQGVLSATILYEILLGKATLYAVLVSALVLMAMVKRKDSRGRAKRSGSGVKQTLNFDLLKLAGDVESNPGPTSMDWIWRILFLVGAATGAHSFEQVQLQQPGAELVKPGASVKMSCKASGYAFSSSWINWMKQKPGQGLEWIGQIYPGDGDTNYNGKFKGRATLTADTSSSTAYMQLSSLTSEDSAVYFCARSITTVVGCAMDYWGQGTSVTVSSTREDLKNVFPPEVAVFEPSEAEISHTQKATLVCLATGFYPDHVELSWWVNGKEVHSGVCTDPQPLKEQPALNDSRYCLSSRLRVSATFWQNPRNHFRCQVQFYGLSENDEWTQDRAKPVTQIVSAEAWGRADCDVKLVEKSFETDTNLNFQNLSVIGFRILLLKVAGFNLLMTLRLWSS

SEQ ID NO: 43932 - protein, 757 aa, synthetic construct
MALPVTALLLPLALLLHAARPEVQLVESGGGLVQPGGSLRLSCAASGFSFSDFWMSWVRQAPGKGLEWVATISQAGSEKDYVDSVKGRFTISRDNAKKSLYLQMNSLRAEDTAVYYCASGVYSFDYRGQGTLVTVSSGTGGGGSGGGGSGGGGSEFDIQMTQSPSSLSASVGDRVTITCKASDHINNWLAWYQQKPGQAPKLLIYGATTLETGVPSRFSGSGSGTDYTLTISSLQPEDFATYYCQQSWNTPWTFGQGTKLEIKRLEDLKNVFPPEVAVFEPSEAEISHTQKATLVCLATGFYPDHVELSWWVNGKEVHSGVCTDPQPLKEQPALNDSRYCLSSRLRVSATFWQNPRNHFRCQVQFYGLSENDEWTQDRAKPVTQIVSAEAWGRADCDVKLVEKSFETDTNLNFQNLSVIGFRILLLKVAGFNLLMTLRLWSSRAKRSGSGATNFSLLKQAGDVEENPGPTSMDWIWRILFLVGAATGAHSFEQVQLQQPGAELVKPGASVKMSCKASGYAFSSSWINWMKQKPGQGLEWIGQIYPGDGDTNYNGKFKGRATLTADTSSSTAYMQLSSLTSEDSAVYFCARSITTVVGCAMDYWGQGTSVTVSSTRIQNPDPAVYQLRDSKSSDKSVCLFTDFDSQTNVSQSKDSDVYITDKCVLDMRSMDFKSNSAVAWSNKSDFACANAFNNSIIPEDTFFPSPESSCGFTSESYQQGVLSATILYEILLGKATLYAVLVSALVLMAMVKRKDSRG

SEQ ID NO: 43933 - protein, 761 aa, synthetic construct
MALPVTALLLPLALLLHAARPEVQLVESGGGLVQPGGSLRLSCAASGFSFSDFWMSWVRQAPGKGLEWVATISQAGSEKDYVDSVKGRFTISRDNAKKSLYLQMNSLRAEDTAVYYCASGVYSFDYRGQGTLVTVSSGTGGGGSGGGGSGGGGSEFDIQMTQSPSSLSASVGDRVTITCKASDHINNWLAWYQQKPGQAPKLLIYGATTLETGVPSRFSGSGSGTDYTLTISSLQPEDFATYYCQQSWNTPWTFGQGTKLEIKRLEIQNPDPAVYQLRDSKSSDKSVCLFTDFDSQTNVSQSKDSDVYITDKCVLDMRSMDFKSNSAVAWSNKSDFACANAFNNSIIPEDTFFPSPESSCGFTSESYQQGVLSATILYEILLGKATLYAVLVSALVLMAMVKRKDSRGRAKRSGSGVKQTLNFDLLKLAGDVESNPGPTSMDWIWRILFLVGAATGAHSFEQVQLQQPGAELVKPGASVKMSCKASGYAFSSSWINWMKQKPGQGLEWIGQIYPGDGDTNYNGKFKGRATLTADTSSSTAYMQLSSLTSEDSAVYFCARSITTVVGCAMDYWGQGTSVTVSSTREDLKNVFPPEVAVFEPSEAEISHTQKATLVCLATGFYPDHVELSWWVNGKEVHSGVCTDPQPLKEQPALNDSRYCLSSRLRVSATFWQNPRNHFRCQVQFYGLSENDEWTQDRAKPVTQIVSAEAWGRADCDVKLVEKSFETDTNLNFQNLSVIGFRILLLKVAGFNLLMTLRLWSS

SEQ ID NO: 43934 - protein, 894 aa, synthetic construct
MALPVTALLLPLALLLHAARPEVQLVESGGGLVQPGGSLRLSCAASGFSFSDFWMSWVRQAPGKGLEWVATISQAGSEKDYVDSVKGRFTISRDNAKKSLYLQMNSLRAEDTAVYYCASGVYSFDYRGQGTLVTVSSGTGGGGSGGGGSGGGGSEFDIQMTQSPSSLSASVGDRVTITCKASDHINNWLAWYQQKPGQAPKLLIYGATTLETGVPSRFSGSGSGTDYTLTISSLQPEDFATYYCQQSWNTPWTFGQGTKLEIKRLEDLKNVFPPEVAVFEPSEAEISHTQKATLVCLATGFYPDHVELSWWVNGKEVHSGVCTDPQPLKEQPALNDSRYCLSSRLRVSATFWQNPRNHFRCQVQFYGLSENDEWTQDRAKPVTQIVSAEAWGRADCDVKLVEKSFETDTNLNFQNLSVIGFRILLLKVAGFNLLMTLRLWSSRAKRSGSGATNFSLLKQAGDVEENPGPTSMDWIWRILFLVGAATGAHSGPQLQLQESGPGLVKPSETLSLTCTVSGDSISSGDYYWGWIRQPPGKGLEWIGHIYYSGVTYYNPSLKSRVTISVDTSRNQFSLKLSSVTAADTAVYYCTREDSSNWRSRGQGTLVTVSSGSGGGGSGGGGSGGGGSFEQVQLQQPGAELVKPGASVKMSCKASGYAFSSSWINWMKQKPGQGLEWIGQIYPGDGDTNYNGKFKGRATLTADTSSSTAYMQLSSLTSEDSAVYFCARSITTVVGCAMDYWGQGTSVTVSSTRIQNPDPAVYQLRDSKSSDKSVCLFTDFDSQTNVSQSKDSDVYITDKCVLDMRSMDFKSNSAVAWSNKSDFACANAFNNSIIPEDTFFPSPESSCGFTSESYQQGVLSATILYEILLGKATLYAVLVSALVLMAMVKRKDSRG

SEQ ID NO: 43935 - protein, 898 aa, synthetic construct
MALPVTALLLPLALLLHAARPEVQLVESGGGLVQPGGSLRLSCAASGFSFSDFWMSWVRQAPGKGLEWVATISQAGSEKDYVDSVKGRFTISRDNAKKSLYLQMNSLRAEDTAVYYCASGVYSFDYRGQGTLVTVSSGTGGGGSGGGGSGGGGSEFDIQMTQSPSSLSASVGDRVTITCKASDHINNWLAWYQQKPGQAPKLLIYGATTLETGVPSRFSGSGSGTDYTLTISSLQPEDFATYYCQQSWNTPWTFGQGTKLEIKRLEIQNPDPAVYQLRDSKSSDKSVCLFTDFDSQTNVSQSKDSDVYITDKCVLDMRSMDFKSNSAVAWSNKSDFACANAFNNSIIPEDTFFPSPESSCGFTSESYQQGVLSATILYEILLGKATLYAVLVSALVLMAMVKRKDSRGRAKRSGSGVKQTLNFDLLKLAGDVESNPGPTSMDWIWRILFLVGAATGAHSGPQLQLQESGPGLVKPSETLSLTCTVSGDSISSGDYYWGWIRQPPGKGLEWIGHIYYSGVTYYNPSLKSRVTISVDTSRNQFSLKLSSVTAADTAVYYCTREDSSNWRSRGQGTLVTVSSGSGGGGSGGGGSGGGGSFEQVQLQQPGAELVKPGASVKMSCKASGYAFSSSWINWMKQKPGQGLEWIGQIYPGDGDTNYNGKFKGRATLTADTSSSTAYMQLSSLTSEDSAVYFCARSITTVVGCAMDYWGQGTSVTVSSTREDLKNVFPPEVAVFEPSEAEISHTQKATLVCLATGFYPDHVELSWWVNGKEVHSGVCTDPQPLKEQPALNDSRYCLSSRLRVSATFWQNPRNHFRCQVQFYGLSENDEWTQDRAKPVTQIVSAEAWGRADCDVKLVEKSFETDTNLNFQNLSVIGFRILLLKVAGFNLLMTLRLWSS

SEQ ID NO: 43936 - protein, 692 aa, synthetic construct
MALPVTALLLPLALLLHAARPDIQMTQSPSSLSASVGDRVTITCKASDHINNWLAWYQQKPGQAPKLLIYGATTLETGVPSRFSGSGSGTDYTLTISSLQPEDFATYYCQQSWNTPWTFGQGTKLEIKRLEDLKNVFPPEVAVFEPSEAEISHTQKATLVCLATGFYPDHVELSWWVNGKEVHSGVCTDPQPLKEQPALNDSRYCLSSRLRVSATFWQNPRNHFRCQVQFYGLSENDEWTQDRAKPVTQIVSAEAWGRADCDVKLVEKSFETDTNLNFQNLSVIGFRILLLKVAGFNLLMTLRLWSSRAKRSGSGATNFSLLKQAGDVEENPGPTSMDWIWRILFLVGAATGAHSGPMDPDLEIRAAFLRQRNTALRTEVAELEQEVQRLENEVSQYETRYGPLGGGKGSGGGGSGGGGSGGGGSFEQVQLQQPGAELVKPGASVKMSCKASGYAFSSSWINWMKQKPGQGLEWIGQIYPGDGDTNYNGKFKGRATLTADTSSSTAYMQLSSLTSEDSAVYFCARSITTVVGCAMDYWGQGTSVTVSSTRIQNPDPAVYQLRDSKSSDKSVCLFTDFDSQTNVSQSKDSDVYITDKCVLDMRSMDFKSNSAVAWSNKSDFACANAFNNSIIPEDTFFPSPESSCGFTSESYQQGVLSATILYEILLGKATLYAVLVSALVLMAMVKRKDSRG

SEQ ID NO: 43937 - protein, 696 aa, synthetic construct
MALPVTALLLPLALLLHAARPDIQMTQSPSSLSASVGDRVTITCKASDHINNWLAWYQQKPGQAPKLLIYGATTLETGVPSRFSGSGSGTDYTLTISSLQPEDFATYYCQQSWNTPWTFGQGTKLEIKRLEIQNPDPAVYQLRDSKSSDKSVCLFTDFDSQTNVSQSKDSDVYITDKCVLDMRSMDFKSNSAVAWSNKSDFACANAFNNSIIPEDTFFPSPESSCGFTSESYQQGVLSATILYEILLGKATLYAVLVSALVLMAMVKRKDSRGRAKRSGSGVKQTLNFDLLKLAGDVESNPGPTSMDWIWRILFLVGAATGAHSGPMDPDLEIRAAFLRQRNTALRTEVAELEQEVQRLENEVSQYETRYGPLGGGKGSGGGGSGGGGSGGGGSFEQVQLQQPGAELVKPGASVKMSCKASGYAFSSSWINWMKQKPGQGLEWIGQIYPGDGDTNYNGKFKGRATLTADTSSSTAYMQLSSLTSEDSAVYFCARSITTVVGCAMDYWGQGTSVTVSSTREDLKNVFPPEVAVFEPSEAEISHTQKATLVCLATGFYPDHVELSWWVNGKEVHSGVCTDPQPLKEQPALNDSRYCLSSRLRVSATFWQNPRNHFRCQVQFYGLSENDEWTQDRAKPVTQIVSAEAWGRADCDVKLVEKSFETDTNLNFQNLSVIGFRILLLKVAGFNLLMTLRLWSS

SEQ ID NO: 43938 - protein, 669 aa, synthetic construct
MALPVTALLLPLALLLHAARPDIQMTQSPSSLSASVGDRVTITCKASDHINNWLAWYQQKPGQAPKLLIYGATTLETGVPSRFSGSGSGTDYTLTISSLQPEDFATYYCQQSWNTPWTFGQGTKLEIKRLEDLKNVFPPEVAVFEPSEAEISHTQKATLVCLATGFYPDHVELSWWVNGKEVHSGVCTDPQPLKEQPALNDSRYCLSSRLRVSATFWQNPRNHFRCQVQFYGLSENDEWTQDRAKPVTQIVSAEAWGRADCDVKLVEKSFETDTNLNFQNLSVIGFRILLLKVAGFNLLMTLRLWSSRAKRSGSGATNFSLLKQAGDVEENPGPTSMDWIWRILFLVGAATGAHSGPEVAALEKEVAALEKEVAALEKEVAALEKGSGGGGSGGGGSGGGGSFEQVQLQQPGAELVKPGASVKMSCKASGYAFSSSWINWMKQKPGQGLEWIGQIYPGDGDTNYNGKFKGRATLTADTSSSTAYMQLSSLTSEDSAVYFCARSITTVVGCAMDYWGQGTSVTVSSTRIQNPDPAVYQLRDSKSSDKSVCLFTDFDSQTNVSQSKDSDVYITDKCVLDMRSMDFKSNSAVAWSNKSDFACANAFNNSIIPEDTFFPSPESSCGFTSESYQQGVLSATILYEILLGKATLYAVLVSALVLMAMVKRKDSRG

SEQ ID NO: 43939 - protein, 673 aa, synthetic construct
MALPVTALLLPLALLLHAARPDIQMTQSPSSLSASVGDRVTITCKASDHINNWLAWYQQKPGQAPKLLIYGATTLETGVPSRFSGSGSGTDYTLTISSLQPEDFATYYCQQSWNTPWTFGQGTKLEIKRLEIQNPDPAVYQLRDSKSSDKSVCLFTDFDSQTNVSQSKDSDVYITDKCVLDMRSMDFKSNSAVAWSNKSDFACANAFNNSIIPEDTFFPSPESSCGFTSESYQQGVLSATILYEILLGKATLYAVLVSALVLMAMVKRKDSRGRAKRSGSGVKQTLNFDLLKLAGDVESNPGPTSMDWIWRILFLVGAATGAHSGPEVAALEKEVAALEKEVAALEKEVAALEKGSGGGGSGGGGSGGGGSFEQVQLQQPGAELVKPGASVKMSCKASGYAFSSSWINWMKQKPGQGLEWIGQIYPGDGDTNYNGKFKGRATLTADTSSSTAYMQLSSLTSEDSAVYFCARSITTVVGCAMDYWGQGTSVTVSSTREDLKNVFPPEVAVFEPSEAEISHTQKATLVCLATGFYPDHVELSWWVNGKEVHSGVCTDPQPLKEQPALNDSRYCLSSRLRVSATFWQNPRNHFRCQVQFYGLSENDEWTQDRAKPVTQIVSAEAWGRADCDVKLVEKSFETDTNLNFQNLSVIGFRILLLKVAGFNLLMTLRLWSS

SEQ ID NO: 43940 - protein, 759 aa, synthetic construct
MALPVTALLLPLALLLHAARPDIQMTQSPSSLSASVGDRVTITCKASDHINNWLAWYQQKPGQAPKLLIYGATTLETGVPSRFSGSGSGTDYTLTISSLQPEDFATYYCQQSWNTPWTFGQGTKLEIKRLEDLKNVFPPEVAVFEPSEAEISHTQKATLVCLATGFYPDHVELSWWVNGKEVHSGVCTDPQPLKEQPALNDSRYCLSSRLRVSATFWQNPRNHFRCQVQFYGLSENDEWTQDRAKPVTQIVSAEAWGRADCDVKLVEKSFETDTNLNFQNLSVIGFRILLLKVAGFNLLMTLRLWSSRAKRSGSGATNFSLLKQAGDVEENPGPTSMDWIWRILFLVGAATGAHSGPQVQLQESGGGLAQAGGSLRLSCAASGRTFSMGWFRQAPGKEREFVAAITYSGGSPYYASSVRGRFTISRDNAKNTVYLQMNSLKPEDTAVYYCAANPTYGSDWNAENWGQGTQVTVSSGSGGGGSGGGGSGGGGSFEQVQLQQPGAELVKPGASVKMSCKASGYAFSSSWINWMKQKPGQGLEWIGQIYPGDGDTNYNGKFKGRATLTADTSSSTAYMQLSSLTSEDSAVYFCARSITTVVGCAMDYWGQGTSVTVSSTRIQNPDPAVYQLRDSKSSDKSVCLFTDFDSQTNVSQSKDSDVYITDKCVLDMRSMDFKSNSAVAWSNKSDFACANAFNNSIIPEDTFFPSPESSCGFTSESYQQGVLSATILYEILLGKATLYAVLVSALVLMAMVKRKDSRG

SEQ ID NO: 43941 - protein, 763 aa, synthetic construct
MALPVTALLLPLALLLHAARPDIQMTQSPSSLSASVGDRVTITCKASDHINNWLAWYQQKPGQAPKLLIYGATTLETGVPSRFSGSGSGTDYTLTISSLQPEDFATYYCQQSWNTPWTFGQGTKLEIKRLEIQNPDPAVYQLRDSKSSDKSVCLFTDFDSQTNVSQSKDSDVYITDKCVLDMRSMDFKSNSAVAWSNKSDFACANAFNNSIIPEDTFFPSPESSCGFTSESYQQGVLSATILYEILLGKATLYAVLVSALVLMAMVKRKDSRGRAKRSGSGVKQTLNFDLLKLAGDVESNPGPTSMDWIWRILFLVGAATGAHSGPQVQLQESGGGLAQAGGSLRLSCAASGRTFSMGWFRQAPGKEREFVAAITYSGGSPYYASSVRGRFTISRDNAKNTVYLQMNSLKPEDTAVYYCAANPTYGSDWNAENWGQGTQVTVSSGSGGGGSGGGGSGGGGSFEQVQLQQPGAELVKPGASVKMSCKASGYAFSSSWINWMKQKPGQGLEWIGQIYPGDGDTNYNGKFKGRATLTADTSSSTAYMQLSSLTSEDSAVYFCARSITTVVGCAMDYWGQGTSVTVSSTREDLKNVFPPEVAVFEPSEAEISHTQKATLVCLATGFYPDHVELSWWVNGKEVHSGVCTDPQPLKEQPALNDSRYCLSSRLRVSATFWQNPRNHFRCQVQFYGLSENDEWTQDRAKPVTQIVSAEAWGRADCDVKLVEKSFETDTNLNFQNLSVIGFRILLLKVAGFNLLMTLRLWSS

SEQ ID NO: 43942 - protein, 765 aa, synthetic construct
MALPVTALLLPLALLLHAARPEVQLVESGGSLVQPGGSLRLSCAASGFTFDDYAMSWVRQVPGKGLEWVSSINWSGTHTDYADSVKGRFTISRNNANNTLYLQMNSLKSEDTAVYYCAKNWRDAGTTWFEKSGSAGQGTQVTVSSGTGGGGSGGGGSGGGGSEFDIQMTQSPSSLSASVGDRVTITCKASDHINNWLAWYQQKPGQAPKLLIYGATTLETGVPSRFSGSGSGTDYTLTISSLQPEDFATYYCQQSWNTPWTFGQGTKLEIKRLEDLKNVFPPEVAVFEPSEAEISHTQKATLVCLATGFYPDHVELSWWVNGKEVHSGVCTDPQPLKEQPALNDSRYCLSSRLRVSATFWQNPRNHFRCQVQFYGLSENDEWTQDRAKPVTQIVSAEAWGRADCDVKLVEKSFETDTNLNFQNLSVIGFRILLLKVAGFNLLMTLRLWSSRAKRSGSGATNFSLLKQAGDVEENPGPTSMDWIWRILFLVGAATGAHSFEQVQLQQPGAELVKPGASVKMSCKASGYAFSSSWINWMKQKPGQGLEWIGQIYPGDGDTNYNGKFKGRATLTADTSSSTAYMQLSSLTSEDSAVYFCARSITTVVGCAMDYWGQGTSVTVSSTRIQNPDPAVYQLRDSKSSDKSVCLFTDFDSQTNVSQSKDSDVYITDKCVLDMRSMDFKSNSAVAWSNKSDFACANAFNNSIIPEDTFFPSPESSCGFTSESYQQGVLSATILYEILLGKATLYAVLVSALVLMAMVKRKDSRG

SEQ ID NO: 43943 - protein, 769 aa, synthetic construct
MALPVTALLLPLALLLHAARPEVQLVESGGSLVQPGGSLRLSCAASGFTFDDYAMSWVRQVPGKGLEWVSSINWSGTHTDYADSVKGRFTISRNNANNTLYLQMNSLKSEDTAVYYCAKNWRDAGTTWFEKSGSAGQGTQVTVSSGTGGGGSGGGGSGGGGSEFDIQMTQSPSSLSASVGDRVTITCKASDHINNWLAWYQQKPGQAPKLLIYGATTLETGVPSRFSGSGSGTDYTLTISSLQPEDFATYYCQQSWNTPWTFGQGTKLEIKRLEIQNPDPAVYQLRDSKSSDKSVCLFTDFDSQTNVSQSKDSDVYITDKCVLDMRSMDFKSNSAVAWSNKSDFACANAFNNSIIPEDTFFPSPESSCGFTSESYQQGVLSATILYEILLGKATLYAVLVSALVLMAMVKRKDSRGRAKRSGSGVKQTLNFDLLKLAGDVESNPGPTSMDWIWRILFLVGAATGAHSFEQVQLQQPGAELVKPGASVKMSCKASGYAFSSSWINWMKQKPGQGLEWIGQIYPGDGDTNYNGKFKGRATLTADTSSSTAYMQLSSLTSEDSAVYFCARSITTVVGCAMDYWGQGTSVTVSSTREDLKNVFPPEVAVFEPSEAEISHTQKATLVCLATGFYPDHVELSWWVNGKEVHSGVCTDPQPLKEQPALNDSRYCLSSRLRVSATFWQNPRNHFRCQVQFYGLSENDEWTQDRAKPVTQIVSAEAWGRADCDVKLVEKSFETDTNLNFQNLSVIGFRILLLKVAGFNLLMTLRLWSS

SEQ ID NO: 43944 - protein, 763 aa, synthetic construct
MALPVTALLLPLALLLHAARPEVQLLESGGGLVQPGGSLRLSCAASGFIFSSYAMSWVRQAPGKGQEWVSGVSGTGVNTYYADSVKGRFTISRDNSKNTLYLQMNSLRAEDTAVYYCASGKGWDSGSWYEDYRGQGTLVTVSSGTGGGGSGGGGSGGGGSEFDIQMTQSPSSLSASVGDRVTITCKASDHINNWLAWYQQKPGQAPKLLIYGATTLETGVPSRFSGSGSGTDYTLTISSLQPEDFATYYCQQSWNTPWTFGQGTKLEIKRLEDLKNVFPPEVAVFEPSEAEISHTQKATLVCLATGFYPDHVELSWWVNGKEVHSGVCTDPQPLKEQPALNDSRYCLSSRLRVSATFWQNPRNHFRCQVQFYGLSENDEWTQDRAKPVTQIVSAEAWGRADCDVKLVEKSFETDTNLNFQNLSVIGFRILLLKVAGFNLLMTLRLWSSRAKRSGSGATNFSLLKQAGDVEENPGPTSMDWIWRILFLVGAATGAHSFEQVQLQQPGAELVKPGASVKMSCKASGYAFSSSWINWMKQKPGQGLEWIGQIYPGDGDTNYNGKFKGRATLTADTSSSTAYMQLSSLTSEDSAVYFCARSITTVVGCAMDYWGQGTSVTVSSTRIQNPDPAVYQLRDSKSSDKSVCLFTDFDSQTNVSQSKDSDVYITDKCVLDMRSMDFKSNSAVAWSNKSDFACANAFNNSIIPEDTFFPSPESSCGFTSESYQQGVLSATILYEILLGKATLYAVLVSALVLMAMVKRKDSRG

SEQ ID NO: 43945 - protein, 767 aa, synthetic construct
MALPVTALLLPLALLLHAARPEVQLLESGGGLVQPGGSLRLSCAASGFIFSSYAMSWVRQAPGKGQEWVSGVSGTGVNTYYADSVKGRFTISRDNSKNTLYLQMNSLRAEDTAVYYCASGKGWDSGSWYEDYRGQGTLVTVSSGTGGGGSGGGGSGGGGSEFDIQMTQSPSSLSASVGDRVTITCKASDHINNWLAWYQQKPGQAPKLLIYGATTLETGVPSRFSGSGSGTDYTLTISSLQPEDFATYYCQQSWNTPWTFGQGTKLEIKRLEIQNPDPAVYQLRDSKSSDKSVCLFTDFDSQTNVSQSKDSDVYITDKCVLDMRSMDFKSNSAVAWSNKSDFACANAFNNSIIPEDTFFPSPESSCGFTSESYQQGVLSATILYEILLGKATLYAVLVSALVLMAMVKRKDSRGRAKRSGSGVKQTLNFDLLKLAGDVESNPGPTSMDWIWRILFLVGAATGAHSFEQVQLQQPGAELVKPGASVKMSCKASGYAFSSSWINWMKQKPGQGLEWIGQIYPGDGDTNYNGKFKGRATLTADTSSSTAYMQLSSLTSEDSAVYFCARSITTVVGCAMDYWGQGTSVTVSSTREDLKNVFPPEVAVFEPSEAEISHTQKATLVCLATGFYPDHVELSWWVNGKEVHSGVCTDPQPLKEQPALNDSRYCLSSRLRVSATFWQNPRNHFRCQVQFYGLSENDEWTQDRAKPVTQIVSAEAWGRADCDVKLVEKSFETDTNLNFQNLSVIGFRILLLKVAGFNLLMTLRLWSS

SEQ ID NO: 43946 - protein, 731 aa, synthetic construct
MALPVTALLLPLALLLHAARPMLPAPKNLVVSRITEDSARLSWTAPDAAFDSFPIRYIETLIWGEAIWLDVPGSERSYDLTGLKPGTEYAVVITGVKGGRFSSPLVASFTTGTGGGGSGGGGSGGGGSEFDIQMTQSPSSLSASVGDRVTITCKASDHINNWLAWYQQKPGQAPKLLIYGATTLETGVPSRFSGSGSGTDYTLTISSLQPEDFATYYCQQSWNTPWTFGQGTKLEIKRLEDLKNVFPPEVAVFEPSEAEISHTQKATLVCLATGFYPDHVELSWWVNGKEVHSGVCTDPQPLKEQPALNDSRYCLSSRLRVSATFWQNPRNHFRCQVQFYGLSENDEWTQDRAKPVTQIVSAEAWGRADCDVKLVEKSFETDTNLNFQNLSVIGFRILLLKVAGFNLLMTLRLWSSRAKRSGSGATNFSLLKQAGDVEENPGPTSMDWIWRILFLVGAATGAHSFEQVQLQQPGAELVKPGASVKMSCKASGYAFSSSWINWMKQKPGQGLEWIGQIYPGDGDTNYNGKFKGRATLTADTSSSTAYMQLSSLTSEDSAVYFCARSITTVVGCAMDYWGQGTSVTVSSTRIQNPDPAVYQLRDSKSSDKSVCLFTDFDSQTNVSQSKDSDVYITDKCVLDMRSMDFKSNSAVAWSNKSDFACANAFNNSIIPEDTFFPSPESSCGFTSESYQQGVLSATILYEILLGKATLYAVLVSALVLMAMVKRKDSRG

SEQ ID NO: 43947 - protein, 735 aa, synthetic construct
MALPVTALLLPLALLLHAARPMLPAPKNLVVSRITEDSARLSWTAPDAAFDSFPIRYIETLIWGEAIWLDVPGSERSYDLTGLKPGTEYAVVITGVKGGRFSSPLVASFTTGTGGGGSGGGGSGGGGSEFDIQMTQSPSSLSASVGDRVTITCKASDHINNWLAWYQQKPGQAPKLLIYGATTLETGVPSRFSGSGSGTDYTLTISSLQPEDFATYYCQQSWNTPWTFGQGTKLEIKRLEIQNPDPAVYQLRDSKSSDKSVCLFTDFDSQTNVSQSKDSDVYITDKCVLDMRSMDFKSNSAVAWSNKSDFACANAFNNSIIPEDTFFPSPESSCGFTSESYQQGVLSATILYEILLGKATLYAVLVSALVLMAMVKRKDSRGRAKRSGSGVKQTLNFDLLKLAGDVESNPGPTSMDWIWRILFLVGAATGAHSFEQVQLQQPGAELVKPGASVKMSCKASGYAFSSSWINWMKQKPGQGLEWIGQIYPGDGDTNYNGKFKGRATLTADTSSSTAYMQLSSLTSEDSAVYFCARSITTVVGCAMDYWGQGTSVTVSSTREDLKNVFPPEVAVFEPSEAEISHTQKATLVCLATGFYPDHVELSWWVNGKEVHSGVCTDPQPLKEQPALNDSRYCLSSRLRVSATFWQNPRNHFRCQVQFYGLSENDEWTQDRAKPVTQIVSAEAWGRADCDVKLVEKSFETDTNLNFQNLSVIGFRILLLKVAGFNLLMTLRLWSS

SEQ ID NO: 43948 - protein, 760 aa, synthetic construct
MALPVTALLLPLALLLHAARPEVQLVESGGGLVQPGGSLRLSCAASGFNIKDTCIGWVRRAPGKEEELVAKICKYSGHTRYADSVKGRFTISADTSKNTAYLQMNSLRAEDTAVYYCAAVSVRDGHYNYWGQGTTVTVSSGTGGGGSGGGGSGGGGSEFDIQMTQSPSSLSASVGDRVTITCKASDHINNWLAWYQQKPGQAPKLLIYGATTLETGVPSRFSGSGSGTDYTLTISSLQPEDFATYYCQQSWNTPWTFGQGTKLEIKRLEDLKNVFPPEVAVFEPSEAEISHTQKATLVCLATGFYPDHVELSWWVNGKEVHSGVCTDPQPLKEQPALNDSRYCLSSRLRVSATFWQNPRNHFRCQVQFYGLSENDEWTQDRAKPVTQIVSAEAWGRADCDVKLVEKSFETDTNLNFQNLSVIGFRILLLKVAGFNLLMTLRLWSSRAKRSGSGATNFSLLKQAGDVEENPGPTSMDWIWRILFLVGAATGAHSFEQVQLQQPGAELVKPGASVKMSCKASGYAFSSSWINWMKQKPGQGLEWIGQIYPGDGDTNYNGKFKGRATLTADTSSSTAYMQLSSLTSEDSAVYFCARSITTVVGCAMDYWGQGTSVTVSSTRIQNPDPAVYQLRDSKSSDKSVCLFTDFDSQTNVSQSKDSDVYITDKCVLDMRSMDFKSNSAVAWSNKSDFACANAFNNSIIPEDTFFPSPESSCGFTSESYQQGVLSATILYEILLGKATLYAVLVSALVLMAMVKRKDSRG

SEQ ID NO: 43949 - protein, 764 aa, synthetic construct
MALPVTALLLPLALLLHAARPEVQLVESGGGLVQPGGSLRLSCAASGFNIKDTCIGWVRRAPGKEEELVAKICKYSGHTRYADSVKGRFTISADTSKNTAYLQMNSLRAEDTAVYYCAAVSVRDGHYNYWGQGTTVTVSSGTGGGGSGGGGSGGGGSEFDIQMTQSPSSLSASVGDRVTITCKASDHINNWLAWYQQKPGQAPKLLIYGATTLETGVPSRFSGSGSGTDYTLTISSLQPEDFATYYCQQSWNTPWTFGQGTKLEIKRLEIQNPDPAVYQLRDSKSSDKSVCLFTDFDSQTNVSQSKDSDVYITDKCVLDMRSMDFKSNSAVAWSNKSDFACANAFNNSIIPEDTFFPSPESSCGFTSESYQQGVLSATILYEILLGKATLYAVLVSALVLMAMVKRKDSRGRAKRSGSGVKQTLNFDLLKLAGDVESNPGPTSMDWIWRILFLVGAATGAHSFEQVQLQQPGAELVKPGASVKMSCKASGYAFSSSWINWMKQKPGQGLEWIGQIYPGDGDTNYNGKFKGRATLTADTSSSTAYMQLSSLTSEDSAVYFCARSITTVVGCAMDYWGQGTSVTVSSTREDLKNVFPPEVAVFEPSEAEISHTQKATLVCLATGFYPDHVELSWWVNGKEVHSGVCTDPQPLKEQPALNDSRYCLSSRLRVSATFWQNPRNHFRCQVQFYGLSENDEWTQDRAKPVTQIVSAEAWGRADCDVKLVEKSFETDTNLNFQNLSVIGFRILLLKVAGFNLLMTLRLWSS

SEQ ID NO: 43950 - protein, 1131 aa, synthetic construct
MALPVTALLLPLALLLHAARPEVQLVESGGGLVQAGGSLRLSCAASGRTFSMGWFRQAPGKEREFVAAITYSGGSPYYADSVKGRFTISRDNAKNTVYLQMNSLKPEDTAVYYCAANPTYGSDWNAENWGQGTQVTVSSGTGGGGSGGGGSGGGGSEFDIQMTQSPSSLSASVGDRVTITCKASDHINNWLAWYQQKPGQAPKLLIYGATTLETGVPSRFSGSGSGTDYTLTISSLQPEDFATYYCQQSWNTPWTFGQGTKLEIKRLEDLKNVFPPEVAVFEPSEAEISHTQKATLVCLATGFYPDHVELSWWVNGKEVHSGVCTDPQPLKEQPALNDSRYCLSSRLRVSATFWQNPRNHFRCQVQFYGLSENDEWTQDRAKPVTQIVSAEAWGRADCDVKLVEKSFETDTNLNFQNLSVIGFRILLLKVAGFNLLMTLRLWSSRAKRSGSGATNFSLLKQAGDVEENPGPTSATMDWIWRILFLVGAATGAHSGPEVQLVESGGGLVQAGGSLRLSCAASGRTFTMGWFRQAPGKEREFVAAISLSPTLAYYADSVKGRFTISRDNAKNTVVLQMNSLKPEDTALYYCAADRKSVMSIRPDYWGQGTQVTVSSGSGGGGSGGGGSGGGGSFEQVQLQQPGAELVKPGASVKMSCKASGYAFSSSWINWMKQKPGQGLEWIGQIYPGDGDTNYNGKFKGRATLTADTSSSTAYMQLSSLTSEDSAVYFCARSITTVVGCAMDYWGQGTSVTVSSTRIQNPDPAVYQLRDSKSSDKSVCLFTDFDSQTNVSQSKDSDVYITDKCVLDMRSMDFKSNSAVAWSNKSDFACANAFNNSIIPEDTFFPSPESSCGFTSESYQQGVLSATILYEILLGKATLYAVLVSALVLMAMVKRKDSRGRAKRSGSGVKQTLNFDLLKLAGDVESNPGPSRGHMTEYKPTVRLATRDDVPRAVRTLAAAFADYPATRHTVDPDRHIERVTELQELFLTRVGLDIGKVWVADDGAAVAVWTTPESVEAGAVFAEIGPRMAELSGSRLAAQQQMEGLLAPHRPKEPAWFLATVGVSPDHQGKGLGSAVVLPGVEAAERAGVPAFLETSAPRNLPFYERLGFTVTADVEVPEGPRTWCMTRKPGA

SEQ ID NO: 43951 - protein, 769 aa, synthetic construct
MALPVTALLLPLALLLHAARPEVQLVESGGGLVQPGGSLRLSCAASGFASDYYIIGWFRQAPGKEREGVSCISSRYANTNYADSVKGRFTISRDNAKNTVYLQMNSLKPEDTAVYYCAADTRRYTCPDIATMHRNFDSWGQGTLVTVSSGTGGGGSGGGGSGGGGSEFDIQMTQSPSSLSASVGDRVTITCKASDHINNWLAWYQQKPGQAPKLLIYGATTLETGVPSRFSGSGSGTDYTLTISSLQPEDFATYYCQQSWNTPWTFGQGTKLEIKRLEDLKNVFPPEVAVFEPSEAEISHTQKATLVCLATGFYPDHVELSWWVNGKEVHSGVCTDPQPLKEQPALNDSRYCLSSRLRVSATFWQNPRNHFRCQVQFYGLSENDEWTQDRAKPVTQIVSAEAWGRADCDVKLVEKSFETDTNLNFQNLSVIGFRILLLKVAGFNLLMTLRLWSSRAKRSGSGATNFSLLKQAGDVEENPGPTSMDWIWRILFLVGAATGAHSFEQVQLQQPGAELVKPGASVKMSCKASGYAFSSSWINWMKQKPGQGLEWIGQIYPGDGDTNYNGKFKGRATLTADTSSSTAYMQLSSLTSEDSAVYFCARSITTVVGCAMDYWGQGTSVTVSSTRIQNPDPAVYQLRDSKSSDKSVCLFTDFDSQTNVSQSKDSDVYITDKCVLDMRSMDFKSNSAVAWSNKSDFACANAFNNSIIPEDTFFPSPESSCGFTSESYQQGVLSATILYEILLGKATLYAVLVSALVLMAMVKRKDSRG

SEQ ID NO: 43952 - protein, 769 aa, synthetic construct
MALPVTALLLPLALLLHAARPEVQLVESGGGLVQPGGSLRLSCEASGFASDDYIIGWFRQAPGKEREGVSCISSKYANTVYTDSVKGRFRLSRGTAKNTVYLQMSALKPEDTAVYYCAMDSRRVTCPEISTMHRNFDSWGQGTLVTVSSGTGGGGSGGGGSGGGGSEFDIQMTQSPSSLSASVGDRVTITCKASDHINNWLAWYQQKPGQAPKLLIYGATTLETGVPSRFSGSGSGTDYTLTISSLQPEDFATYYCQQSWNTPWTFGQGTKLEIKRLEDLKNVFPPEVAVFEPSEAEISHTQKATLVCLATGFYPDHVELSWWVNGKEVHSGVCTDPQPLKEQPALNDSRYCLSSRLRVSATFWQNPRNHFRCQVQFYGLSENDEWTQDRAKPVTQIVSAEAWGRADCDVKLVEKSFETDTNLNFQNLSVIGFRILLLKVAGFNLLMTLRLWSSRAKRSGSGATNFSLLKQAGDVEENPGPTSMDWIWRILFLVGAATGAHSFEQVQLQQPGAELVKPGASVKMSCKASGYAFSSSWINWMKQKPGQGLEWIGQIYPGDGDTNYNGKFKGRATLTADTSSSTAYMQLSSLTSEDSAVYFCARSITTVVGCAMDYWGQGTSVTVSSTRIQNPDPAVYQLRDSKSSDKSVCLFTDFDSQTNVSQSKDSDVYITDKCVLDMRSMDFKSNSAVAWSNKSDFACANAFNNSIIPEDTFFPSPESSCGFTSESYQQGVLSATILYEILLGKATLYAVLVSALVLMAMVKRKDSRG

SEQ ID NO: 43953 - protein, 769 aa, synthetic construct
MALPVTALLLPLALLLHAARPEVQLVESGGGLVQPGGSLRLSCAASGFASDYYIIGWFRQAPGKEREGVSCISSRYANTNYADSVKGRFTISRDNAKNTVYLQMNSLKPEDTAVYYCAADTRRYTCPDIATMHRNFDSWGQGTLVTVSSGTGGGGSGGGGSGGGGSEFDIQMTQSPSSLSASVGDRVTITCKASDHINNWLAWYQQKPGQAPKLLIYGATTLETGVPSRFSGSGSGTDYTLTISSLQPEDFATYYCQQSWNTPWTFGQGTKLEIKRLEIQNPDPAVYQLRDSKSSDKSVCLFTDFDSQTNVSQSKDSDVYITDKCVLDMRSMDFKSNSAVAWSNKSDFACANAFNNSIIPEDTFFPSPESSCGFTSESYQQGVLSATILYEILLGKATLYAVLVSALVLMAMVKRKDSRGRAKRSGSGATNFSLLKQAGDVEENPGPTSMDWIWRILFLVGAATGAHSFEQVQLQQPGAELVKPGASVKMSCKASGYAFSSSWINWMKQKPGQGLEWIGQIYPGDGDTNYNGKFKGRATLTADTSSSTAYMQLSSLTSEDSAVYFCARSITTVVGCAMDYWGQGTSVTVSSTRDLKNVFPPEVAVFEPSEAEISHTQKATLVCLATGFYPDHVELSWWVNGKEVHSGVCTDPQPLKEQPALNDSRYCLSSRLRVSATFWQNPRNHFRCQVQFYGLSENDEWTQDRAKPVTQIVSAEAWGRADCDVKLVEKSFETDTNLNFQNLSVIGFRILLLKVAGFNLLMTLRLWSS

SEQ ID NO: 43954 - protein, 769 aa, synthetic construct
MALPVTALLLPLALLLHAARPEVQLVESGGGLVQPGGSLRLSCEASGFASDDYIIGWFRQAPGKEREGVSCISSKYANTVYTDSVKGRFRLSRGTAKNTVYLQMSALKPEDTAVYYCAMDSRRVTCPEISTMHRNFDSWGQGTLVTVSSGTGGGGSGGGGSGGGGSEFDIQMTQSPSSLSASVGDRVTITCKASDHINNWLAWYQQKPGQAPKLLIYGATTLETGVPSRFSGSGSGTDYTLTISSLQPEDFATYYCQQSWNTPWTFGQGTKLEIKRLEIQNPDPAVYQLRDSKSSDKSVCLFTDFDSQTNVSQSKDSDVYITDKCVLDMRSMDFKSNSAVAWSNKSDFACANAFNNSIIPEDTFFPSPESSCGFTSESYQQGVLSATILYEILLGKATLYAVLVSALVLMAMVKRKDSRGRAKRSGSGATNFSLLKQAGDVEENPGPTSMDWIWRILFLVGAATGAHSFEQVQLQQPGAELVKPGASVKMSCKASGYAFSSSWINWMKQKPGQGLEWIGQIYPGDGDTNYNGKFKGRATLTADTSSSTAYMQLSSLTSEDSAVYFCARSITTVVGCAMDYWGQGTSVTVSSTRDLKNVFPPEVAVFEPSEAEISHTQKATLVCLATGFYPDHVELSWWVNGKEVHSGVCTDPQPLKEQPALNDSRYCLSSRLRVSATFWQNPRNHFRCQVQFYGLSENDEWTQDRAKPVTQIVSAEAWGRADCDVKLVEKSFETDTNLNFQNLSVIGFRILLLKVAGFNLLMTLRLWSS

SEQ ID NO: 43955 - protein, 760 aa, synthetic construct
MALPVTALLLPLALLLHAARPQVKLEESGGGLVQPGESLRLSCSASGSIFKVFRVFAMSWYRQGPGKQRELVASISSGETTTYAESVKGRFTISRDNAKNTAYLQMDSLKPEDTAVYYCNADHTFTGDFWGQGTQVTVSSGTGGGGSGGGGSGGGGSEFDIQMTQSPSSLSASVGDRVTITCKASDHINNWLAWYQQKPGQAPKLLIYGATTLETGVPSRFSGSGSGTDYTLTISSLQPEDFATYYCQQSWNTPWTFGQGTKLEIKRLEIQNPDPAVYQLRDSKSSDKSVCLFTDFDSQTNVSQSKDSDVYITDKCVLDMRSMDFKSNSAVAWSNKSDFACANAFNNSIIPEDTFFPSPESSCGFTSESYQQGVLSATILYEILLGKATLYAVLVSALVLMAMVKRKDSRGRAKRSGSGATNFSLLKQAGDVEENPGPTSMDWIWRILFLVGAATGAHSFEQVQLQQPGAELVKPGASVKMSCKASGYAFSSSWINWMKQKPGQGLEWIGQIYPGDGDTNYNGKFKGRATLTADTSSSTAYMQLSSLTSEDSAVYFCARSITTVVGCAMDYWGQGTSVTVSSTRDLKNVFPPEVAVFEPSEAEISHTQKATLVCLATGFYPDHVELSWWVNGKEVHSGVCTDPQPLKEQPALNDSRYCLSSRLRVSATFWQNPRNHFRCQVQFYGLSENDEWTQDRAKPVTQIVSAEAWGRADCDVKLVEKSFETDTNLNFQNLSVIGFRILLLKVAGFNLLMTLRLWSS

SEQ ID NO: 43956 - protein, 761 aa, synthetic construct
MALPVTALLLPLALLLHAARPDIQMTQSPSSLSASVGDRVTITCKASDHINNWLAWYQQKPGQAPKLLIYGATTLETGVPSRFSGSGSGTDYTLTISSLQPEDFATYYCQQSWNTPWTFGQGTKLEIKRLEDLKNVFPPEVAVFEPSEAEISHTQKATLVCLATGFYPDHVELSWWVNGKEVHSGVCTDPQPLKEQPALNDSRYCLSSRLRVSATFWQNPRNHFRCQVQFYGLSENDEWTQDRAKPVTQIVSAEAWGRADCDVKLVEKSFETDTNLNFQNLSVIGFRILLLKVAGFNLLMTLRLWSSRAKRSGSGATNFSLLKQAGDVEENPGPTSATMDWIWRILFLVGAATGAHSGPEVQLVESGGGLVQAGGSLRLSCAASGRTFSMGWFRQAPGKEREFVAAITYSGGSPYYADSVKGRFTISRDNAKNTVYLQMNSLKPEDTAVYYCAANPTYGSDWNAENWGQGTQVTVSSGSGGGGSGGGGSGGGGSFEQVQLQQPGAELVKPGASVKMSCKASGYAFSSSWINWMKQKPGQGLEWIGQIYPGDGDTNYNGKFKGRATLTADTSSSTAYMQLSSLTSEDSAVYFCARSITTVVGCAMDYWGQGTSVTVSSTRIQNPDPAVYQLRDSKSSDKSVCLFTDFDSQTNVSQSKDSDVYITDKCVLDMRSMDFKSNSAVAWSNKSDFACANAFNNSIIPEDTFFPSPESSCGFTSESYQQGVLSATILYEILLGKATLYAVLVSALVLMAMVKRKDSRG

SEQ ID NO: 43957 - protein, 762 aa, synthetic construct
MALPVTALLLPLALLLHAARPDIQMTQSPSSLSASVGDRVTITCKASDHINNWLAWYQQKPGQAPKLLIYGATTLETGVPSRFSGSGSGTDYTLTISSLQPEDFATYYCQQSWNTPWTFGQGTKLEIKRLEDLKNVFPPEVAVFEPSEAEISHTQKATLVCLATGFYPDHVELSWWVNGKEVHSGVCTDPQPLKEQPALNDSRYCLSSRLRVSATFWQNPRNHFRCQVQFYGLSENDEWTQDRAKPVTQIVSAEAWGRADCDVKLVEKSFETDTNLNFQNLSVIGFRILLLKVAGFNLLMTLRLWSSRAKRSGSGATNFSLLKQAGDVEENPGPTSATMDWIWRILFLVGAATGAHSGPEVQLVESGGGLVQPGGSLRLSCAASGSIFGFNDMAWYRQAPGKQRELVALISRVGVTSSADSVKGRFTISRVNAKDTVYLQMNSLKPEDTAVYYCYMDQRLDGSTLAYWGQGTQVTVSSGSGGGGSGGGGSGGGGSFEQVQLQQPGAELVKPGASVKMSCKASGYAFSSSWINWMKQKPGQGLEWIGQIYPGDGDTNYNGKFKGRATLTADTSSSTAYMQLSSLTSEDSAVYFCARSITTVVGCAMDYWGQGTSVTVSSTRIQNPDPAVYQLRDSKSSDKSVCLFTDFDSQTNVSQSKDSDVYITDKCVLDMRSMDFKSNSAVAWSNKSDFACANAFNNSIIPEDTFFPSPESSCGFTSESYQQGVLSATILYEILLGKATLYAVLVSALVLMAMVKRKDSRG

SEQ ID NO: 43958 - protein, 758 aa, synthetic construct
MALPVTALLLPLALLLHAARPDIQMTQSPSSLSASVGDRVTITCKASDHINNWLAWYQQKPGQAPKLLIYGATTLETGVPSRFSGSGSGTDYTLTISSLQPEDFATYYCQQSWNTPWTFGQGTKLEIKRLEDLKNVFPPEVAVFEPSEAEISHTQKATLVCLATGFYPDHVELSWWVNGKEVHSGVCTDPQPLKEQPALNDSRYCLSSRLRVSATFWQNPRNHFRCQVQFYGLSENDEWTQDRAKPVTQIVSAEAWGRADCDVKLVEKSFETDTNLNFQNLSVIGFRILLLKVAGFNLLMTLRLWSSRAKRSGSGATNFSLLKQAGDVEENPGPTSATMDWIWRILFLVGAATGAHSGPEVQLVESGGGLVQAGGSLRLSCAASGSVFSGNVMGWYRQAPGKEREWVAAIASGGSIYYRDSVKGRFTISRDNAKNTVYLQMNSLKPEDTAVYYCNSHPPTLPYWGLGTQVTVSSGSGGGGSGGGGSGGGGSFEQVQLQQPGAELVKPGASVKMSCKASGYAFSSSWINWMKQKPGQGLEWIGQIYPGDGDTNYNGKFKGRATLTADTSSSTAYMQLSSLTSEDSAVYFCARSITTVVGCAMDYWGQGTSVTVSSTRIQNPDPAVYQLRDSKSSDKSVCLFTDFDSQTNVSQSKDSDVYITDKCVLDMRSMDFKSNSAVAWSNKSDFACANAFNNSIIPEDTFFPSPESSCGFTSESYQQGVLSATILYEILLGKATLYAVLVSALVLMAMVKRKDSRG

SEQ ID NO: 43959 - protein, 756 aa, synthetic construct
MALPVTALLLPLALLLHAARPDIQMTQSPSSLSASVGDRVTITCKASDHINNWLAWYQQKPGQAPKLLIYGATTLETGVPSRFSGSGSGTDYTLTISSLQPEDFATYYCQQSWNTPWTFGQGTKLEIKRLEDLKNVFPPEVAVFEPSEAEISHTQKATLVCLATGFYPDHVELSWWVNGKEVHSGVCTDPQPLKEQPALNDSRYCLSSRLRVSATFWQNPRNHFRCQVQFYGLSENDEWTQDRAKPVTQIVSAEAWGRADCDVKLVEKSFETDTNLNFQNLSVIGFRILLLKVAGFNLLMTLRLWSSRAKRSGSGATNFSLLKQAGDVEENPGPTSATMDWIWRILFLVGAATGAHSGPEVQLLESGGGLVQPGGSLRLSCAASGFSFSSYALSWVRQAPGKGLEWVSSIGENDGTTDYADAVKGRFTISRDNSKNTLYLQMNSLRVEDTAVYYCVKDGIHWGQGTLVTVSSGSGGGGSGGGGSGGGGSFEQVQLQQPGAELVKPGASVKMSCKASGYAFSSSWINWMKQKPGQGLEWIGQIYPGDGDTNYNGKFKGRATLTADTSSSTAYMQLSSLTSEDSAVYFCARSITTVVGCAMDYWGQGTSVTVSSTRIQNPDPAVYQLRDSKSSDKSVCLFTDFDSQTNVSQSKDSDVYITDKCVLDMRSMDFKSNSAVAWSNKSDFACANAFNNSIIPEDTFFPSPESSCGFTSESYQQGVLSATILYEILLGKATLYAVLVSALVLMAMVKRKDSRG

SEQ ID NO: 43960 - protein, 1125 aa, synthetic construct
MGPRLLFWALLCLLGTGPVEAGVTQSPTHLIKTRGQQATLRCSPISGHTSVYWYQQALGLGLQFLLWYDEGEERNRGNFPPRFSGRQFPNYSSELNVNALELEDSALYLCASSLGGPRGLAGLRGDEQFFGPGTRLTVLEGTGGGGSGGGEFDIQMTQSPSSLSASVGDRVTITCKASDHINNWLAWYQQKPGQAPKLLIYGATTLETGVPSRFSGSGSGTDYTLTISSLQPEDFATYYCQQSWNTPWTFGQGTKLEIKRLEDLKNVFPPEVAVFEPSEAEISHTQKATLVCLATGFYPDHVELSWWVNGKEVHSGVCTDPQPLKEQPALNDSRYCLSSRLRVSATFWQNPRNHFRCQVQFYGLSENDEWTQDRAKPVTQIVSAEAWGRADCDVKLVEKSFETDTNLNFQNLSVIGFRILLLKVAGFNLLMTLRLWSSRAKRSGSGATNFSLLKQAGDVEENPGPTSATMDWIWRILFLVGAATGAHSGPEVQLVESGGGLVQAGGSLRLSCAASGRTFSMGWFRQAPGKEREFVAAITYSGGSPYYADSVKGRFTISRDNAKNTVYLQMNSLKPEDTAVYYCAANPTYGSDWNAENWGQGTQVTVSSGSGGGGSGGGGSGGGGSFEQVQLQQPGAELVKPGASVKMSCKASGYAFSSSWINWMKQKPGQGLEWIGQIYPGDGDTNYNGKFKGRATLTADTSSSTAYMQLSSLTSEDSAVYFCARSITTVVGCAMDYWGQGTSVTVSSTRIQNPDPAVYQLRDSKSSDKSVCLFTDFDSQTNVSQSKDSDVYITDKCVLDMRSMDFKSNSAVAWSNKSDFACANAFNNSIIPEDTFFPSPESSCGFTSESYQQGVLSATILYEILLGKATLYAVLVSALVLMAMVKRKDSRGRAKRSGSGVKQTLNFDLLKLAGDVESNPGPSRGHMTEYKPTVRLATRDDVPRAVRTLAAAFADYPATRHTVDPDRHIERVTELQELFLTRVGLDIGKVWVADDGAAVAVWTTPESVEAGAVFAEIGPRMAELSGSRLAAQQQMEGLLAPHRPKEPAWFLATVGVSPDHQGKGLGSAVVLPGVEAAERAGVPAFLETSAPRNLPFYERLGFTVTADVEVPEGPRTWCMTRKPGA

SEQ ID NO: 43961 - protein, 1124 aa, synthetic construct
MGPRLLFWALLCLLGTGPVEAGVTQSPTHLIKTRGQQATLRCSPISGHTSVYWYQQALGLGLQFLLWYDEGEERNRGNFPPRFSGRQFPNYSSELNVNALELEDSALYLCASSLGGDELGADGNEQFFGPGTRLTVLEGTGGGGSGGGSEFDIQMTQSPSSLSASVGDRVTITCKASDHINNWLAWYQQKPGQAPKLLIYGATTLETGVPSRFSGSGSGTDYTLTISSLQPEDFATYYCQQSWNTPWTFGQGTKLEIKRLEDLKNVFPPEVAVFEPSEAEISHTQKATLVCLATGFYPDHVELSWWVNGKEVHSGVCTDPQPLKEQPALNDSRYCLSSRLRVSATFWQNPRNHFRCQVQFYGLSENDEWTQDRAKPVTQIVSAEAWGRADCDVKLVEKSFETDTNLNFQNLSVIGFRILLLKVAGFNLLMTLRLWSSRAKRSGSGATNFSLLKQAGDVEENPGPTSATMDWIWRILFLVGAATGAHSGPEVQLVESGGGLVQAGGSLRLSCAASGRTFSMGWFRQAPGKEREFVAAITYSGGSPYYADSVKGRFTISRDNAKNTVYLQMNSLKPEDTAVYYCAANPTYGSDWNAENWGQGTQVTVSSGSGGGGSGGGGSGGGGSFEQVQLQQPGAELVKPGASVKMSCKASGYAFSSSWINWMKQKPGQGLEWIGQIYPGDGDTNYNGKFKGRATLTADTSSSTAYMQLSSLTSEDSAVYFCARSITTVVGCAMDYWGQGTSVTVSSTRIQNPDPAVYQLRDSKSSDKSVCLFTDFDSQTNVSQSKDSDVYITDKCVLDMRSMDFKSNSAVAWSNKSDFACANAFNNSIIPEDTFFPSPESSCGFTSESYQQGVLSATILYEILLGKATLYAVLVSALVLMAMVKRKDSRGRAKRSGSGVKQTLNFDLLKLAGDVESNPGPSRGHMTEYKPTVRLATRDDVPRAVRTLAAAFADYPATRHTVDPDRHIERVTELQELFLTRVGLDIGKVWVADDGAAVAVWTTPESVEAGAVFAEIGPRMAELSGSRLAAQQQMEGLLAPHRPKEPAWFLATVGVSPDHQGKGLGSAVVLPGVEAAERAGVPAFLETSAPRNLPFYERLGFTVTADVEVPEGPRTWCMTRKPGA

SEQ ID NO: 43962 - protein, 949 aa, synthetic construct
MALPVTALLLPLALLLHAARPDIQMTQSPSSLSASVGDRVTITCKASDHINNWLAWYQQKPGQAPKLLIYGATTLETGVPSRFSGSGSGTDYTLTISSLQPEDFATYYCQQSWNTPWTFGQGTKLEIKRLEDLKNVFPPEVAVFEPSEAEISHTQKATLVCLATGFYPDHVELSWWVNGKEVHSGVCTDPQPLKEQPALNDSRYCLSSRLRVSATFWQNPRNHFRCQVQFYGLSENDEWTQDRAKPVTQIVSAEAWGRADCDVKLVEKSFETDTNLNFQNLSVIGFRILLLKVAGFNLLMTLRLWSSRAKRSGSGATNFSLLKQAGDVEENPGPTSATMDWIWRILFLVGAATGAHSGPMGSWLEFYHRLNAIDSRLWALGGSEAELAAFEKEIAAFESELQAYKGKGNPEVESLRDHAAHIREWLQAYRHNGSGGGGSGGGGSGGGGSFEQVQLQQPGAELVKPGASVKMSCKASGYAFSSSWINWMKQKPGQGLEWIGQIYPGDGDTNYNGKFKGRATLTADTSSSTAYMQLSSLTSEDSAVYFCARSITTVVGCAMDYWGQGTSVTVSSTRIQNPDPAVYQLRDSKSSDKSVCLFTDFDSQTNVSQSKDSDVYITDKCVLDMRSMDFKSNSAVAWSNKSDFACANAFNNSIIPEDTFFPSPESSCGFTSESYQQGVLSATILYEILLGKATLYAVLVSALVLMAMVKRKDSRGRAKRSGSGVKQTLNFDLLKLAGDVESNPGPSRGHMTEYKPTVRLATRDDVPRAVRTLAAAFADYPATRHTVDPDRHIERVTELQELFLTRVGLDIGKVWVADDGAAVAVWTTPESVEAGAVFAEIGPRMAELSGSRLAAQQQMEGLLAPHRPKEPAWFLATVGVSPDHQGKGLGSAVVLPGVEAAERAGVPAFLETSAPRNLPFYERLGFTVTADVEVPEGPRTWCMTRKPGA

SEQ ID NO: 43963 - protein, 949 aa, synthetic construct
MALPVTALLLPLALLLHAARPACMGSWFEFYDRLNAIDARLWALGGSEAELAAFEKEIAAFESELQAYKGKGNPEVENLRVHAAAIREWLQAYRHNGTGGGGSGGGGSGGGGSEFDIQMTQSPSSLSASVGDRVTITCKASDHINNWLAWYQQKPGQAPKLLIYGATTLETGVPSRFSGSGSGTDYTLTISSLQPEDFATYYCQQSWNTPWTFGQGTKLEIKRLEDLKNVFPPEVAVFEPSEAEISHTQKATLVCLATGFYPDHVELSWWVNGKEVHSGVCTDPQPLKEQPALNDSRYCLSSRLRVSATFWQNPRNHFRCQVQFYGLSENDEWTQDRAKPVTQIVSAEAWGRADCDVKLVEKSFETDTNLNFQNLSVIGFRILLLKVAGFNLLMTLRLWSSRAKRSGSGATNFSLLKQAGDVEENPGPTSMDWIWRILFLVGAATGAHSFEQVQLQQPGAELVKPGASVKMSCKASGYAFSSSWINWMKQKPGQGLEWIGQIYPGDGDTNYNGKFKGRATLTADTSSSTAYMQLSSLTSEDSAVYFCARSITTVVGCAMDYWGQGTSVTVSSTRIQNPDPAVYQLRDSKSSDKSVCLFTDFDSQTNVSQSKDSDVYITDKCVLDMRSMDFKSNSAVAWSNKSDFACANAFNNSIIPEDTFFPSPESSCGFTSESYQQGVLSATILYEILLGKATLYAVLVSALVLMAMVKRKDSRGRAKRSGSGVKQTLNFDLLKLAGDVESNPGPSRGHMTEYKPTVRLATRDDVPRAVRTLAAAFADYPATRHTVDPDRHIERVTELQELFLTRVGLDIGKVWVADDGAAVAVWTTPESVEAGAVFAEIGPRMAELSGSRLAAQQQMEGLLAPHRPKEPAWFLATVGVSPDHQGKGLGSAVVLPGVEAAERAGVPAFLETSAPRNLPFYERLGFTVTADVEVPEGPRTWCMTRKPGA

SEQ ID NO: 43964 - protein, 1066 aa, synthetic construct
MALPVTALLLPLALLLHAARPACMDPDLEIRAAFLRQRNTALRTEVAELEQEVQRLENEVSQYETRYGPLGGGKGTGGGGSGGGGSGGGGSEFDIQMTQSPSSLSASVGDRVTITCKASDHINNWLAWYQQKPGQAPKLLIYGATTLETGVPSRFSGSGSGTDYTLTISSLQPEDFATYYCQQSWNTPWTFGQGTKLEIKRLEDLKNVFPPEVAVFEPSEAEISHTQKATLVCLATGFYPDHVELSWWVNGKEVHSGVCTDPQPLKEQPALNDSRYCLSSRLRVSATFWQNPRNHFRCQVQFYGLSENDEWTQDRAKPVTQIVSAEAWGRADCDVKLVEKSFETDTNLNFQNLSVIGFRILLLKVAGFNLLMTLRLWSSRAKRSGSGATNFSLLKQAGDVEENPGPTSATMDWIWRILFLVGAATGAHSGPEVQLVESGGGLVQAGGSLRLSCAASGRTFSMGWFRQAPGKEREFVAAITYSGGSPYYADSVKGRFTISRDNAKNTVYLQMNSLKPEDTAVYYCAANPTYGSDWNAENWGQGTQVTVSSGSGGGGSGGGGSGGGGSFEQVQLQQPGAELVKPGASVKMSCKASGYAFSSSWINWMKQKPGQGLEWIGQIYPGDGDTNYNGKFKGRATLTADTSSSTAYMQLSSLTSEDSAVYFCARSITTVVGCAMDYWGQGTSVTVSSTRIQNPDPAVYQLRDSKSSDKSVCLFTDFDSQTNVSQSKDSDVYITDKCVLDMRSMDFKSNSAVAWSNKSDFACANAFNNSIIPEDTFFPSPESSCGFTSESYQQGVLSATILYEILLGKATLYAVLVSALVLMAMVKRKDSRGRAKRSGSGVKQTLNFDLLKLAGDVESNPGPSRGHMTEYKPTVRLATRDDVPRAVRTLAAAFADYPATRHTVDPDRHIERVTELQELFLTRVGLDIGKVWVADDGAAVAVWTTPESVEAGAVFAEIGPRMAELSGSRLAAQQQMEGLLAPHRPKEPAWFLATVGVSPDHQGKGLGSAVVLPGVEAAERAGVPAFLETSAPRNLPFYERLGFTVTADVEVPEGPRTWCMTRKPGA

SEQ ID NO: 43965 - protein, 949 aa, synthetic construct
MALPVTALLLPLALLLHAARPDIQMTQSPSSLSASVGDRVTITCKASDHINNWLAWYQQKPGQAPKLLIYGATTLETGVPSRFSGSGSGTDYTLTISSLQPEDFATYYCQQSWNTPWTFGQGTKLEIKRLEDLKNVFPPEVAVFEPSEAEISHTQKATLVCLATGFYPDHVELSWWVNGKEVHSGVCTDPQPLKEQPALNDSRYCLSSRLRVSATFWQNPRNHFRCQVQFYGLSENDEWTQDRAKPVTQIVSAEAWGRADCDVKLVEKSFETDTNLNFQNLSVIGFRILLLKVAGFNLLMTLRLWSSRAKRSGSGATNFSLLKQAGDVEENPGPTSATMDWIWRILFLVGAATGAHSGPMGSWSEFYDRLHAIHHRLYALGGSEAELAAFEKEIAAFESELQAYKGKGNPEVEALRDTAAFIRTRLQAYRHNGSGGGGSGGGGSGGGGSFEQVQLQQPGAELVKPGASVKMSCKASGYAFSSSWINWMKQKPGQGLEWIGQIYPGDGDTNYNGKFKGRATLTADTSSSTAYMQLSSLTSEDSAVYFCARSITTVVGCAMDYWGQGTSVTVSSTRIQNPDPAVYQLRDSKSSDKSVCLFTDFDSQTNVSQSKDSDVYITDKCVLDMRSMDFKSNSAVAWSNKSDFACANAFNNSIIPEDTFFPSPESSCGFTSESYQQGVLSATILYEILLGKATLYAVLVSALVLMAMVKRKDSRGRAKRSGSGVKQTLNFDLLKLAGDVESNPGPSRGHMTEYKPTVRLATRDDVPRAVRTLAAAFADYPATRHTVDPDRHIERVTELQELFLTRVGLDIGKVWVADDGAAVAVWTTPESVEAGAVFAEIGPRMAELSGSRLAAQQQMEGLLAPHRPKEPAWFLATVGVSPDHQGKGLGSAVVLPGVEAAERAGVPAFLETSAPRNLPFYERLGFTVTADVEVPEGPRTWCMTRKPGA

SEQ ID NO: 43966 - protein, 1159 aa, synthetic construct
MALPVTALLLPLALLLHAARPDIQMTQSPSSLSASVGDRVTITCKASDHINNWLAWYQQKPGQAPKLLIYGATTLETGVPSRFSGSGSGTDYTLTISSLQPEDFATYYCQQSWNTPWTFGQGTKLEIKRLEDLKNVFPPEVAVFEPSEAEISHTQKATLVCLATGFYPDHVELSWWVNGKEVHSGVCTDPQPLKEQPALNDSRYCLSSRLRVSATFWQNPRNHFRCQVQFYGLSENDEWTQDRAKPVTQIVSAEAWGRADCDVKLVEKSFETDTNLNFQNLSVIGFRILLLKVAGFNLLMTLRLWSSRAKRSGSGATNFSLLKQAGDVEENPGPTSTMDWIWRILFLVGAATGAHSLFNQEVQIPLTESYCGPCPKNWICYKNNCYQFFDESKNWYESQASCMSQNASLLKVYSKEDQDLLKLVKSAHWMGLVHIPTNGSWQWEDGSILSPNLLTIIEMQKGDCALYASSFKGYIENCSTPNTYICMQRTVSGGGGSGGGGSGGGGDLFNQEVQIPLTESYCGPCPKNWICYKNNCYQFFDESKNWYESQASCMSQNASLLKVYSKEDQDLLKLVKSAHWMGLVHIPTNGSWQWEDGSILSPNLLTIIEMQKGDCALYASSFKGYIENCSTPNTYICMQRTVGSGGGGSGGGGSGGGGSFEQVQLQQPGAELVKPGASVKMSCKASGYAFSSSWINWMKQKPGQGLEWIGQIYPGDGDTNYNGKFKGRATLTADTSSSTAYMQLSSLTSEDSAVYFCARSITTVVGCAMDYWGQGTSVTVSSTRIQNPDPAVYQLRDSKSSDKSVCLFTDFDSQTNVSQSKDSDVYITDKCVLDMRSMDFKSNSAVAWSNKSDFACANAFNNSIIPEDTFFPSPESSCGFTSESYQQGVLSATILYEILLGKATLYAVLVSALVLMAMVKRKDSRGRAKRSGSGVKQTLNFDLLKLAGDVESNPGPSRGHMTEYKPTVRLATRDDVPRAVRTLAAAFADYPATRHTVDPDRHIERVTELQELFLTRVGLDIGKVWVADDGAAVAVWTTPESVEAGAVFAEIGPRMAELSGSRLAAQQQMEGLLAPHRPKEPAWFLATVGVSPDHQGKGLGSAVVLPGVEAAERAGVPAFLETSAPRNLPFYERLGFTVTADVEVPEGPRTWCMTRKPGA

SEQ ID NO: 43967 - protein, 622 aa, synthetic construct; identical to SEQ ID NO: 43924

SEQ ID NO: 43968 - protein, 626 aa, synthetic construct
MALPVTALLLPLALLLHAARPDIQMTQSPSSLSASVGDRVTITCKASDHINNWLAWYQQKPGQAPKLLIYGATTLETGVPSRFSGSGSGTDYTLTISSLQPEDFATYYCQQSWNTPWTFGQGTKLEIKRLEIQNPDPAVYQLRDSKSSDKSVCLFTDFDSQTNVSQSKDSDVYITDKCVLDMRSMDFKSNSAVAWSNKSDFACANAFNNSIIPEDTFFPSPESSCDVKLVEKSFETDTNLNFQILYEILLGKATLYAVLVSALVLMAMVKRKDSRGRAKRSGSGVKQTLNFDLLKLAGDVESNPGPTSMDWIWRILFLVGAATGAHSFEQVQLQQPGAELVKPGASVKMSCKASGYAFSSSWINWMKQKPGQGLEWIGQIYPGDGDTNYNGKFKGRATLTADTSSSTAYMQLSSLTSEDSAVYFCARSITTVVGCAMDYWGQGTSVTVSSTREDLKNVFPPEVAVFEPSEAEISHTQKATLVCLATGFYPDHVELSWWVNGKEVHSGVCTDPQPLKEQPALNDSRYCLSSRLRVSATFWQNPRNHFRCQVQFYGLSENDEWTQDRAKPVTQIVSAEAWGRADCGFTSESYQQGVLSATNLSVIGFRILLLKVAGFNLLMTLRLWSS

SEQ ID NO: 43969 - protein, 757 aa, synthetic construct
MALPVTALLLPLALLLHAARPEVQLVESGGGLVQPGGSLRLSCAASGFSFSDFWMSWVRQAPGKGLEWVATISQAGSEKDYVDSVKGRFTISRDNAKKSLYLQMNSLRAEDTAVYYCASGVYSFDYRGQGTLVTVSSGTGGGGSGGGGSGGGGSEFDIQMTQSPSSLSASVGDRVTITCKASDHINNWLAWYQQKPGQAPKLLIYGATTLETGVPSRFSGSGSGTDYTLTISSLQPEDFATYYCQQSWNTPWTFGQGTKLEIKRLEDLKNVFPPEVAVFEPSEAEISHTQKATLVCLATGFYPDHVELSWWVNGKEVHSGVCTDPQPLKEQPALNDSRYCLSSRLRVSATFWQNPRNHFRCQVQFYGLSENDEWTQDRAKPVTQIVSAEAWGRADCGFTSESYQQGVLSATNLSVIGFRILLLKVAGFNLLMTLRLWSSRAKRSGSGATNFSLLKQAGDVEENPGPTSMDWIWRILFLVGAATGAHSFEQVQLQQPGAELVKPGASVKMSCKASGYAFSSSWINWMKQKPGQGLEWIGQIYPGDGDTNYNGKFKGRATLTADTSSSTAYMQLSSLTSEDSAVYFCARSITTVVGCAMDYWGQGTSVTVSSTRIQNPDPAVYQLRDSKSSDKSVCLFTDFDSQTNVSQSKDSDVYITDKCVLDMRSMDFKSNSAVAWSNKSDFACANAFNNSIIPEDTFFPSPESSCDVKLVEKSFETDTNLNFQILYEILLGKATLYAVLVSALVLMAMVKRKDSRG

SEQ ID NO: 43970 - protein, 761 aa, synthetic construct
MALPVTALLLPLALLLHAARPEVQLVESGGGLVQPGGSLRLSCAASGFSFSDFWMSWVRQAPGKGLEWVATISQAGSEKDYVDSVKGRFTISRDNAKKSLYLQMNSLRAEDTAVYYCASGVYSFDYRGQGTLVTVSSGTGGGGSGGGGSGGGGSEFDIQMTQSPSSLSASVGDRVTITCKASDHINNWLAWYQQKPGQAPKLLIYGATTLETGVPSRFSGSGSGTDYTLTISSLQPEDFATYYCQQSWNTPWTFGQGTKLEIKRLEIQNPDPAVYQLRDSKSSDKSVCLFTDFDSQTNVSQSKDSDVYITDKCVLDMRSMDFKSNSAVAWSNKSDFACANAFNNSIIPEDTFFPSPESSCDVKLVEKSFETDTNLNFQILYEILLGKATLYAVLVSALVLMAMVKRKDSRGRAKRSGSGVKQTLNFDLLKLAGDVESNPGPTSMDWIWRILFLVGAATGAHSFEQVQLQQPGAELVKPGASVKMSCKASGYAFSSSWINWMKQKPGQGLEWIGQIYPGDGDTNYNGKFKGRATLTADTSSSTAYMQLSSLTSEDSAVYFCARSITTVVGCAMDYWGQGTSVTVSSTREDLKNVFPPEVAVFEPSEAEISHTQKATLVCLATGFYPDHVELSWWVNGKEVHSGVCTDPQPLKEQPALNDSRYCLSSRLRVSATFWQNPRNHFRCQVQFYGLSENDEWTQDRAKPVTQIVSAEAWGRADCGFTSESYQQGVLSATNLSVIGFRILLLKVAGFNLLMTLRLWSS

SEQ ID NO: 43971 - protein, 894 aa, synthetic construct
MALPVTALLLPLALLLHAARPEVQLVESGGGLVQPGGSLRLSCAASGFSFSDFWMSWVRQAPGKGLEWVATISQAGSEKDYVDSVKGRFTISRDNAKKSLYLQMNSLRAEDTAVYYCASGVYSFDYRGQGTLVTVSSGTGGGGSGGGGSGGGGSEFDIQMTQSPSSLSASVGDRVTITCKASDHINNWLAWYQQKPGQAPKLLIYGATTLETGVPSRFSGSGSGTDYTLTISSLQPEDFATYYCQQSWNTPWTFGQGTKLEIKRLEDLKNVFPPEVAVFEPSEAEISHTQKATLVCLATGFYPDHVELSWWVNGKEVHSGVCTDPQPLKEQPALNDSRYCLSSRLRVSATFWQNPRNHFRCQVQFYGLSENDEWTQDRAKPVTQIVSAEAWGRADCGFTSESYQQGVLSATNLSVIGFRILLLKVAGFNLLMTLRLWSSRAKRSGSGATNFSLLKQAGDVEENPGPTSMDWIWRILFLVGAATGAHSGPQLQLQESGPGLVKPSETLSLTCTVSGDSISSGDYYWGWIRQPPGKGLEWIGHIYYSGVTYYNPSLKSRVTISVDTSRNQFSLKLSSVTAADTAVYYCTREDSSNWRSRGQGTLVTVSSGSGGGGSGGGGSGGGGSFEQVQLQQPGAELVKPGASVKMSCKASGYAFSSSWINWMKQKPGQGLEWIGQIYPGDGDTNYNGKFKGRATLTADTSSSTAYMQLSSLTSEDSAVYFCARSITTVVGCAMDYWGQGTSVTVSSTRIQNPDPAVYQLRDSKSSDKSVCLFTDFDSQTNVSQSKDSDVYITDKCVLDMRSMDFKSNSAVAWSNKSDFACANAFNNSIIPEDTFFPSPESSCDVKLVEKSFETDTNLNFQILYEILLGKATLYAVLVSALVLMAMVKRKDSRG

SEQ ID NO: 43972 - protein, 898 aa, synthetic construct
MALPVTALLLPLALLLHAARPEVQLVESGGGLVQPGGSLRLSCAASGFSFSDFWMSWVRQAPGKGLEWVATISQAGSEKDYVDSVKGRFTISRDNAKKSLYLQMNSLRAEDTAVYYCASGVYSFDYRGQGTLVTVSSGTGGGGSGGGGSGGGGSEFDIQMTQSPSSLSASVGDRVTITCKASDHINNWLAWYQQKPGQAPKLLIYGATTLETGVPSRFSGSGSGTDYTLTISSLQPEDFATYYCQQSWNTPWTFGQGTKLEIKRLEIQNPDPAVYQLRDSKSSDKSVCLFTDFDSQTNVSQSKDSDVYITDKCVLDMRSMDFKSNSAVAWSNKSDFACANAFNNSIIPEDTFFPSPESSCDVKLVEKSFETDTNLNFQILYEILLGKATLYAVLVSALVLMAMVKRKDSRGRAKRSGSGVKQTLNFDLLKLAGDVESNPGPTSMDWIWRILFLVGAATGAHSGPQLQLQESGPGLVKPSETLSLTCTVSGDSISSGDYYWGWIRQPPGKGLEWIGHIYYSGVTYYNPSLKSRVTISVDTSRNQFSLKLSSVTAADTAVYYCTREDSSNWRSRGQGTLVTVSSGSGGGGSGGGGSGGGGSFEQVQLQQPGAELVKPGASVKMSCKASGYAFSSSWINWMKQKPGQGLEWIGQIYPGDGDTNYNGKFKGRATLTADTSSSTAYMQLSSLTSEDSAVYFCARSITTVVGCAMDYWGQGTSVTVSSTREDLKNVFPPEVAVFEPSEAEISHTQKATLVCLATGFYPDHVELSWWVNGKEVHSGVCTDPQPLKEQPALNDSRYCLSSRLRVSATFWQNPRNHFRCQVQFYGLSENDEWTQDRAKPVTQIVSAEAWGRADCGFTSESYQQGVLSATNLSVIGFRILLLKVAGFNLLMTLRLWSS

SEQ ID NO: 43973 - protein, 726 aa, synthetic construct
MALPVTALLLPLALLLHAARPDIQMTQSPSSLSASVGDRVTITCKASDHINNWLAWYQQKPGQAPKLLIYGATTLETGVPSRFSGSGSGTDYTLTISSLQPEDFATYYCQQSWNTPWTFGQGTKLEIKRLEDLKNVFPPEVAVFEPSEAEISHTQKATLVCLATGFYPDHVELSWWVNGKEVHSGVCTDPQPLKEQPALNDSRYCLSSRLRVSATFWQNPRNHFRCQVQFYGLSENDEWTQDRAKPVTQIVSAEAWGRADDVIKIHWQEKKSNTILGSQEGNTMKTNDTYMKFSWLTVPEKSLDKEHRCIVRHENNKNGVDQEIIFPPIKTDVITMDPKDNCSKDANDTLLLQLTNTSAYYMYLLLLLKSVVYFAIITCCLLMAMVKRKDSRGRAKRSGSGATNFSLLKQAGDVEENPGPTSMDWIWRILFLVGAATGAHSFEQVQLQQPGAELVKPGASVKMSCKASGYAFSSSWINWMKQKPGQGLEWIGQIYPGDGDTNYNGKFKGRATLTADTSSSTAYMQLSSLTSEDSAVYFCARSITTVVGCAMDYWGQGTSVTVSSTRIQNPDPAVYQLRDSKSSDKSVCLFTDFDSQTNVSQSKDSDVYITDKCVLDMRSMDFKSNSAVAWSNKSDFACANAFNNSIIPEDTFFPSPESSDSTDHVKPKETENTKQPSKSCHKPKAIVHTEKVNMMSLTVLGLRMLFAKTVAVNFLLTAKLFFLLTA

SEQ ID NO: 43974 - protein, 730 aa, synthetic construct
MALPVTALLLPLALLLHAARPDIQMTQSPSSLSASVGDRVTITCKASDHINNWLAWYQQKPGQAPKLLIYGATTLETGVPSRFSGSGSGTDYTLTISSLQPEDFATYYCQQSWNTPWTFGQGTKLEIKRLEIQNPDPAVYQLRDSKSSDKSVCLFTDFDSQTNVSQSKDSDVYITDKCVLDMRSMDFKSNSAVAWSNKSDFACANAFNNSIIPEDTFFPSPESSDSTDHVKPKETENTKQPSKSCHKPKAIVHTEKVNMMSLTVLGLRMLFAKTVAVNFLLTAKLFFLLTARAKRSGSGVKQTLNFDLLKLAGDVESNPGPTSMDWIWRILFLVGAATGAHSFEQVQLQQPGAELVKPGASVKMSCKASGYAFSSSWINWMKQKPGQGLEWIGQIYPGDGDTNYNGKFKGRATLTADTSSSTAYMQLSSLTSEDSAVYFCARSITTVVGCAMDYWGQGTSVTVSSTREDLKNVFPPEVAVFEPSEAEISHTQKATLVCLATGFYPDHVELSWWVNGKEVHSGVCTDPQPLKEQPALNDSRYCLSSRLRVSATFWQNPRNHFRCQVQFYGLSENDEWTQDRAKPVTQIVSAEAWGRADDVIKIHWQEKKSNTILGSQEGNTMKTNDTYMKFSWLTVPEKSLDKEHRCIVRHENNKNGVDQEIIFPPIKTDVITMDPKDNCSKDANDTLLLQLTNTSAYYMYLLLLLKSVVYFAIITCCLLMAMVKRKDSRG

SEQ ID NO: 43975 - protein, 861 aa, synthetic construct
MALPVTALLLPLALLLHAARPEVQLVESGGGLVQPGGSLRLSCAASGFSFSDFWMSWVRQAPGKGLEWVATISQAGSEKDYVDSVKGRFTISRDNAKKSLYLQMNSLRAEDTAVYYCASGVYSFDYRGQGTLVTVSSGTGGGGSGGGGSGGGGSEFDIQMTQSPSSLSASVGDRVTITCKASDHINNWLAWYQQKPGQAPKLLIYGATTLETGVPSRFSGSGSGTDYTLTISSLQPEDFATYYCQQSWNTPWTFGQGTKLEIKRLEDLKNVFPPEVAVFEPSEAEISHTQKATLVCLATGFYPDHVELSWWVNGKEVHSGVCTDPQPLKEQPALNDSRYCLSSRLRVSATFWQNPRNHFRCQVQFYGLSENDEWTQDRAKPVTQIVSAEAWGRADDVIKIHWQEKKSNTILGSQEGNTMKTNDTYMKFSWLTVPEKSLDKEHRCIVRHENNKNGVDQEIIFPPIKTDVITMDPKDNCSKDANDTLLLQLTNTSAYYMYLLLLLKSVVYFAIITCCLLMAMVKRKDSRGRAKRSGSGATNFSLLKQAGDVEENPGPTSMDWIWRILFLVGAATGAHSFEQVQLQQPGAELVKPGASVKMSCKASGYAFSSSWINWMKQKPGQGLEWIGQIYPGDGDTNYNGKFKGRATLTADTSSSTAYMQLSSLTSEDSAVYFCARSITTVVGCAMDYWGQGTSVTVSSTRIQNPDPAVYQLRDSKSSDKSVCLFTDFDSQTNVSQSKDSDVYITDKCVLDMRSMDFKSNSAVAWSNKSDFACANAFNNSIIPEDTFFPSPESSDSTDHVKPKETENTKQPSKSCHKPKAIVHTEKVNMMSLTVLGLRMLFAKTVAVNFLLTAKLFFLLTA

SEQ ID NO: 43976 - protein, 865 aa, synthetic construct
MALPVTALLLPLALLLHAARPEVQLVESGGGLVQPGGSLRLSCAASGFSFSDFWMSWVRQAPGKGLEWVATISQAGSEKDYVDSVKGRFTISRDNAKKSLYLQMNSLRAEDTAVYYCASGVYSFDYRGQGTLVTVSSGTGGGGSGGGGSGGGGSEFDIQMTQSPSSLSASVGDRVTITCKASDHINNWLAWYQQKPGQAPKLLIYGATTLETGVPSRFSGSGSGTDYTLTISSLQPEDFATYYCQQSWNTPWTFGQGTKLEIKRLEIQNPDPAVYQLRDSKSSDKSVCLFTDFDSQTNVSQSKDSDVYITDKCVLDMRSMDFKSNSAVAWSNKSDFACANAFNNSIIPEDTFFPSPESSDSTDHVKPKETENTKQPSKSCHKPKAIVHTEKVNMMSLTVLGLRMLFAKTVAVNFLLTAKLFFLLTARAKRSGSGVKQTLNFDLLKLAGDVESNPGPTSMDWIWRILFLVGAATGAHSFEQVQLQQPGAELVKPGASVKMSCKASGYAFSSSWINWMKQKPGQGLEWIGQIYPGDGDTNYNGKFKGRATLTADTSSSTAYMQLSSLTSEDSAVYFCARSITTVVGCAMDYWGQGTSVTVSSTREDLKNVFPPEVAVFEPSEAEISHTQKATLVCLATGFYPDHVELSWWVNGKEVHSGVCTDPQPLKEQPALNDSRYCLSSRLRVSATFWQNPRNHFRCQVQFYGLSENDEWTQDRAKPVTQIVSAEAWGRADDVIKIHWQEKKSNTILGSQEGNTMKTNDTYMKFSWLTVPEKSLDKEHRCIVRHENNKNGVDQEIIFPPIKTDVITMDPKDNCSKDANDTLLLQLTNTSAYYMYLLLLLKSVVYFAIITCCLLMAMVKRKDSRG

SEQ ID NO: 43977 - protein, 998 aa, synthetic construct
MALPVTALLLPLALLLHAARPEVQLVESGGGLVQPGGSLRLSCAASGFSFSDFWMSWVRQAPGKGLEWVATISQAGSEKDYVDSVKGRFTISRDNAKKSLYLQMNSLRAEDTAVYYCASGVYSFDYRGQGTLVTVSSGTGGGGSGGGGSGGGGSEFDIQMTQSPSSLSASVGDRVTITCKASDHINNWLAWYQQKPGQAPKLLIYGATTLETGVPSRFSGSGSGTDYTLTISSLQPEDFATYYCQQSWNTPWTFGQGTKLEIKRLEDLKNVFPPEVAVFEPSEAEISHTQKATLVCLATGFYPDHVELSWWVNGKEVHSGVCTDPQPLKEQPALNDSRYCLSSRLRVSATFWQNPRNHFRCQVQFYGLSENDEWTQDRAKPVTQIVSAEAWGRADDVIKIHWQEKKSNTILGSQEGNTMKTNDTYMKFSWLTVPEKSLDKEHRCIVRHENNKNGVDQEIIFPPIKTDVITMDPKDNCSKDANDTLLLQLTNTSAYYMYLLLLLKSVVYFAIITCCLLMAMVKRKDSRGRAKRSGSGATNFSLLKQAGDVEENPGPTSMDWIWRILFLVGAATGAHSGPQLQLQESGPGLVKPSETLSLTCTVSGDSISSGDYYWGWIRQPPGKGLEWIGHIYYSGVTYYNPSLKSRVTISVDTSRNQFSLKLSSVTAADTAVYYCTREDSSNWRSRGQGTLVTVSSGSGGGGSGGGGSGGGGSFEQVQLQQPGAELVKPGASVKMSCKASGYAFSSSWINWMKQKPGQGLEWIGQIYPGDGDTNYNGKFKGRATLTADTSSSTAYMQLSSLTSEDSAVYFCARSITTVVGCAMDYWGQGTSVTVSSTRIQNPDPAVYQLRDSKSSDKSVCLFTDFDSQTNVSQSKDSDVYITDKCVLDMRSMDFKSNSAVAWSNKSDFACANAFNNSIIPEDTFFPSPESSDSTDHVKPKETENTKQPSKSCHKPKAIVHTEKVNMMSLTVLGLRMLFAKTVAVNFLLTAKLFFLLTA

SEQ ID NO: 43978 - protein, 1002 aa, synthetic construct
MALPVTALLLPLALLLHAARPEVQLVESGGGLVQPGGSLRLSCAASGFSFSDFWMSWVRQAPGKGLEWVATISQAGSEKDYVDSVKGRFTISRDNAKKSLYLQMNSLRAEDTAVYYCASGVYSFDYRGQGTLVTVSSGTGGGGSGGGGSGGGGSEFDIQMTQSPSSLSASVGDRVTITCKASDHINNWLAWYQQKPGQAPKLLIYGATTLETGVPSRFSGSGSGTDYTLTISSLQPEDFATYYCQQSWNTPWTFGQGTKLEIKRLEIQNPDPAVYQLRDSKSSDKSVCLFTDFDSQTNVSQSKDSDVYITDKCVLDMRSMDFKSNSAVAWSNKSDFACANAFNNSIIPEDTFFPSPESSDSTDHVKPKETENTKQPSKSCHKPKAIVHTEKVNMMSLTVLGLRMLFAKTVAVNFLLTAKLFFLLTARAKRSGSGVKQTLNFDLLKLAGDVESNPGPTSMDWIWRILFLVGAATGAHSGPQLQLQESGPGLVKPSETLSLTCTVSGDSISSGDYYWGWIRQPPGKGLEWIGHIYYSGVTYYNPSLKSRVTISVDTSRNQFSLKLSSVTAADTAVYYCTREDSSNWRSRGQGTLVTVSSGSGGGGSGGGGSGGGGSFEQVQLQQPGAELVKPGASVKMSCKASGYAFSSSWINWMKQKPGQGLEWIGQIYPGDGDTNYNGKFKGRATLTADTSSSTAYMQLSSLTSEDSAVYFCARSITTVVGCAMDYWGQGTSVTVSSTREDLKNVFPPEVAVFEPSEAEISHTQKATLVCLATGFYPDHVELSWWVNGKEVHSGVCTDPQPLKEQPALNDSRYCLSSRLRVSATFWQNPRNHFRCQVQFYGLSENDEWTQDRAKPVTQIVSAEAWGRADDVIKIHWQEKKSNTILGSQEGNTMKTNDTYMKFSWLTVPEKSLDKEHRCIVRHENNKNGVDQEIIFPPIKTDVITMDPKDNCSKDANDTLLLQLTNTSAYYMYLLLLLKSVVYFAIITCCLLMAMVKRKDSRG

SEQ ID NO: 43979 - protein, 724 aa, synthetic construct
MALPVTALLLPLALLLHAARPDIQMTQSPSSLSASVGDRVTITCKASDHINNWLAWYQQKPGQAPKLLIYGATTLETGVPSRFSGSGSGTDYTLTISSLQPEDFATYYCQQSWNTPWTFGQGTKLEIKRLEDLKNVFPPEVAVFEPSEAEISHTQKATLVCLATGFYPDHVELSWWVNGKEVHSGVCTDPQPLKEQPALNDSRYCLSSRLRVSATFWQNPRNHFRCQVQFYGLSENDEWTQDRAKPVTQIVSAEAWGRADDVIKIHWQEKKSNTILGSQEGNTMKTNDTYMKFSWLTVPEKSLDKEHRCIVRHENNKNGVDQEIIFPPIKTDVITMDPKDNCSKDANDTLLLQLTNTSAYYMYLLLLLKSVVYFAIITCCLLRRTAFCCNGEKSRAKRSGSGATNFSLLKQAGDVEENPGPTSMDWIWRILFLVGAATGAHSFEQVQLQQPGAELVKPGASVKMSCKASGYAFSSSWINWMKQKPGQGLEWIGQIYPGDGDTNYNGKFKGRATLTADTSSSTAYMQLSSLTSEDSAVYFCARSITTVVGCAMDYWGQGTSVTVSSTRIQNPDPAVYQLRDSKSSDKSVCLFTDFDSQTNVSQSKDSDVYITDKCVLDMRSMDFKSNSAVAWSNKSDFACANAFNNSIIPEDTFFPSPESSDSTDHVKPKETENTKQPSKSCHKPKAIVHTEKVNMMSLTVLGLRMLFAKTVAVNFLLTAKLFFL

SEQ ID NO: 43980 - protein, 728 aa, synthetic construct
MALPVTALLLPLALLLHAARPDIQMTQSPSSLSASVGDRVTITCKASDHINNWLAWYQQKPGQAPKLLIYGATTLETGVPSRFSGSGSGTDYTLTISSLQPEDFATYYCQQSWNTPWTFGQGTKLEIKRLEIQNPDPAVYQLRDSKSSDKSVCLFTDFDSQTNVSQSKDSDVYITDKCVLDMRSMDFKSNSAVAWSNKSDFACANAFNNSIIPEDTFFPSPESSDSTDHVKPKETENTKQPSKSCHKPKAIVHTEKVNMMSLTVLGLRMLFAKTVAVNFLLTAKLFFLRAKRSGSGVKQTLNFDLLKLAGDVESNPGPTSMDWIWRILFLVGAATGAHSFEQVQLQQPGAELVKPGASVKMSCKASGYAFSSSWINWMKQKPGQGLEWIGQIYPGDGDTNYNGKFKGRATLTADTSSSTAYMQLSSLTSEDSAVYFCARSITTVVGCAMDYWGQGTSVTVSSTREDLKNVFPPEVAVFEPSEAEISHTQKATLVCLATGFYPDHVELSWWVNGKEVHSGVCTDPQPLKEQPALNDSRYCLSSRLRVSATFWQNPRNHFRCQVQFYGLSENDEWTQDRAKPVTQIVSAEAWGRADDVIKIHWQEKKSNTILGSQEGNTMKTNDTYMKFSWLTVPEKSLDKEHRCIVRHENNKNGVDQEIIFPPIKTDVITMDPKDNCSKDANDTLLLQLTNTSAYYMYLLLLLKSVVYFAIITCCLLRRTAFCCNGEKS

SEQ ID NO: 43981 - protein, 859 aa, synthetic construct
MALPVTALLLPLALLLHAARPEVQLVESGGGLVQPGGSLRLSCAASGFSFSDFWMSWVRQAPGKGLEWVATISQAGSEKDYVDSVKGRFTISRDNAKKSLYLQMNSLRAEDTAVYYCASGVYSFDYRGQGTLVTVSSGTGGGGSGGGGSGGGGSEFDIQMTQSPSSLSASVGDRVTITCKASDHINNWLAWYQQKPGQAPKLLIYGATTLETGVPSRFSGSGSGTDYTLTISSLQPEDFATYYCQQSWNTPWTFGQGTKLEIKRLEDLKNVFPPEVAVFEPSEAEISHTQKATLVCLATGFYPDHVELSWWVNGKEVHSGVCTDPQPLKEQPALNDSRYCLSSRLRVSATFWQNPRNHFRCQVQFYGLSENDEWTQDRAKPVTQIVSAEAWGRADDVIKIHWQEKKSNTILGSQEGNTMKTNDTYMKFSWLTVPEKSLDKEHRCIVRHENNKNGVDQEIIFPPIKTDVITMDPKDNCSKDANDTLLLQLTNTSAYYMYLLLLLKSVVYFAIITCCLLRRTAFCCNGEKSRAKRSGSGATNFSLLKQAGDVEENPGPTSMDWIWRILFLVGAATGAHSFEQVQLQQPGAELVKPGASVKMSCKASGYAFSSSWINWMKQKPGQGLEWIGQIYPGDGDTNYNGKFKGRATLTADTSSSTAYMQLSSLTSEDSAVYFCARSITTVVGCAMDYWGQGTSVTVSSTRIQNPDPAVYQLRDSKSSDKSVCLFTDFDSQTNVSQSKDSDVYITDKCVLDMRSMDFKSNSAVAWSNKSDFACANAFNNSIIPEDTFFPSPESSDSTDHVKPKETENTKQPSKSCHKPKAIVHTEKVNMMSLTVLGLRMLFAKTVAVNFLLTAKLFFL

SEQ ID NO: 43982 - protein, 996 aa, synthetic construct
MALPVTALLLPLALLLHAARPEVQLVESGGGLVQPGGSLRLSCAASGFSFSDFWMSWVRQAPGKGLEWVATISQAGSEKDYVDSVKGRFTISRDNAKKSLYLQMNSLRAEDTAVYYCASGVYSFDYRGQGTLVTVSSGTGGGGSGGGGSGGGGSEFDIQMTQSPSSLSASVGDRVTITCKASDHINNWLAWYQQKPGQAPKLLIYGATTLETGVPSRFSGSGSGTDYTLTISSLQPEDFATYYCQQSWNTPWTFGQGTKLEIKRLEDLKNVFPPEVAVFEPSEAEISHTQKATLVCLATGFYPDHVELSWWVNGKEVHSGVCTDPQPLKEQPALNDSRYCLSSRLRVSATFWQNPRNHFRCQVQFYGLSENDEWTQDRAKPVTQIVSAEAWGRADDVIKIHWQEKKSNTILGSQEGNTMKTNDTYMKFSWLTVPEKSLDKEHRCIVRHENNKNGVDQEIIFPPIKTDVITMDPKDNCSKDANDTLLLQLTNTSAYYMYLLLLLKSVVYFAIITCCLLRRTAFCCNGEKSRAKRSGSGATNFSLLKQAGDVEENPGPTSMDWIWRILFLVGAATGAHSGPQLQLQESGPGLVKPSETLSLTCTVSGDSISSGDYYWGWIRQPPGKGLEWIGHIYYSGVTYYNPSLKSRVTISVDTSRNQFSLKLSSVTAADTAVYYCTREDSSNWRSRGQGTLVTVSSGSGGGGSGGGGSGGGGSFEQVQLQQPGAELVKPGASVKMSCKASGYAFSSSWINWMKQKPGQGLEWIGQIYPGDGDTNYNGKFKGRATLTADTSSSTAYMQLSSLTSEDSAVYFCARSITTVVGCAMDYWGQGTSVTVSSTRIQNPDPAVYQLRDSKSSDKSVCLFTDFDSQTNVSQSKDSDVYITDKCVLDMRSMDFKSNSAVAWSNKSDFACANAFNNSIIPEDTFFPSPESSDSTDHVKPKETENTKQPSKSCHKPKAIVHTEKVNMMSLTVLGLRMLFAKTVAVNFLLTAKLFFL

SEQ ID NO: 43983 - protein, 622 aa, synthetic construct
MALPVTALLLPLALLLHAARPDIQMTQSPSSLSASVGDRVTITCKASDHINNWLAWYQQKPGQAPKLLIYGATTLETGVPSRFSGSGSGTDYTLTISSLQPEDFATYYCQQSWNTPWTFGQGTKLEIKRLEDLKNVFPPEVAVFEPSEAEISHTQKATLVCLATGFYPDHVELSWWVNGKEVHSGVSTDPQPLKEQPALNDSRYCLSSRLRVSATFWQNPRNHFRCQVQFYGLSENDEWTQDRAKPVTQIVSAEAWGRADCDVKLVEKSFETDTNLNFQNLSVIGFRILLLKVAGFNLLMTLRLWSSRAKRSGSGATNFSLLKQAGDVEENPGPTSMDWIWRILFLVGAATGAHSFEQVQLQQPGAELVKPGASVKMSCKASGYAFSSSWINWMKQKPGQGLEWIGQIYPGDGDTNYNGKFKGRATLTADTSSSTAYMQLSSLTSEDSAVYFCARSITTVVGCAMDYWGQGTSVTVSSTRIQNPDPAVYQLRDSKSSDKSVCLFTDFDSQTNVSQSKDSDVYITDKTVLDMRSMDFKSNSAVAWSNKSDFACANAFNNSIIPEDTFFPSPESSCGFTSESYQQGVLSATILYEILLGKATLYAVLVSALVLMAMVKRKDSRG

SEQ ID NO: 43984 - protein, 622 aa, synthetic construct
MALPVTALLLPLALLLHAARPDIQMTQSPSSLSASVGDRVTITCKASDHINNWLAWYQQKPGQAPKLLIYGATTLETGVPSRFSGSGSGTDYTLTISSLQPEDFATYYCQQSWNTPWTFGQGTKLEIKRLEDLKNVFPPEVAVFEPSEAEISHTQKATLVCLATGFYPDHVELSWWVNGKEVHSGVSTDPQPLKEQPALNDSRYCLSSRLRVSATFWQNPRNHFRCQVQFYGLSENDEWTQDRAKPVTQIVSAEAWGRADCGFTSESYQQGVLSATNLSVIGFRILLLKVAGFNLLMTLRLWSSRAKRSGSGATNFSLLKQAGDVEENPGPTSMDWIWRILFLVGAATGAHSFEQVQLQQPGAELVKPGASVKMSCKASGYAFSSSWINWMKQKPGQGLEWIGQIYPGDGDTNYNGKFKGRATLTADTSSSTAYMQLSSLTSEDSAVYFCARSITTVVGCAMDYWGQGTSVTVSSTRIQNPDPAVYQLRDSKSSDKSVCLFTDFDSQTNVSQSKDSDVYITDKTVLDMRSMDFKSNSAVAWSNKSDFACANAFNNSIIPEDTFFPSPESSCDVKLVEKSFETDTNLNFQILYEILLGKATLYAVLVSALVLMAMVKRKDSRG

SEQ ID NO: 43985 - protein, 726 aa, synthetic construct
MALPVTALLLPLALLLHAARPDIQMTQSPSSLSASVGDRVTITCKASDHINNWLAWYQQKPGQAPKLLIYGATTLETGVPSRFSGSGSGTDYTLTISSLQPEDFATYYCQQSWNTPWTFGQGTKLEIKRLEDLKNVFPPEVAVFEPSEAEISHTQKATLVCLATGFYPDHVELSWWVNGKEVHSGVSTDPQPLKEQPALNDSRYCLSSRLRVSATFWQNPRNHFRCQVQFYGLSENDEWTQDRAKPVTQIVSAEAWGRADDVIKIHWQEKKSNTILGSQEGNTMKTNDTYMKFSWLTVPEKSLDKEHRCIVRHENNKNGVDQEIIFPPIKTDVITMDPKDNCSKDANDTLLLQLTNTSAYYMYLLLLLKSVVYFAIITCCLLMAMVKRKDSRGRAKRSGSGATNFSLLKQAGDVEENPGPTSMDWIWRILFLVGAATGAHSFEQVQLQQPGAELVKPGASVKMSCKASGYAFSSSWINWMKQKPGQGLEWIGQIYPGDGDTNYNGKFKGRATLTADTSSSTAYMQLSSLTSEDSAVYFCARSITTVVGCAMDYWGQGTSVTVSSTRIQNPDPAVYQLRDSKSSDKSVCLFTDFDSQTNVSQSKDSDVYITDKTVLDMRSMDFKSNSAVAWSNKSDFACANAFNNSIIPEDTFFPSPESSDSTDHVKPKETENTKQPSKSCHKPKAIVHTEKVNMMSLTVLGLRMLFAKTVAVNFLLTAKLFFLLTA

SEQ ID NO: 43986 - protein, 724 aa, synthetic construct
MALPVTALLLPLALLLHAARPDIQMTQSPSSLSASVGDRVTITCKASDHINNWLAWYQQKPGQAPKLLIYGATTLETGVPSRFSGSGSGTDYTLTISSLQPEDFATYYCQQSWNTPWTFGQGTKLEIKRLEDLKNVFPPEVAVFEPSEAEISHTQKATLVCLATGFYPDHVELSWWVNGKEVHSGVSTDPQPLKEQPALNDSRYCLSSRLRVSATFWQNPRNHFRCQVQFYGLSENDEWTQDRAKPVTQIVSAEAWGRADDVIKIHWQEKKSNTILGSQEGNTMKTNDTYMKFSWLTVPEKSLDKEHRCIVRHENNKNGVDQEIIFPPIKTDVITMDPKDNCSKDANDTLLLQLTNTSAYYMYLLLLLKSVVYFAIITCCLLRRTAFCCNGEKSRAKRSGSGATNFSLLKQAGDVEENPGPTSMDWIWRILFLVGAATGAHSFEQVQLQQPGAELVKPGASVKMSCKASGYAFSSSWINWMKQKPGQGLEWIGQIYPGDGDTNYNGKFKGRATLTADTSSSTAYMQLSSLTSEDSAVYFCARSITTVVGCAMDYWGQGTSVTVSSTRIQNPDPAVYQLRDSKSSDKSVCLFTDFDSQTNVSQSKDSDVYITDKTVLDMRSMDFKSNSAVAWSNKSDFACANAFNNSIIPEDTFFPSPESSDSTDHVKPKETENTKQPSKSCHKPKAIVHTEKVNMMSLTVLGLRMLFAKTVAVNFLLTAKLFFL

SEQ ID NO: 43987 - protein, 867 aa, synthetic construct
MALPVTALLLPLALLLHAARPLEEDLKNVFPPEVAVFEPSEAEISHTQKATLVCLATGFYPDHVELSWWVNGKEVHSGVCTDPQPLKEQPALNDSRYCLSSRLRVSATFWQNPRNHFRCQVQFYGLSENDEWTQDRAKPVTQIVSAEAWGRADCGFTSESYQQGVLSATNLSVIGFRILLLKVAGFNLLMTLRLWSSRAKRSGSGATNFSLLKQAGDVEENPGPTSMALPVTALLLPLALLLHAARPDIQMTQSPSSLSASVGDRVTITCKASDHINNWLAWYQQKPGQAPKLLIYGATTLETGVPSRFSGSGSGTDYTLTISSLQPEDFATYYCQQSWNTPWTFGQGTKLEIKRGGGGSGGGGSGGGGSQVQLQQPGAELVKPGASVKMSCKASGYAFSSSWINWMKQKPGQGLEWIGQIYPGDGDTNYNGKFKGRATLTADTSSSTAYMQLSSLTSEDSAVYFCARSITTVVGCAMDYWGQGTSVTVSSTRIQNPDPAVYQLRDSKSSDKSVCLFTDFDSQTNVSQSKDSDVYITDKCVLDMRSMDFKSNSAVAWSNKSDFACANAFNNSIIPEDTFFPSPESSCDVKLVEKSFETDTNLNFQILYEVIGFRILLLKVAGFNLLMTLRLWSSRAKRSGSGVKQTLNFDLLKLAGDVESNPGPSRGHMTEYKPTVRLATRDDVPRAVRTLAAAFADYPATRHTVDPDRHIERVTELQELFLTRVGLDIGKVWVADDGAAVAVWTTPESVEAGAVFAEIGPRMAELSGSRLAAQQQMEGLLAPHRPKEPAWFLATVGVSPDHQGKGLGSAVVLPGVEAAERAGVPAFLETSAPRNLPFYERLGFTVTADVEVPEGPRTWCMTRKPGA

SEQ ID NO: 43988 - protein, 867 aa, synthetic construct
MALPVTALLLPLALLLHAARPLEIQNPDPAVYQLRDSKSSDKSVCLFTDFDSQTNVSQSKDSDVYITDKCVLDMRSMDFKSNSAVAWSNKSDFACANAFNNSIIPEDTFFPSPESSCDVKLVEKSFETDTNLNFQILYEVIGFRILLLKVAGFNLLMTLRLWSSRAKRSGSGATNFSLLKQAGDVEENPGPTSMALPVTALLLPLALLLHAARPDIQMTQSPSSLSASVGDRVTITCKASDHINNWLAWYQQKPGQAPKLLIYGATTLETGVPSRFSGSGSGTDYTLTISSLQPEDFATYYCQQSWNTPWTFGQGTKLEIKRGGGGSGGGGSGGGGSQVQLQQPGAELVKPGASVKMSCKASGYAFSSSWINWMKQKPGQGLEWIGQIYPGDGDTNYNGKFKGRATLTADTSSSTAYMQLSSLTSEDSAVYFCARSITTVVGCAMDYWGQGTSVTVSSTREDLKNVFPPEVAVFEPSEAEISHTQKATLVCLATGFYPDHVELSWWVNGKEVHSGVCTDPQPLKEQPALNDSRYCLSSRLRVSATFWQNPRNHFRCQVQFYGLSENDEWTQDRAKPVTQIVSAEAWGRADCGFTSESYQQGVLSATNLSVIGFRILLLKVAGFNLLMTLRLWSSRAKRSGSGVKQTLNFDLLKLAGDVESNPGPSRGHMTEYKPTVRLATRDDVPRAVRTLAAAFADYPATRHTVDPDRHIERVTELQELFLTRVGLDIGKVWVADDGAAVAVWTTPESVEAGAVFAEIGPRMAELSGSRLAAQQQMEGLLAPHRPKEPAWFLATVGVSPDHQGKGLGSAVVLPGVEAAERAGVPAFLETSAPRNLPFYERLGFTVTADVEVPEGPRTWCMTRKPGA

SEQ ID NO: 43989 - protein, 867 aa, synthetic construct; identical to SEQ ID NO: 43987

SEQ ID NO: 43990 - protein, 975 aa, synthetic construct
MALPVTALLLPLALLLHAARPLEEDLKNVFPPEVAVFEPSEAEISHTQKATLVCLATGFYPDHVELSWWVNGKEVHSGVSTDPQPLKEQPALNDSRYCLSSRLRVSATFWQNPRNHFRCQVQFYGLSENDEWTQDRAKPVTQIVSAEAWGRADDVIKIHWQEKKSNTILGSQEGNTMKTNDTYMKFSWLTVPEKSLDKEHRCIVRHENNKNGVDQEIIFPPIKTDVITMDPKDNCSKDANDTLLLQLTNTSAYYMYLLLLLKSVVYFAIITCCLLMAMVKRKDSRGRAKRSGSGATNFSLLKQAGDVEENPGPTSMALPVTALLLPLALLLHAARPDIQMTQSPSSLSASVGDRVTITCKASDHINNWLAWYQQKPGQAPKLLIYGATTLETGVPSRFSGSGSGTDYTLTISSLQPEDFATYYCQQSWNTPWTFGQGTKLEIKRGGGGSGGGGSGGGGSQVQLQQPGAELVKPGASVKMSCKASGYAFSSSWINWMKQKPGQGLEWIGQIYPGDGDTNYNGKFKGRATLTADTSSSTAYMQLSSLTSEDSAVYFCARSITTVVGCAMDYWGQGTSVTVSSTRIQNPDPAVYQLRDSKSSDKSVCLFTDFDSQTNVSQSKDSDVYITDKTVLDMRSMDFKSNSAVAWSNKSDFACANAFNNSIIPEDTFFPSPESSDSTDHVKPKETENTKQPSKSCHKPKAIVHTEKVNMMSLTVLGLRMLFAKTVAVNFLLTAKLFFLLTARAKRSGSGVKQTLNFDLLKLAGDVESNPGPSRGHMTEYKPTVRLATRDDVPRAVRTLAAAFADYPATRHTVDPDRHIERVTELQELFLTRVGLDIGKVWVADDGAAVAVWTTPESVEAGAVFAEIGPRMAELSGSRLAAQQQMEGLLAPHRPKEPAWFLATVGVSPDHQGKGLGSAVVLPGVEAAERAGVPAFLETSAPRNLPFYERLGFTVTADVEVPEGPRTWCMTRKPGA

SEQ ID NO: 43991 - protein, 975 aa, synthetic construct
MALPVTALLLPLALLLHAARPLEIQNPDPAVYQLRDSKSSDKSVCLFTDFDSQTNVSQSKDSDVYITDKTVLDMRSMDFKSNSAVAWSNKSDFACANAFNNSIIPEDTFFPSPESSDSTDHVKPKETENTKQPSKSCHKPKAIVHTEKVNMMSLTVLGLRMLFAKTVAVNFLLTAKLFFLLTARAKRSGSGATNFSLLKQAGDVEENPGPTSMALPVTALLLPLALLLHAARPDIQMTQSPSSLSASVGDRVTITCKASDHINNWLAWYQQKPGQAPKLLIYGATTLETGVPSRFSGSGSGTDYTLTISSLQPEDFATYYCQQSWNTPWTFGQGTKLEIKRGGGGSGGGGSGGGGSQVQLQQPGAELVKPGASVKMSCKASGYAFSSSWINWMKQKPGQGLEWIGQIYPGDGDTNYNGKFKGRATLTADTSSSTAYMQLSSLTSEDSAVYFCARSITTVVGCAMDYWGQGTSVTVSSTREDLKNVFPPEVAVFEPSEAEISHTQKATLVCLATGFYPDHVELSWWVNGKEVHSGVSTDPQPLKEQPALNDSRYCLSSRLRVSATFWQNPRNHFRCQVQFYGLSENDEWTQDRAKPVTQIVSAEAWGRADDVIKIHWQEKKSNTILGSQEGNTMKTNDTYMKFSWLTVPEKSLDKEHRCIVRHENNKNGVDQEIIFPPIKTDVITMDPKDNCSKDANDTLLLQLTNTSAYYMYLLLLLKSVVYFAIITCCLLMAMVKRKDSRGRAKRSGSGVKQTLNFDLLKLAGDVESNPGPSRGHMTEYKPTVRLATRDDVPRAVRTLAAAFADYPATRHTVDPDRHIERVTELQELFLTRVGLDIGKVWVADDGAAVAVWTTPESVEAGAVFAEIGPRMAELSGSRLAAQQQMEGLLAPHRPKEPAWFLATVGVSPDHQGKGLGSAVVLPGVEAAERAGVPAFLETSAPRNLPFYERLGFTVTADVEVPEGPRTWCMTRKPGA

SEQ ID NO: 43992 - protein, 973 aa, synthetic construct
MALPVTALLLPLALLLHAARPLEEDLKNVFPPEVAVFEPSEAEISHTQKATLVCLATGFYPDHVELSWWVNGKEVHSGVCTDPQPLKEQPALNDSRYCLSSRLRVSATFWQNPRNHFRCQVQFYGLSENDEWTQDRAKPVTQIVSAEAWGRADDVIKIHWQEKKSNTILGSQEGNTMKTNDTYMKFSWLTVPEKSLDKEHRCIVRHENNKNGVDQEIIFPPIKTDVITMDPKDNCSKDANDTLLLQLTNTSAYYMYLLLLLKSVVYFAIITCCLLRRTAFCCNGEKSRAKRSGSGATNFSLLKQAGDVEENPGPTSMALPVTALLLPLALLLHAARPDIQMTQSPSSLSASVGDRVTITCKASDHINNWLAWYQQKPGQAPKLLIYGATTLETGVPSRFSGSGSGTDYTLTISSLQPEDFATYYCQQSWNTPWTFGQGTKLEIKRGGGGSGGGGSGGGGSQVQLQQPGAELVKPGASVKMSCKASGYAFSSSWINWMKQKPGQGLEWIGQIYPGDGDTNYNGKFKGRATLTADTSSSTAYMQLSSLTSEDSAVYFCARSITTVVGCAMDYWGQGTSVTVSSTRIQNPDPAVYQLRDSKSSDKSVCLFTDFDSQTNVSQSKDSDVYITDKCVLDMRSMDFKSNSAVAWSNKSDFACANAFNNSIIPEDTFFPSPESSDSTDHVKPKETENTKQPSKSCHKPKAIVHTEKVNMMSLTVLGLRMLFAKTVAVNFLLTAKLFFLRAKRSGSGVKQTLNFDLLKLAGDVESNPGPSRGHMTEYKPTVRLATRDDVPRAVRTLAAAFADYPATRHTVDPDRHIERVTELQELFLTRVGLDIGKVWVADDGAAVAVWTTPESVEAGAVFAEIGPRMAELSGSRLAAQQQMEGLLAPHRPKEPAWFLATVGVSPDHQGKGLGSAVVLPGVEAAERAGVPAFLETSAPRNLPFYERLGFTVTADVEVPEGPRTWCMTRKPGA

SEQ ID NO: 43993 - protein, 973 aa, synthetic construct
MALPVTALLLPLALLLHAARPLEIQNPDPAVYQLRDSKSSDKSVCLFTDFDSQTNVSQSKDSDVYITDKCVLDMRSMDFKSNSAVAWSNKSDFACANAFNNSIIPEDTFFPSPESSDSTDHVKPKETENTKQPSKSCHKPKAIVHTEKVNMMSLTVLGLRMLFAKTVAVNFLLTAKLFFLRAKRSGSGATNFSLLKQAGDVEENPGPTSMALPVTALLLPLALLLHAARPDIQMTQSPSSLSASVGDRVTITCKASDHINNWLAWYQQKPGQAPKLLIYGATTLETGVPSRFSGSGSGTDYTLTISSLQPEDFATYYCQQSWNTPWTFGQGTKLEIKRGGGGSGGGGSGGGGSQVQLQQPGAELVKPGASVKMSCKASGYAFSSSWINWMKQKPGQGLEWIGQIYPGDGDTNYNGKFKGRATLTADTSSSTAYMQLSSLTSEDSAVYFCARSITTVVGCAMDYWGQGTSVTVSSTREDLKNVFPPEVAVFEPSEAEISHTQKATLVCLATGFYPDHVELSWWVNGKEVHSGVCTDPQPLKEQPALNDSRYCLSSRLRVSATFWQNPRNHFRCQVQFYGLSENDEWTQDRAKPVTQIVSAEAWGRADDVIKIHWQEKKSNTILGSQEGNTMKTNDTYMKFSWLTVPEKSLDKEHRCIVRHENNKNGVDQEIIFPPIKTDVITMDPKDNCSKDANDTLLLQLTNTSAYYMYLLLLLKSVVYFAIITCCLLRRTAFCCNGEKSRAKRSGSGVKQTLNFDLLKLAGDVESNPGPSRGHMTEYKPTVRLATRDDVPRAVRTLAAAFADYPATRHTVDPDRHIERVTELQELFLTRVGLDIGKVWVADDGAAVAVWTTPESVEAGAVFAEIGPRMAELSGSRLAAQQQMEGLLAPHRPKEPAWFLATVGVSPDHQGKGLGSAVVLPGVEAAERAGVPAFLETSAPRNLPFYERLGFTVTADVEVPEGPRTWCMTRKPGA

SEQ ID NO: 43994 - protein, 973 aa, synthetic construct
MALPVTALLLPLALLLHAARPLEEDLKNVFPPEVAVFEPSEAEISHTQKATLVCLATGFYPDHVELSWWVNGKEVHSGVSTDPQPLKEQPALNDSRYCLSSRLRVSATFWQNPRNHFRCQVQFYGLSENDEWTQDRAKPVTQIVSAEAWGRADDVIKIHWQEKKSNTILGSQEGNTMKTNDTYMKFSWLTVPEKSLDKEHRCIVRHENNKNGVDQEIIFPPIKTDVITMDPKDNCSKDANDTLLLQLTNTSAYYMYLLLLLKSVVYFAIITCCLLRRTAFCCNGEKSRAKRSGSGATNFSLLKQAGDVEENPGPTSMALPVTALLLPLALLLHAARPDIQMTQSPSSLSASVGDRVTITCKASDHINNWLAWYQQKPGQAPKLLIYGATTLETGVPSRFSGSGSGTDYTLTISSLQPEDFATYYCQQSWNTPWTFGQGTKLEIKRGGGGSGGGGSGGGGSQVQLQQPGAELVKPGASVKMSCKASGYAFSSSWINWMKQKPGQGLEWIGQIYPGDGDTNYNGKFKGRATLTADTSSSTAYMQLSSLTSEDSAVYFCARSITTVVGCAMDYWGQGTSVTVSSTRIQNPDPAVYQLRDSKSSDKSVCLFTDFDSQTNVSQSKDSDVYITDKTVLDMRSMDFKSNSAVAWSNKSDFACANAFNNSIIPEDTFFPSPESSDSTDHVKPKETENTKQPSKSCHKPKAIVHTEKVNMMSLTVLGLRMLFAKTVAVNFLLTAKLFFLRAKRSGSGVKQTLNFDLLKLAGDVESNPGPSRGHMTEYKPTVRLATRDDVPRAVRTLAAAFADYPATRHTVDPDRHIERVTELQELFLTRVGLDIGKVWVADDGAAVAVWTTPESVEAGAVFAEIGPRMAELSGSRLAAQQQMEGLLAPHRPKEPAWFLATVGVSPDHQGKGLGSAVVLPGVEAAERAGVPAFLETSAPRNLPFYERLGFTVTADVEVPEGPRTWCMTRKPGA

SEQ ID NO: 43995 - protein, 973 aa, synthetic construct
MALPVTALLLPLALLLHAARPLEIQNPDPAVYQLRDSKSSDKSVCLFTDFDSQTNVSQSKDSDVYITDKTVLDMRSMDFKSNSAVAWSNKSDFACANAFNNSIIPEDTFFPSPESSDSTDHVKPKETENTKQPSKSCHKPKAIVHTEKVNMMSLTVLGLRMLFAKTVAVNFLLTAKLFFLRAKRSGSGATNFSLLKQAGDVEENPGPTSMALPVTALLLPLALLLHAARPDIQMTQSPSSLSASVGDRVTITCKASDHINNWLAWYQQKPGQAPKLLIYGATTLETGVPSRFSGSGSGTDYTLTISSLQPEDFATYYCQQSWNTPWTFGQGTKLEIKRGGGGSGGGGSGGGGSQVQLQQPGAELVKPGASVKMSCKASGYAFSSSWINWMKQKPGQGLEWIGQIYPGDGDTNYNGKFKGRATLTADTSSSTAYMQLSSLTSEDSAVYFCARSITTVVGCAMDYWGQGTSVTVSSTREDLKNVFPPEVAVFEPSEAEISHTQKATLVCLATGFYPDHVELSWWVNGKEVHSGVSTDPQPLKEQPALNDSRYCLSSRLRVSATFWQNPRNHFRCQVQFYGLSENDEWTQDRAKPVTQIVSAEAWGRADDVIKIHWQEKKSNTILGSQEGNTMKTNDTYMKFSWLTVPEKSLDKEHRCIVRHENNKNGVDQEIIFPPIKTDVITMDPKDNCSKDANDTLLLQLTNTSAYYMYLLLLLKSVVYFAIITCCLLRRTAFCCNGEKSRAKRSGSGVKQTLNFDLLKLAGDVESNPGPSRGHMTEYKPTVRLATRDDVPRAVRTLAAAFADYPATRHTVDPDRHIERVTELQELFLTRVGLDIGKVWVADDGAAVAVWTTPESVEAGAVFAEIGPRMAELSGSRLAAQQQMEGLLAPHRPKEPAWFLATVGVSPDHQGKGLGSAVVLPGVEAAERAGVPAFLETSAPRNLPFYERLGFTVTADVEVPEGPRTWCMTRKPGA

SEQ ID NO: 43996 - protein, 871 aa, synthetic construct
MALPVTALLLPLALLLHAARPLEEDLKNVFPPEVAVFEPSKAEIAHTQKATLVCLATGFYPDHVELSWWVNGKEVHSGVCTDPQPLKEQPALNDSRYCLSSRLRVSATFWQNPRNHFRCQVQFYGLSENDEWTQDRAKPVTQIVSAEAWGRADCGITSASYHQGVLSATILYEILLGKATLYAVLVSALVLMAMVKRKDSRGRAKRSGSGATNFSLLKQAGDVEENPGPTSMALPVTALLLPLALLLHAARPDIQMTQSPSSLSASVGDRVTITCKASDHINNWLAWYQQKPGQAPKLLIYGATTLETGVPSRFSGSGSGTDYTLTISSLQPEDFATYYCQQSWNTPWTFGQGTKLEIKRGGGGSGGGGSGGGGSQVQLQQPGAELVKPGASVKMSCKASGYAFSSSWINWMKQKPGQGLEWIGQIYPGDGDTNYNGKFKGRATLTADTSSSTAYMQLSSLTSEDSAVYFCARSITTVVGCAMDYWGQGTSVTVSSTRIQNPDPAVYQLRDSKSSDKSVCLFTDFDSQTNVSQSKDSDVYITDKCVLDMRSMDFKSNSAVAWSNKSDFACANAFNNSIIPEDTFFPSSDVPCDVKLVEKSFETDTNLNFQNLSVIGFRILLLKVAGFNLLMTLRLWSSRAKRSGSGVKQTLNFDLLKLAGDVESNPGPSRGHMTEYKPTVRLATRDDVPRAVRTLAAAFADYPATRHTVDPDRHIERVTELQELFLTRVGLDIGKVWVADDGAAVAVWTTPESVEAGAVFAEIGPRMAELSGSRLAAQQQMEGLLAPHRPKEPAWFLATVGVSPDHQGKGLGSAVVLPGVEAAERAGVPAFLETSAPRNLPFYERLGFTVTADVEVPEGPRTWCMTRKPGA

SEQ ID NO: 43997 - protein, 871 aa, synthetic construct
MALPVTALLLPLALLLHAARPLEIQNPDPAVYQLRDSKSSDKSVCLFTDFDSQTNVSQSKDSDVYITDKCVLDMRSMDFKSNSAVAWSNKSDFACANAFNNSIIPEDTFFPSSDVPCDVKLVEKSFETDTNLNFQNLSVIGFRILLLKVAGFNLLMTLRLWSSRAKRSGSGATNFSLLKQAGDVEENPGPTSMALPVTALLLPLALLLHAARPDIQMTQSPSSLSASVGDRVTITCKASDHINNWLAWYQQKPGQAPKLLIYGATTLETGVPSRFSGSGSGTDYTLTISSLQPEDFATYYCQQSWNTPWTFGQGTKLEIKRGGGGSGGGGSGGGGSQVQLQQPGAELVKPGASVKMSCKASGYAFSSSWINWMKQKPGQGLEWIGQIYPGDGDTNYNGKFKGRATLTADTSSSTAYMQLSSLTSEDSAVYFCARSITTVVGCAMDYWGQGTSVTVSSTREDLKNVFPPEVAVFEPSKAEIAHTQKATLVCLATGFYPDHVELSWWVNGKEVHSGVCTDPQPLKEQPALNDSRYCLSSRLRVSATFWQNPRNHFRCQVQFYGLSENDEWTQDRAKPVTQIVSAEAWGRADCGITSASYHQGVLSATILYEILLGKATLYAVLVSALVLMAMVKRKDSRGRAKRSGSGVKQTLNFDLLKLAGDVESNPGPSRGHMTEYKPTVRLATRDDVPRAVRTLAAAFADYPATRHTVDPDRHIERVTELQELFLTRVGLDIGKVWVADDGAAVAVWTTPESVEAGAVFAEIGPRMAELSGSRLAAQQQMEGLLAPHRPKEPAWFLATVGVSPDHQGKGLGSAVVLPGVEAAERAGVPAFLETSAPRNLPFYERLGFTVTADVEVPEGPRTWCMTRKPGA

SEQ ID NO: 43998 - protein, 764 aa, synthetic construct
MALPVTALLLPLALLLHAARPLEQSFGLLDPKLCYLLDGILFIYGVILTALFLRVKFSRSADAPAYQQGQNQLYNELNLGRREEYDVLDKRRGRDPEMGGKPQRRKNPQEGLYNELQKDKMAEAYSEIGMKGERRRGKGHDGLYQGLSTATKDTYDALHMQALPPRRAKRSGSGATNFSLLKQAGDVEENPGPTSMALPVTALLLPLALLLHAARPDIQMTQSPSSLSASVGDRVTITCKASDHINNWLAWYQQKPGQAPKLLIYGATTLETGVPSRFSGSGSGTDYTLTISSLQPEDFATYYCQQSWNTPWTFGQGTKLEIKRGGGGSGGGGSGGGGSQVQLQQPGAELVKPGASVKMSCKASGYAFSSSWINWMKQKPGQGLEWIGQIYPGDGDTNYNGKFKGRATLTADTSSSTAYMQLSSLTSEDSAVYFCARSITTVVGCAMDYWGQGTSVTVSSTRELGEPQLCYILDAILFLYGIVLTLLYCRLKIQVRKAAITSYEKSDGVYTGLSTRNQETYETLKHEKPPQRAKRSGSGVKQTLNFDLLKLAGDVESNPGPSRGHMTEYKPTVRLATRDDVPRAVRTLAAAFADYPATRHTVDPDRHIERVTELQELFLTRVGLDIGKVWVADDGAAVAVWTTPESVEAGAVFAEIGPRMAELSGSRLAAQQQMEGLLAPHRPKEPAWFLATVGVSPDHQGKGLGSAVVLPGVEAAERAGVPAFLETSAPRNLPFYERLGFTVTADVEVPEGPRTWCMTRKPGA

SEQ ID NO: 43999 - protein, 975 aa, synthetic construct; identical to SEQ ID NO: 43990

SEQ ID NO: 44000 - protein, 975 aa, synthetic construct; identical to SEQ ID NO: 43991

SEQ ID NO: 44001 - protein, 974 aa, synthetic construct
MALPVTALLLPLALLLHAARPLEEEDLKNVFPPEVAVFEPSEAEISHTQKATLVCLATGFYPDHVELSWWVNGKEVHSGVCTDPQPLKEQPALNDSRYCLSSRLRVSATFWQNPRNHFRCQVQFYGLSENDEWTQDRAKPVTQIVSAEAWGRADDVIKIHWQEKKSNTILGSQEGNTMKTNDTYMKFSWLTVPEKSLDKEHRCIVRHENNKNGVDQEIIFPPIKTDVITMDPKDNCSKDANDTLLLQLTNTSAYYMYLLLLLKSVVYFAIITCCLLRRTAFCCNGEKSRAKRSGSGATNFSLLKQAGDVEENPGPTSMALPVTALLLPLALLLHAARPDIQMTQSPSSLSASVGDRVTITCKASDHINNWLAWYQQKPGQAPKLLIYGATTLETGVPSRFSGSGSGTDYTLTISSLQPEDFATYYCQQSWNTPWTFGQGTKLEIKRGGGGSGGGGSGGGGSQVQLQQPGAELVKPGASVKMSCKASGYAFSSSWINWMKQKPGQGLEWIGQIYPGDGDTNYNGKFKGRATLTADTSSSTAYMQLSSLTSEDSAVYFCARSITTVVGCAMDYWGQGTSVTVSSTRIQNPDPAVYQLRDSKSSDKSVCLFTDFDSQTNVSQSKDSDVYITDKCVLDMRSMDFKSNSAVAWSNKSDFACANAFNNSIIPEDTFFPSPESSDSTDHVKPKETENTKQPSKSCHKPKAIVHTEKVNMMSLTVLGLRMLFAKTVAVNFLLTAKLFFLRAKRSGSGVKQTLNFDLLKLAGDVESNPGPSRGHMTEYKPTVRLATRDDVPRAVRTLAAAFADYPATRHTVDPDRHIERVTELQELFLTRVGLDIGKVWVADDGAAVAVWTTPESVEAGAVFAEIGPRMAELSGSRLAAQQQMEGLLAPHRPKEPAWFLATVGVSPDHQGKGLGSAVVLPGVEAAERAGVPAFLETSAPRNLPFYERLGFTVTADVEVPEGPRTWCMTRKPGA

SEQ ID NO: 44002 - protein, 974 aa, synthetic construct
MALPVTALLLPLALLLHAARPLEIQNPDPAVYQLRDSKSSDKSVCLFTDFDSQTNVSQSKDSDVYITDKCVLDMRSMDFKSNSAVAWSNKSDFACANAFNNSIIPEDTFFPSPESSDSTDHVKPKETENTKQPSKSCHKPKAIVHTEKVNMMSLTVLGLRMLFAKTVAVNFLLTAKLFFLRAKRSGSGATNFSLLKQAGDVEENPGPTSMALPVTALLLPLALLLHAARPDIQMTQSPSSLSASVGDRVTITCKASDHINNWLAWYQQKPGQAPKLLIYGATTLETGVPSRFSGSGSGTDYTLTISSLQPEDFATYYCQQSWNTPWTFGQGTKLEIKRGGGGSGGGGSGGGGSQVQLQQPGAELVKPGASVKMSCKASGYAFSSSWINWMKQKPGQGLEWIGQIYPGDGDTNYNGKFKGRATLTADTSSSTAYMQLSSLTSEDSAVYFCARSITTVVGCAMDYWGQGTSVTVSSTREEDLKNVFPPEVAVFEPSEAEISHTQKATLVCLATGFYPDHVELSWWVNGKEVHSGVCTDPQPLKEQPALNDSRYCLSSRLRVSATFWQNPRNHFRCQVQFYGLSENDEWTQDRAKPVTQIVSAEAWGRADDVIKIHWQEKKSNTILGSQEGNTMKTNDTYMKFSWLTVPEKSLDKEHRCIVRHENNKNGVDQEIIFPPIKTDVITMDPKDNCSKDANDTLLLQLTNTSAYYMYLLLLLKSVVYFAIITCCLLRRTAFCCNGEKSRAKRSGSGVKQTLNFDLLKLAGDVESNPGPSRGHMTEYKPTVRLATRDDVPRAVRTLAAAFADYPATRHTVDPDRHIERVTELQELFLTRVGLDIGKVWVADDGAAVAVWTTPESVEAGAVFAEIGPRMAELSGSRLAAQQQMEGLLAPHRPKEPAWFLATVGVSPDHQGKGLGSAVVLPGVEAAERAGVPAFLETSAPRNLPFYERLGFTVTADVEVPEGPRTWCMTRKPGA

SEQ ID NO: 44003 - protein, 871 aa, synthetic construct
MALPVTALLLPLALLLHAARPLEEDLKNVFPPEVAVFEPSEAEISHTQKATLVCLATGFYPDHVELSWWVNGKEVHSGVSTDPQPLKEQPALNDSRYCLSSRLRVSATFWQNPRNHFRCQVQFYGLSENDEWTQDRAKPVTQIVSAEAWGRADCGFTSESYQQGVLSATNLSVIGFRILLLKVAGFNLLMTLRLWSSRAKRSGSGATNFSLLKQAGDVEENPGPTSMALPVTALLLPLALLLHAARPDIQMTQSPSSLSASVGDRVTITCKASDHINNWLAWYQQKPGQAPKLLIYGATTLETGVPSRFSGSGSGTDYTLTISSLQPEDFATYYCQQSWNTPWTFGQGTKLEIKRGGGGSGGGGSGGGGSQVQLQQPGAELVKPGASVKMSCKASGYAFSSSWINWMKQKPGQGLEWIGQIYPGDGDTNYNGKFKGRATLTADTSSSTAYMQLSSLTSEDSAVYFCARSITTVVGCAMDYWGQGTSVTVSSTRIQNPDPAVYQLRDSKSSDKSVCLFTDFDSQTNVSQSKDSDVYITDKTVLDMRSMDFKSNSAVAWSNKSDFACANAFNNSIIPEDTFFPSPESSCDVKLVEKSFETDTNLNFQILYEILLGKATLYAVLVSALVLMAMVKRKDSRGRAKRSGSGVKQTLNFDLLKLAGDVESNPGPSRGHMTEYKPTVRLATRDDVPRAVRTLAAAFADYPATRHTVDPDRHIERVTELQELFLTRVGLDIGKVWVADDGAAVAVWTTPESVEAGAVFAEIGPRMAELSGSRLAAQQQMEGLLAPHRPKEPAWFLATVGVSPDHQGKGLGSAVVLPGVEAAERAGVPAFLETSAPRNLPFYERLGFTVTADVEVPEGPRTWCMTRKPGA

SEQ ID NO: 44004 - protein, 871 aa, synthetic construct
MALPVTALLLPLALLLHAARPLEIQNPDPAVYQLRDSKSSDKSVCLFTDFDSQTNVSQSKDSDVYITDKTVLDMRSMDFKSNSAVAWSNKSDFACANAFNNSIIPEDTFFPSPESSCDVKLVEKSFETDTNLNFQILYEILLGKATLYAVLVSALVLMAMVKRKDSRGRAKRSGSGATNFSLLKQAGDVEENPGPTSMALPVTALLLPLALLLHAARPDIQMTQSPSSLSASVGDRVTITCKASDHINNWLAWYQQKPGQAPKLLIYGATTLETGVPSRFSGSGSGTDYTLTISSLQPEDFATYYCQQSWNTPWTFGQGTKLEIKRGGGGSGGGGSGGGGSQVQLQQPGAELVKPGASVKMSCKASGYAFSSSWINWMKQKPGQGLEWIGQIYPGDGDTNYNGKFKGRATLTADTSSSTAYMQLSSLTSEDSAVYFCARSITTVVGCAMDYWGQGTSVTVSSTREDLKNVFPPEVAVFEPSEAEISHTQKATLVCLATGFYPDHVELSWWVNGKEVHSGVSTDPQPLKEQPALNDSRYCLSSRLRVSATFWQNPRNHFRCQVQFYGLSENDEWTQDRAKPVTQIVSAEAWGRADCGFTSESYQQGVLSATNLSVIGFRILLLKVAGFNLLMTLRLWSSRAKRSGSGVKQTLNFDLLKLAGDVESNPGPSRGHMTEYKPTVRLATRDDVPRAVRTLAAAFADYPATRHTVDPDRHIERVTELQELFLTRVGLDIGKVWVADDGAAVAVWTTPESVEAGAVFAEIGPRMAELSGSRLAAQQQMEGLLAPHRPKEPAWFLATVGVSPDHQGKGLGSAVVLPGVEAAERAGVPAFLETSAPRNLPFYERLGFTVTADVEVPEGPRTWCMTRKPGA

SEQ ID NO: 44005 - protein, 871 aa, synthetic construct
MALPVTALLLPLALLLHAARPLEEDLKNVFPPEVAVFEPSEAEISHTQKATLVCLATGFYPDHVELSWWVNGKEVHSGVCTDPQPLKEQPALNDSRYCLSSRLRVSATFWQNPRNHFRCQVQFYGLSENDEWTQDRAKPVTQIVSAEAWGRADCDVKLVEKSFETDTNLNFQNLSVIGFRILLLKVAGFNLLMTLRLWSSRAKRSGSGATNFSLLKQAGDVEENPGPTSMALPVTALLLPLALLLHAARPDIQMTQSPSSLSASVGDRVTITCKASDHINNWLAWYQQKPGQAPKLLIYGATTLETGVPSRFSGSGSGTDYTLTISSLQPEDFATYYCQQSWNTPWTFGQGTKLEIKRGGGGSGGGGSGGGGSQVQLQQPGAELVKPGASVKMSCKASGYAFSSSWINWMKQKPGQGLEWIGQIYPGDGDTNYNGKFKGRATLTADTSSSTAYMQLSSLTSEDSAVYFCARSITTVVGCAMDYWGQGTSVTVSSTRIQNPDPAVYQLRDSKSSDKSVCLFTDFDSQTNVSQSKDSDVYITDKCVLDMRSMDFKSNSAVAWSNKSDFACANAFNNSIIPEDTFFPSPESSCGFTSESYQQGVLSATILYEILLGKATLYAVLVSALVLMAMVKRKDSRGRAKRSGSGVKQTLNFDLLKLAGDVESNPGPSRGHMTEYKPTVRLATRDDVPRAVRTLAAAFADYPATRHTVDPDRHIERVTELQELFLTRVGLDIGKVWVADDGAAVAVWTTPESVEAGAVFAEIGPRMAELSGSRLAAQQQMEGLLAPHRPKEPAWFLATVGVSPDHQGKGLGSAVVLPGVEAAERAGVPAFLETSAPRNLPFYERLGFTVTADVEVPEGPRTWCMTRKPGA

SEQ ID NO: 44006 - protein, 871 aa, synthetic construct
MALPVTALLLPLALLLHAARPLEEDLKNVFPPEVAVFEPSEAEISHTQKATLVCLATGFYPDHVELSWWVNGKEVHSGVSTDPQPLKEQPALNDSRYCLSSRLRVSATFWQNPRNHFRCQVQFYGLSENDEWTQDRAKPVTQIVSAEAWGRADCDVKLVEKSFETDTNLNFQNLSVIGFRILLLKVAGFNLLMTLRLWSSRAKRSGSGATNFSLLKQAGDVEENPGPTSMALPVTALLLPLALLLHAARPDIQMTQSPSSLSASVGDRVTITCKASDHINNWLAWYQQKPGQAPKLLIYGATTLETGVPSRFSGSGSGTDYTLTISSLQPEDFATYYCQQSWNTPWTFGQGTKLEIKRGGGGSGGGGSGGGGSQVQLQQPGAELVKPGASVKMSCKASGYAFSSSWINWMKQKPGQGLEWIGQIYPGDGDTNYNGKFKGRATLTADTSSSTAYMQLSSLTSEDSAVYFCARSITTVVGCAMDYWGQGTSVTVSSTRIQNPDPAVYQLRDSKSSDKSVCLFTDFDSQTNVSQSKDSDVYITDKTVLDMRSMDFKSNSAVAWSNKSDFACANAFNNSIIPEDTFFPSPESSCGFTSESYQQGVLSATILYEILLGKATLYAVLVSALVLMAMVKRKDSRGRAKRSGSGVKQTLNFDLLKLAGDVESNPGPSRGHMTEYKPTVRLATRDDVPRAVRTLAAAFADYPATRHTVDPDRHIERVTELQELFLTRVGLDIGKVWVADDGAAVAVWTTPESVEAGAVFAEIGPRMAELSGSRLAAQQQMEGLLAPHRPKEPAWFLATVGVSPDHQGKGLGSAVVLPGVEAAERAGVPAFLETSAPRNLPFYERLGFTVTADVEVPEGPRTWCMTRKPGA

SEQ ID NO: 44007 - protein, 974 aa, synthetic construct
MALPVTALLLPLALLLHAARPLEEEDLKNVFPPEVAVFEPSEAEISHTQKATLVCLATGFYPDHVELSWWVNGKEVHSGVSTDPQPLKEQPALNDSRYCLSSRLRVSATFWQNPRNHFRCQVQFYGLSENDEWTQDRAKPVTQIVSAEAWGRADDVIKIHWQEKKSNTILGSQEGNTMKTNDTYMKFSWLTVPEKSLDKEHRCIVRHENNKNGVDQEIIFPPIKTDVITMDPKDNCSKDANDTLLLQLTNTSAYYMYLLLLLKSVVYFAIITCCLLRRTAFCCNGEKSRAKRSGSGATNFSLLKQAGDVEENPGPTSMALPVTALLLPLALLLHAARPDIQMTQSPSSLSASVGDRVTITCKASDHINNWLAWYQQKPGQAPKLLIYGATTLETGVPSRFSGSGSGTDYTLTISSLQPEDFATYYCQQSWNTPWTFGQGTKLEIKRGGGGSGGGGSGGGGSQVQLQQPGAELVKPGASVKMSCKASGYAFSSSWINWMKQKPGQGLEWIGQIYPGDGDTNYNGKFKGRATLTADTSSSTAYMQLSSLTSEDSAVYFCARSITTVVGCAMDYWGQGTSVTVSSTRIQNPDPAVYQLRDSKSSDKSVCLFTDFDSQTNVSQSKDSDVYITDKTVLDMRSMDFKSNSAVAWSNKSDFACANAFNNSIIPEDTFFPSPESSDSTDHVKPKETENTKQPSKSCHKPKAIVHTEKVNMMSLTVLGLRMLFAKTVAVNFLLTAKLFFLRAKRSGSGVKQTLNFDLLKLAGDVESNPGPSRGHMTEYKPTVRLATRDDVPRAVRTLAAAFADYPATRHTVDPDRHIERVTELQELFLTRVGLDIGKVWVADDGAAVAVWTTPESVEAGAVFAEIGPRMAELSGSRLAAQQQMEGLLAPHRPKEPAWFLATVGVSPDHQGKGLGSAVVLPGVEAAERAGVPAFLETSAPRNLPFYERLGFTVTADVEVPEGPRTWCMTRKPGA

SEQ ID NO: 44008 - protein, 871 aa, synthetic construct
MALPVTALLLPLALLLHAARPLEEDLKNVFPPEVAVFEPSEAEISHTQKATLVCLATGFYPDHVELSWWVNGKEVHSGVCTDPQPLKEQPALNDSRYCLSSRLRVSATFWQNPRNHFRCQVQFYGLSENDEWTQDRAKPVTQIVSAEAWGRADCGFTSESYQQGVLSATNLSVIGFRILLLKVAGFNLLMTLRLWSSRAKRSGSGATNFSLLKQAGDVEENPGPTSMALPVTALLLPLALLLHAARPDIQMTQSPSSLSASVGDRVTITCKASDHINNWLAWYQQKPGQAPKLLIYGATTLETGVPSRFSGSGSGTDYTLTISSLQPEDFATYYCQQSWNTPWTFGQGTKLEIKRGGGGSGGGGSGGGGSQVQLQQPGAELVKPGASVKMSCKASGYAFSSSWINWMKQKPGQGLEWIGQIYPGDGDTNYNGKFKGRATLTADTSSSTAYMQLSSLTSEDSAVYFCARSITTVVGCAMDYWGQGTSVTVSSTRIQNPDPAVYQLRDSKSSDKSVCLFTDFDSQTNVSQSKDSDVYITDKCVLDMRSMDFKSNSAVAWSNKSDFACANAFNNSIIPEDTFFPSPESSCDVKLVEKSFETDTNLNFQILYEILLGKATLYAVLVSALVLMAMVKRKDSRGRAKRSGSGVKQTLNFDLLKLAGDVESNPGPSRGHMTEYKPTVRLATRDDVPRAVRTLAAAFADYPATRHTVDPDRHIERVTELQELFLTRVGLDIGKVWVADDGAAVAVWTTPESVEAGAVFAEIGPRMAELSGSRLAAQQQMEGLLAPHRPKEPAWFLATVGVSPDHQGKGLGSAVVLPGVEAAERAGVPAFLETSAPRNLPFYERLGFTVTADVEVPEGPRTWCMTRKPGA

SEQ ID NO: 44009 - protein, 900 aa, synthetic construct
MALPVTALLLPLALLLHAARPLEEEDLKNVFPPEVAVFEPSEAEISHTQKATLVCLATGFYPDHVELSWWVNGKEVHSGVCTDPQPLKEQPALNDSRYCLSSRLRVSATFWQNPRNHFRCQVQFYGLSENDEWTQDRAKPVTQIVSAEAWGRADCGFTSESYQQGVLSATNLSVIGFRILLLKVAGFNLLMTLRLWSSRAKRSGSGATNFSLLKQAGDVEENPGPTSMALPVTALLLPLALLLHAARPDIQMTQSPSSLSASVGDRVTITCKASDHINNWLAWYQQKPGQAPKLLIYGATTLETGVPSRFSGSGSGTDYTLTISSLQPEDFATYYCQQSWNTPWTFGQGTKLEIKRGGGGSGGGGSGGGGSQVQLQQPGAELVKPGASVKMSCKASGYAFSSSWINWMKQKPGQGLEWIGQIYPGDGDTNYNGKFKGRATLTADTSSSTAYMQLSSLTSEDSAVYFCARSITTVVGCAMDYWGQGTSVTVSSTRGQPKANPTVTLFPPSSEELQANKATLVCLISDFYPGAVTVAWKADGSPVKAGVETTKPSKQSNNKYAASSYLSLTPEQWKSHRSYSCQVTHEGSTVEKTVAPTECSPIKTDVITMDPKDNCSKDANDTLLLQLTNTSAYYMYLLLLLKSVVYFAIITCCLLRRTAFCCNGEKSRAKRSGSGVKQTLNFDLLKLAGDVESNPGPSRGHMTEYKPTVRLATRDDVPRAVRTLAAAFADYPATRHTVDPDRHIERVTELQELFLTRVGLDIGKVWVADDGAAVAVWTTPESVEAGAVFAEIGPRMAELSGSRLAAQQQMEGLLAPHRPKEPAWFLATVGVSPDHQGKGLGSAVVLPGVEAAERAGVPAFLETSAPRNLPFYERLGFTVTADVEVPEGPRTWCMTRKPGA

SEQ ID NO: 44010 - protein, 900 aa, synthetic construct
MALPVTALLLPLALLLHAARPLEGQPKANPTVTLFPPSSEELQANKATLVCLISDFYPGAVTVAWKADGSPVKAGVETTKPSKQSNNKYAASSYLSLTPEQWKSHRSYSCQVTHEGSTVEKTVAPTECSPIKTDVITMDPKDNCSKDANDTLLLQLTNTSAYYMYLLLLLKSVVYFAIITCCLLRRTAFCCNGEKSRAKRSGSGATNFSLLKQAGDVEENPGPTSMALPVTALLLPLALLLHAARPDIQMTQSPSSLSASVGDRVTITCKASDHINNWLAWYQQKPGQAPKLLIYGATTLETGVPSRFSGSGSGTDYTLTISSLQPEDFATYYCQQSWNTPWTFGQGTKLEIKRGGGGSGGGGSGGGGSQVQLQQPGAELVKPGASVKMSCKASGYAFSSSWINWMKQKPGQGLEWIGQIYPGDGDTNYNGKFKGRATLTADTSSSTAYMQLSSLTSEDSAVYFCARSITTVVGCAMDYWGQGTSVTVSSTREEDLKNVFPPEVAVFEPSEAEISHTQKATLVCLATGFYPDHVELSWWVNGKEVHSGVCTDPQPLKEQPALNDSRYCLSSRLRVSATFWQNPRNHFRCQVQFYGLSENDEWTQDRAKPVTQIVSAEAWGRADCGFTSESYQQGVLSATNLSVIGFRILLLKVAGFNLLMTLRLWSSRAKRSGSGVKQTLNFDLLKLAGDVESNPGPSRGHMTEYKPTVRLATRDDVPRAVRTLAAAFADYPATRHTVDPDRHIERVTELQELFLTRVGLDIGKVWVADDGAAVAVWTTPESVEAGAVFAEIGPRMAELSGSRLAAQQQMEGLLAPHRPKEPAWFLATVGVSPDHQGKGLGSAVVLPGVEAAERAGVPAFLETSAPRNLPFYERLGFTVTADVEVPEGPRTWCMTRKPGA

SEQ ID NO: 44011 - protein, 897 aa, synthetic construct
MALPVTALLLPLALLLHAARPLEEASTKGPSVFPLAPSSKSTSGGTAALGCLVKDYFPEPVTVSWNSGALTSGVHTFPAVLQSSGLYSLSSVVTVPSSSLGTQTYICNVNHKPSNTKVDKRVEPKSCPIKTDVITMDPKDNCSKDANDTLLLQLTNTSAYYMYLLLLLKSVVYFAIITCCLLRRTAFCCNGEKSRAKRSGSGATNFSLLKQAGDVEENPGPTSMALPVTALLLPLALLLHAARPDIQMTQSPSSLSASVGDRVTITCKASDHINNWLAWYQQKPGQAPKLLIYGATTLETGVPSRFSGSGSGTDYTLTISSLQPEDFATYYCQQSWNTPWTFGQGTKLEIKRGGGGSGGGGSGGGGSQVQLQQPGAELVKPGASVKMSCKASGYAFSSSWINWMKQKPGQGLEWIGQIYPGDGDTNYNGKFKGRATLTADTSSSTAYMQLSSLTSEDSAVYFCARSITTVVGCAMDYWGQGTSVTVSSTRGQPKANPTVTLFPPSSEELQANKATLVCLISDFYPGAVTVAWKADGSPVKAGVETTKPSKQSNNKYAASSYLSLTPEQWKSHRSYSCQVTHEGSTVEKTVAPTECSEVKTDSTDHVKPKETENTKQPSKSCHKPKAIVHTEKVNMMSLTVLGLRMLFAKTVAVNFLLTAKLFFLRAKRSGSGVKQTLNFDLLKLAGDVESNPGPSRGHMTEYKPTVRLATRDDVPRAVRTLAAAFADYPATRHTVDPDRHIERVTELQELFLTRVGLDIGKVWVADDGAAVAVWTTPESVEAGAVFAEIGPRMAELSGSRLAAQQQMEGLLAPHRPKEPAWFLATVGVSPDHQGKGLGSAVVLPGVEAAERAGVPAFLETSAPRNLPFYERLGFTVTADVEVPEGPRTWCMTRKPGA

SEQ ID NO: 44012 - protein, 875 aa, synthetic construct
MALPVTALLLPLALLLHAARPLEEASTKGPSVFPLAPSSKSTSGGTAALGCLVKDYFPEPVTVSWNSGALTSGVHTFPAVLQSSGLYSLSSVVTVPSSSLGTQTYICNVNHKPSNTKVDKRVEPKSCGRADCGFTSESYQQGVLSATILYEILLGKATLYAVLVSALVLMAMVKRKDSRGRAKRSGSGATNFSLLKQAGDVEENPGPTSMALPVTALLLPLALLLHAARPDIQMTQSPSSLSASVGDRVTITCKASDHINNWLAWYQQKPGQAPKLLIYGATTLETGVPSRFSGSGSGTDYTLTISSLQPEDFATYYCQQSWNTPWTFGQGTKLEIKRGGGGSGGGGSGGGGSQVQLQQPGAELVKPGASVKMSCKASGYAFSSSWINWMKQKPGQGLEWIGQIYPGDGDTNYNGKFKGRATLTADTSSSTAYMQLSSLTSEDSAVYFCARSITTVVGCAMDYWGQGTSVTVSSTRGQPKANPTVTLFPPSSEELQANKATLVCLISDFYPGAVTVAWKADGSPVKAGVETTKPSKQSNNKYAASSYLSLTPEQWKSHRSYSCQVTHEGSTVEKTVAPTECSIPEDTFFPSPESSCDVKLVEKSFETDTNLNFQNLSVIGFRILLLKVAGFNLLMTLRLWSSRAKRSGSGVKQTLNFDLLKLAGDVESNPGPSRGHMTEYKPTVRLATRDDVPRAVRTLAAAFADYPATRHTVDPDRHIERVTELQELFLTRVGLDIGKVWVADDGAAVAVWTTPESVEAGAVFAEIGPRMAELSGSRLAAQQQMEGLLAPHRPKEPAWFLATVGVSPDHQGKGLGSAVVLPGVEAAERAGVPAFLETSAPRNLPFYERLGFTVTADVEVPEGPRTWCMTRKPGA

SEQ ID NO: 44013 - protein, 875 aa, synthetic construct
MALPVTALLLPLALLLHAARPLEEASTKGPSVFPLAPSSKSTSGGTAALGCLVKDYFPEPVTVSWNSGALTSGVHTFPAVLQSSGLYSLSSVVTVPSSSLGTQTYICNVNHKPSNTKVDKRVEPKSCIPEDTFFPSPESSCDVKLVEKSFETDTNLNFQNLSVIGFRILLLKVAGFNLLMTLRLWSSRAKRSGSGATNFSLLKQAGDVEENPGPTSMALPVTALLLPLALLLHAARPDIQMTQSPSSLSASVGDRVTITCKASDHINNWLAWYQQKPGQAPKLLIYGATTLETGVPSRFSGSGSGTDYTLTISSLQPEDFATYYCQQSWNTPWTFGQGTKLEIKRGGGGSGGGGSGGGGSQVQLQQPGAELVKPGASVKMSCKASGYAFSSSWINWMKQKPGQGLEWIGQIYPGDGDTNYNGKFKGRATLTADTSSSTAYMQLSSLTSEDSAVYFCARSITTVVGCAMDYWGQGTSVTVSSTRGQPKANPTVTLFPPSSEELQANKATLVCLISDFYPGAVTVAWKADGSPVKAGVETTKPSKQSNNKYAASSYLSLTPEQWKSHRSYSCQVTHEGSTVEKTVAPTECSGRADCGFTSESYQQGVLSATILYEILLGKATLYAVLVSALVLMAMVKRKDSRGRAKRSGSGVKQTLNFDLLKLAGDVESNPGPSRGHMTEYKPTVRLATRDDVPRAVRTLAAAFADYPATRHTVDPDRHIERVTELQELFLTRVGLDIGKVWVADDGAAVAVWTTPESVEAGAVFAEIGPRMAELSGSRLAAQQQMEGLLAPHRPKEPAWFLATVGVSPDHQGKGLGSAVVLPGVEAAERAGVPAFLETSAPRNLPFYERLGFTVTADVEVPEGPRTWCMTRKPGA

SEQ ID NO: 44014 - protein, 622 aa, synthetic construct
MALPVTALLLPLALLLHAARPDIQMTQSPSSLSASVGDRVTITCKASDHINNWLAWYQQKPGQAPKLLIYGATTLETGVPSRFSGSGSGTDYTLTISSLQPEDFATYYCQQSWNTPWTFGQGTKLEIKRLEDLKNVFPPEVAVFEPSEAEISHTQKATLVCLATGFYPDHVELSWWVNGKEVHSGVCTDPQPLKEQPALNDSRYCLSSRLRVSATFWQNPRNHFRCQVQFYGLSENDEWTQDRAKPVTQIVSAEAWGRADSGFTSESYQQGVLSATILYEILLGKATLYAVLVSALVLMAMVKRKDSRGRAKRSGSGATNFSLLKQAGDVEENPGPTSMDWIWRILFLVGAATGAHSFEQVQLQQPGAELVKPGASVKMSCKASGYAFSSSWINWMKQKPGQGLEWIGQIYPGDGDTNYNGKFKGRATLTADTSSSTAYMQLSSLTSEDSAVYFCARSITTVVGCAMDYWGQGTSVTVSSTRIQNPDPAVYQLRDSKSSDKSVCLFTDFDSQTNVSQSKDSDVYITDKCVLDMRSMDFKSNSAVAWSNKSDFACANAFNNSIIPEDTFFPSPESSSDVKLVEKSFETDTNLNFQNLSVIGFRILLLKVAGFNLLMTLRLWSS

SEQ ID NO: 44015 - protein, 901 aa, synthetic construct
MALPVTALLLPLALLLHAARPEVQLLESGGGLVQPGGSLRLSCAASGRTFSMGWYRQAPGKGLEFVSAITYSGGSPYYADSVKGRFTISRDNSKNTVYLQMNSLRAEDTAVYYCAANPTYGSDWNAENWGQGTLVTVSSGTGGGGSGGGGSGGGGSEFDIQMTQSPSSLSASVGDRVTITCKASDHINNWLAWYQQKPGQAPKLLIYGATTLETGVPSRFSGSGSGTDYTLTISSLQPEDFATYYCQQSWNTPWTFGQGTKLEIKRLEIQNPDPAVYQLRDSKSSDKSVCLFTDFDSQTNVSQSKDSDVYITDKCVLDMRSMDFKSNSAVAWSNKSDFACANAFNNSIIPEDTFFPSSDVPCDVKLVEKSFETDTNLNFQNLSVIGFRILLLKVAGFNLLMTLRLWSSRAKRSGSGVKQTLNFDLLKLAGDVESNPGPTSTMDWIWRILFLVGAATGTHSGPEVQLVESGGGLVQPGGSLRLSCAASGRTFTMGWYRQAPGKEREFVAAISLSPTLAYYADSVKGRFTISRDNSKNTVVLQMNSLRAEDTALYYCAADRKSVMSIRPDYWGQGTLVTVSSGSGGGGSGGGGSGGGGSFEQVQLQQPGAELVKPGASVKMSCKASGYAFSSSWINWMKQKPGQGLEWIGQIYPGDGDTNYNGKFKGRATLTADTSSSTAYMQLSSLTSEDSAVYFCARSITTVVGCAMDYWGQGTSVTVSSTREDLKNVFPPEVAVFEPSKAEIAHTQKATLVCLATGFYPDHVELSWWVNGKEVHSGVCTDPQPLKEQPALNDSRYCLSSRLRVSATFWQNPRNHFRCQVQFYGLSENDEWTQDRAKPVTQIVSAEAWGRADCGITSASYHQGVLSATILYEILLGKATLYAVLVSALVLMAMVKRKDSRG

SEQ ID NO: 44016 - protein, 901 aa, synthetic construct
MALPVTALLLPLALLLHAARPEVQLVESGGGLVQAGGSLRLSCAASGRTFSMGWFRQAPGKEREFVAAITYSGGSPYYADSVKGRFTISRDNAKNTVYLQMNSLKPEDTAVYYCAANPTYGSDWNAENWGQGTQVTVSSGTGGGGSGGGGSGGGGSEFDIQMTQSPSSLSASVGDRVTITCKASDHINNWLAWYQQKPGQAPKLLIYGATTLETGVPSRFSGSGSGTDYTLTISSLQPEDFATYYCQQSWNTPWTFGQGTKLEIKRLEIQNPDPAVYQLRDSKSSDKSVCLFTDFDSQTNVSQSKDSDVYITDKCVLDMRSMDFKSNSAVAWSNKSDFACANAFNNSIIPEDTFFPSSDVPCDVKLVEKSFETDTNLNFQNLSVIGFRILLLKVAGFNLLMTLRLWSSRAKRSGSGVKQTLNFDLLKLAGDVESNPGPTSTMDWIWRILFLVGAATGAHSGPEVQLVESGGGLVQPGGSLRLSCAASGRTFTMGWYRQAPGKEREFVAAISLSPTLAYYADSVKGRFTISRDNSKNTVVLQMNSLRAEDTALYYCAADRKSVMSIRPDYWGQGTLVTVSSGSGGGGSGGGGSGGGGSFEQVQLQQPGAELVKPGASVKMSCKASGYAFSSSWINWMKQKPGQGLEWIGQIYPGDGDTNYNGKFKGRATLTADTSSSTAYMQLSSLTSEDSAVYFCARSITTVVGCAMDYWGQGTSVTVSSTREDLKNVFPPEVAVFEPSKAEIAHTQKATLVCLATGFYPDHVELSWWVNGKEVHSGVCTDPQPLKEQPALNDSRYCLSSRLRVSATFWQNPRNHFRCQVQFYGLSENDEWTQDRAKPVTQIVSAEAWGRADCGITSASYHQGVLSATILYEILLGKATLYAVLVSALVLMAMVKRKDSRG

SEQ ID NO: 44017 - protein, 898 aa, synthetic construct
MALPVTALLLPLALLLHAARPEVQLVESGGGLVQAGGSLRLSCAASGRTFSMGWFRQAPGKEREFVAAITYSGGSPYYADSVKGRFTISRDNAKNTVYLQMNSLKPEDTAVYYCAANPTYGSDWNAENWGQGTQVTVSSGTGGGGSGGGGSGGGGSEFDIQMTQSPSSLSASVGDRVTITCKASDHINNWLAWYQQKPGQAPKLLIYGATTLETGVPSRFSGSGSGTDYTLTISSLQPEDFATYYCQQSWNTPWTFGQGTKLEIKRLEDLKNVFPPEVAVFEPSEAEISHTQKATLVCLATGFYPDHVELSWWVNGKEVHSGVCTDPQPLKEQPALNDSRYCLSSRLRVSATFWQNPRNHFRCQVQFYGLSENDEWTQDRAKPVTQIVSAEAWGRADCGFTSESYQQGVLSATILYEILLGKATLYAVLVSALVLMAMVKRKDSRGRAKRSGSGATNFSLLKQAGDVEENPGPTSATMDWIWRILFLVGAATGAHSGPEVQLVESGGGLVQAGGSLRLSCAASGRTFTMGWFRQAPGKEREFVAAISLSPTLAYYADSVKGRFTISRDNAKNTVVLQMNSLKPEDTALYYCAADRKSVMSIRPDYWGQGTQVTVSSGSGGGGSGGGGSGGGGSFEQVQLQQPGAELVKPGASVKMSCKASGYAFSSSWINWMKQKPGQGLEWIGQIYPGDGDTNYNGKFKGRATLTADTSSSTAYMQLSSLTSEDSAVYFCARSITTVVGCAMDYWGQGTSVTVSSTRIQNPDPAVYQLRDSKSSDKSVCLFTDFDSQTNVSQSKDSDVYITDKCVLDMRSMDFKSNSAVAWSNKSDFACANAFNNSIIPEDTFFPSPESSCDVKLVEKSFETDTNLNFQNLSVIGFRILLLKVAGFNLLMTLRLWSS

SEQ ID NO: 44018 - protein, 769 aa, synthetic construct
MALPVTALLLPLALLLHAARPEVQLVESGGGLVQPGGSLRLSCEASGFASDDYIIGWFRQAPGKEREGVSCISSKYANTVYTDSVKGRFRLSRGTAKNTVYLQMSALKPEDTAVYYCAMDSRRVTCPEISTMHRNFDSWGQGTLVTVSSGTGGGGSGGGGSGGGGSEFDIQMTQSPSSLSASVGDRVTITCKASDHINNWLAWYQQKPGQAPKLLIYGATTLETGVPSRFSGSGSGTDYTLTISSLQPEDFATYYCQQSWNTPWTFGQGTKLEIKRLEDLKNVFPPEVAVFEPSKAEIAHTQKATLVCLATGFYPDHVELSWWVNGKEVHSGVCTDPQPLKEQPALNDSRYCLSSRLRVSATFWQNPRNHFRCQVQFYGLSENDEWTQDRAKPVTQIVSAEAWGRADCGITSASYHQGVLSATILYEILLGKATLYAVLVSALVLMAMVKRKDSRGRAKRSGSGATNFSLLKQAGDVEENPGPTSMDWIWRILFLVGAATGAHSFEQVQLQQPGAELVKPGASVKMSCKASGYAFSSSWINWMKQKPGQGLEWIGQIYPGDGDTNYNGKFKGRATLTADTSSSTAYMQLSSLTSEDSAVYFCARSITTVVGCAMDYWGQGTSVTVSSTRIQNPDPAVYQLRDSKSSDKSVCLFTDFDSQTNVSQSKDSDVYITDKCVLDMRSMDFKSNSAVAWSNKSDFACANAFNNSIIPEDTFFPSSDVPCDVKLVEKSFETDTNLNFQNLSVIGFRILLLKVAGFNLLMTLRLWSS

SEQ ID NO: 44019 - protein, 760 aa, synthetic construct
MALPVTALLLPLALLLHAARPDIQMTQSPSSLSASVGDRVTITCKASDHINNWLAWYQQKPGQAPKLLIYGATTLETGVPSRFSGSGSGTDYTLTISSLQPEDFATYYCQQSWNTPWTFGQGTKLEIKRLEDLKNVFPPEVAVFEPSEAEISHTQKATLVCLATGFYPDHVELSWWVNGKEVHSGVCTDPQPLKEQPALNDSRYCLSSRLRVSATFWQNPRNHFRCQVQFYGLSENDEWTQDRAKPVTQIVSAEAWGRADCGFTSESYQQGVLSATILYEILLGKATLYAVLVSALVLMAMVKRKDSRGRAKRSGSGATNFSLLKQAGDVEENPGPTSTMDWIWRILFLVGAATGAHSGPEVQLVESGGGLVQPGGSLRLSCAASGRTFTMGWYRQAPGKEREFVAAISLSPTLAYYADSVKGRFTISRDNSKNTVVLQMNSLRAEDTALYYCAADRKSVMSIRPDYWGQGTLVTVSSGSGGGGSGGGGSGGGGSFEQVQLQQPGAELVKPGASVKMSCKASGYAFSSSWINWMKQKPGQGLEWIGQIYPGDGDTNYNGKFKGRATLTADTSSSTAYMQLSSLTSEDSAVYFCARSITTVVGCAMDYWGQGTSVTVSSTRIQNPDPAVYQLRDSKSSDKSVCLFTDFDSQTNVSQSKDSDVYITDKCVLDMRSMDFKSNSAVAWSNKSDFACANAFNNSIIPEDTFFPSPESSCDVKLVEKSFETDTNLNFQNLSVIGFRILLLKVAGFNLLMTLRLWSS

SEQ ID NO: 44020 - protein, 767 aa, synthetic construct
MALPVTALLLPLALLLHAARPDIQMTQSPSSLSASVGDRVTITCKASDHINNWLAWYQQKPGQAPKLLIYGATTLETGVPSRFSGSGSGTDYTLTISSLQPEDFATYYCQQSWNTPWTFGQGTKLEIKRLEDLKNVFPPEVAVFEPSEAEISHTQKATLVCLATGFYPDHVELSWWVNGKEVHSGVCTDPQPLKEQPALNDSRYCLSSRLRVSATFWQNPRNHFRCQVQFYGLSENDEWTQDRAKPVTQIVSAEAWGRADCGFTSESYQQGVLSATILYEILLGKATLYAVLVSALVLMAMVKRKDSRGRAKRSGSGATNFSLLKQAGDVEENPGPTSTMDWIWRILFLVGAATGAHSGPQVQLVESGGGLVQPGGSLRLSCAASGNINSRNCMGWFRQAPGKGREGVAAIGQVTGRTYYVDSVKGRFTISLDNSKNTLYLQMNSLRAEDTAVYYCAAAPGCLLSALRSADYRNWGQGTLVTVSSGSGGGGSGGGGSGGGGSFEQVQLQQPGAELVKPGASVKMSCKASGYAFSSSWINWMKQKPGQGLEWIGQIYPGDGDTNYNGKFKGRATLTADTSSSTAYMQLSSLTSEDSAVYFCARSITTVVGCAMDYWGQGTSVTVSSTRIQNPDPAVYQLRDSKSSDKSVCLFTDFDSQTNVSQSKDSDVYITDKCVLDMRSMDFKSNSAVAWSNKSDFACANAFNNSIIPEDTFFPSPESSCDVKLVEKSFETDTNLNFQNLSVIGFRILLLKVAGFNLLMTLRLWSS

SEQ ID NO: 44021 - protein, 767 aa, synthetic construct
MALPVTALLLPLALLLHAARPDIQMTQSPSSLSASVGDRVTITCKASDHINNWLAWYQQKPGQAPKLLIYGATTLETGVPSRFSGSGSGTDYTLTISSLQPEDFATYYCQQSWNTPWTFGQGTKLEIKRLEDLKNVFPPEVAVFEPSEAEISHTQKATLVCLATGFYPDHVELSWWVNGKEVHSGVCTDPQPLKEQPALNDSRYCLSSRLRVSATFWQNPRNHFRCQVQFYGLSENDEWTQDRAKPVTQIVSAEAWGRADCGFTSESYQQGVLSATILYEILLGKATLYAVLVSALVLMAMVKRKDSRGRAKRSGSGATNFSLLKQAGDVEENPGPTSTMDWIWRILFLVGAATGAHSGPQVQLVESGGGSVQAGGSLRLSCGASGNISSRNCMGWFRQAPGKEREGVAAIGQVTGRSYYVDSVKGRFTISLDNAKNTLYLQMNTLKPEDTAMYYCAAAPGCLLSALRSADYRNWGQGTQVTVSSGSGGGGSGGGGSGGGGSFEQVQLQQPGAELVKPGASVKMSCKASGYAFSSSWINWMKQKPGQGLEWIGQIYPGDGDTNYNGKFKGRATLTADTSSSTAYMQLSSLTSEDSAVYFCARSITTVVGCAMDYWGQGTSVTVSSTRIQNPDPAVYQLRDSKSSDKSVCLFTDFDSQTNVSQSKDSDVYITDKCVLDMRSMDFKSNSAVAWSNKSDFACANAFNNSIIPEDTFFPSPESSCDVKLVEKSFETDTNLNFQNLSVIGFRILLLKVAGFNLLMTLRLWSS

SEQ ID NO: 44022 - protein, 908 aa, synthetic construct
MALPVTALLLPLALLLHAARPEVQLVESGGGLVQAGGSLRLSCAASGRTFSMGWFRQAPGKEREFVAAITYSGGSPYYADSVKGRFTISRDNAKNTVYLQMNSLKPEDTAVYYCAANPTYGSDWNAENWGQGTQVTVSSGTGGGGSGGGGSGGGGSEFDIQMTQSPSSLSASVGDRVTITCKASDHINNWLAWYQQKPGQAPKLLIYGATTLETGVPSRFSGSGSGTDYTLTISSLQPEDFATYYCQQSWNTPWTFGQGTKLEIKRLEIQNPDPAVYQLRDSKSSDKSVCLFTDFDSQTNVSQSKDSDVYITDKCVLDMRSMDFKSNSAVAWSNKSDFACANAFNNSIIPEDTFFPSSDVPCDVKLVEKSFETDTNLNFQNLSVIGFRILLLKVAGFNLLMTLRLWSSRAKRSGSGVKQTLNFDLLKLAGDVESNPGPTSTMDWIWRILFLVGAATGAHSGPQVQLVESGGGSVQAGGSLRLSCGASGNISSRNCMGWFRQAPGKEREGVAAIGQVTGRSYYVDSVKGRFTISLDNAKNTLYLQMNTLKPEDTAMYYCAAAPGCLLSALRSADYRNWGQGTQVTVSSGSGGGGSGGGGSGGGGSFEQVQLQQPGAELVKPGASVKMSCKASGYAFSSSWINWMKQKPGQGLEWIGQIYPGDGDTNYNGKFKGRATLTADTSSSTAYMQLSSLTSEDSAVYFCARSITTVVGCAMDYWGQGTSVTVSSTREDLKNVFPPEVAVFEPSKAEIAHTQKATLVCLATGFYPDHVELSWWVNGKEVHSGVCTDPQPLKEQPALNDSRYCLSSRLRVSATFWQNPRNHFRCQVQFYGLSENDEWTQDRAKPVTQIVSAEAWGRADCGITSASYHQGVLSATILYEILLGKATLYAVLVSALVLMAMVKRKDSRG

SEQ ID NO: 44023 - protein, 905 aa, synthetic construct
MALPVTALLLPLALLLHAARPQVQLVESGGGSVQAGGSLRLSCGASGNISSRNCMGWFRQAPGKEREGVAAIGQVTGRSYYVDSVKGRFTISLDNAKNTLYLQMNTLKPEDTAMYYCAAAPGCLLSALRSADYRNWGQGTQVTVSSGTGGGGSGGGGSGGGGSEFDIQMTQSPSSLSASVGDRVTITCKASDHINNWLAWYQQKPGQAPKLLIYGATTLETGVPSRFSGSGSGTDYTLTISSLQPEDFATYYCQQSWNTPWTFGQGTKLEIKRLEDLKNVFPPEVAVFEPSEAEISHTQKATLVCLATGFYPDHVELSWWVNGKEVHSGVCTDPQPLKEQPALNDSRYCLSSRLRVSATFWQNPRNHFRCQVQFYGLSENDEWTQDRAKPVTQIVSAEAWGRADCGFTSESYQQGVLSATILYEILLGKATLYAVLVSALVLMAMVKRKDSRGRAKRSGSGATNFSLLKQAGDVEENPGPTSATMDWIWRILFLVGAATGAHSGPEVQLVESGGGLVQAGGSLRLSCAASGRTFTMGWFRQAPGKEREFVAAISLSPTLAYYADSVKGRFTISRDNAKNTVVLQMNSLKPEDTALYYCAADRKSVMSIRPDYWGQGTQVTVSSGSGGGGSGGGGSGGGGSFEQVQLQQPGAELVKPGASVKMSCKASGYAFSSSWINWMKQKPGQGLEWIGQIYPGDGDTNYNGKFKGRATLTADTSSSTAYMQLSSLTSEDSAVYFCARSITTVVGCAMDYWGQGTSVTVSSTRIQNPDPAVYQLRDSKSSDKSVCLFTDFDSQTNVSQSKDSDVYITDKCVLDMRSMDFKSNSAVAWSNKSDFACANAFNNSIIPEDTFFPSPESSCDVKLVEKSFETDTNLNFQNLSVIGFRILLLKVAGFNLLMTLRLWSS

SEQ ID NO: 44024 - protein, 768 aa, synthetic construct
MALPVTALLLPLALLLHAARPQVQLVESGGGSVQAGGSLRLSCGASGNISSRNCMGWFRQAPGKEREGVAAIGQVTGRSYYVDSVKGRFTISLDNAKNTLYLQMNTLKPEDTAMYYCAAAPGCLLSALRSADYRNWGQGTQVTVSSGTGGGGSGGGGSGGGGSEFDIQMTQSPSSLSASVGDRVTITCKASDHINNWLAWYQQKPGQAPKLLIYGATTLETGVPSRFSGSGSGTDYTLTISSLQPEDFATYYCQQSWNTPWTFGQGTKLEIKRLEDLKNVFPPEVAVFEPSEAEISHTQKATLVCLATGFYPDHVELSWWVNGKEVHSGVCTDPQPLKEQPALNDSRYCLSSRLRVSATFWQNPRNHFRCQVQFYGLSENDEWTQDRAKPVTQIVSAEAWGRADCGFTSESYQQGVLSATILYEILLGKATLYAVLVSALVLMAMVKRKDSRGRAKRSGSGATNFSLLKQAGDVEENPGPTSATMDWIWRILFLVGAATGAHSFEQVQLQQPGAELVKPGASVKMSCKASGYAFSSSWINWMKQKPGQGLEWIGQIYPGDGDTNYNGKFKGRATLTADTSSSTAYMQLSSLTSEDSAVYFCARSITTVVGCAMDYWGQGTSVTVSSTRIQNPDPAVYQLRDSKSSDKSVCLFTDFDSQTNVSQSKDSDVYITDKCVLDMRSMDFKSNSAVAWSNKSDFACANAFNNSIIPEDTFFPSPESSCDVKLVEKSFETDTNLNFQNLSVIGFRILLLKVAGFNLLMTLRLWSS

SEQ ID NO: 44025 - protein, 768 aa, synthetic construct
MALPVTALLLPLALLLHAARPQVQLVESGGGVVQPGGSLRLSCAASGLSFSTYTVAWFRQAPGKGLEGVAAIPYTSQHMVYTDSVRGRFTISRDNSKNTLYLQMNSLRAEDTAVYYCATDRRPGTSMLAINGYNRWGQGTTVTVSSGTGGGGSGGGGSGGGGSEFDIQMTQSPSSLSASVGDRVTITCKASDHINNWLAWYQQKPGQAPKLLIYGATTLETGVPSRFSGSGSGTDYTLTISSLQPEDFATYYCQQSWNTPWTFGQGTKLEIKRLEDLKNVFPPEVAVFEPSEAEISHTQKATLVCLATGFYPDHVELSWWVNGKEVHSGVCTDPQPLKEQPALNDSRYCLSSRLRVSATFWQNPRNHFRCQVQFYGLSENDEWTQDRAKPVTQIVSAEAWGRADCGFTSESYQQGVLSATILYEILLGKATLYAVLVSALVLMAMVKRKDSRGRAKRSGSGATNFSLLKQAGDVEENPGPTSATMDWIWRILFLVGAATGAHSFEQVQLQQPGAELVKPGASVKMSCKASGYAFSSSWINWMKQKPGQGLEWIGQIYPGDGDTNYNGKFKGRATLTADTSSSTAYMQLSSLTSEDSAVYFCARSITTVVGCAMDYWGQGTSVTVSSTRIQNPDPAVYQLRDSKSSDKSVCLFTDFDSQTNVSQSKDSDVYITDKCVLDMRSMDFKSNSAVAWSNKSDFACANAFNNSIIPEDTFFPSPESSCDVKLVEKSFETDTNLNFQNLSVIGFRILLLKVAGFNLLMTLRLWSS

SEQ ID NO: 44026 - protein, 767 aa, synthetic construct
MALPVTALLLPLALLLHAARPDIQMTQSPSSLSASVGDRVTITCKASDHINNWLAWYQQKPGQAPKLLIYGATTLETGVPSRFSGSGSGTDYTLTISSLQPEDFATYYCQQSWNTPWTFGQGTKLEIKRLEDLKNVFPPEVAVFEPSEAEISHTQKATLVCLATGFYPDHVELSWWVNGKEVHSGVCTDPQPLKEQPALNDSRYCLSSRLRVSATFWQNPRNHFRCQVQFYGLSENDEWTQDRAKPVTQIVSAEAWGRADCGFTSESYQQGVLSATILYEILLGKATLYAVLVSALVLMAMVKRKDSRGRAKRSGSGATNFSLLKQAGDVEENPGPTSTMDWIWRILFLVGAATGAHSGPQVQLVESGGGVVQPGGSLRLSCAASGLSFSTYTVAWFRQAPGKGLEGVAAIPYTSQHMVYTDSVRGRFTISRDNSKNTLYLQMNSLRAEDTAVYYCATDRRPGTSMLAINGYNRWGQGTTVTVSSGSGGGGSGGGGSGGGGSFEQVQLQQPGAELVKPGASVKMSCKASGYAFSSSWINWMKQKPGQGLEWIGQIYPGDGDTNYNGKFKGRATLTADTSSSTAYMQLSSLTSEDSAVYFCARSITTVVGCAMDYWGQGTSVTVSSTRIQNPDPAVYQLRDSKSSDKSVCLFTDFDSQTNVSQSKDSDVYITDKCVLDMRSMDFKSNSAVAWSNKSDFACANAFNNSIIPEDTFFPSPESSCDVKLVEKSFETDTNLNFQNLSVIGFRILLLKVAGFNLLMTLRLWSS

SEQ ID NO: 44027 - protein, 769 aa, synthetic construct
MALPVTALLLPLALLLHAARPDIQMTQSPSSLSASVGDRVTITCKASDHINNWLAWYQQKPGQAPKLLIYGATTLETGVPSRFSGSGSGTDYTLTISSLQPEDFATYYCQQSWNTPWTFGQGTKLEIKRLEDLKNVFPPEVAVFEPSEAEISHTQKATLVCLATGFYPDHVELSWWVNGKEVHSGVCTDPQPLKEQPALNDSRYCLSSRLRVSATFWQNPRNHFRCQVQFYGLSENDEWTQDRAKPVTQIVSAEAWGRADCGFTSESYQQGVLSATILYEILLGKATLYAVLVSALVLMAMVKRKDSRGRAKRSGSGATNFSLLKQAGDVEENPGPTSTMDWIWRILFLVGAATGAHSGPEVQLVESGGGSVQAGGSLRLSCAASGYTYSINCMGWFRQAPGKEREGVAAISTGGGRTDYRDSVKGRFTISQDNAKNTVYLQMNSLKPEDTAMYYCAGKTTYPGYGCGLGRSAYNYWGQGTQVTVSSGSGGGGSGGGGSGGGGSFEQVQLQQPGAELVKPGASVKMSCKASGYAFSSSWINWMKQKPGQGLEWIGQIYPGDGDTNYNGKFKGRATLTADTSSSTAYMQLSSLTSEDSAVYFCARSITTVVGCAMDYWGQGTSVTVSSTRIQNPDPAVYQLRDSKSSDKSVCLFTDFDSQTNVSQSKDSDVYITDKCVLDMRSMDFKSNSAVAWSNKSDFACANAFNNSIIPEDTFFPSPESSCDVKLVEKSFETDTNLNFQNLSVIGFRILLLKVAGFNLLMTLRLWSS

SEQ ID NO: 44028 - protein, 622 aa, synthetic construct
MALPVTALLLPLALLLHAARPDIQMTQSPSSLSASVGDRVTITCKASDHINNWLAWYQQKPGQAPKLLIYGATTLETGVPSRFSGSGSGTDYTLTISSLQPEDFATYYCQQSWNTPWTFGQGTKLEIKRLEDLKHVFPPEVAVFEPSDAEIWHTQKATLVCLATGFYPDHVELSWWVNGKEVHSGVSTDPQPLKEQPALNDSRYCLSSRLRVSATFWQNPRNHFRCQVQFYGLSENDEWTQDRAKPVTQIVSAEAWGRADCGFTSESYQQGVLSATILYEILLGKATLYAVLVSALVLMAMVKRKDSRGRAKRSGSGATNFSLLKQAGDVEENPGPTSMDWIWRILFLVGAATGAHSFEQVQLQQPGAELVKPGASVKMSCKASGYAFSSSWINWMKQKPGQGLEWIGQIYPGDGDTNYNGKFKGRATLTADTSSSTAYMQLSSLTSEDSAVYFCARSITTVVGCAMDYWGQGTSVTVSSTRIQNPDPAVYQLRDSKSSDKSVCLFTDFDSQTNVSQSKDSDVYITDKTVLDMRSMDFKSNSAVAWSSKSDFACANAFNNSIIPEDTFFPSPEMACDVKLVEKSFETDTNLNFQNLLVIWLRILLLKVAGFNLLMTLRLWSS

SEQ ID NO: 44029 - protein, 622 aa, synthetic construct
MALPVTALLLPLALLLHAARPDIQMTQSPSSLSASVGDRVTITCKASDHINNWLAWYQQKPGQAPKLLIYGATTLETGVPSRFSGSGSGTDYTLTISSLQPEDFATYYCQQSWNTPWTFGQGTKLEIKRLEDLKHVFPPEVAVFEPSDAEIWHTQKATLVCLATGFYPDHVELSWWVNGKEVHSGVSTDPQPLKEQPALNDSRYCLSSRLRVSATFWQNPRNHFRCQVQFYGLSENDEWTQDRAKPVTQIVSAEAWGRADCGFTSESYQQGVLSATILYEILLGKATLYAVLVSALVLMAMVKRKDSRGRAKRSGSGATNFSLLKQAGDVEENPGPTSMDWIWRILFLVGAATGAHSFEQVQLQQPGAELVKPGASVKMSCKASGYAFSSSWINWMKQKPGQGLEWIGQIYPGDGDTNYNGKFKGRATLTADTSSSTAYMQLSSLTSEDSAVYFCARSITTVVGCAMDYWGQGTSVTVSSTRIQNPDPAVYQLRDSKSSDKSVCLFTDFDSQTNVSQSKDSDVYITDKTVLDMRSMDFKSNSAVAWSTKSDFACANAFNNSIIPEDTFFPSPEVVCDVKLVEKSFETDTNLNFQNLVVIGARILLLKVAGFNLLMTLRLWSS

SEQ ID NO: 44030 - protein, 622 aa, synthetic construct
MALPVTALLLPLALLLHAARPDIQMTQSPSSLSASVGDRVTITCKASDHINNWLAWYQQKPGQAPKLLIYGATTLETGVPSRFSGSGSGTDYTLTISSLQPEDFATYYCQQSWNTPWTFGQGTKLEIKRLEDLKNVFPPEVAVFEPSKAEISRTQKATLVCLATGFYPPHVELSWWVNGKEVHDGVCTDPQPLKEQPALNDSRYCLSSRLRVSATFWQNPRNHFRCQVQFYGLSENDEWTQDRAKPVTQIVSAEAWGRADCGFTSESYQQGVLSATILYEILLGKATLYAVLVSALVLMAMVKRKDSRGRAKRSGSGATNFSLLKQAGDVEENPGPTSMDWIWRILFLVGAATGAHSFEQVQLQQPGAELVKPGASVKMSCKASGYAFSSSWINWMKQKPGQGLEWIGQIYPGDGDTNYNGKFKGRATLTADTSSSTAYMQLSSLTSEDSAVYFCARSITTVVGCAMDYWGQGTSVTVSSTRIQNPDPAVYQLRDSKSSDKFVCLFTDFDSQINVSQSKDSDVYITDKCVLDMRSMDFKSNSAVAWSNKSDFTCANAFNNSIIPEDTFFPSPESSCDVKLVEKSFETDTNLNFQNLSVIGFRILLLKVAGFNLLMTLRLWSS

SEQ ID NO: 44031 - protein, 764 aa, synthetic construct
MALPVTALLLPLALLLHAARPDIQMTQSPSSLSASVGDRVTITCKASDHINNWLAWYQQKPGQAPKLLIYGATTLETGVPSRFSGSGSGTDYTLTISSLQPEDFATYYCQQSWNTPWTFGQGTKLEIKRLEDLKNVFPPEVAVFEPSEAEISHTQKATLVCLATGFYPDHVELSWWVNGKEVHSGVCTDPQPLKEQPALNDSRYCLSSRLRVSATFWQNPRNHFRCQVQFYGLSENDEWTQDRAKPVTQIVSAEAWGRADCGFTSESYQQGVLSATILYEILLGKATLYAVLVSALVLMAMVKRKDSRGRAKRSGSGATNFSLLKQAGDVEENPGPTSTMDWIWRILFLVGAATGAHSGPQVQLQESGPGLVKPSQTLSLTCTVSGASITTGEYYWNWFRQPPGKGLEWMGAIAASGSTTYSPSFESRTSISRDTSKNQFSLKLSSVTAADTAVYYCGRSFGVAAVTTGQNRGQGTLVTVSSGSGGGGSGGGGSGGGGSFEQVQLQQPGAELVKPGASVKMSCKASGYAFSSSWINWMKQKPGQGLEWIGQIYPGDGDTNYNGKFKGRATLTADTSSSTAYMQLSSLTSEDSAVYFCARSITTVVGCAMDYWGQGTSVTVSSTRIQNPDPAVYQLRDSKSSDKSVCLFTDFDSQTNVSQSKDSDVYITDKCVLDMRSMDFKSNSAVAWSNKSDFACANAFNNSIIPEDTFFPSPESSCDVKLVEKSFETDTNLNFQNLSVIGFRILLLKVAGFNLLMTLRLWSS

SEQ ID NO: 44032 - protein, 905 aa, synthetic construct
MALPVTALLLPLALLLHAARPQVQLQESGPGLVKPSQTLSLTCTVSGGSITTGEFYWNWFRQPPGKGLEWMGAIAASGSTTYSPSFESRTSISRDTSKNQFSLKLSSVTAADTAVYYCGRSFGVAAVTTGQNRGQGTLVTVSSGTGGGGSGGGGSGGGGSEFDIQMTQSPSSLSASVGDRVTITCKASDHINNWLAWYQQKPGQAPKLLIYGATTLETGVPSRFSGSGSGTDYTLTISSLQPEDFATYYCQQSWNTPWTFGQGTKLEIKRLEIQNPDPAVYQLRDSKSSDKSVCLFTDFDSQTNVSQSKDSDVYITDKCVLDMRSMDFKSNSAVAWSNKSDFACANAFNNSIIPEDTFFPSSDVPCDVKLVEKSFETDTNLNFQNLSVIGFRILLLKVAGFNLLMTLRLWSSRAKRSGSGVKQTLNFDLLKLAGDVESNPGPTSTMDWIWRILFLVGAATGAHSGPEVQLVESGGGLVQPGGSLRLSCAASGRTFTMGWYRQAPGKEREFVAAISLSPTLAYYADSVKGRFTISRDNSKNTVVLQMNSLRAEDTALYYCAADRKSVMSIRPDYWGQGTLVTVSSGSGGGGSGGGGSGGGGSFEQVQLQQPGAELVKPGASVKMSCKASGYAFSSSWINWMKQKPGQGLEWIGQIYPGDGDTNYNGKFKGRATLTADTSSSTAYMQLSSLTSEDSAVYFCARSITTVVGCAMDYWGQGTSVTVSSTREDLKNVFPPEVAVFEPSKAEIAHTQKATLVCLATGFYPDHVELSWWVNGKEVHSGVCTDPQPLKEQPALNDSRYCLSSRLRVSATFWQNPRNHFRCQVQFYGLSENDEWTQDRAKPVTQIVSAEAWGRADCGITSASYHQGVLSATILYEILLGKATLYAVLVSALVLMAMVKRKDSRG

SEQ ID NO: 44033 - protein, 768 aa, synthetic construct
MALPVTALLLPLALLLHAARPQVQLQESGPGLVKPSQTLSLTCTVSGGSITTGEFYWNWFRQPPGKGLEWMGAIAASGSTTYSPSFESRTSISRDTSKNQFSLKLSSVTAADTAVYYCGRSFGVAAVTTGQNRGQGTLVTVSSGTGGGGSGGGGSGGGGSEFDIQMTQSPSSLSASVGDRVTITCKASDHINNWLAWYQQKPGQAPKLLIYGATTLETGVPSRFSGSGSGTDYTLTISSLQPEDFATYYCQQSWNTPWTFGQGTKLEIKRLEIQNPDPAVYQLRDSKSSDKSVCLFTDFDSQTNVSQSKDSDVYITDKCVLDMRSMDFKSNSAVAWSNKSDFACANAFNNSIIPEDTFFPSSDVPCDVKLVEKSFETDTNLNFQNLSVIGFRILLLKVAGFNLLMTLRLWSSRAKRSGSGVKQTLNFDLLKLAGDVESNPGPTSTMDWIWRILFLVGAATGAHSFEQVQLQQPGAELVKPGASVKMSCKASGYAFSSSWINWMKQKPGQGLEWIGQIYPGDGDTNYNGKFKGRATLTADTSSSTAYMQLSSLTSEDSAVYFCARSITTVVGCAMDYWGQGTSVTVSSTREDLKNVFPPEVAVFEPSKAEIAHTQKATLVCLATGFYPDHVELSWWVNGKEVHSGVCTDPQPLKEQPALNDSRYCLSSRLRVSATFWQNPRNHFRCQVQFYGLSENDEWTQDRAKPVTQIVSAEAWGRADCGITSASYHQGVLSATILYEILLGKATLYAVLVSALVLMAMVKRKDSRG

SEQ ID NO: 44034 - protein, 901 aa, synthetic construct
MALPVTALLLPLALLLHAARPEVQLVESGGGLVQAGGSLRLSCAASGRTFSMGWFRQAPGKEREFVAAITYSGGSPYYADSVKGRFTISRDNAKNTVYLQMNSLKPEDTAVYYCAANPTYGSDWNAENWGQGTQVTVSSGTGGGGSGGGGSGGGGSEFDIQMTQSPSSLSASVGDRVTITCKASDHINNWLAWYQQKPGQAPKLLIYGATTLETGVPSRFSGSGSGTDYTLTISSLQPEDFATYYCQQSWNTPWTFGQGTKLEIKRLEDLKNVFPPEVAVFEPSEAEISHTQKATLVCLATGFYPDHVELSWWVNGKEVHSGVCTDPQPLKEQPALNDSRYCLSSRLRVSATFWQNPRNHFRCQVQFYGLSENDEWTQDRAKPVTQIVSAEAWGRADCGFTSESYQQGVLSATILYEILLGKATLYAVLVSALVLMAMVKRKDSRGRAKRSGSGATNFSLLKQAGDVEENPGPTSTMDWIWRILFLVGAATGAHSGPQVQLQESGPGLVKPSQTLSLTCTVSGASITTGEYYWNWFRQPPGKGLEWMGAIAASGSTTYSPSFESRTSISRDTSKNQFSLKLSSVTAADTAVYYCGRSFGVAAVTTGQNRGQGTLVTVSSGSGGGGSGGGGSGGGGSFEQVQLQQPGAELVKPGASVKMSCKASGYAFSSSWINWMKQKPGQGLEWIGQIYPGDGDTNYNGKFKGRATLTADTSSSTAYMQLSSLTSEDSAVYFCARSITTVVGCAMDYWGQGTSVTVSSTRIQNPDPAVYQLRDSKSSDKSVCLFTDFDSQTNVSQSKDSDVYITDKCVLDMRSMDFKSNSAVAWSNKSDFACANAFNNSIIPEDTFFPSPESSCDVKLVEKSFETDTNLNFQNLSVIGFRILLLKVAGFNLLMTLRLWSS

SEQ ID NO: 44035 - protein, 908 aa, synthetic construct
MALPVTALLLPLALLLHAARPEVQLVESGGGLVQAGGSLRLSCAASGRTFSMGWFRQAPGKEREFVAAITYSGGSPYYADSVKGRFTISRDNAKNTVYLQMNSLKPEDTAVYYCAANPTYGSDWNAENWGQGTQVTVSSGTGGGGSGGGGSGGGGSEFDIQMTQSPSSLSASVGDRVTITCKASDHINNWLAWYQQKPGQAPKLLIYGATTLETGVPSRFSGSGSGTDYTLTISSLQPEDFATYYCQQSWNTPWTFGQGTKLEIKRLEIQNPDPAVYQLRDSKSSDKSVCLFTDFDSQTNVSQSKDSDVYITDKCVLDMRSMDFKSNSAVAWSNKSDFACANAFNNSIIPEDTFFPSSDVPCDVKLVEKSFETDTNLNFQNLSVIGFRILLLKVAGFNLLMTLRLWSSRAKRSGSGVKQTLNFDLLKLAGDVESNPGPTSTMDWIWRILFLVGAATGAHSGPQVQLVESGGGLVQPGGSLRLSCAASGNINSRNCMGWFRQAPGKGREGVAAIGQVTGRTYYVDSVKGRFTISLDNSKNTLYLQMNSLRAEDTAVYYCAAAPGCLLSALRSADYRNWGQGTLVTVSSGSGGGGSGGGGSGGGGSFEQVQLQQPGAELVKPGASVKMSCKASGYAFSSSWINWMKQKPGQGLEWIGQIYPGDGDTNYNGKFKGRATLTADTSSSTAYMQLSSLTSEDSAVYFCARSITTVVGCAMDYWGQGTSVTVSSTREDLKNVFPPEVAVFEPSKAEIAHTQKATLVCLATGFYPDHVELSWWVNGKEVHSGVCTDPQPLKEQPALNDSRYCLSSRLRVSATFWQNPRNHFRCQVQFYGLSENDEWTQDRAKPVTQIVSAEAWGRADCGITSASYHQGVLSATILYEILLGKATLYAVLVSALVLMAMVKRKDSRG

SEQ ID NO: 44036 - protein, 904 aa, synthetic construct
MALPVTALLLPLALLLHAARPEVQLVESGGGLVQAGGSLRLSCAASGRTFSMGWFRQAPGKEREFVAAITYSGGSPYYADSVKGRFTISRDNAKNTVYLQMNSLKPEDTAVYYCAANPTYGSDWNAENWGQGTQVTVSSGTGGGGSGGGGSGGGGSEFDIQMTQSPSSLSASVGDRVTITCKASDHINNWLAWYQQKPGQAPKLLIYGATTLETGVPSRFSGSGSGTDYTLTISSLQPEDFATYYCQQSWNTPWTFGQGTKLEIKRLEDLKNVFPPEVAVFEPSEAEISHTQKATLVCLATGFYPDHVELSWWVNGKEVHSGVCTDPQPLKEQPALNDSRYCLSSRLRVSATFWQNPRNHFRCQVQFYGLSENDEWTQDRAKPVTQIVSAEAWGRADCGFTSESYQQGVLSATILYEILLGKATLYAVLVSALVLMAMVKRKDSRGRAKRSGSGATNFSLLKQAGDVEENPGPTSTMDWIWRILFLVGAATGAHSGPQVQLVESGGGLVQPGGSLRLSCAASGNINSRNCMGWFRQAPGKGREGVAAIGQVTGRTYYVDSVKGRFTISLDNSKNTLYLQMNSLRAEDTAVYYCAAAPGCLLSALRSADYRNWGQGTLVTVSSGSGGGGSGGGGSGGGGSFEQVQLQQPGAELVKPGASVKMSCKASGYAFSSSWINWMKQKPGQGLEWIGQIYPGDGDTNYNGKFKGRATLTADTSSSTAYMQLSSLTSEDSAVYFCARSITTVVGCAMDYWGQGTSVTVSSTRIQNPDPAVYQLRDSKSSDKSVCLFTDFDSQTNVSQSKDSDVYITDKCVLDMRSMDFKSNSAVAWSNKSDFACANAFNNSIIPEDTFFPSPESSCDVKLVEKSFETDTNLNFQNLSVIGFRILLLKVAGFNLLMTLRLWSS

SEQ ID NO: 44037 - protein, 904 aa, synthetic construct
MALPVTALLLPLALLLHAARPEVQLVESGGGLVQAGGSLRLSCAASGRTFTMGWFRQAPGKEREFVAAISLSPTLAYYADSVKGRFTISRDNAKNTVVLQMNSLKPEDTALYYCAADRKSVMSIRPDYWGQGTQVTVSSGTGGGGSGGGGSGGGGSEFDIQMTQSPSSLSASVGDRVTITCKASDHINNWLAWYQQKPGQAPKLLIYGATTLETGVPSRFSGSGSGTDYTLTISSLQPEDFATYYCQQSWNTPWTFGQGTKLEIKRLEDLKNVFPPEVAVFEPSEAEISHTQKATLVCLATGFYPDHVELSWWVNGKEVHSGVCTDPQPLKEQPALNDSRYCLSSRLRVSATFWQNPRNHFRCQVQFYGLSENDEWTQDRAKPVTQIVSAEAWGRADCGFTSESYQQGVLSATILYEILLGKATLYAVLVSALVLMAMVKRKDSRGRAKRSGSGATNFSLLKQAGDVEENPGPTSTMDWIWRILFLVGAATGAHSGPQVQLVESGGGLVQPGGSLRLSCAASGNINSRNCMGWFRQAPGKGREGVAAIGQVTGRTYYVDSVKGRFTISLDNSKNTLYLQMNSLRAEDTAVYYCAAAPGCLLSALRSADYRNWGQGTLVTVSSGSGGGGSGGGGSGGGGSFEQVQLQQPGAELVKPGASVKMSCKASGYAFSSSWINWMKQKPGQGLEWIGQIYPGDGDTNYNGKFKGRATLTADTSSSTAYMQLSSLTSEDSAVYFCARSITTVVGCAMDYWGQGTSVTVSSTRIQNPDPAVYQLRDSKSSDKSVCLFTDFDSQTNVSQSKDSDVYITDKCVLDMRSMDFKSNSAVAWSNKSDFACANAFNNSIIPEDTFFPSPESSCDVKLVEKSFETDTNLNFQNLSVIGFRILLLKVAGFNLLMTLRLWSS

SEQ ID NO: 44038 - protein, 908 aa, synthetic construct
MALPVTALLLPLALLLHAARPQVQLQESGPGLVKPSQTLSLTCTVSGGSITTGEFYWNWFRQPPGKGLEWMGAIAASGSTTYSPSFESRTSISRDTSKNQFSLKLSSVTAADTAVYYCGRSFGVAAVTTGQNRGQGTLVTVSSGTGGGGSGGGGSGGGGSEFDIQMTQSPSSLSASVGDRVTITCKASDHINNWLAWYQQKPGQAPKLLIYGATTLETGVPSRFSGSGSGTDYTLTISSLQPEDFATYYCQQSWNTPWTFGQGTKLEIKRLEDLKNVFPPEVAVFEPSEAEISHTQKATLVCLATGFYPDHVELSWWVNGKEVHSGVCTDPQPLKEQPALNDSRYCLSSRLRVSATFWQNPRNHFRCQVQFYGLSENDEWTQDRAKPVTQIVSAEAWGRADCGFTSESYQQGVLSATILYEILLGKATLYAVLVSALVLMAMVKRKDSRGRAKRSGSGATNFSLLKQAGDVEENPGPTSTMDWIWRILFLVGAATGAHSGPQVQLVESGGGLVQPGGSLRLSCAASGNINSRNCMGWFRQAPGKGREGVAAIGQVTGRTYYVDSVKGRFTISLDNSKNTLYLQMNSLRAEDTAVYYCAAAPGCLLSALRSADYRNWGQGTLVTVSSGSGGGGSGGGGSGGGGSFEQVQLQQPGAELVKPGASVKMSCKASGYAFSSSWINWMKQKPGQGLEWIGQIYPGDGDTNYNGKFKGRATLTADTSSSTAYMQLSSLTSEDSAVYFCARSITTVVGCAMDYWGQGTSVTVSSTRIQNPDPAVYQLRDSKSSDKSVCLFTDFDSQTNVSQSKDSDVYITDKCVLDMRSMDFKSNSAVAWSNKSDFACANAFNNSIIPEDTFFPSPESSCDVKLVEKSFETDTNLNFQNLSVIGFRILLLKVAGFNLLMTLRLWSS

SEQ ID NO: 44039 - protein, 487 aa, synthetic construct
MALPVTALLLPLALLLHAARPEIVLTQSPATLSLSPGERATLSCRASQSVSSYLAWYQQKPGQAPRLLIYDASNRATGIPARFSGSGSGTDFTLTISSLEPEDFAVYYCQQRSNWPITFGQGTRLEIKGGGGSGGGGSGGGGSEVQLVESGGGLVQPGRSLRLSCAASGFTFNDYAMHWVRQAPGKGLEWVSTISWNSGSIGYADSVKGRFTISRDNAKKSLYLQMNSLRAEDTALYYCAKDIQYGNYYYGMDVWGQGTTVTVSSTRKIEVMYPPPYLDNEKSNGTIIHVKGKHLCPSPLFPGPSKPFWVLVVVGGVLACYSLLVTVAFIIFWVRSKRSRLLHSDYMNMTPRRPGPTRKHYQPYAPPRDFAAYRSRVKFSRSADAPAYQQGQNQLYNELNLGRREEYDVLDKRRGRDPEMGGKPRRKNPQEGLYNELQKDKMAEAYSEIGMKGERRRGKGHDGLYQGLSTATKDTYDALHMQALPPR

SEQ ID NO: 44040 - protein, 493 aa, synthetic construct
MALPVTALLLPLALLLHAARPEIVLTQSPATLSLSPGERATLSCRASQSVSSYLAWYQQKPGQAPRLLIYDASNRATGIPARFSGSGSGTDFTLTISSLEPEDFAVYYCQQRSNWPITFGQGTRLEIKGGGGSGGGGSGGGGSEVQLVESGGGLVQPGRSLRLSCAASGFTFNDYAMHWVRQAPGKGLEWVSTISWNSGSIGYADSVKGRFTISRDNAKKSLYLQMNSLRAEDTALYYCAKDIQYGNYYYGMDVWGQGTTVTVSSTRAKPTTTPAPRPPTPAPTIASQPLSLRPEACRPAAGGAVHTRGLDFACDIYIWAPLAGTCGVLLLSLVITLYCKRGRKKLLYIFKQPFMRPVQTTQEEDGCSCRFPEEEEGGCELRVKFSRSADAPAYQQGQNQLYNELNLGRREEYDVLDKRRGRDPEMGGKPRRKNPQEGLYNELQKDKMAEAYSEIGMKGERRRGKGHDGLYQGLSTATKDTYDALHMQALPPR

SEQ ID NO: 44041 - protein, 493 aa, synthetic construct
MALPVTALLLPLALLLHAARPEVQLVESGGGLVQPGRSLRLSCAASGFTFNDYAMHWVRQAPGKGLEWVSTISWNSGSIGYADSVKGRFTISRDNAKKSLYLQMNSLRAEDTALYYCAKDIQYGNYYYGMDVWGQGTTVTVSSGGGGSGGGGSGGGGSEIVLTQSPATLSLSPGERATLSCRASQSVSSYLAWYQQKPGQAPRLLIYDASNRATGIPARFSGSGSGTDFTLTISSLEPEDFAVYYCQQRSNWPITFGQGTRLEIKTRAKPTTTPAPRPPTPAPTIASQPLSLRPEACRPAAGGAVHTRGLDFACDIYIWAPLAGTCGVLLLSLVITLYCKRGRKKLLYIFKQPFMRPVQTTQEEDGCSCRFPEEEEGGCELRVKFSRSADAPAYQQGQNQLYNELNLGRREEYDVLDKRRGRDPEMGGKPRRKNPQEGLYNELQKDKMAEAYSEIGMKGERRRGKGHDGLYQGLSTATKDTYDALHMQALPPR

SEQ ID NO: 44042 - protein, 626 aa, synthetic construct
MALPVTALLLPLALLLHAARPEIVLTQSPATLSLSPGERATLSCRASQSVSSYLAWYQQKPGQAPRLLIYDASNRATGIPARFSGSGSGTDFTLTISSLEPEDFAVYYCQQRSNWPITFGQGTRLEIKLEIQNPDPAVYQLRDSKSSDKSVCLFTDFDSQTNVSQSKDSDVYITDKCVLDMRSMDFKSNSAVAWSNKSDFACANAFNNSIIPEDTFFPSSDVPCDVKLVEKSFETDTNLNFQNLSVIGFRILLLKVAGFNLLMTLRLWSSRAKRSGSGVKQTLNFDLLKLAGDVESNPGPTSMDWIWRILFLVGAATGAHSFEEVQLVESGGGLVQPGRSLRLSCAASGFTFNDYAMHWVRQAPGKGLEWVSTISWNSGSIGYADSVKGRFTISRDNAKKSLYLQMNSLRAEDTALYYCAKDIQYGNYYYGMDVWGQGTTVTVSSTREDLKNVFPPEVAVFEPSKAEIAHTQKATLVCLATGFYPDHVELSWWVNGKEVHSGVCTDPQPLKEQPALNDSRYCLSSRLRVSATFWQNPRNHFRCQVQFYGLSENDEWTQDRAKPVTQIVSAEAWGRADCGITSASYHQGVLSATILYEILLGKATLYAVLVSALVLMAMVKRKDSRG

SEQ ID NO: 44043 - protein, 622 aa, synthetic construct
MALPVTALLLPLALLLHAARPEIVLTQSPATLSLSPGERATLSCRASQSVSSYLAWYQQKPGQAPRLLIYDASNRATGIPARFSGSGSGTDFTLTISSLEPEDFAVYYCQQRSNWPITFGQGTRLEIKLEDLKNVFPPEVAVFEPSKAEIAHTQKATLVCLATGFYPDHVELSWWVNGKEVHSGVCTDPQPLKEQPALNDSRYCLSSRLRVSATFWQNPRNHFRCQVQFYGLSENDEWTQDRAKPVTQIVSAEAWGRADCGITSASYHQGVLSATILYEILLGKATLYAVLVSALVLMAMVKRKDSRGRAKRSGSGATNFSLLKQAGDVEENPGPTSMDWIWRILFLVGAATGAHSFEEVQLVESGGGLVQPGRSLRLSCAASGFTFNDYAMHWVRQAPGKGLEWVSTISWNSGSIGYADSVKGRFTISRDNAKKSLYLQMNSLRAEDTALYYCAKDIQYGNYYYGMDVWGQGTTVTVSSTRIQNPDPAVYQLRDSKSSDKSVCLFTDFDSQTNVSQSKDSDVYITDKCVLDMRSMDFKSNSAVAWSNKSDFACANAFNNSIIPEDTFFPSSDVPCDVKLVEKSFETDTNLNFQNLSVIGFRILLLKVAGFNLLMTLRLWSS

SEQ ID NO: 44044 - protein, 622 aa, synthetic construct
MALPVTALLLPLALLLHAARPEIVLTQSPATLSLSPGERATLSCRASQSVSSYLAWYQQKPGQAPRLLIYDASNRATGIPARFSGSGSGTDFTLTISSLEPEDFAVYYCQQRSNWPITFGQGTRLEIKLEDLKNVFPPEVAVFEPSEAEISHTQKATLVCLATGFYPDHVELSWWVNGKEVHSGVCTDPQPLKEQPALNDSRYCLSSRLRVSATFWQNPRNHFRCQVQFYGLSENDEWTQDRAKPVTQIVSAEAWGRADCGFTSESYQQGVLSATILYEILLGKATLYAVLVSALVLMAMVKRKDSRGRAKRSGSGATNFSLLKQAGDVEENPGPTSMDWIWRILFLVGAATGAHSFEEVQLVESGGGLVQPGRSLRLSCAASGFTFNDYAMHWVRQAPGKGLEWVSTISWNSGSIGYADSVKGRFTISRDNAKKSLYLQMNSLRAEDTALYYCAKDIQYGNYYYGMDVWGQGTTVTVSSTRIQNPDPAVYQLRDSKSSDKSVCLFTDFDSQTNVSQSKDSDVYITDKCVLDMRSMDFKSNSAVAWSNKSDFACANAFNNSIIPEDTFFPSPESSCDVKLVEKSFETDTNLNFQNLSVIGFRILLLKVAGFNLLMTLRLWSS

SEQ ID NO: 44045 - protein, 626 aa, synthetic construct
MALPVTALLLPLALLLHAARPEIVLTQSPATLSLSPGERATLSCRASQSVSSYLAWYQQKPGQAPRLLIYDASNRATGIPARFSGSGSGTDFTLTISSLEPEDFAVYYCQQRSNWPITFGQGTRLEIKLEIQNPDPAVYQLRDSKSSDKSVCLFTDFDSQTNVSQSKDSDVYITDKCVLDMRSMDFKSNSAVAWSNKSDFACANAFNNSIIPEDTFFPSPESSCDVKLVEKSFETDTNLNFQNLSVIGFRILLLKVAGFNLLMTLRLWSSRAKRSGSGVKQTLNFDLLKLAGDVESNPGPTSMDWIWRILFLVGAATGAHSFEEVQLVESGGGLVQPGRSLRLSCAASGFTFNDYAMHWVRQAPGKGLEWVSTISWNSGSIGYADSVKGRFTISRDNAKKSLYLQMNSLRAEDTALYYCAKDIQYGNYYYGMDVWGQGTTVTVSSTREDLKNVFPPEVAVFEPSEAEISHTQKATLVCLATGFYPDHVELSWWVNGKEVHSGVCTDPQPLKEQPALNDSRYCLSSRLRVSATFWQNPRNHFRCQVQFYGLSENDEWTQDRAKPVTQIVSAEAWGRADCGFTSESYQQGVLSATILYEILLGKATLYAVLVSALVLMAMVKRKDSRG

SEQ ID NO: 44046 - protein, 638 aa, synthetic construct
MALPVTALLLPLALLLHAARPLEEDLKNVFPPEVAVFEPSKAEIAHTQKATLVCLATGFYPDHVELSWWVNGKEVHSGVCTDPQPLKEQPALNDSRYCLSSRLRVSATFWQNPRNHFRCQVQFYGLSENDEWTQDRAKPVTQIVSAEAWGRADCGITSASYHQGVLSATILYEILLGKATLYAVLVSALVLMAMVKRKDSRGRAKRSGSGATNFSLLKQAGDVEENPGPTSMALPVTALLLPLALLLHAARPEIVLTQSPATLSLSPGERATLSCRASQSVSSYLAWYQQKPGQAPRLLIYDASNRATGIPARFSGSGSGTDFTLTISSLEPEDFAVYYCQQRSNWPITFGQGTRLEIKGGGGSGGGGSGGGGSEVQLVESGGGLVQPGRSLRLSCAASGFTFNDYAMHWVRQAPGKGLEWVSTISWNSGSIGYADSVKGRFTISRDNAKKSLYLQMNSLRAEDTALYYCAKDIQYGNYYYGMDVWGQGTTVTVSSTRIQNPDPAVYQLRDSKSSDKSVCLFTDFDSQTNVSQSKDSDVYITDKCVLDMRSMDFKSNSAVAWSNKSDFACANAFNNSIIPEDTFFPSSDVPCDVKLVEKSFETDTNLNFQNLSVIGFRILLLKVAGFNLLMTLRLWSS

SEQ ID NO: 44047 - protein, 645 aa, synthetic construct
MALPVTALLLPLALLLHAARPLEGSGDRPDPAVYQLRDSKSSDKSVCLFTDFDSQTNVSQSKDSDVYITDKCVLDMRSMDFKSNSAVAWSNKSDFACANAFNNSIIPEDTFFPSPESSCDVKLVEKSFETDTNLNFQNLSVIGFRILLLKVAGFNLLMTLRLWSSSSRAKRSGSGVKQTLNFDLLKLAGDVESNPGPTSMALPVTALLLPLALLLHAARPEIVLTQSPATLSLSPGERATLSCRASQSVSSYLAWYQQKPGQAPRLLIYDASNRATGIPARFSGSGSGTDFTLTISSLEPEDFAVYYCQQRSNWPITFGQGTRLEIKGGGGSGGGGSGGGGSEVQLVESGGGLVQPGRSLRLSCAASGFTFNDYAMHWVRQAPGKGLEWVSTISWNSGSIGYADSVKGRFTISRDNAKKSLYLQMNSLRAEDTALYYCAKDIQYGNYYYGMDVWGQGTTVTVSSTREDLKNVFPPEVAVFEPSEAEISHTQKATLVCLATGFYPDHVELSWWVNGKEVHSGVCTDPQPLKEQPALNDSRYCLSSRLRVSATFWQNPRNHFRCQVQFYGLSENDEWTQDRAKPVTQIVSAEAWGRADCGFTSESYQQGVLSATILYEILLGKATLYAVLVSALVLMAMVKRKDSRG

SEQ ID NO: 44048 - protein, 622 aa, synthetic construct
MALPVTALLLPLALLLHAARPEIVLTQSPATLSLSPGERATLSCRASQSVSSYLAWYQQKPGQAPRLLIYDASNRATGIPARFSGSGSGTDFTLTISSLEPEDFAVYYCQQRSNWPITFGQGTRLEIKLEDLKNVFPPEVAVFEPSEAEISHTQKATLVCLATGFYPDHVELSWWVNGKEVHSGVSTDPQPLKEQPALNDSRYCLSSRLRVSATFWQNPRNHFRCQVQFYGLSENDEWTQDRAKPVTQIVSAEAWGRADCGFTSESYQQGVLSATILYEILLGKATLYAVLVSALVLMAMVKRKDSRGRAKRSGSGATNFSLLKQAGDVEENPGPTSMDWIWRILFLVGAATGAHSFEEVQLVESGGGLVQPGRSLRLSCAASGFTFNDYAMHWVRQAPGKGLEWVSTISWNSGSIGYADSVKGRFTISRDNAKKSLYLQMNSLRAEDTALYYCAKDIQYGNYYYGMDVWGQGTTVTVSSTRIQNPDPAVYQLRDSKSSDKSVCLFTDFDSQTNVSQSKDSDVYITDKTVLDMRSMDFKSNSAVAWSNKSDFACANAFNNSIIPEDTFFPSPESSCDVKLVEKSFETDTNLNFQNLSVIGFRILLLKVAGFNLLMTLRLWSS

SEQ ID NO: 44049 - protein, 630 aa, synthetic construct
MALPVTALLLPLALLLHAARPEIVLTQSPATLSLSPGERATLSCRASQSVSSYLAWYQQKPGQAPRLLIYDASNRATGIPARFSGSGSGTDFTLTISSLEPEDFAVYYCQQRSNWPITFGQGTRLEIKLEDKQLDADVSPKPTIFLPSIAETKLQKAGTYLCLLEKFFPDVIKIHWQEKKSNTILGSQEGNTMKTNDTYMKFSWLTVPEKSLDKEHRCIVRHENNKNGVDQEIIFPPIKTDVITMDPKDNCSKDANDTLLLQLTNTSAYYMYLLLLLKSVVYFAIITCCLLRRTAFCCNGEKSRAKRSGSGATNFSLLKQAGDVEENPGPTSMDWIWRILFLVGAATGAHSFEEVQLVESGGGLVQPGRSLRLSCAASGFTFNDYAMHWVRQAPGKGLEWVSTISWNSGSIGYADSVKGRFTISRDNAKKSLYLQMNSLRAEDTALYYCAKDIQYGNYYYGMDVWGQGTTVTVSSTRSQPHTKPSVFVMKNGTNVACLVKEFYPKDIRINLVSSKKITEFDPAIVISPSGKYNAVKLGKYEDSNSVTCSVQHDNKTVHSTDFEVKTDSTDHVKPKETENTKQPSKSCHKPKAIVHTEKVNMMSLTVLGLRMLFAKTVAVNFLLTAKLFFL

SEQ ID NO: 44050 - protein, 630 aa, synthetic construct
MALPVTALLLPLALLLHAARPEIVLTQSPATLSLSPGERATLSCRASQSVSSYLAWYQQKPGQAPRLLIYDASNRATGIPARFSGSGSGTDFTLTISSLEPEDFAVYYCQQRSNWPITFGQGTRLEIKLESQPHTKPSVFVMKNGTNVACLVKEFYPKDIRINLVSSKKITEFDPAIVISPSGKYNAVKLGKYEDSNSVTCSVQHDNKTVHSTDFEVKTDSTDHVKPKETENTKQPSKSCHKPKAIVHTEKVNMMSLTVLGLRMLFAKTVAVNFLLTAKLFFLRAKRSGSGATNFSLLKQAGDVEENPGPTSMDWIWRILFLVGAATGAHSFEEVQLVESGGGLVQPGRSLRLSCAASGFTFNDYAMHWVRQAPGKGLEWVSTISWNSGSIGYADSVKGRFTISRDNAKKSLYLQMNSLRAEDTALYYCAKDIQYGNYYYGMDVWGQGTTVTVSSTRDKQLDADVSPKPTIFLPSIAETKLQKAGTYLCLLEKFFPDVIKIHWQEKKSNTILGSQEGNTMKTNDTYMKFSWLTVPEKSLDKEHRCIVRHENNKNGVDQEIIFPPIKTDVITMDPKDNCSKDANDTLLLQLTNTSAYYMYLLLLLKSVVYFAIITCCLLRRTAFCCNGEKS

SEQ ID NO: 44051 - protein, 645 aa, synthetic construct
MALPVTALLLPLALLLHAARPLEDKQLDADVSPKPTIFLPSIAETKLQKAGTYLCLLEKFFPDVIKIHWQEKKSNTILGSQEGNTMKTNDTYMKFSWLTVPEKSLDKEHRCIVRHENNKNGVDQEIIFPPIKTDVITMDPKDNCSKDANDTLLLQLTNTSAYYMYLLLLLKSVVYFAIITCCLLRRTAFCCNGEKSRAKRSGSGATNFSLLKQAGDVEENPGPTSMALPVTALLLPLALLLHAARPEIVLTQSPATLSLSPGERATLSCRASQSVSSYLAWYQQKPGQAPRLLIYDASNRATGIPARFSGSGSGTDFTLTISSLEPEDFAVYYCQQRSNWPITFGQGTRLEIKGGGGSGGGGSGGGGSEVQLVESGGGLVQPGRSLRLSCAASGFTFNDYAMHWVRQAPGKGLEWVSTISWNSGSIGYADSVKGRFTISRDNAKKSLYLQMNSLRAEDTALYYCAKDIQYGNYYYGMDVWGQGTTVTVSSTRSQPHTKPSVFVMKNGTNVACLVKEFYPKDIRINLVSSKKITEFDPAIVISPSGKYNAVKLGKYEDSNSVTCSVQHDNKTVHSTDFEVKTDSTDHVKPKETENTKQPSKSCHKPKAIVHTEKVNMMSLTVLGLRMLFAKTVAVNFLLTAKLFFL

SEQ ID NO: 44052 - protein, 799 aa, synthetic construct
MALPVTALLLPLALLLHAARPEIVLTQSPATLSLSPGERATLSCRASQSVSSYLAWYQQKPGQAPRLLIYDASNRATGIPARFSGSGSGTDFTLTISSLEPEDFAVYYCQQRSNWPITFGQGTRLEIKGQPKANPTVTLFPPSSEELQANKATLVCLISDFYPGAVTVAWKADGSPVKAGVETTKPSKQSNNKYAASSYLSLTPEQWKSHRSYSCQVTHEGSTVEKTVAPTECSGSQSFGLLDPKLCYLLDGILFIYGVILTALFLRVKFSRSADAPAYQQGQNQLYNELNLGRREEYDVLDKRRGRDPEMGGKPQRRKNPQEGLYNELQKDKMAEAYSEIGMKGERRRGKGHDGLYQGLSTATKDTYDALHMQALPPRRAKRSGSGATNFSLLKQAGDVEENPGPTSMDWIWRILFLVGAATGAHSFEEVQLVESGGGLVQPGRSLRLSCAASGFTFNDYAMHWVRQAPGKGLEWVSTISWNSGSIGYADSVKGRFTISRDNAKKSLYLQMNSLRAEDTALYYCAKDIQYGNYYYGMDVWGQGTTVTVSSASTKGPSVFPLAPSSKSTSGGTAALGCLVKDYFPEPVTVSWNSGALTSGVHTFPAVLQSSGLYSLSSVVTVPSSSLGTQTYICNVNHKPSNTKVDKRVEPKSCGTQSFGLLDPKLCYLLDGILFIYGVILTALFLRVKFSRSADAPAYQQGQNQLYNELNLGRREEYDVLDKRRGRDPEMGGKPQRRKNPQEGLYNELQKDKMAEAYSEIGMKGERRRGKGHDGLYQGLSTATKDTYDALHMQALPPR

SEQ ID NO: 44053 - protein, 818 aa, synthetic construct
MALPVTALLLPLALLLHAARPEIVLTQSPATLSLSPGERATLSCRASQSVSSYLAWYQQKPGQAPRLLIYDASNRATGIPARFSGSGSGTDFTLTISSLEPEDFAVYYCQQRSNWPITFGQGTRLEIKLEDLKNVFPPEVAVFEPSEAEISHTQKATLVCLATGFYPDHVELSWWVNGKEVHSGVSTDPQPLKEQPALNDSRYCLSSRLRVSATFWQNPRNHFRCQVQFYGLSENDEWTQDRAKPVTQIVSAEAWGRADCGSQSFGLLDPKLCYLLDGILFIYGVILTALFLRVKFSRSADAPAYQQGQNQLYNELNLGRREEYDVLDKRRGRDPEMGGKPQRRKNPQEGLYNELQKDKMAEAYSEIGMKGERRRGKGHDGLYQGLSTATKDTYDALHMQALPPRRAKRSGSGATNFSLLKQAGDVEENPGPTSMDWIWRILFLVGAATGAHSFEEVQLVESGGGLVQPGRSLRLSCAASGFTFNDYAMHWVRQAPGKGLEWVSTISWNSGSIGYADSVKGRFTISRDNAKKSLYLQMNSLRAEDTALYYCAKDIQYGNYYYGMDVWGQGTTVTVSSTRIQNPDPAVYQLRDSKSSDKSVCLFTDFDSQTNVSQSKDSDVYITDKTVLDMRSMDFKSNSAVAWSNKSDFACANAFNNSIIPEDTFFPSPESSCGTQSFGLLDPKLCYLLDGILFIYGVILTALFLRVKFSRSADAPAYQQGQNQLYNELNLGRREEYDVLDKRRGRDPEMGGKPQRRKNPQEGLYNELQKDKMAEAYSEIGMKGERRRGKGHDGLYQGLSTATKDTYDALHMQALPPR

SEQ ID NO: 44054 - protein, 860 aa, synthetic construct
MALPVTALLLPLALLLHAARPEIVLTQSPATLSLSPGERATLSCRASQSVSSYLAWYQQKPGQAPRLLIYDASNRATGIPARFSGSGSGTDFTLTISSLEPEDFAVYYCQQRSNWPITFGQGTRLEIKLEEDLKNVFPPEVAVFEPSEAEISHTQKATLVCLATGFYPDHVELSWWVNGKEVHSGVSTDPQPLKEQPALNDSRYCLSSRLRVSATFWQNPRNHFRCQVQFYGLSENDEWTQDRAKPVTQIVSAEAWGRADCGSQSFGLLDPKLCYLLDGILFIYGVILTALFLRVKFSRSADAPAYQQGQNQLYNELNLGRREEYDVLDKRRGRDPEMGGKPQRRKNPQEGLYNELQKDKMAEAYSEIGMKGERRRGKGHDGLYQGLSTATKDTYDALHMQALPPRRAKRSGSGATNFSLLKQAGDVEENPGPTSMDWIWRILFLVGAATGAHSFEEVQLVESGGGLVQPGRSLRLSCAASGFTFNDYAMHWVRQAPGKGLEWVSTISWNSGSIGYADSVKGRFTISRDNAKKSLYLQMNSLRAEDTALYYCAKDIQYGNYYYGMDVWGQGTTVTVSSTRIQNPDPAVYQLRDSKSSDKSVCLFTDFDSQTNVSQSKDSDVYITDKTVLDMRSMDFKSNSAVAWSNKSDFACANAFNNSIIPEDTFFPSPESSCGTQSFGLLDPKLCYLLDGILFIYGVILTALFLRSKRSRLLHSDYMNMTPRRPGPTRKHYQPYAPPRDFAAYRSRVKFSRSADAPAYQQGQNQLYNELNLGRREEYDVLDKRRGRDPEMGGKPQRRKNPQEGLYNELQKDKMAEAYSEIGMKGERRRGKGHDGLYQGLSTATKDTYDALHMQALPPR

SEQ ID NO: 44055 - protein, 903 aa, synthetic construct
MALPVTALLLPLALLLHAARPEIVLTQSPATLSLSPGERATLSCRASQSVSSYLAWYQQKPGQAPRLLIYDASNRATGIPARFSGSGSGTDFTLTISSLEPEDFAVYYCQQRSNWPITFGQGTRLEIKLEEDLKNVFPPEVAVFEPSEAEISHTQKATLVCLATGFYPDHVELSWWVNGKEVHSGVSTDPQPLKEQPALNDSRYCLSSRLRVSATFWQNPRNHFRCQVQFYGLSENDEWTQDRAKPVTQIVSAEAWGRADCGSQSFGLLDPKLCYLLDGILFIYGVILTALFLKRGRKKLLYIFKQPFMRPVQTTQEEDGCSCRFPEEEEGGCELRVKFSRSADAPAYQQGQNQLYNELNLGRREEYDVLDKRRGRDPEMGGKPQRRKNPQEGLYNELQKDKMAEAYSEIGMKGERRRGKGHDGLYQGLSTATKDTYDALHMQALPPRRAKRSGSGATNFSLLKQAGDVEENPGPTSMDWIWRILFLVGAATGAHSFEEVQLVESGGGLVQPGRSLRLSCAASGFTFNDYAMHWVRQAPGKGLEWVSTISWNSGSIGYADSVKGRFTISRDNAKKSLYLQMNSLRAEDTALYYCAKDIQYGNYYYGMDVWGQGTTVTVSSTRIQNPDPAVYQLRDSKSSDKSVCLFTDFDSQTNVSQSKDSDVYITDKTVLDMRSMDFKSNSAVAWSNKSDFACANAFNNSIIPEDTFFPSPESSCGTQSFGLLDPKLCYLLDGILFIYGVILTALFLKRGRKKLLYIFKQPFMRPVQTTQEEDGCSCRFPEEEEGGCELRVKFSRSADAPAYQQGQNQLYNELNLGRREEYDVLDKRRGRDPEMGGKPQRRKNPQEGLYNELQKDKMAEAYSEIGMKGERRRGKGHDGLYQGLSTATKDTYDALHMQALPPR

SEQ ID NO: 44056 - protein, 590 aa, synthetic construct
MALPVTALLLPLALLLHAARPEIVLTQSPATLSLSPGERATLSCRASQSVSSYLAWYQQKPGQAPRLLIYDASNRATGIPARFSGSGSGTDFTLTISSLEPEDFAVYYCQQRSNWPITFGQGTRLEIKLEQSFGLLDPKLCYLLDGILFIYGVILTALFLRVKFSRSADAPAYQQGQNQLYNELNLGRREEYDVLDKRRGRDPEMGGKPQRRKNPQEGLYNELQKDKMAEAYSEIGMKGERRRGKGHDGLYQGLSTATKDTYDALHMQALPPRRAKRSGSGATNFSLLKQAGDVEENPGPTSMDWIWRILFLVGAATGAHSFEEVQLVESGGGLVQPGRSLRLSCAASGFTFNDYAMHWVRQAPGKGLEWVSTISWNSGSIGYADSVKGRFTISRDNAKKSLYLQMNSLRAEDTALYYCAKDIQYGNYYYGMDVWGQGTTVTVSSTRQSFGLLDPKLCYLLDGILFIYGVILTALFLRVKFSRSADAPAYQQGQNQLYNELNLGRREEYDVLDKRRGRDPEMGGKPQRRKNPQEGLYNELQKDKMAEAYSEIGMKGERRRGKGHDGLYQGLSTATKDTYDALHMQALPPR

SEQ ID NO: 44057 - protein, 648 aa, synthetic construct
MALPVTALLLPLALLLHAARPEIVLTQSPATLSLSPGERATLSCRASQSVSSYLAWYQQKPGQAPRLLIYDASNRATGIPARFSGSGSGTDFTLTISSLEPEDFAVYYCQQRSNWPITFGQGTRLEIKLEGQPKANPTVTLFPPSSEELQANKATLVCLISDFYPGAVTVAWKADGSPVKAGVETTKPSKQSNNKYAASSYLSLTPEQWKSHRSYSCQVTHEGSTVEKTVAPTECSPIKTDVITMDPKDNCSKDANDTLLLQLTNTSAYYMYLLLLLKSVVYFAIITCCLLRRTAFCCNGEKSRAKRSGSGATNFSLLKQAGDVEENPGPTSMDWIWRILFLVGAATGAHSFEEVQLVESGGGLVQPGRSLRLSCAASGFTFNDYAMHWVRQAPGKGLEWVSTISWNSGSIGYADSVKGRFTISRDNAKKSLYLQMNSLRAEDTALYYCAKDIQYGNYYYGMDVWGQGTTVTVSSTRASTKGPSVFPLAPSSKSTSGGTAALGCLVKDYFPEPVTVSWNSGALTSGVHTFPAVLQSSGLYSLSSVVTVPSSSLGTQTYICNVNHKPSNTKVDKRVEPKSCEVKTDSTDHVKPKETENTKQPSKSCHKPKAIVHTEKVNMMSLTVLGLRMLFAKTVAVNFLLTAKLFFL

SEQ ID NO: 44058 - protein, 626 aa, synthetic construct
MALPVTALLLPLALLLHAARPEIVLTQSPATLSLSPGERATLSCRASQSVSSYLAWYQQKPGQAPRLLIYDASNRATGIPARFSGSGSGTDFTLTISSLEPEDFAVYYCQQRSNWPITFGQGTRLEIKLEGQPKANPTVTLFPPSSEELQANKATLVCLISDFYPGAVTVAWKADGSPVKAGVETTKPSKQSNNKYAASSYLSLTPEQWKSHRSYSCQVTHEGSTVEKTVAPTECSGRADCGITSASYHQGVLSATILYEILLGKATLYAVLVSALVLMAMVKRKDSRGRAKRSGSGATNFSLLKQAGDVEENPGPTSMDWIWRILFLVGAATGAHSFEEVQLVESGGGLVQPGRSLRLSCAASGFTFNDYAMHWVRQAPGKGLEWVSTISWNSGSIGYADSVKGRFTISRDNAKKSLYLQMNSLRAEDTALYYCAKDIQYGNYYYGMDVWGQGTTVTVSSTRASTKGPSVFPLAPSSKSTSGGTAALGCLVKDYFPEPVTVSWNSGALTSGVHTFPAVLQSSGLYSLSSVVTVPSSSLGTQTYICNVNHKPSNTKVDKRVEPKSCIPEDTFFPSSDVPCDVKLVEKSFETDTNLNFQNLSVIGFRILLLKVAGFNLLMTLRLWSS

SEQ ID NO: 44059 - protein, 626 aa, synthetic construct
MALPVTALLLPLALLLHAARPEIVLTQSPATLSLSPGERATLSCRASQSVSSYLAWYQQKPGQAPRLLIYDASNRATGIPARFSGSGSGTDFTLTISSLEPEDFAVYYCQQRSNWPITFGQGTRLEIKLEGQPKANPTVTLFPPSSEELQANKATLVCLISDFYPGAVTVAWKADGSPVKAGVETTKPSKQSNNKYAASSYLSLTPEQWKSHRSYSCQVTHEGSTVEKTVAPTECSGRADCGFTSESYQQGVLSATILYEILLGKATLYAVLVSALVLMAMVKRKDSRGRAKRSGSGATNFSLLKQAGDVEENPGPTSMDWIWRILFLVGAATGAHSFEEVQLVESGGGLVQPGRSLRLSCAASGFTFNDYAMHWVRQAPGKGLEWVSTISWNSGSIGYADSVKGRFTISRDNAKKSLYLQMNSLRAEDTALYYCAKDIQYGNYYYGMDVWGQGTTVTVSSTRASTKGPSVFPLAPSSKSTSGGTAALGCLVKDYFPEPVTVSWNSGALTSGVHTFPAVLQSSGLYSLSSVVTVPSSSLGTQTYICNVNHKPSNTKVDKRVEPKSCIPEDTFFPSPESSCDVKLVEKSFETDTNLNFQNLSVIGFRILLLKVAGFNLLMTLRLWSS

SEQ ID NO: 44060 - protein, 452 aa, synthetic construct
MALPVTALLLPLALLLHAARPEIVLTQSPATLSLSPGERATLSCRASQSVSSYLAWYQQKPGQAPRLLIYDASNRATGIPARFSGSGSGTDFTLTISSLEPEDFAVYYCQQRSNWPITFGQGTRLEIKGGGGSGGGGSGGGGSEVQLVESGGGLVQPGRSLRLSCAASGFTFNDYAMHWVRQAPGKGLEWVSTISWNSGSIGYADSVKGRFTISRDNAKKSLYLQMNSLRAEDTALYYCAKDIQYGNYYYGMDVWGQGTTVTVSSTRDGNEEMGGITQTPYKVSISGTTVILTCPQYPGSEILWQHNDKNIGGDEDDKNIGSDEDHLSLKEFSELEQSGYYVCYPRGSKPEDANFYLYLRARVCENCMEMDVMSVATIVIVDICITGGLLLLVYYWSKNRKAKAKPVTRGAGAGGRQRGQNKERPPPVPNPDYEPIRKGQRDLYSGLNQRRI

SEQ ID NO: 44061 - protein, 417 aa, synthetic construct
MALPVTALLLPLALLLHAARPEIVLTQSPATLSLSPGERATLSCRASQSVSSYLAWYQQKPGQAPRLLIYDASNRATGIPARFSGSGSGTDFTLTISSLEPEDFAVYYCQQRSNWPITFGQGTRLEIKGGGGSGGGGSGGGGSEVQLVESGGGLVQPGRSLRLSCAASGFTFNDYAMHWVRQAPGKGLEWVSTISWNSGSIGYADSVKGRFTISRDNAKKSLYLQMNSLRAEDTALYYCAKDIQYGNYYYGMDVWGQGTTVTVSSTRFKIPIEELEDRVFVNCNTSITWVEGTVGTLLSDITRLDLGKRILDPRGIYRCNGTDIYKDKESTVQVHYRMCQSCVELDPATVAGIIVTDVIATLLLALGVFCFAGHETGRLSGAADTQALLRNDQVYQPLRDRDDAQYSHLGGNWARNK

SEQ ID NO: 44062 - protein, 427 aa, synthetic construct
MALPVTALLLPLALLLHAARPEIVLTQSPATLSLSPGERATLSCRASQSVSSYLAWYQQKPGQAPRLLIYDASNRATGIPARFSGSGSGTDFTLTISSLEPEDFAVYYCQQRSNWPITFGQGTRLEIKGGGGSGGGGSGGGGSEVQLVESGGGLVQPGRSLRLSCAASGFTFNDYAMHWVRQAPGKGLEWVSTISWNSGSIGYADSVKGRFTISRDNAKKSLYLQMNSLRAEDTALYYCAKDIQYGNYYYGMDVWGQGTTVTVSSTRQSIKGNHLVKVYDYQEDGSVLLTCDAEAKNITWFKDGKMIGFLTEDKKKWNLGSNAKDPRGMYQCKGSQNKSKPLQVYYRMCQNCIELNAATISGFLFAEIVSIFVLAVGVYFIAGQDGVRQSRASDKQTLLPNDQLYQPLKDREDDQYSHLQGNQLRRN

SEQ ID NO: 44063 - protein, 410 aa, synthetic construct
MALPVTALLLPLALLLHAARPEIVLTQSPATLSLSPGERATLSCRASQSVSSYLAWYQQKPGQAPRLLIYDASNRATGIPARFSGSGSGTDFTLTISSLEPEDFAVYYCQQRSNWPITFGQGTRLEIKGGGGSGGGGSGGGGSEVQLVESGGGLVQPGRSLRLSCAASGFTFNDYAMHWVRQAPGKGLEWVSTISWNSGSIGYADSVKGRFTISRDNAKKSLYLQMNSLRAEDTALYYCAKDIQYGNYYYGMDVWGQGTTVTVSSTRQSFGLLDPKLCYLLDGILFIYGVILTALFLRVKFSRSADAPAYQQGQNQLYNELNLGRREEYDVLDKRRGRDPEMGGKPQRRKNPQEGLYNELQKDKMAEAYSEIGMKGERRRGKGHDGLYQGLSTATKDTYDALHMQALPPR

SEQ ID NO: 44064 - protein, 505 aa, synthetic construct
MALPVTALLLPLALLLHAARPEIVLTQSPATLSLSPGERATLSCRASQSVSSYLAWYQQKPGQAPRLLIYDASNRATGIPARFSGSGSGTDFTLTISSLEPEDFAVYYCQQRSNWPITFGQGTRLEIKGGGGSGGGGSGGGGSEVQLVESGGGLVQPGRSLRLSCAASGFTFNDYAMHWVRQAPGKGLEWVSTISWNSGSIGYADSVKGRFTISRDNAKKSLYLQMNSLRAEDTALYYCAKDIQYGNYYYGMDVWGQGTTVTVSSTRGMRTEDLPKAVVFLEPQWYRVLEKDSVTLKCQGAYSPEDNSTQWFHNESLISSQASSYFIDAATVDDSGEYRCQTNLSTLSDPVQLEVHIGWLLLQAPRWVFKEEDPIHLRCHSWKNTALHKVTYLQNGKGRKYFHHNSDFYIPKATLKDSGSYFCRGLVGSKNVSSETVNITITQGLAVPTISSFFPPGYQVSFCLVMVLLFAVDTGLYFSVKTNIRSSTRDWKDHKFKWRKDPQDK

SEQ ID NO: 44065 - protein, 480 aa, synthetic construct; identical to SEQ ID NO: 9782

SEQ ID NO: 44066 - protein, 481 aa, synthetic construct; identical to SEQ ID NO: 9501

SEQ ID NO: 44067 - protein, 725 aa, synthetic construct
MALPVTALLLPLALLLHAARPEIVLTQSPATLSLSPGERATLSCRASQSVSSYLAWYQQKPGQAPRLLIYDASNRATGIPARFSGSGSGTDFTLTISSLEPEDFAVYYCQQRSNWPITFGQGTRLEIKLEGQPKANPTVTLFPPSSEELQANKATLVCLISDFYPGAVTVAWKADGSPVKAGVETTKPSKQSNNKYAASSYLSLTPEQWKSHRSYSCQVTHEGSTVEKTVAPTECSGSQSFGLLDPKLCYLLDGILFIYGVILTALFLRVKFSRSADAPAYQQGQNQLYNELNLGRREEYDVLDKRRGRDPEMGGKPQRRKNPQEGLYNELQKDKMAEAYSEIGMKGERRRGKGHDGLYQGLSTATKDTYDALHMQALPPRRAKRSGSGATNFSLLKQAGDVEENPGPTSMDWIWRILFLVGAATGAHSFEEVQLVESGGGLVQPGRSLRLSCAASGFTFNDYAMHWVRQAPGKGLEWVSTISWNSGSIGYADSVKGRFTISRDNAKKSLYLQMNSLRAEDTALYYCAKDIQYGNYYYGMDVWGQGTTVTVSSTRASTKGPSVFPLAPSSKSTSGGTAALGCLVKDYFPEPVTVSWNSGALTSGVHTFPAVLQSSGLYSLSSVVTVPSSSLGTQTYICNVNHKPSNTKVDKRVEPKSCGTITQGLAVSTISSFFPPGYQVSFCLVMVLLFAVDTGLYFSVKTNIRSSTRDWKDHKFKWRKDPQDK

SEQ ID NO: 44068 - protein, 740 aa, synthetic construct
MALPVTALLLPLALLLHAARPEIVLTQSPATLSLSPGERATLSCRASQSVSSYLAWYQQKPGQAPRLLIYDASNRATGIPARFSGSGSGTDFTLTISSLEPEDFAVYYCQQRSNWPITFGQGTRLEIKLEDLKNVFPPEVAVFEPSEAEISHTQKATLVCLATGFYPDHVELSWWVNGKEVHSGVSTDPQPLKEQPALNDSRYCLSSRLRVSATFWQNPRNHFRCQVQFYGLSENDEWTQDRAKPVTQIVSAEAWGRADCGSQSFGLLDPKLCYLLDGILFIYGVILTALFLRVKFSRSADAPAYQQGQNQLYNELNLGRREEYDVLDKRRGRDPEMGGKPQRRKNPQEGLYNELQKDKMAEAYSEIGMKGERRRGKGHDGLYQGLSTATKDTYDALHMQALPPRRAKRSGSGATNFSLLKQAGDVEENPGPTSMDWIWRILFLVGAATGAHSFEEVQLVESGGGLVQPGRSLRLSCAASGFTFNDYAMHWVRQAPGKGLEWVSTISWNSGSIGYADSVKGRFTISRDNAKKSLYLQMNSLRAEDTALYYCAKDIQYGNYYYGMDVWGQGTTVTVSSTRIQNPDPAVYQLRDSKSSDKSVCLFTDFDSQTNVSQSKDSDVYITDKTVLDMRSMDFKSNSAVAWSNKSDFACANAFNNSIIPEDTFFPSPESSCGTITQGLAVSTISSFFPPGYQVSFCLVMVLLFAVDTGLYFSVKTNIRSSTRDWKDHKFKWRKDPQDK

SEQ ID NO: 44069 - protein, 715 aa, synthetic construct
MALPVTALLLPLALLLHAARPEIVLTQSPATLSLSPGERATLSCRASQSVSSYLAWYQQKPGQAPRLLIYDASNRATGIPARFSGSGSGTDFTLTISSLEPEDFAVYYCQQRSNWPITFGQGTRLEIKLEDLKNVFPPEVAVFEPSEAEISHTQKATLVCLATGFYPDHVELSWWVNGKEVHSGVSTDPQPLKEQPALNDSRYCLSSRLRVSATFWQNPRNHFRCQVQFYGLSENDEWTQDRAKPVTQIVSAEAWGRADCGSQSFGLLDPKLCYLLDGILFIYGVILTALFLRVKFSRSADAPAYQQGQNQLYNELNLGRREEYDVLDKRRGRDPEMGGKPQRRKNPQEGLYNELQKDKMAEAYSEIGMKGERRRGKGHDGLYQGLSTATKDTYDALHMQALPPRRAKRSGSGATNFSLLKQAGDVEENPGPTSMDWIWRILFLVGAATGAHSFEEVQLVESGGGLVQPGRSLRLSCAASGFTFNDYAMHWVRQAPGKGLEWVSTISWNSGSIGYADSVKGRFTISRDNAKKSLYLQMNSLRAEDTALYYCAKDIQYGNYYYGMDVWGQGTTVTVSSTRIQNPDPAVYQLRDSKSSDKSVCLFTDFDSQTNVSQSKDSDVYITDKTVLDMRSMDFKSNSAVAWSNKSDFACANAFNNSIIPEDTFFPSPESSCGTITQGLAVSTISSFFPPGYQVSFCLVMVLLFAVDTGLYFSV

SEQ ID NO: 44070 - protein, 716 aa, synthetic construct
MALPVTALLLPLALLLHAARPEIVLTQSPATLSLSPGERATLSCRASQSVSSYLAWYQQKPGQAPRLLIYDASNRATGIPARFSGSGSGTDFTLTISSLEPEDFAVYYCQQRSNWPITFGQGTRLEIKLEDLKNVFPPEVAVFEPSEAEISHTQKATLVCLATGFYPDHVELSWWVNGKEVHSGVSTDPQPLKEQPALNDSRYCLSSRLRVSATFWQNPRNHFRCQVQFYGLSENDEWTQDRAKPVTQIVSAEAWGRADCGSQSFGLLDPKLCYLLDGILFIYGVILTALFLRVKFSRSADAPAYQQGQNQLYNELNLGRREEYDVLDKRRGRDPEMGGKPQRRKNPQEGLYNELQKDKMAEAYSEIGMKGERRRGKGHDGLYQGLSTATKDTYDALHMQALPPRRAKRSGSGATNFSLLKQAGDVEENPGPTSMDWIWRILFLVGAATGAHSFEEVQLVESGGGLVQPGRSLRLSCAASGFTFNDYAMHWVRQAPGKGLEWVSTISWNSGSIGYADSVKGRFTISRDNAKKSLYLQMNSLRAEDTALYYCAKDIQYGNYYYGMDVWGQGTTVTVSSTRIQNPDPAVYQLRDSKSSDKSVCLFTDFDSQTNVSQSKDSDVYITDKTVLDMRSMDFKSNSAVAWSNKSDFACANAFNNSIIPEDTFFPSPESSCGTITQGLAVSTISSFFPPGYQVSFCLVMVLLFAVDTGLYFSVK

SEQ ID NO: 44071 - protein, 717 aa, synthetic construct
MALPVTALLLPLALLLHAARPEIVLTQSPATLSLSPGERATLSCRASQSVSSYLAWYQQKPGQAPRLLIYDASNRATGIPARFSGSGSGTDFTLTISSLEPEDFAVYYCQQRSNWPITFGQGTRLEIKLEDLKNVFPPEVAVFEPSEAEISHTQKATLVCLATGFYPDHVELSWWVNGKEVHSGVSTDPQPLKEQPALNDSRYCLSSRLRVSATFWQNPRNHFRCQVQFYGLSENDEWTQDRAKPVTQIVSAEAWGRADCGSQSFGLLDPKLCYLLDGILFIYGVILTALFLRVKFSRSADAPAYQQGQNQLYNELNLGRREEYDVLDKRRGRDPEMGGKPQRRKNPQEGLYNELQKDKMAEAYSEIGMKGERRRGKGHDGLYQGLSTATKDTYDALHMQALPPRRAKRSGSGATNFSLLKQAGDVEENPGPTSMDWIWRILFLVGAATGAHSFEEVQLVESGGGLVQPGRSLRLSCAASGFTFNDYAMHWVRQAPGKGLEWVSTISWNSGSIGYADSVKGRFTISRDNAKKSLYLQMNSLRAEDTALYYCAKDIQYGNYYYGMDVWGQGTTVTVSSTRIQNPDPAVYQLRDSKSSDKSVCLFTDFDSQTNVSQSKDSDVYITDKTVLDMRSMDFKSNSAVAWSNKSDFACANAFNNSIIPEDTFFPSPESSCGTITQGLAVSTISSFFPPGYQVSFCLVMVLLFAVDTGLYFSVKT

SEQ ID NO: 44072 - protein, 653 aa, synthetic construct
MALPVTALLLPLALLLHAARPEIVLTQSPATLSLSPGERATLSCRASQSVSSYLAWYQQKPGQAPRLLIYDASNRATGIPARFSGSGSGTDFTLTISSLEPEDFAVYYCQQRSNWPITFGQGTRLEIKLEGQPKANPTVTLFPPSSEELQANKATLVCLISDFYPGAVTVAWKADGSPVKAGVETTKPSKQSNNKYAASSYLSLTPEQWKSHRSYSCQVTHEGSTVEKTVAPTECSGSLGEPQLCYILDAILFLYGIVLTLLYCRLKIQVRKAAITSYEKSDGVYTGLSTRNQETYETLKHEKPPQRAKRSGSGATNFSLLKQAGDVEENPGPTSMDWIWRILFLVGAATGAHSFEEVQLVESGGGLVQPGRSLRLSCAASGFTFNDYAMHWVRQAPGKGLEWVSTISWNSGSIGYADSVKGRFTISRDNAKKSLYLQMNSLRAEDTALYYCAKDIQYGNYYYGMDVWGQGTTVTVSSTRASTKGPSVFPLAPSSKSTSGGTAALGCLVKDYFPEPVTVSWNSGALTSGVHTFPAVLQSSGLYSLSSVVTVPSSSLGTQTYICNVNHKPSNTKVDKRVEPKSCGTLGEPQLCYILDAILFLYGIVLTLLYCRLKIQVRKAAITSYEKSDGVYTGLSTRNQETYETLKHEKPPQ

SEQ ID NO: 44073 - protein, 623 aa, synthetic construct
MALPVTALLLPLALLLHAARPEIVLTQSPATLSLSPGERATLSCRASQSVSSYLAWYQQKPGQAPRLLIYDASNRATGIPARFSGSGSGTDFTLTISSLEPEDFAVYYCQQRSNWPITFGQGTRLEIKLEDLKNVFPPEVAVFEPSEAEISHTQKATLVCLATGFYPDHVELSWWVNGKEVHSGVCTDPQPLKEQPALNDSRYCLSSRLRVSATFWQNPRNHFRCQVQFYGLSENDEWTQDRAKPVTQIVSAEAWGRADCGFTSESYQQGVLSAYYMYLLLLLKSVVYFAIITCCLLRRTAFCCNGEKSRAKRSGSGATNFSLLKQAGDVEENPGPTSMDWIWRILFLVGAATGAHSFEEVQLVESGGGLVQPGRSLRLSCAASGFTFNDYAMHWVRQAPGKGLEWVSTISWNSGSIGYADSVKGRFTISRDNAKKSLYLQMNSLRAEDTALYYCAKDIQYGNYYYGMDVWGQGTTVTVSSTRIQNPDPAVYQLRDSKSSDKSVCLFTDFDSQTNVSQSKDSDVYITDKCVLDMRSMDFKSNSAVAWSNKSDFACANAFNNSIIPEDTFFPSPESSCDVKLVEKSFETDTNLNFQNLSVIGFRILLLKVAGFNLLMTLRLWSS

SEQ ID NO: 44074 - protein, 629 aa, synthetic construct
MALPVTALLLPLALLLHAARPEIVLTQSPATLSLSPGERATLSCRASQSVSSYLAWYQQKPGQAPRLLIYDASNRATGIPARFSGSGSGTDFTLTISSLEPEDFAVYYCQQRSNWPITFGQGTRLEIKLEDKQLDADVSPKPTIFLPSIAETKLQKAGTYLCLLEKFFPDVIKIHWQEKKSNTILGSQEGNTMKTNDTYMKFSWLTVPEKSLDKEHRCIVRHENNKNGVDQEIIFPPIKTDVITMDPKDNCSKDANDTLLLQLTNTSAYYMYEILLGKATLYAVLVSALVLMAMVKRKDSRGRAKRSGSGATNFSLLKQAGDVEENPGPTSMDWIWRILFLVGAATGAHSFEEVQLVESGGGLVQPGRSLRLSCAASGFTFNDYAMHWVRQAPGKGLEWVSTISWNSGSIGYADSVKGRFTISRDNAKKSLYLQMNSLRAEDTALYYCAKDIQYGNYYYGMDVWGQGTTVTVSSTRSQPHTKPSVFVMKNGTNVACLVKEFYPKDIRINLVSSKKITEFDPAIVISPSGKYNAVKLGKYEDSNSVTCSVQHDNKTVHSTDFEVKTDSTDHVKPKETENTKQPSKSCHKPKAIVHTEKVNMMSLTVIGFRILLLKVAGFNLLMTLRLWSS

SEQ ID NO: 44075 - protein, 629 aa, synthetic construct
MALPVTALLLPLALLLHAARPEIVLTQSPATLSLSPGERATLSCRASQSVSSYLAWYQQKPGQAPRLLIYDASNRATGIPARFSGSGSGTDFTLTISSLEPEDFAVYYCQQRSNWPITFGQGTRLEIKLEDKQLDADVSPKPTIFLPSIAETKLQKAGTYLCLLEKFFPDVIKIHWQEKKSNTILGSQEGNTMKTNDTYMKFSWLTVPEKSLDKEHRCIVRHENNKNGVDQEIIFPPIKTDVITMDPKDNCSKDANDTLLLQLTNTSATILYEILLGKATLYAVLVSALVLMAMVKRKDSRGRAKRSGSGATNFSLLKQAGDVEENPGPTSMDWIWRILFLVGAATGAHSFEEVQLVESGGGLVQPGRSLRLSCAASGFTFNDYAMHWVRQAPGKGLEWVSTISWNSGSIGYADSVKGRFTISRDNAKKSLYLQMNSLRAEDTALYYCAKDIQYGNYYYGMDVWGQGTTVTVSSTRSQPHTKPSVFVMKNGTNVACLVKEFYPKDIRINLVSSKKITEFDPAIVISPSGKYNAVKLGKYEDSNSVTCSVQHDNKTVHSTDFEVKTDSTDHVKPKETENTKQPSKSCHKPKAIVHTEKVNMMSLTVIGFRILLLKVAGFNLLMTLRLWSS

SEQ ID NO: 44076 - protein, 629 aa, synthetic construct
MALPVTALLLPLALLLHAARPEIVLTQSPATLSLSPGERATLSCRASQSVSSYLAWYQQKPGQAPRLLIYDASNRATGIPARFSGSGSGTDFTLTISSLEPEDFAVYYCQQRSNWPITFGQGTRLEIKLEDKQLDADVSPKPTIFLPSIAETKLQKAGTYLCLLEKFFPDVIKIHWQEKKSNTILGSQEGNTMKTNDTYMKFSWLTVPEKSLDKEHRCIVRHENNKNGVDQEIIFPPIKTDVITMDPKDNCSKDANDTLLLQLTNTSAYYMYEILLGKATLYAVLVSALVLMAMVKRKDSRGRAKRSGSGATNFSLLKQAGDVEENPGPTSMDWIWRILFLVGAATGAHSFEEVQLVESGGGLVQPGRSLRLSCAASGFTFNDYAMHWVRQAPGKGLEWVSTISWNSGSIGYADSVKGRFTISRDNAKKSLYLQMNSLRAEDTALYYCAKDIQYGNYYYGMDVWGQGTTVTVSSTRSQPHTKPSVFVMKNGTNVACLVKEFYPKDIRINLVSSKKITEFDPAIVISPSGKYNAVKLGKYEDSNSVTCSVQHDNKTVHSTDFEVKTDSTDHVKPKETENTKQPSKSCHKPKAIVHTEKVNMMSLTVLGFRILLLKVAGFNLLMTLRLWSS

SEQ ID NO: 44077 - protein, 629 aa, synthetic construct
MALPVTALLLPLALLLHAARPEIVLTQSPATLSLSPGERATLSCRASQSVSSYLAWYQQKPGQAPRLLIYDASNRATGIPARFSGSGSGTDFTLTISSLEPEDFAVYYCQQRSNWPITFGQGTRLEIKLEDKQLDADVSPKPTIFLPSIAETKLQKAGTYLCLLEKFFPDVIKIHWQEKKSNTILGSQEGNTMKTNDTYMKFSWLTVPEKSLDKEHRCIVRHENNKNGVDQEIIFPPIKTDVITMDPKDNCSKDANDTLLLQLTNTSATILYEILLGKATLYAVLVSALVLMAMVKRKDSRGRAKRSGSGATNFSLLKQAGDVEENPGPTSMDWIWRILFLVGAATGAHSFEEVQLVESGGGLVQPGRSLRLSCAASGFTFNDYAMHWVRQAPGKGLEWVSTISWNSGSIGYADSVKGRFTISRDNAKKSLYLQMNSLRAEDTALYYCAKDIQYGNYYYGMDVWGQGTTVTVSSTRSQPHTKPSVFVMKNGTNVACLVKEFYPKDIRINLVSSKKITEFDPAIVISPSGKYNAVKLGKYEDSNSVTCSVQHDNKTVHSTDFEVKTDSTDHVKPKETENTKQPSKSCHKPKAIVHTEKVNMMSLTVLGFRILLLKVAGFNLLMTLRLWSS

SEQ ID NO: 44078 - protein, 623 aa, synthetic construct
MALPVTALLLPLALLLHAARPEIVLTQSPATLSLSPGERATLSCRASQSVSSYLAWYQQKPGQAPRLLIYDASNRATGIPARFSGSGSGTDFTLTISSLEPEDFAVYYCQQRSNWPITFGQGTRLEIKLEDLKNVFPPEVAVFEPSEAEISHTQKATLVCLATGFYPDHVELSWWVNGKEVHSGVCTDPQPLKEQPALNDSRYCLSSRLRVSATFWQNPRNHFRCQVQFYGLSENDEWTQDRAKPVTQIVSAEAWGRADCGFTSESYQQGVLSATILYLLLLLKSVVYFAIITCCLLRRTAFCCNGEKSRAKRSGSGATNFSLLKQAGDVEENPGPTSMDWIWRILFLVGAATGAHSFEEVQLVESGGGLVQPGRSLRLSCAASGFTFNDYAMHWVRQAPGKGLEWVSTISWNSGSIGYADSVKGRFTISRDNAKKSLYLQMNSLRAEDTALYYCAKDIQYGNYYYGMDVWGQGTTVTVSSTRIQNPDPAVYQLRDSKSSDKSVCLFTDFDSQTNVSQSKDSDVYITDKCVLDMRSMDFKSNSAVAWSNKSDFACANAFNNSIIPEDTFFPSPESSCDVKLVEKSFETDTNLNFQNLSVIGLRMLFAKTVAVNFLLTAKLFFL

SEQ ID NO: 44079 - protein, 652 aa, synthetic construct
MALPVTALLLPLALLLHAARPEIVLTQSPATLSLSPGERATLSCRASQSVSSYLAWYQQKPGQAPRLLIYDASNRATGIPARFSGSGSGTDFTLTISSLEPEDFAVYYCQQRSNWPITFGQGTRLEIKLEDLKNVFPPEVAVFEPSEAEISHTQKATLVCLATGFYPDHVELSWWVNGKEVHSGVSTDPQPLKEQPALNDSRYCLSSRLRVSATFWQNPRNHFRCQVQFYGLSENDEWTQDRAKPVTQIVSAEAWGRADCGSSKDANDTLLLQLTNTSAYYMYLLLLLKSVVYFAIITCCLLRRTAFCCNGEKSRAKRSGSGATNFSLLKQAGDVEENPGPTSMDWIWRILFLVGAATGAHSFEEVQLVESGGGLVQPGRSLRLSCAASGFTFNDYAMHWVRQAPGKGLEWVSTISWNSGSIGYADSVKGRFTISRDNAKKSLYLQMNSLRAEDTALYYCAKDIQYGNYYYGMDVWGQGTTVTVSSTRIQNPDPAVYQLRDSKSSDKSVCLFTDFDSQTNVSQSKDSDVYITDKTVLDMRSMDFKSNSAVAWSNKSDFACANAFNNSIIPEDTFFPSPESSCGTEVKTDSTDHVKPKETENTKQPSKSCHKPKAIVHTEKVNMMSLTVLGLRMLFAKTVAVNFLLTAKLFFL

SEQ ID NO: 44080 - protein, 622 aa, synthetic construct
MALPVTALLLPLALLLHAARPEIVLTQSPATLSLSPGERATLSCRASQSVSSYLAWYQQKPGQAPRLLIYDASNRATGIPARFSGSGSGTDFTLTISSLEPEDFAVYYCQQRSNWPITFGQGTRLEIKLEDLKNVFPPEVAVFEPSEAEISHTQKATLVCLATGFYPDHVELSWWVNGKEVHSGVCTDPQPLKEQPALNDSRYCLSSRLRVSATFWQNPRNHFRCQVQFYGLSENDEWTQDRAKPVTQIVSAEAWGRADCDVKLVEKSFETDTNLNFQNLSVIGFRILLLKVAGFNLLMTLRLWSSRAKRSGSGATNFSLLKQAGDVEENPGPTSMDWIWRILFLVGAATGAHSFEEVQLVESGGGLVQPGRSLRLSCAASGFTFNDYAMHWVRQAPGKGLEWVSTISWNSGSIGYADSVKGRFTISRDNAKKSLYLQMNSLRAEDTALYYCAKDIQYGNYYYGMDVWGQGTTVTVSSTRIQNPDPAVYQLRDSKSSDKSVCLFTDFDSQTNVSQSKDSDVYITDKCVLDMRSMDFKSNSAVAWSNKSDFACANAFNNSIIPEDTFFPSPESSCGFTSESYQQGVLSATILYEILLGKATLYAVLVSALVLMAMVKRKDSRG

SEQ ID NO: 44081 - protein, 622 aa, synthetic construct
MALPVTALLLPLALLLHAARPEIVLTQSPATLSLSPGERATLSCRASQSVSSYLAWYQQKPGQAPRLLIYDASNRATGIPARFSGSGSGTDFTLTISSLEPEDFAVYYCQQRSNWPITFGQGTRLEIKLEDLKNVFPPEVAVFEPSEAEISHTQKATLVCLATGFYPDHVELSWWVNGKEVHSGVCTDPQPLKEQPALNDSRYCLSSRLRVSATFWQNPRNHFRCQVQFYGLSENDEWTQDRAKPVTQIVSAEAWGRADCGFTSESYQQGVLSATNLSVIGFRILLLKVAGFNLLMTLRLWSSRAKRSGSGATNFSLLKQAGDVEENPGPTSMDWIWRILFLVGAATGAHSFEEVQLVESGGGLVQPGRSLRLSCAASGFTFNDYAMHWVRQAPGKGLEWVSTISWNSGSIGYADSVKGRFTISRDNAKKSLYLQMNSLRAEDTALYYCAKDIQYGNYYYGMDVWGQGTTVTVSSTRIQNPDPAVYQLRDSKSSDKSVCLFTDFDSQTNVSQSKDSDVYITDKCVLDMRSMDFKSNSAVAWSNKSDFACANAFNNSIIPEDTFFPSPESSCDVKLVEKSFETDTNLNFQILYEILLGKATLYAVLVSALVLMAMVKRKDSRG

SEQ ID NO: 44082 - protein, 622 aa, synthetic construct; identical to SEQ ID NO: 44080

SEQ ID NO: 44083 - protein, 622 aa, synthetic construct; identical to SEQ ID NO: 44081

SEQ ID NO: 44084 - protein, 622 aa, synthetic construct; identical to SEQ ID NO: 44080

SEQ ID NO: 44085 - protein, 625 aa, synthetic construct
MALPVTALLLPLALLLHAARPEIVLTQSPATLSLSPGERATLSCRASQSVSSYLAWYQQKPGQAPRLLIYDASNRATGIPARFSGSGSGTDFTLTISSLEPEDFAVYYCQQRSNWPITFGQGTRLEIKLEADVSPKPTIFLPSIAETKLQKAGTYLCLLEKFFPDVIKIHWQEKKSNTILGSQEGNTMKTNDTYMKFSWLTVPEKSLDKEHRCIVRHENNKNGVDQEIIFPPIKTDVITMDPKDNCSKDANDTLLLQLTNTSAYYMYLLLLLKSVVYFAIITCCLLRRTAFCCNGEKSRAKRSGSGATNFSLLKQAGDVEENPGPTSMDWIWRILFLVGAATGAHSFEEVQLVESGGGLVQPGRSLRLSCAASGFTFNDYAMHWVRQAPGKGLEWVSTISWNSGSIGYADSVKGRFTISRDNAKKSLYLQMNSLRAEDTALYYCAKDIQYGNYYYGMDVWGQGTTVTVSSTRSQPHTKPSVFVMKNGTNVACLVKEFYPKDIRINLVSSKKITEFDPAIVISPSGKYNAVKLGKYEDSNSVTCSVQHDNKTVHSTDFEVKTDSTDHVKPKETENTKQPSKSCHKPKAIVHTEKVNMMSLTVIGFRILLLKVAGFNLLMTLRLWSS

SEQ ID NO: 44086 - protein, 625 aa, synthetic construct
MALPVTALLLPLALLLHAARPEIVLTQSPATLSLSPGERATLSCRASQSVSSYLAWYQQKPGQAPRLLIYDASNRATGIPARFSGSGSGTDFTLTISSLEPEDFAVYYCQQRSNWPITFGQGTRLEIKLEADVSPKPTIFLPSIAETKLQKAGTYLCLLEKFFPDVIKIHWQEKKSNTILGSQEGNTMKTNDTYMKFSWLTVPEKSLDKEHRCIVRHENNKNGVDQEIIFPPIKTDVITMDPKDNCSKDANDTLLLQLTNTSAYYMYLLLLLKSVVYFAIITCCLLRRTAFCCNGEKSRAKRSGSGATNFSLLKQAGDVEENPGPTSMDWIWRILFLVGAATGAHSFEEVQLVESGGGLVQPGRSLRLSCAASGFTFNDYAMHWVRQAPGKGLEWVSTISWNSGSIGYADSVKGRFTISRDNAKKSLYLQMNSLRAEDTALYYCAKDIQYGNYYYGMDVWGQGTTVTVSSTRSQPHTKPSVFVMKNGTNVACLVKEFYPKDIRINLVSSKKITEFDPAIVISPSGKYNAVKLGKYEDSNSVTCSVQHDNKTVHSTDFEVKTDSTDHVKPKETENTKQPSKSCHKPKAIVHTEKVNMMSLTVLGFRILLLKVAGFNLLMTLRLWSS

SEQ ID NO: 44087 - protein, 622 aa, synthetic construct; identical to SEQ ID NO: 44080

SEQ ID NO: 44088 - protein, 626 aa, synthetic construct
MALPVTALLLPLALLLHAARPEIVLTQSPATLSLSPGERATLSCRASQSVSSYLAWYQQKPGQAPRLLIYDASNRATGIPARFSGSGSGTDFTLTISSLEPEDFAVYYCQQRSNWPITFGQGTRLEIKLEIQNPDPAVYQLRDSKSSDKSVCLFTDFDSQTNVSQSKDSDVYITDKCVLDMRSMDFKSNSAVAWSNKSDFACANAFNNSIIPEDTFFPSPESSCGFTSESYQQGVLSATILYEILLGKATLYAVLVSALVLMAMVKRKDSRGRAKRSGSGVKQTLNFDLLKLAGDVESNPGPTSMDWIWRILFLVGAATGAHSFEEVQLVESGGGLVQPGRSLRLSCAASGFTFNDYAMHWVRQAPGKGLEWVSTISWNSGSIGYADSVKGRFTISRDNAKKSLYLQMNSLRAEDTALYYCAKDIQYGNYYYGMDVWGQGTTVTVSSTREDLKNVFPPEVAVFEPSEAEISHTQKATLVCLATGFYPDHVELSWWVNGKEVHSGVCTDPQPLKEQPALNDSRYCLSSRLRVSATFWQNPRNHFRCQVQFYGLSENDEWTQDRAKPVTQIVSAEAWGRADCDVKLVEKSFETDTNLNFQNLSVIGFRILLLKVAGFNLLMTLRLWSS

SEQ ID NO: 44089 - protein, 757 aa, synthetic construct
MALPVTALLLPLALLLHAARPEVQLVESGGGLVQPGGSLRLSCAASGFSFSDFWMSWVRQAPGKGLEWVATISQAGSEKDYVDSVKGRFTISRDNAKKSLYLQMNSLRAEDTAVYYCASGVYSFDYRGQGTLVTVSSGTGGGGSGGGGSGGGGSEFEIVLTQSPATLSLSPGERATLSCRASQSVSSYLAWYQQKPGQAPRLLIYDASNRATGIPARFSGSGSGTDFTLTISSLEPEDFAVYYCQQRSNWPITFGQGTRLEIKLEDLKNVFPPEVAVFEPSEAEISHTQKATLVCLATGFYPDHVELSWWVNGKEVHSGVCTDPQPLKEQPALNDSRYCLSSRLRVSATFWQNPRNHFRCQVQFYGLSENDEWTQDRAKPVTQIVSAEAWGRADCDVKLVEKSFETDTNLNFQNLSVIGFRILLLKVAGFNLLMTLRLWSSRAKRSGSGATNFSLLKQAGDVEENPGPTSMDWIWRILFLVGAATGAHSFEEVQLVESGGGLVQPGRSLRLSCAASGFTFNDYAMHWVRQAPGKGLEWVSTISWNSGSIGYADSVKGRFTISRDNAKKSLYLQMNSLRAEDTALYYCAKDIQYGNYYYGMDVWGQGTTVTVSSTRIQNPDPAVYQLRDSKSSDKSVCLFTDFDSQTNVSQSKDSDVYITDKCVLDMRSMDFKSNSAVAWSNKSDFACANAFNNSIIPEDTFFPSPESSCGFTSESYQQGVLSATILYEILLGKATLYAVLVSALVLMAMVKRKDSRG

SEQ ID NO: 44090 - protein, 761 aa, synthetic construct
MALPVTALLLPLALLLHAARPEVQLVESGGGLVQPGGSLRLSCAASGFSFSDFWMSWVRQAPGKGLEWVATISQAGSEKDYVDSVKGRFTISRDNAKKSLYLQMNSLRAEDTAVYYCASGVYSFDYRGQGTLVTVSSGTGGGGSGGGGSGGGGSEFEIVLTQSPATLSLSPGERATLSCRASQSVSSYLAWYQQKPGQAPRLLIYDASNRATGIPARFSGSGSGTDFTLTISSLEPEDFAVYYCQQRSNWPITFGQGTRLEIKLEIQNPDPAVYQLRDSKSSDKSVCLFTDFDSQTNVSQSKDSDVYITDKCVLDMRSMDFKSNSAVAWSNKSDFACANAFNNSIIPEDTFFPSPESSCGFTSESYQQGVLSATILYEILLGKATLYAVLVSALVLMAMVKRKDSRGRAKRSGSGVKQTLNFDLLKLAGDVESNPGPTSMDWIWRILFLVGAATGAHSFEEVQLVESGGGLVQPGRSLRLSCAASGFTFNDYAMHWVRQAPGKGLEWVSTISWNSGSIGYADSVKGRFTISRDNAKKSLYLQMNSLRAEDTALYYCAKDIQYGNYYYGMDVWGQGTTVTVSSTREDLKNVFPPEVAVFEPSEAEISHTQKATLVCLATGFYPDHVELSWWVNGKEVHSGVCTDPQPLKEQPALNDSRYCLSSRLRVSATFWQNPRNHFRCQVQFYGLSENDEWTQDRAKPVTQIVSAEAWGRADCDVKLVEKSFETDTNLNFQNLSVIGFRILLLKVAGFNLLMTLRLWSS

SEQ ID NO: 44091 - protein, 894 aa, synthetic construct
MALPVTALLLPLALLLHAARPEVQLVESGGGLVQPGGSLRLSCAASGFSFSDFWMSWVRQAPGKGLEWVATISQAGSEKDYVDSVKGRFTISRDNAKKSLYLQMNSLRAEDTAVYYCASGVYSFDYRGQGTLVTVSSGTGGGGSGGGGSGGGGSEFEIVLTQSPATLSLSPGERATLSCRASQSVSSYLAWYQQKPGQAPRLLIYDASNRATGIPARFSGSGSGTDFTLTISSLEPEDFAVYYCQQRSNWPITFGQGTRLEIKLEDLKNVFPPEVAVFEPSEAEISHTQKATLVCLATGFYPDHVELSWWVNGKEVHSGVCTDPQPLKEQPALNDSRYCLSSRLRVSATFWQNPRNHFRCQVQFYGLSENDEWTQDRAKPVTQIVSAEAWGRADCDVKLVEKSFETDTNLNFQNLSVIGFRILLLKVAGFNLLMTLRLWSSRAKRSGSGATNFSLLKQAGDVEENPGPTSMDWIWRILFLVGAATGAHSGPQLQLQESGPGLVKPSETLSLTCTVSGDSISSGDYYWGWIRQPPGKGLEWIGHIYYSGVTYYNPSLKSRVTISVDTSRNQFSLKLSSVTAADTAVYYCTREDSSNWRSRGQGTLVTVSSGSGGGGSGGGGSGGGGSFEEVQLVESGGGLVQPGRSLRLSCAASGFTFNDYAMHWVRQAPGKGLEWVSTISWNSGSIGYADSVKGRFTISRDNAKKSLYLQMNSLRAEDTALYYCAKDIQYGNYYYGMDVWGQGTTVTVSSTRIQNPDPAVYQLRDSKSSDKSVCLFTDFDSQTNVSQSKDSDVYITDKCVLDMRSMDFKSNSAVAWSNKSDFACANAFNNSIIPEDTFFPSPESSCGFTSESYQQGVLSATILYEILLGKATLYAVLVSALVLMAMVKRKDSRG

SEQ ID NO: 44092 - protein, 898 aa, synthetic construct
MALPVTALLLPLALLLHAARPEVQLVESGGGLVQPGGSLRLSCAASGFSFSDFWMSWVRQAPGKGLEWVATISQAGSEKDYVDSVKGRFTISRDNAKKSLYLQMNSLRAEDTAVYYCASGVYSFDYRGQGTLVTVSSGTGGGGSGGGGSGGGGSEFEIVLTQSPATLSLSPGERATLSCRASQSVSSYLAWYQQKPGQAPRLLIYDASNRATGIPARFSGSGSGTDFTLTISSLEPEDFAVYYCQQRSNWPITFGQGTRLEIKLEIQNPDPAVYQLRDSKSSDKSVCLFTDFDSQTNVSQSKDSDVYITDKCVLDMRSMDFKSNSAVAWSNKSDFACANAFNNSIIPEDTFFPSPESSCGFTSESYQQGVLSATILYEILLGKATLYAVLVSALVLMAMVKRKDSRGRAKRSGSGVKQTLNFDLLKLAGDVESNPGPTSMDWIWRILFLVGAATGAHSGPQLQLQESGPGLVKPSETLSLTCTVSGDSISSGDYYWGWIRQPPGKGLEWIGHIYYSGVTYYNPSLKSRVTISVDTSRNQFSLKLSSVTAADTAVYYCTREDSSNWRSRGQGTLVTVSSGSGGGGSGGGGSGGGGSFEEVQLVESGGGLVQPGRSLRLSCAASGFTFNDYAMHWVRQAPGKGLEWVSTISWNSGSIGYADSVKGRFTISRDNAKKSLYLQMNSLRAEDTALYYCAKDIQYGNYYYGMDVWGQGTTVTVSSTREDLKNVFPPEVAVFEPSEAEISHTQKATLVCLATGFYPDHVELSWWVNGKEVHSGVCTDPQPLKEQPALNDSRYCLSSRLRVSATFWQNPRNHFRCQVQFYGLSENDEWTQDRAKPVTQIVSAEAWGRADCDVKLVEKSFETDTNLNFQNLSVIGFRILLLKVAGFNLLMTLRLWSS

SEQ ID NO: 44093 - protein, 692 aa, synthetic construct
MALPVTALLLPLALLLHAARPEIVLTQSPATLSLSPGERATLSCRASQSVSSYLAWYQQKPGQAPRLLIYDASNRATGIPARFSGSGSGTDFTLTISSLEPEDFAVYYCQQRSNWPITFGQGTRLEIKLEDLKNVFPPEVAVFEPSEAEISHTQKATLVCLATGFYPDHVELSWWVNGKEVHSGVCTDPQPLKEQPALNDSRYCLSSRLRVSATFWQNPRNHFRCQVQFYGLSENDEWTQDRAKPVTQIVSAEAWGRADCDVKLVEKSFETDTNLNFQNLSVIGFRILLLKVAGFNLLMTLRLWSSRAKRSGSGATNFSLLKQAGDVEENPGPTSMDWIWRILFLVGAATGAHSGPMDPDLEIRAAFLRQRNTALRTEVAELEQEVQRLENEVSQYETRYGPLGGGKGSGGGGSGGGGSGGGGSFEEVQLVESGGGLVQPGRSLRLSCAASGFTFNDYAMHWVRQAPGKGLEWVSTISWNSGSIGYADSVKGRFTISRDNAKKSLYLQMNSLRAEDTALYYCAKDIQYGNYYYGMDVWGQGTTVTVSSTRIQNPDPAVYQLRDSKSSDKSVCLFTDFDSQTNVSQSKDSDVYITDKCVLDMRSMDFKSNSAVAWSNKSDFACANAFNNSIIPEDTFFPSPESSCGFTSESYQQGVLSATILYEILLGKATLYAVLVSALVLMAMVKRKDSRG

SEQ ID NO: 44094 - protein, 696 aa, synthetic construct
MALPVTALLLPLALLLHAARPEIVLTQSPATLSLSPGERATLSCRASQSVSSYLAWYQQKPGQAPRLLIYDASNRATGIPARFSGSGSGTDFTLTISSLEPEDFAVYYCQQRSNWPITFGQGTRLEIKLEIQNPDPAVYQLRDSKSSDKSVCLFTDFDSQTNVSQSKDSDVYITDKCVLDMRSMDFKSNSAVAWSNKSDFACANAFNNSIIPEDTFFPSPESSCGFTSESYQQGVLSATILYEILLGKATLYAVLVSALVLMAMVKRKDSRGRAKRSGSGVKQTLNFDLLKLAGDVESNPGPTSMDWIWRILFLVGAATGAHSGPMDPDLEIRAAFLRQRNTALRTEVAELEQEVQRLENEVSQYETRYGPLGGGKGSGGGGSGGGGSGGGGSFEEVQLVESGGGLVQPGRSLRLSCAASGFTFNDYAMHWVRQAPGKGLEWVSTISWNSGSIGYADSVKGRFTISRDNAKKSLYLQMNSLRAEDTALYYCAKDIQYGNYYYGMDVWGQGTTVTVSSTREDLKNVFPPEVAVFEPSEAEISHTQKATLVCLATGFYPDHVELSWWVNGKEVHSGVCTDPQPLKEQPALNDSRYCLSSRLRVSATFWQNPRNHFRCQVQFYGLSENDEWTQDRAKPVTQIVSAEAWGRADCDVKLVEKSFETDTNLNFQNLSVIGFRILLLKVAGFNLLMTLRLWSS

SEQ ID NO: 44095 - protein, 669 aa, synthetic construct
MALPVTALLLPLALLLHAARPEIVLTQSPATLSLSPGERATLSCRASQSVSSYLAWYQQKPGQAPRLLIYDASNRATGIPARFSGSGSGTDFTLTISSLEPEDFAVYYCQQRSNWPITFGQGTRLEIKLEDLKNVFPPEVAVFEPSEAEISHTQKATLVCLATGFYPDHVELSWWVNGKEVHSGVCTDPQPLKEQPALNDSRYCLSSRLRVSATFWQNPRNHFRCQVQFYGLSENDEWTQDRAKPVTQIVSAEAWGRADCDVKLVEKSFETDTNLNFQNLSVIGFRILLLKVAGFNLLMTLRLWSSRAKRSGSGATNFSLLKQAGDVEENPGPTSMDWIWRILFLVGAATGAHSGPEVAALEKEVAALEKEVAALEKEVAALEKGSGGGGSGGGGSGGGGSFEEVQLVESGGGLVQPGRSLRLSCAASGFTFNDYAMHWVRQAPGKGLEWVSTISWNSGSIGYADSVKGRFTISRDNAKKSLYLQMNSLRAEDTALYYCAKDIQYGNYYYGMDVWGQGTTVTVSSTRIQNPDPAVYQLRDSKSSDKSVCLFTDFDSQTNVSQSKDSDVYITDKCVLDMRSMDFKSNSAVAWSNKSDFACANAFNNSIIPEDTFFPSPESSCGFTSESYQQGVLSATILYEILLGKATLYAVLVSALVLMAMVKRKDSRG

SEQ ID NO: 44096 - protein, 673 aa, synthetic construct
MALPVTALLLPLALLLHAARPEIVLTQSPATLSLSPGERATLSCRASQSVSSYLAWYQQKPGQAPRLLIYDASNRATGIPARFSGSGSGTDFTLTISSLEPEDFAVYYCQQRSNWPITFGQGTRLEIKLEIQNPDPAVYQLRDSKSSDKSVCLFTDFDSQTNVSQSKDSDVYITDKCVLDMRSMDFKSNSAVAWSNKSDFACANAFNNSIIPEDTFFPSPESSCGFTSESYQQGVLSATILYEILLGKATLYAVLVSALVLMAMVKRKDSRGRAKRSGSGVKQTLNFDLLKLAGDVESNPGPTSMDWIWRILFLVGAATGAHSGPEVAALEKEVAALEKEVAALEKEVAALEKGSGGGGSGGGGSGGGGSFEEVQLVESGGGLVQPGRSLRLSCAASGFTFNDYAMHWVRQAPGKGLEWVSTISWNSGSIGYADSVKGRFTISRDNAKKSLYLQMNSLRAEDTALYYCAKDIQYGNYYYGMDVWGQGTTVTVSSTREDLKNVFPPEVAVFEPSEAEISHTQKATLVCLATGFYPDHVELSWWVNGKEVHSGVCTDPQPLKEQPALNDSRYCLSSRLRVSATFWQNPRNHFRCQVQFYGLSENDEWTQDRAKPVTQIVSAEAWGRADCDVKLVEKSFETDTNLNFQNLSVIGFRILLLKVAGFNLLMTLRLWSS

SEQ ID NO: 44097 - protein, 759 aa, synthetic construct
MALPVTALLLPLALLLHAARPEIVLTQSPATLSLSPGERATLSCRASQSVSSYLAWYQQKPGQAPRLLIYDASNRATGIPARFSGSGSGTDFTLTISSLEPEDFAVYYCQQRSNWPITFGQGTRLEIKLEDLKNVFPPEVAVFEPSEAEISHTQKATLVCLATGFYPDHVELSWWVNGKEVHSGVCTDPQPLKEQPALNDSRYCLSSRLRVSATFWQNPRNHFRCQVQFYGLSENDEWTQDRAKPVTQIVSAEAWGRADCDVKLVEKSFETDTNLNFQNLSVIGFRILLLKVAGFNLLMTLRLWSSRAKRSGSGATNFSLLKQAGDVEENPGPTSMDWIWRILFLVGAATGAHSGPQVQLQESGGGLAQAGGSLRLSCAASGRTFSMGWFRQAPGKEREFVAAITYSGGSPYYASSVRGRFTISRDNAKNTVYLQMNSLKPEDTAVYYCAANPTYGSDWNAENWGQGTQVTVSSGSGGGGSGGGGSGGGGSFEEVQLVESGGGLVQPGRSLRLSCAASGFTFNDYAMHWVRQAPGKGLEWVSTISWNSGSIGYADSVKGRFTISRDNAKKSLYLQMNSLRAEDTALYYCAKDIQYGNYYYGMDVWGQGTTVTVSSTRIQNPDPAVYQLRDSKSSDKSVCLFTDFDSQTNVSQSKDSDVYITDKCVLDMRSMDFKSNSAVAWSNKSDFACANAFNNSIIPEDTFFPSPESSCGFTSESYQQGVLSATILYEILLGKATLYAVLVSALVLMAMVKRKDSRG

SEQ ID NO: 44098 - protein, 763 aa, synthetic construct
MALPVTALLLPLALLLHAARPEIVLTQSPATLSLSPGERATLSCRASQSVSSYLAWYQQKPGQAPRLLIYDASNRATGIPARFSGSGSGTDFTLTISSLEPEDFAVYYCQQRSNWPITFGQGTRLEIKLEIQNPDPAVYQLRDSKSSDKSVCLFTDFDSQTNVSQSKDSDVYITDKCVLDMRSMDFKSNSAVAWSNKSDFACANAFNNSIIPEDTFFPSPESSCGFTSESYQQGVLSATILYEILLGKATLYAVLVSALVLMAMVKRKDSRGRAKRSGSGVKQTLNFDLLKLAGDVESNPGPTSMDWIWRILFLVGAATGAHSGPQVQLQESGGGLAQAGGSLRLSCAASGRTFSMGWFRQAPGKEREFVAAITYSGGSPYYASSVRGRFTISRDNAKNTVYLQMNSLKPEDTAVYYCAANPTYGSDWNAENWGQGTQVTVSSGSGGGGSGGGGSGGGGSFEEVQLVESGGGLVQPGRSLRLSCAASGFTFNDYAMHWVRQAPGKGLEWVSTISWNSGSIGYADSVKGRFTISRDNAKKSLYLQMNSLRAEDTALYYCAKDIQYGNYYYGMDVWGQGTTVTVSSTREDLKNVFPPEVAVFEPSEAEISHTQKATLVCLATGFYPDHVELSWWVNGKEVHSGVCTDPQPLKEQPALNDSRYCLSSRLRVSATFWQNPRNHFRCQVQFYGLSENDEWTQDRAKPVTQIVSAEAWGRADCDVKLVEKSFETDTNLNFQNLSVIGFRILLLKVAGFNLLMTLRLWSS

SEQ ID NO: 44099 - protein, 765 aa, synthetic construct
MALPVTALLLPLALLLHAARPEVQLVESGGSLVQPGGSLRLSCAASGFTFDDYAMSWVRQVPGKGLEWVSSINWSGTHTDYADSVKGRFTISRNNANNTLYLQMNSLKSEDTAVYYCAKNWRDAGTTWFEKSGSAGQGTQVTVSSGTGGGGSGGGGSGGGGSEFEIVLTQSPATLSLSPGERATLSCRASQSVSSYLAWYQQKPGQAPRLLIYDASNRATGIPARFSGSGSGTDFTLTISSLEPEDFAVYYCQQRSNWPITFGQGTRLEIKLEDLKNVFPPEVAVFEPSEAEISHTQKATLVCLATGFYPDHVELSWWVNGKEVHSGVCTDPQPLKEQPALNDSRYCLSSRLRVSATFWQNPRNHFRCQVQFYGLSENDEWTQDRAKPVTQIVSAEAWGRADCDVKLVEKSFETDTNLNFQNLSVIGFRILLLKVAGFNLLMTLRLWSSRAKRSGSGATNFSLLKQAGDVEENPGPTSMDWIWRILFLVGAATGAHSFEEVQLVESGGGLVQPGRSLRLSCAASGFTFNDYAMHWVRQAPGKGLEWVSTISWNSGSIGYADSVKGRFTISRDNAKKSLYLQMNSLRAEDTALYYCAKDIQYGNYYYGMDVWGQGTTVTVSSTRIQNPDPAVYQLRDSKSSDKSVCLFTDFDSQTNVSQSKDSDVYITDKCVLDMRSMDFKSNSAVAWSNKSDFACANAFNNSIIPEDTFFPSPESSCGFTSESYQQGVLSATILYEILLGKATLYAVLVSALVLMAMVKRKDSRG

SEQ ID NO: 44100 - protein, 769 aa, synthetic construct
MALPVTALLLPLALLLHAARPEVQLVESGGSLVQPGGSLRLSCAASGFTFDDYAMSWVRQVPGKGLEWVSSINWSGTHTDYADSVKGRFTISRNNANNTLYLQMNSLKSEDTAVYYCAKNWRDAGTTWFEKSGSAGQGTQVTVSSGTGGGGSGGGGSGGGGSEFEIVLTQSPATLSLSPGERATLSCRASQSVSSYLAWYQQKPGQAPRLLIYDASNRATGIPARFSGSGSGTDFTLTISSLEPEDFAVYYCQQRSNWPITFGQGTRLEIKLEIQNPDPAVYQLRDSKSSDKSVCLFTDFDSQTNVSQSKDSDVYITDKCVLDMRSMDFKSNSAVAWSNKSDFACANAFNNSIIPEDTFFPSPESSCGFTSESYQQGVLSATILYEILLGKATLYAVLVSALVLMAMVKRKDSRGRAKRSGSGVKQTLNFDLLKLAGDVESNPGPTSMDWIWRILFLVGAATGAHSFEEVQLVESGGGLVQPGRSLRLSCAASGFTFNDYAMHWVRQAPGKGLEWVSTISWNSGSIGYADSVKGRFTISRDNAKKSLYLQMNSLRAEDTALYYCAKDIQYGNYYYGMDVWGQGTTVTVSSTREDLKNVFPPEVAVFEPSEAEISHTQKATLVCLATGFYPDHVELSWWVNGKEVHSGVCTDPQPLKEQPALNDSRYCLSSRLRVSATFWQNPRNHFRCQVQFYGLSENDEWTQDRAKPVTQIVSAEAWGRADCDVKLVEKSFETDTNLNFQNLSVIGFRILLLKVAGFNLLMTLRLWSS

SEQ ID NO: 44101 - protein, 763 aa, synthetic construct
MALPVTALLLPLALLLHAARPEVQLLESGGGLVQPGGSLRLSCAASGFIFSSYAMSWVRQAPGKGQEWVSGVSGTGVNTYYADSVKGRFTISRDNSKNTLYLQMNSLRAEDTAVYYCASGKGWDSGSWYEDYRGQGTLVTVSSGTGGGGSGGGGSGGGGSEFEIVLTQSPATLSLSPGERATLSCRASQSVSSYLAWYQQKPGQAPRLLIYDASNRATGIPARFSGSGSGTDFTLTISSLEPEDFAVYYCQQRSNWPITFGQGTRLEIKLEDLKNVFPPEVAVFEPSEAEISHTQKATLVCLATGFYPDHVELSWWVNGKEVHSGVCTDPQPLKEQPALNDSRYCLSSRLRVSATFWQNPRNHFRCQVQFYGLSENDEWTQDRAKPVTQIVSAEAWGRADCDVKLVEKSFETDTNLNFQNLSVIGFRILLLKVAGFNLLMTLRLWSSRAKRSGSGATNFSLLKQAGDVEENPGPTSMDWIWRILFLVGAATGAHSFEEVQLVESGGGLVQPGRSLRLSCAASGFTFNDYAMHWVRQAPGKGLEWVSTISWNSGSIGYADSVKGRFTISRDNAKKSLYLQMNSLRAEDTALYYCAKDIQYGNYYYGMDVWGQGTTVTVSSTRIQNPDPAVYQLRDSKSSDKSVCLFTDFDSQTNVSQSKDSDVYITDKCVLDMRSMDFKSNSAVAWSNKSDFACANAFNNSIIPEDTFFPSPESSCGFTSESYQQGVLSATILYEILLGKATLYAVLVSALVLMAMVKRKDSRG

SEQ ID NO: 44102 - protein, 767 aa, synthetic construct
MALPVTALLLPLALLLHAARPEVQLLESGGGLVQPGGSLRLSCAASGFIFSSYAMSWVRQAPGKGQEWVSGVSGTGVNTYYADSVKGRFTISRDNSKNTLYLQMNSLRAEDTAVYYCASGKGWDSGSWYEDYRGQGTLVTVSSGTGGGGSGGGGSGGGGSEFEIVLTQSPATLSLSPGERATLSCRASQSVSSYLAWYQQKPGQAPRLLIYDASNRATGIPARFSGSGSGTDFTLTISSLEPEDFAVYYCQQRSNWPITFGQGTRLEIKLEIQNPDPAVYQLRDSKSSDKSVCLFTDFDSQTNVSQSKDSDVYITDKCVLDMRSMDFKSNSAVAWSNKSDFACANAFNNSIIPEDTFFPSPESSCGFTSESYQQGVLSATILYEILLGKATLYAVLVSALVLMAMVKRKDSRGRAKRSGSGVKQTLNFDLLKLAGDVESNPGPTSMDWIWRILFLVGAATGAHSFEEVQLVESGGGLVQPGRSLRLSCAASGFTFNDYAMHWVRQAPGKGLEWVSTISWNSGSIGYADSVKGRFTISRDNAKKSLYLQMNSLRAEDTALYYCAKDIQYGNYYYGMDVWGQGTTVTVSSTREDLKNVFPPEVAVFEPSEAEISHTQKATLVCLATGFYPDHVELSWWVNGKEVHSGVCTDPQPLKEQPALNDSRYCLSSRLRVSATFWQNPRNHFRCQVQFYGLSENDEWTQDRAKPVTQIVSAEAWGRADCDVKLVEKSFETDTNLNFQNLSVIGFRILLLKVAGFNLLMTLRLWSS

SEQ ID NO: 44103 - protein, 731 aa, synthetic construct
MALPVTALLLPLALLLHAARPMLPAPKNLVVSRITEDSARLSWTAPDAAFDSFPIRYIETLIWGEAIWLDVPGSERSYDLTGLKPGTEYAVVITGVKGGRFSSPLVASFTTGTGGGGSGGGGSGGGGSEFEIVLTQSPATLSLSPGERATLSCRASQSVSSYLAWYQQKPGQAPRLLIYDASNRATGIPARFSGSGSGTDFTLTISSLEPEDFAVYYCQQRSNWPITFGQGTRLEIKLEDLKNVFPPEVAVFEPSEAEISHTQKATLVCLATGFYPDHVELSWWVNGKEVHSGVCTDPQPLKEQPALNDSRYCLSSRLRVSATFWQNPRNHFRCQVQFYGLSENDEWTQDRAKPVTQIVSAEAWGRADCDVKLVEKSFETDTNLNFQNLSVIGFRILLLKVAGFNLLMTLRLWSSRAKRSGSGATNFSLLKQAGDVEENPGPTSMDWIWRILFLVGAATGAHSFEEVQLVESGGGLVQPGRSLRLSCAASGFTFNDYAMHWVRQAPGKGLEWVSTISWNSGSIGYADSVKGRFTISRDNAKKSLYLQMNSLRAEDTALYYCAKDIQYGNYYYGMDVWGQGTTVTVSSTRIQNPDPAVYQLRDSKSSDKSVCLFTDFDSQTNVSQSKDSDVYITDKCVLDMRSMDFKSNSAVAWSNKSDFACANAFNNSIIPEDTFFPSPESSCGFTSESYQQGVLSATILYEILLGKATLYAVLVSALVLMAMVKRKDSRG

SEQ ID NO: 44104 - protein, 735 aa, synthetic construct
MALPVTALLLPLALLLHAARPMLPAPKNLVVSRITEDSARLSWTAPDAAFDSFPIRYIETLIWGEAIWLDVPGSERSYDLTGLKPGTEYAVVITGVKGGRFSSPLVASFTTGTGGGGSGGGGSGGGGSEFEIVLTQSPATLSLSPGERATLSCRASQSVSSYLAWYQQKPGQAPRLLIYDASNRATGIPARFSGSGSGTDFTLTISSLEPEDFAVYYCQQRSNWPITFGQGTRLEIKLEIQNPDPAVYQLRDSKSSDKSVCLFTDFDSQTNVSQSKDSDVYITDKCVLDMRSMDFKSNSAVAWSNKSDFACANAFNNSIIPEDTFFPSPESSCGFTSESYQQGVLSATILYEILLGKATLYAVLVSALVLMAMVKRKDSRGRAKRSGSGVKQTLNFDLLKLAGDVESNPGPTSMDWIWRILFLVGAATGAHSFEEVQLVESGGGLVQPGRSLRLSCAASGFTFNDYAMHWVRQAPGKGLEWVSTISWNSGSIGYADSVKGRFTISRDNAKKSLYLQMNSLRAEDTALYYCAKDIQYGNYYYGMDVWGQGTTVTVSSTREDLKNVFPPEVAVFEPSEAEISHTQKATLVCLATGFYPDHVELSWWVNGKEVHSGVCTDPQPLKEQPALNDSRYCLSSRLRVSATFWQNPRNHFRCQVQFYGLSENDEWTQDRAKPVTQIVSAEAWGRADCDVKLVEKSFETDTNLNFQNLSVIGFRILLLKVAGFNLLMTLRLWSS

SEQ ID NO: 44105 - protein, 760 aa, synthetic construct
MALPVTALLLPLALLLHAARPEVQLVESGGGLVQPGGSLRLSCAASGFNIKDTCIGWVRRAPGKEEELVAKICKYSGHTRYADSVKGRFTISADTSKNTAYLQMNSLRAEDTAVYYCAAVSVRDGHYNYWGQGTTVTVSSGTGGGGSGGGGSGGGGSEFEIVLTQSPATLSLSPGERATLSCRASQSVSSYLAWYQQKPGQAPRLLIYDASNRATGIPARFSGSGSGTDFTLTISSLEPEDFAVYYCQQRSNWPITFGQGTRLEIKLEDLKNVFPPEVAVFEPSEAEISHTQKATLVCLATGFYPDHVELSWWVNGKEVHSGVCTDPQPLKEQPALNDSRYCLSSRLRVSATFWQNPRNHFRCQVQFYGLSENDEWTQDRAKPVTQIVSAEAWGRADCDVKLVEKSFETDTNLNFQNLSVIGFRILLLKVAGFNLLMTLRLWSSRAKRSGSGATNFSLLKQAGDVEENPGPTSMDWIWRILFLVGAATGAHSFEEVQLVESGGGLVQPGRSLRLSCAASGFTFNDYAMHWVRQAPGKGLEWVSTISWNSGSIGYADSVKGRFTISRDNAKKSLYLQMNSLRAEDTALYYCAKDIQYGNYYYGMDVWGQGTTVTVSSTRIQNPDPAVYQLRDSKSSDKSVCLFTDFDSQTNVSQSKDSDVYITDKCVLDMRSMDFKSNSAVAWSNKSDFACANAFNNSIIPEDTFFPSPESSCGFTSESYQQGVLSATILYEILLGKATLYAVLVSALVLMAMVKRKDSRG

SEQ ID NO: 44106 - protein, 764 aa, synthetic construct
MALPVTALLLPLALLLHAARPEVQLVESGGGLVQPGGSLRLSCAASGFNIKDTCIGWVRRAPGKEEELVAKICKYSGHTRYADSVKGRFTISADTSKNTAYLQMNSLRAEDTAVYYCAAVSVRDGHYNYWGQGTTVTVSSGTGGGGSGGGGSGGGGSEFEIVLTQSPATLSLSPGERATLSCRASQSVSSYLAWYQQKPGQAPRLLIYDASNRATGIPARFSGSGSGTDFTLTISSLEPEDFAVYYCQQRSNWPITFGQGTRLEIKLEIQNPDPAVYQLRDSKSSDKSVCLFTDFDSQTNVSQSKDSDVYITDKCVLDMRSMDFKSNSAVAWSNKSDFACANAFNNSIIPEDTFFPSPESSCGFTSESYQQGVLSATILYEILLGKATLYAVLVSALVLMAMVKRKDSRGRAKRSGSGVKQTLNFDLLKLAGDVESNPGPTSMDWIWRILFLVGAATGAHSFEEVQLVESGGGLVQPGRSLRLSCAASGFTFNDYAMHWVRQAPGKGLEWVSTISWNSGSIGYADSVKGRFTISRDNAKKSLYLQMNSLRAEDTALYYCAKDIQYGNYYYGMDVWGQGTTVTVSSTREDLKNVFPPEVAVFEPSEAEISHTQKATLVCLATGFYPDHVELSWWVNGKEVHSGVCTDPQPLKEQPALNDSRYCLSSRLRVSATFWQNPRNHFRCQVQFYGLSENDEWTQDRAKPVTQIVSAEAWGRADCDVKLVEKSFETDTNLNFQNLSVIGFRILLLKVAGFNLLMTLRLWSS

SEQ ID NO: 44107 - protein, 1131 aa, synthetic construct
MALPVTALLLPLALLLHAARPEVQLVESGGGLVQAGGSLRLSCAASGRTFSMGWFRQAPGKEREFVAAITYSGGSPYYADSVKGRFTISRDNAKNTVYLQMNSLKPEDTAVYYCAANPTYGSDWNAENWGQGTQVTVSSGTGGGGSGGGGSGGGGSEFEIVLTQSPATLSLSPGERATLSCRASQSVSSYLAWYQQKPGQAPRLLIYDASNRATGIPARFSGSGSGTDFTLTISSLEPEDFAVYYCQQRSNWPITFGQGTRLEIKLEDLKNVFPPEVAVFEPSEAEISHTQKATLVCLATGFYPDHVELSWWVNGKEVHSGVCTDPQPLKEQPALNDSRYCLSSRLRVSATFWQNPRNHFRCQVQFYGLSENDEWTQDRAKPVTQIVSAEAWGRADCDVKLVEKSFETDTNLNFQNLSVIGFRILLLKVAGFNLLMTLRLWSSRAKRSGSGATNFSLLKQAGDVEENPGPTSATMDWIWRILFLVGAATGAHSGPEVQLVESGGGLVQAGGSLRLSCAASGRTFTMGWFRQAPGKEREFVAAISLSPTLAYYADSVKGRFTISRDNAKNTVVLQMNSLKPEDTALYYCAADRKSVMSIRPDYWGQGTQVTVSSGSGGGGSGGGGSGGGGSFEEVQLVESGGGLVQPGRSLRLSCAASGFTFNDYAMHWVRQAPGKGLEWVSTISWNSGSIGYADSVKGRFTISRDNAKKSLYLQMNSLRAEDTALYYCAKDIQYGNYYYGMDVWGQGTTVTVSSTRIQNPDPAVYQLRDSKSSDKSVCLFTDFDSQTNVSQSKDSDVYITDKCVLDMRSMDFKSNSAVAWSNKSDFACANAFNNSIIPEDTFFPSPESSCGFTSESYQQGVLSATILYEILLGKATLYAVLVSALVLMAMVKRKDSRGRAKRSGSGVKQTLNFDLLKLAGDVESNPGPSRGHMTEYKPTVRLATRDDVPRAVRTLAAAFADYPATRHTVDPDRHIERVTELQELFLTRVGLDIGKVWVADDGAAVAVWTTPESVEAGAVFAEIGPRMAELSGSRLAAQQQMEGLLAPHRPKEPAWFLATVGVSPDHQGKGLGSAVVLPGVEAAERAGVPAFLETSAPRNLPFYERLGFTVTADVEVPEGPRTWCMTRKPGA

SEQ ID NO: 44108 - protein, 769 aa, synthetic construct
MALPVTALLLPLALLLHAARPEVQLVESGGGLVQPGGSLRLSCAASGFASDYYIIGWFRQAPGKEREGVSCISSRYANTNYADSVKGRFTISRDNAKNTVYLQMNSLKPEDTAVYYCAADTRRYTCPDIATMHRNFDSWGQGTLVTVSSGTGGGGSGGGGSGGGGSEFEIVLTQSPATLSLSPGERATLSCRASQSVSSYLAWYQQKPGQAPRLLIYDASNRATGIPARFSGSGSGTDFTLTISSLEPEDFAVYYCQQRSNWPITFGQGTRLEIKLEDLKNVFPPEVAVFEPSEAEISHTQKATLVCLATGFYPDHVELSWWVNGKEVHSGVCTDPQPLKEQPALNDSRYCLSSRLRVSATFWQNPRNHFRCQVQFYGLSENDEWTQDRAKPVTQIVSAEAWGRADCDVKLVEKSFETDTNLNFQNLSVIGFRILLLKVAGFNLLMTLRLWSSRAKRSGSGATNFSLLKQAGDVEENPGPTSMDWIWRILFLVGAATGAHSFEEVQLVESGGGLVQPGRSLRLSCAASGFTFNDYAMHWVRQAPGKGLEWVSTISWNSGSIGYADSVKGRFTISRDNAKKSLYLQMNSLRAEDTALYYCAKDIQYGNYYYGMDVWGQGTTVTVSSTRIQNPDPAVYQLRDSKSSDKSVCLFTDFDSQTNVSQSKDSDVYITDKCVLDMRSMDFKSNSAVAWSNKSDFACANAFNNSIIPEDTFFPSPESSCGFTSESYQQGVLSATILYEILLGKATLYAVLVSALVLMAMVKRKDSRG

SEQ ID NO: 44109 - protein, 769 aa, synthetic construct
MALPVTALLLPLALLLHAARPEVQLVESGGGLVQPGGSLRLSCEASGFASDDYIIGWFRQAPGKEREGVSCISSKYANTVYTDSVKGRFRLSRGTAKNTVYLQMSALKPEDTAVYYCAMDSRRVTCPEISTMHRNFDSWGQGTLVTVSSGTGGGGSGGGGSGGGGSEFEIVLTQSPATLSLSPGERATLSCRASQSVSSYLAWYQQKPGQAPRLLIYDASNRATGIPARFSGSGSGTDFTLTISSLEPEDFAVYYCQQRSNWPITFGQGTRLEIKLEDLKNVFPPEVAVFEPSEAEISHTQKATLVCLATGFYPDHVELSWWVNGKEVHSGVCTDPQPLKEQPALNDSRYCLSSRLRVSATFWQNPRNHFRCQVQFYGLSENDEWTQDRAKPVTQIVSAEAWGRADCDVKLVEKSFETDTNLNFQNLSVIGFRILLLKVAGFNLLMTLRLWSSRAKRSGSGATNFSLLKQAGDVEENPGPTSMDWIWRILFLVGAATGAHSFEEVQLVESGGGLVQPGRSLRLSCAASGFTFNDYAMHWVRQAPGKGLEWVSTISWNSGSIGYADSVKGRFTISRDNAKKSLYLQMNSLRAEDTALYYCAKDIQYGNYYYGMDVWGQGTTVTVSSTRIQNPDPAVYQLRDSKSSDKSVCLFTDFDSQTNVSQSKDSDVYITDKCVLDMRSMDFKSNSAVAWSNKSDFACANAFNNSIIPEDTFFPSPESSCGFTSESYQQGVLSATILYEILLGKATLYAVLVSALVLMAMVKRKDSRG

SEQ ID NO: 44110 - protein, 769 aa, synthetic construct
MALPVTALLLPLALLLHAARPEVQLVESGGGLVQPGGSLRLSCAASGFASDYYIIGWFRQAPGKEREGVSCISSRYANTNYADSVKGRFTISRDNAKNTVYLQMNSLKPEDTAVYYCAADTRRYTCPDIATMHRNFDSWGQGTLVTVSSGTGGGGSGGGGSGGGGSEFEIVLTQSPATLSLSPGERATLSCRASQSVSSYLAWYQQKPGQAPRLLIYDASNRATGIPARFSGSGSGTDFTLTISSLEPEDFAVYYCQQRSNWPITFGQGTRLEIKLEIQNPDPAVYQLRDSKSSDKSVCLFTDFDSQTNVSQSKDSDVYITDKCVLDMRSMDFKSNSAVAWSNKSDFACANAFNNSIIPEDTFFPSPESSCGFTSESYQQGVLSATILYEILLGKATLYAVLVSALVLMAMVKRKDSRGRAKRSGSGATNFSLLKQAGDVEENPGPTSMDWIWRILFLVGAATGAHSFEEVQLVESGGGLVQPGRSLRLSCAASGFTFNDYAMHWVRQAPGKGLEWVSTISWNSGSIGYADSVKGRFTISRDNAKKSLYLQMNSLRAEDTALYYCAKDIQYGNYYYGMDVWGQGTTVTVSSTRDLKNVFPPEVAVFEPSEAEISHTQKATLVCLATGFYPDHVELSWWVNGKEVHSGVCTDPQPLKEQPALNDSRYCLSSRLRVSATFWQNPRNHFRCQVQFYGLSENDEWTQDRAKPVTQIVSAEAWGRADCDVKLVEKSFETDTNLNFQNLSVIGFRILLLKVAGFNLLMTLRLWSS

SEQ ID NO: 44111 - protein, 769 aa, synthetic construct
MALPVTALLLPLALLLHAARPEVQLVESGGGLVQPGGSLRLSCEASGFASDDYIIGWFRQAPGKEREGVSCISSKYANTVYTDSVKGRFRLSRGTAKNTVYLQMSALKPEDTAVYYCAMDSRRVTCPEISTMHRNFDSWGQGTLVTVSSGTGGGGSGGGGSGGGGSEFEIVLTQSPATLSLSPGERATLSCRASQSVSSYLAWYQQKPGQAPRLLIYDASNRATGIPARFSGSGSGTDFTLTISSLEPEDFAVYYCQQRSNWPITFGQGTRLEIKLEIQNPDPAVYQLRDSKSSDKSVCLFTDFDSQTNVSQSKDSDVYITDKCVLDMRSMDFKSNSAVAWSNKSDFACANAFNNSIIPEDTFFPSPESSCGFTSESYQQGVLSATILYEILLGKATLYAVLVSALVLMAMVKRKDSRGRAKRSGSGATNFSLLKQAGDVEENPGPTSMDWIWRILFLVGAATGAHSFEEVQLVESGGGLVQPGRSLRLSCAASGFTFNDYAMHWVRQAPGKGLEWVSTISWNSGSIGYADSVKGRFTISRDNAKKSLYLQMNSLRAEDTALYYCAKDIQYGNYYYGMDVWGQGTTVTVSSTRDLKNVFPPEVAVFEPSEAEISHTQKATLVCLATGFYPDHVELSWWVNGKEVHSGVCTDPQPLKEQPALNDSRYCLSSRLRVSATFWQNPRNHFRCQVQFYGLSENDEWTQDRAKPVTQIVSAEAWGRADCDVKLVEKSFETDTNLNFQNLSVIGFRILLLKVAGFNLLMTLRLWSS

SEQ ID NO: 44112 - protein, 760 aa, synthetic construct
MALPVTALLLPLALLLHAARPQVKLEESGGGLVQPGESLRLSCSASGSIFKVFRVFAMSWYRQGPGKQRELVASISSGETTTYAESVKGRFTISRDNAKNTAYLQMDSLKPEDTAVYYCNADHTFTGDFWGQGTQVTVSSGTGGGGSGGGGSGGGGSEFEIVLTQSPATLSLSPGERATLSCRASQSVSSYLAWYQQKPGQAPRLLIYDASNRATGIPARFSGSGSGTDFTLTISSLEPEDFAVYYCQQRSNWPITFGQGTRLEIKLEIQNPDPAVYQLRDSKSSDKSVCLFTDFDSQTNVSQSKDSDVYITDKCVLDMRSMDFKSNSAVAWSNKSDFACANAFNNSIIPEDTFFPSPESSCGFTSESYQQGVLSATILYEILLGKATLYAVLVSALVLMAMVKRKDSRGRAKRSGSGATNFSLLKQAGDVEENPGPTSMDWIWRILFLVGAATGAHSFEEVQLVESGGGLVQPGRSLRLSCAASGFTFNDYAMHWVRQAPGKGLEWVSTISWNSGSIGYADSVKGRFTISRDNAKKSLYLQMNSLRAEDTALYYCAKDIQYGNYYYGMDVWGQGTTVTVSSTRDLKNVFPPEVAVFEPSEAEISHTQKATLVCLATGFYPDHVELSWWVNGKEVHSGVCTDPQPLKEQPALNDSRYCLSSRLRVSATFWQNPRNHFRCQVQFYGLSENDEWTQDRAKPVTQIVSAEAWGRADCDVKLVEKSFETDTNLNFQNLSVIGFRILLLKVAGFNLLMTLRLWSS

SEQ ID NO: 44113 - protein, 761 aa, synthetic construct
MALPVTALLLPLALLLHAARPEIVLTQSPATLSLSPGERATLSCRASQSVSSYLAWYQQKPGQAPRLLIYDASNRATGIPARFSGSGSGTDFTLTISSLEPEDFAVYYCQQRSNWPITFGQGTRLEIKLEDLKNVFPPEVAVFEPSEAEISHTQKATLVCLATGFYPDHVELSWWVNGKEVHSGVCTDPQPLKEQPALNDSRYCLSSRLRVSATFWQNPRNHFRCQVQFYGLSENDEWTQDRAKPVTQIVSAEAWGRADCDVKLVEKSFETDTNLNFQNLSVIGFRILLLKVAGFNLLMTLRLWSSRAKRSGSGATNFSLLKQAGDVEENPGPTSATMDWIWRILFLVGAATGAHSGPEVQLVESGGGLVQAGGSLRLSCAASGRTFSMGWFRQAPGKEREFVAAITYSGGSPYYADSVKGRFTISRDNAKNTVYLQMNSLKPEDTAVYYCAANPTYGSDWNAENWGQGTQVTVSSGSGGGGSGGGGSGGGGSFEEVQLVESGGGLVQPGRSLRLSCAASGFTFNDYAMHWVRQAPGKGLEWVSTISWNSGSIGYADSVKGRFTISRDNAKKSLYLQMNSLRAEDTALYYCAKDIQYGNYYYGMDVWGQGTTVTVSSTRIQNPDPAVYQLRDSKSSDKSVCLFTDFDSQTNVSQSKDSDVYITDKCVLDMRSMDFKSNSAVAWSNKSDFACANAFNNSIIPEDTFFPSPESSCGFTSESYQQGVLSATILYEILLGKATLYAVLVSALVLMAMVKRKDSRG

SEQ ID NO: 44114 - protein, 762 aa, synthetic construct
MALPVTALLLPLALLLHAARPEIVLTQSPATLSLSPGERATLSCRASQSVSSYLAWYQQKPGQAPRLLIYDASNRATGIPARFSGSGSGTDFTLTISSLEPEDFAVYYCQQRSNWPITFGQGTRLEIKLEDLKNVFPPEVAVFEPSEAEISHTQKATLVCLATGFYPDHVELSWWVNGKEVHSGVCTDPQPLKEQPALNDSRYCLSSRLRVSATFWQNPRNHFRCQVQFYGLSENDEWTQDRAKPVTQIVSAEAWGRADCDVKLVEKSFETDTNLNFQNLSVIGFRILLLKVAGFNLLMTLRLWSSRAKRSGSGATNFSLLKQAGDVEENPGPTSATMDWIWRILFLVGAATGAHSGPEVQLVESGGGLVQPGGSLRLSCAASGSIFGFNDMAWYRQAPGKQRELVALISRVGVTSSADSVKGRFTISRVNAKDTVYLQMNSLKPEDTAVYYCYMDQRLDGSTLAYWGQGTQVTVSSGSGGGGSGGGGSGGGGSFEEVQLVESGGGLVQPGRSLRLSCAASGFTFNDYAMHWVRQAPGKGLEWVSTISWNSGSIGYADSVKGRFTISRDNAKKSLYLQMNSLRAEDTALYYCAKDIQYGNYYYGMDVWGQGTTVTVSSTRIQNPDPAVYQLRDSKSSDKSVCLFTDFDSQTNVSQSKDSDVYITDKCVLDMRSMDFKSNSAVAWSNKSDFACANAFNNSIIPEDTFFPSPESSCGFTSESYQQGVLSATILYEILLGKATLYAVLVSALVLMAMVKRKDSRG

SEQ ID NO: 44115 - protein, 758 aa, synthetic construct
MALPVTALLLPLALLLHAARPEIVLTQSPATLSLSPGERATLSCRASQSVSSYLAWYQQKPGQAPRLLIYDASNRATGIPARFSGSGSGTDFTLTISSLEPEDFAVYYCQQRSNWPITFGQGTRLEIKLEDLKNVFPPEVAVFEPSEAEISHTQKATLVCLATGFYPDHVELSWWVNGKEVHSGVCTDPQPLKEQPALNDSRYCLSSRLRVSATFWQNPRNHFRCQVQFYGLSENDEWTQDRAKPVTQIVSAEAWGRADCDVKLVEKSFETDTNLNFQNLSVIGFRILLLKVAGFNLLMTLRLWSSRAKRSGSGATNFSLLKQAGDVEENPGPTSATMDWIWRILFLVGAATGAHSGPEVQLVESGGGLVQAGGSLRLSCAASGSVFSGNVMGWYRQAPGKEREWVAAIASGGSIYYRDSVKGRFTISRDNAKNTVYLQMNSLKPEDTAVYYCNSHPPTLPYWGLGTQVTVSSGSGGGGSGGGGSGGGGSFEEVQLVESGGGLVQPGRSLRLSCAASGFTFNDYAMHWVRQAPGKGLEWVSTISWNSGSIGYADSVKGRFTISRDNAKKSLYLQMNSLRAEDTALYYCAKDIQYGNYYYGMDVWGQGTTVTVSSTRIQNPDPAVYQLRDSKSSDKSVCLFTDFDSQTNVSQSKDSDVYITDKCVLDMRSMDFKSNSAVAWSNKSDFACANAFNNSIIPEDTFFPSPESSCGFTSESYQQGVLSATILYEILLGKATLYAVLVSALVLMAMVKRKDSRG

SEQ ID NO: 44116 - protein, 756 aa, synthetic construct
MALPVTALLLPLALLLHAARPEIVLTQSPATLSLSPGERATLSCRASQSVSSYLAWYQQKPGQAPRLLIYDASNRATGIPARFSGSGSGTDFTLTISSLEPEDFAVYYCQQRSNWPITFGQGTRLEIKLEDLKNVFPPEVAVFEPSEAEISHTQKATLVCLATGFYPDHVELSWWVNGKEVHSGVCTDPQPLKEQPALNDSRYCLSSRLRVSATFWQNPRNHFRCQVQFYGLSENDEWTQDRAKPVTQIVSAEAWGRADCDVKLVEKSFETDTNLNFQNLSVIGFRILLLKVAGFNLLMTLRLWSSRAKRSGSGATNFSLLKQAGDVEENPGPTSATMDWIWRILFLVGAATGAHSGPEVQLLESGGGLVQPGGSLRLSCAASGFSFSSYALSWVRQAPGKGLEWVSSIGENDGTTDYADAVKGRFTISRDNSKNTLYLQMNSLRVEDTAVYYCVKDGIHWGQGTLVTVSSGSGGGGSGGGGSGGGGSFEEVQLVESGGGLVQPGRSLRLSCAASGFTFNDYAMHWVRQAPGKGLEWVSTISWNSGSIGYADSVKGRFTISRDNAKKSLYLQMNSLRAEDTALYYCAKDIQYGNYYYGMDVWGQGTTVTVSSTRIQNPDPAVYQLRDSKSSDKSVCLFTDFDSQTNVSQSKDSDVYITDKCVLDMRSMDFKSNSAVAWSNKSDFACANAFNNSIIPEDTFFPSPESSCGFTSESYQQGVLSATILYEILLGKATLYAVLVSALVLMAMVKRKDSRG

SEQ ID NO: 44117 - protein, 1125 aa, synthetic construct
MGPRLLFWALLCLLGTGPVEAGVTQSPTHLIKTRGQQATLRCSPISGHTSVYWYQQALGLGLQFLLWYDEGEERNRGNFPPRFSGRQFPNYSSELNVNALELEDSALYLCASSLGGPRGLAGLRGDEQFFGPGTRLTVLEGTGGGGSGGGEFEIVLTQSPATLSLSPGERATLSCRASQSVSSYLAWYQQKPGQAPRLLIYDASNRATGIPARFSGSGSGTDFTLTISSLEPEDFAVYYCQQRSNWPITFGQGTRLEIKLEDLKNVFPPEVAVFEPSEAEISHTQKATLVCLATGFYPDHVELSWWVNGKEVHSGVCTDPQPLKEQPALNDSRYCLSSRLRVSATFWQNPRNHFRCQVQFYGLSENDEWTQDRAKPVTQIVSAEAWGRADCDVKLVEKSFETDTNLNFQNLSVIGFRILLLKVAGFNLLMTLRLWSSRAKRSGSGATNFSLLKQAGDVEENPGPTSATMDWIWRILFLVGAATGAHSGPEVQLVESGGGLVQAGGSLRLSCAASGRTFSMGWFRQAPGKEREFVAAITYSGGSPYYADSVKGRFTISRDNAKNTVYLQMNSLKPEDTAVYYCAANPTYGSDWNAENWGQGTQVTVSSGSGGGGSGGGGSGGGGSFEEVQLVESGGGLVQPGRSLRLSCAASGFTFNDYAMHWVRQAPGKGLEWVSTISWNSGSIGYADSVKGRFTISRDNAKKSLYLQMNSLRAEDTALYYCAKDIQYGNYYYGMDVWGQGTTVTVSSTRIQNPDPAVYQLRDSKSSDKSVCLFTDFDSQTNVSQSKDSDVYITDKCVLDMRSMDFKSNSAVAWSNKSDFACANAFNNSIIPEDTFFPSPESSCGFTSESYQQGVLSATILYEILLGKATLYAVLVSALVLMAMVKRKDSRGRAKRSGSGVKQTLNFDLLKLAGDVESNPGPSRGHMTEYKPTVRLATRDDVPRAVRTLAAAFADYPATRHTVDPDRHIERVTELQELFLTRVGLDIGKVWVADDGAAVAVWTTPESVEAGAVFAEIGPRMAELSGSRLAAQQQMEGLLAPHRPKEPAWFLATVGVSPDHQGKGLGSAVVLPGVEAAERAGVPAFLETSAPRNLPFYERLGFTVTADVEVPEGPRTWCMTRKPGA

SEQ ID NO: 44118 - protein, 1124 aa, synthetic construct
MGPRLLFWALLCLLGTGPVEAGVTQSPTHLIKTRGQQATLRCSPISGHTSVYWYQQALGLGLQFLLWYDEGEERNRGNFPPRFSGRQFPNYSSELNVNALELEDSALYLCASSLGGDELGADGNEQFFGPGTRLTVLEGTGGGGSGGGSEFEIVLTQSPATLSLSPGERATLSCRASQSVSSYLAWYQQKPGQAPRLLIYDASNRATGIPARFSGSGSGTDFTLTISSLEPEDFAVYYCQQRSNWPITFGQGTRLEIKLEDLKNVFPPEVAVFEPSEAEISHTQKATLVCLATGFYPDHVELSWWVNGKEVHSGVCTDPQPLKEQPALNDSRYCLSSRLRVSATFWQNPRNHFRCQVQFYGLSENDEWTQDRAKPVTQIVSAEAWGRADCDVKLVEKSFETDTNLNFQNLSVIGFRILLLKVAGFNLLMTLRLWSSRAKRSGSGATNFSLLKQAGDVEENPGPTSATMDWIWRILFLVGAATGAHSGPEVQLVESGGGLVQAGGSLRLSCAASGRTFSMGWFRQAPGKEREFVAAITYSGGSPYYADSVKGRFTISRDNAKNTVYLQMNSLKPEDTAVYYCAANPTYGSDWNAENWGQGTQVTVSSGSGGGGSGGGGSGGGGSFEEVQLVESGGGLVQPGRSLRLSCAASGFTFNDYAMHWVRQAPGKGLEWVSTISWNSGSIGYADSVKGRFTISRDNAKKSLYLQMNSLRAEDTALYYCAKDIQYGNYYYGMDVWGQGTTVTVSSTRIQNPDPAVYQLRDSKSSDKSVCLFTDFDSQTNVSQSKDSDVYITDKCVLDMRSMDFKSNSAVAWSNKSDFACANAFNNSIIPEDTFFPSPESSCGFTSESYQQGVLSATILYEILLGKATLYAVLVSALVLMAMVKRKDSRGRAKRSGSGVKQTLNFDLLKLAGDVESNPGPSRGHMTEYKPTVRLATRDDVPRAVRTLAAAFADYPATRHTVDPDRHIERVTELQELFLTRVGLDIGKVWVADDGAAVAVWTTPESVEAGAVFAEIGPRMAELSGSRLAAQQQMEGLLAPHRPKEPAWFLATVGVSPDHQGKGLGSAVVLPGVEAAERAGVPAFLETSAPRNLPFYERLGFTVTADVEVPEGPRTWCMTRKPGA

SEQ ID NO: 44119 - protein, 949 aa, synthetic construct
MALPVTALLLPLALLLHAARPEIVLTQSPATLSLSPGERATLSCRASQSVSSYLAWYQQKPGQAPRLLIYDASNRATGIPARFSGSGSGTDFTLTISSLEPEDFAVYYCQQRSNWPITFGQGTRLEIKLEDLKNVFPPEVAVFEPSEAEISHTQKATLVCLATGFYPDHVELSWWVNGKEVHSGVCTDPQPLKEQPALNDSRYCLSSRLRVSATFWQNPRNHFRCQVQFYGLSENDEWTQDRAKPVTQIVSAEAWGRADCDVKLVEKSFETDTNLNFQNLSVIGFRILLLKVAGFNLLMTLRLWSSRAKRSGSGATNFSLLKQAGDVEENPGPTSATMDWIWRILFLVGAATGAHSGPMGSWLEFYHRLNAIDSRLWALGGSEAELAAFEKEIAAFESELQAYKGKGNPEVESLRDHAAHIREWLQAYRHNGSGGGGSGGGGSGGGGSFEEVQLVESGGGLVQPGRSLRLSCAASGFTFNDYAMHWVRQAPGKGLEWVSTISWNSGSIGYADSVKGRFTISRDNAKKSLYLQMNSLRAEDTALYYCAKDIQYGNYYYGMDVWGQGTTVTVSSTRIQNPDPAVYQLRDSKSSDKSVCLFTDFDSQTNVSQSKDSDVYITDKCVLDMRSMDFKSNSAVAWSNKSDFACANAFNNSIIPEDTFFPSPESSCGFTSESYQQGVLSATILYEILLGKATLYAVLVSALVLMAMVKRKDSRGRAKRSGSGVKQTLNFDLLKLAGDVESNPGPSRGHMTEYKPTVRLATRDDVPRAVRTLAAAFADYPATRHTVDPDRHIERVTELQELFLTRVGLDIGKVWVADDGAAVAVWTTPESVEAGAVFAEIGPRMAELSGSRLAAQQQMEGLLAPHRPKEPAWFLATVGVSPDHQGKGLGSAVVLPGVEAAERAGVPAFLETSAPRNLPFYERLGFTVTADVEVPEGPRTWCMTRKPGA

SEQ ID NO: 44120 - protein, 949 aa, synthetic construct
MALPVTALLLPLALLLHAARPACMGSWFEFYDRLNAIDARLWALGGSEAELAAFEKEIAAFESELQAYKGKGNPEVENLRVHAAAIREWLQAYRHNGTGGGGSGGGGSGGGGSEFEIVLTQSPATLSLSPGERATLSCRASQSVSSYLAWYQQKPGQAPRLLIYDASNRATGIPARFSGSGSGTDFTLTISSLEPEDFAVYYCQQRSNWPITFGQGTRLEIKLEDLKNVFPPEVAVFEPSEAEISHTQKATLVCLATGFYPDHVELSWWVNGKEVHSGVCTDPQPLKEQPALNDSRYCLSSRLRVSATFWQNPRNHFRCQVQFYGLSENDEWTQDRAKPVTQIVSAEAWGRADCDVKLVEKSFETDTNLNFQNLSVIGFRILLLKVAGFNLLMTLRLWSSRAKRSGSGATNFSLLKQAGDVEENPGPTSMDWIWRILFLVGAATGAHSFEEVQLVESGGGLVQPGRSLRLSCAASGFTFNDYAMHWVRQAPGKGLEWVSTISWNSGSIGYADSVKGRFTISRDNAKKSLYLQMNSLRAEDTALYYCAKDIQYGNYYYGMDVWGQGTTVTVSSTRIQNPDPAVYQLRDSKSSDKSVCLFTDFDSQTNVSQSKDSDVYITDKCVLDMRSMDFKSNSAVAWSNKSDFACANAFNNSIIPEDTFFPSPESSCGFTSESYQQGVLSATILYEILLGKATLYAVLVSALVLMAMVKRKDSRGRAKRSGSGVKQTLNFDLLKLAGDVESNPGPSRGHMTEYKPTVRLATRDDVPRAVRTLAAAFADYPATRHTVDPDRHIERVTELQELFLTRVGLDIGKVWVADDGAAVAVWTTPESVEAGAVFAEIGPRMAELSGSRLAAQQQMEGLLAPHRPKEPAWFLATVGVSPDHQGKGLGSAVVLPGVEAAERAGVPAFLETSAPRNLPFYERLGFTVTADVEVPEGPRTWCMTRKPGA

SEQ ID NO: 44121 - protein, 1066 aa, synthetic construct
MALPVTALLLPLALLLHAARPACMDPDLEIRAAFLRQRNTALRTEVAELEQEVQRLENEVSQYETRYGPLGGGKGTGGGGSGGGGSGGGGSEFEIVLTQSPATLSLSPGERATLSCRASQSVSSYLAWYQQKPGQAPRLLIYDASNRATGIPARFSGSGSGTDFTLTISSLEPEDFAVYYCQQRSNWPITFGQGTRLEIKLEDLKNVFPPEVAVFEPSEAEISHTQKATLVCLATGFYPDHVELSWWVNGKEVHSGVCTDPQPLKEQPALNDSRYCLSSRLRVSATFWQNPRNHFRCQVQFYGLSENDEWTQDRAKPVTQIVSAEAWGRADCDVKLVEKSFETDTNLNFQNLSVIGFRILLLKVAGFNLLMTLRLWSSRAKRSGSGATNFSLLKQAGDVEENPGPTSATMDWIWRILFLVGAATGAHSGPEVQLVESGGGLVQAGGSLRLSCAASGRTFSMGWFRQAPGKEREFVAAITYSGGSPYYADSVKGRFTISRDNAKNTVYLQMNSLKPEDTAVYYCAANPTYGSDWNAENWGQGTQVTVSSGSGGGGSGGGGSGGGGSFEEVQLVESGGGLVQPGRSLRLSCAASGFTFNDYAMHWVRQAPGKGLEWVSTISWNSGSIGYADSVKGRFTISRDNAKKSLYLQMNSLRAEDTALYYCAKDIQYGNYYYGMDVWGQGTTVTVSSTRIQNPDPAVYQLRDSKSSDKSVCLFTDFDSQTNVSQSKDSDVYITDKCVLDMRSMDFKSNSAVAWSNKSDFACANAFNNSIIPEDTFFPSPESSCGFTSESYQQGVLSATILYEILLGKATLYAVLVSALVLMAMVKRKDSRGRAKRSGSGVKQTLNFDLLKLAGDVESNPGPSRGHMTEYKPTVRLATRDDVPRAVRTLAAAFADYPATRHTVDPDRHIERVTELQELFLTRVGLDIGKVWVADDGAAVAVWTTPESVEAGAVFAEIGPRMAELSGSRLAAQQQMEGLLAPHRPKEPAWFLATVGVSPDHQGKGLGSAVVLPGVEAAERAGVPAFLETSAPRNLPFYERLGFTVTADVEVPEGPRTWCMTRKPGA

SEQ ID NO: 44122 - protein, 949 aa, synthetic construct
MALPVTALLLPLALLLHAARPEIVLTQSPATLSLSPGERATLSCRASQSVSSYLAWYQQKPGQAPRLLIYDASNRATGIPARFSGSGSGTDFTLTISSLEPEDFAVYYCQQRSNWPITFGQGTRLEIKLEDLKNVFPPEVAVFEPSEAEISHTQKATLVCLATGFYPDHVELSWWVNGKEVHSGVCTDPQPLKEQPALNDSRYCLSSRLRVSATFWQNPRNHFRCQVQFYGLSENDEWTQDRAKPVTQIVSAEAWGRADCDVKLVEKSFETDTNLNFQNLSVIGFRILLLKVAGFNLLMTLRLWSSRAKRSGSGATNFSLLKQAGDVEENPGPTSATMDWIWRILFLVGAATGAHSGPMGSWSEFYDRLHAIHHRLYALGGSEAELAAFEKEIAAFESELQAYKGKGNPEVEALRDTAAFIRTRLQAYRHNGSGGGGSGGGGSGGGGSFEEVQLVESGGGLVQPGRSLRLSCAASGFTFNDYAMHWVRQAPGKGLEWVSTISWNSGSIGYADSVKGRFTISRDNAKKSLYLQMNSLRAEDTALYYCAKDIQYGNYYYGMDVWGQGTTVTVSSTRIQNPDPAVYQLRDSKSSDKSVCLFTDFDSQTNVSQSKDSDVYITDKCVLDMRSMDFKSNSAVAWSNKSDFACANAFNNSIIPEDTFFPSPESSCGFTSESYQQGVLSATILYEILLGKATLYAVLVSALVLMAMVKRKDSRGRAKRSGSGVKQTLNFDLLKLAGDVESNPGPSRGHMTEYKPTVRLATRDDVPRAVRTLAAAFADYPATRHTVDPDRHIERVTELQELFLTRVGLDIGKVWVADDGAAVAVWTTPESVEAGAVFAEIGPRMAELSGSRLAAQQQMEGLLAPHRPKEPAWFLATVGVSPDHQGKGLGSAVVLPGVEAAERAGVPAFLETSAPRNLPFYERLGFTVTADVEVPEGPRTWCMTRKPGA

SEQ ID NO: 44123 - protein, 1159 aa, synthetic construct
MALPVTALLLPLALLLHAARPEIVLTQSPATLSLSPGERATLSCRASQSVSSYLAWYQQKPGQAPRLLIYDASNRATGIPARFSGSGSGTDFTLTISSLEPEDFAVYYCQQRSNWPITFGQGTRLEIKLEDLKNVFPPEVAVFEPSEAEISHTQKATLVCLATGFYPDHVELSWWVNGKEVHSGVCTDPQPLKEQPALNDSRYCLSSRLRVSATFWQNPRNHFRCQVQFYGLSENDEWTQDRAKPVTQIVSAEAWGRADCDVKLVEKSFETDTNLNFQNLSVIGFRILLLKVAGFNLLMTLRLWSSRAKRSGSGATNFSLLKQAGDVEENPGPTSTMDWIWRILFLVGAATGAHSLFNQEVQIPLTESYCGPCPKNWICYKNNCYQFFDESKNWYESQASCMSQNASLLKVYSKEDQDLLKLVKSAHWMGLVHIPTNGSWQWEDGSILSPNLLTIIEMQKGDCALYASSFKGYIENCSTPNTYICMQRTVSGGGGSGGGGSGGGGDLFNQEVQIPLTESYCGPCPKNWICYKNNCYQFFDESKNWYESQASCMSQNASLLKVYSKEDQDLLKLVKSAHWMGLVHIPTNGSWQWEDGSILSPNLLTIIEMQKGDCALYASSFKGYIENCSTPNTYICMQRTVGSGGGGSGGGGSGGGGSFEEVQLVESGGGLVQPGRSLRLSCAASGFTFNDYAMHWVRQAPGKGLEWVSTISWNSGSIGYADSVKGRFTISRDNAKKSLYLQMNSLRAEDTALYYCAKDIQYGNYYYGMDVWGQGTTVTVSSTRIQNPDPAVYQLRDSKSSDKSVCLFTDFDSQTNVSQSKDSDVYITDKCVLDMRSMDFKSNSAVAWSNKSDFACANAFNNSIIPEDTFFPSPESSCGFTSESYQQGVLSATILYEILLGKATLYAVLVSALVLMAMVKRKDSRGRAKRSGSGVKQTLNFDLLKLAGDVESNPGPSRGHMTEYKPTVRLATRDDVPRAVRTLAAAFADYPATRHTVDPDRHIERVTELQELFLTRVGLDIGKVWVADDGAAVAVWTTPESVEAGAVFAEIGPRMAELSGSRLAAQQQMEGLLAPHRPKEPAWFLATVGVSPDHQGKGLGSAVVLPGVEAAERAGVPAFLETSAPRNLPFYERLGFTVTADVEVPEGPRTWCMTRKPGA

SEQ ID NO: 44124 - protein, 622 aa, synthetic construct; identical to SEQ ID NO: 44081

SEQ ID NO: 44125 - protein, 626 aa, synthetic construct
MALPVTALLLPLALLLHAARPEIVLTQSPATLSLSPGERATLSCRASQSVSSYLAWYQQKPGQAPRLLIYDASNRATGIPARFSGSGSGTDFTLTISSLEPEDFAVYYCQQRSNWPITFGQGTRLEIKLEIQNPDPAVYQLRDSKSSDKSVCLFTDFDSQTNVSQSKDSDVYITDKCVLDMRSMDFKSNSAVAWSNKSDFACANAFNNSIIPEDTFFPSPESSCDVKLVEKSFETDTNLNFQILYEILLGKATLYAVLVSALVLMAMVKRKDSRGRAKRSGSGVKQTLNFDLLKLAGDVESNPGPTSMDWIWRILFLVGAATGAHSFEEVQLVESGGGLVQPGRSLRLSCAASGFTFNDYAMHWVRQAPGKGLEWVSTISWNSGSIGYADSVKGRFTISRDNAKKSLYLQMNSLRAEDTALYYCAKDIQYGNYYYGMDVWGQGTTVTVSSTREDLKNVFPPEVAVFEPSEAEISHTQKATLVCLATGFYPDHVELSWWVNGKEVHSGVCTDPQPLKEQPALNDSRYCLSSRLRVSATFWQNPRNHFRCQVQFYGLSENDEWTQDRAKPVTQIVSAEAWGRADCGFTSESYQQGVLSATNLSVIGFRILLLKVAGFNLLMTLRLWSS

SEQ ID NO: 44126 - protein, 757 aa, synthetic construct
MALPVTALLLPLALLLHAARPEVQLVESGGGLVQPGGSLRLSCAASGFSFSDFWMSWVRQAPGKGLEWVATISQAGSEKDYVDSVKGRFTISRDNAKKSLYLQMNSLRAEDTAVYYCASGVYSFDYRGQGTLVTVSSGTGGGGSGGGGSGGGGSEFEIVLTQSPATLSLSPGERATLSCRASQSVSSYLAWYQQKPGQAPRLLIYDASNRATGIPARFSGSGSGTDFTLTISSLEPEDFAVYYCQQRSNWPITFGQGTRLEIKLEDLKNVFPPEVAVFEPSEAEISHTQKATLVCLATGFYPDHVELSWWVNGKEVHSGVCTDPQPLKEQPALNDSRYCLSSRLRVSATFWQNPRNHFRCQVQFYGLSENDEWTQDRAKPVTQIVSAEAWGRADCGFTSESYQQGVLSATNLSVIGFRILLLKVAGFNLLMTLRLWSSRAKRSGSGATNFSLLKQAGDVEENPGPTSMDWIWRILFLVGAATGAHSFEEVQLVESGGGLVQPGRSLRLSCAASGFTFNDYAMHWVRQAPGKGLEWVSTISWNSGSIGYADSVKGRFTISRDNAKKSLYLQMNSLRAEDTALYYCAKDIQYGNYYYGMDVWGQGTTVTVSSTRIQNPDPAVYQLRDSKSSDKSVCLFTDFDSQTNVSQSKDSDVYITDKCVLDMRSMDFKSNSAVAWSNKSDFACANAFNNSIIPEDTFFPSPESSCDVKLVEKSFETDTNLNFQILYEILLGKATLYAVLVSALVLMAMVKRKDSRG

SEQ ID NO: 44127 - protein, 761 aa, synthetic construct
MALPVTALLLPLALLLHAARPEVQLVESGGGLVQPGGSLRLSCAASGFSFSDFWMSWVRQAPGKGLEWVATISQAGSEKDYVDSVKGRFTISRDNAKKSLYLQMNSLRAEDTAVYYCASGVYSFDYRGQGTLVTVSSGTGGGGSGGGGSGGGGSEFEIVLTQSPATLSLSPGERATLSCRASQSVSSYLAWYQQKPGQAPRLLIYDASNRATGIPARFSGSGSGTDFTLTISSLEPEDFAVYYCQQRSNWPITFGQGTRLEIKLEIQNPDPAVYQLRDSKSSDKSVCLFTDFDSQTNVSQSKDSDVYITDKCVLDMRSMDFKSNSAVAWSNKSDFACANAFNNSIIPEDTFFPSPESSCDVKLVEKSFETDTNLNFQILYEILLGKATLYAVLVSALVLMAMVKRKDSRGRAKRSGSGVKQTLNFDLLKLAGDVESNPGPTSMDWIWRILFLVGAATGAHSFEEVQLVESGGGLVQPGRSLRLSCAASGFTFNDYAMHWVRQAPGKGLEWVSTISWNSGSIGYADSVKGRFTISRDNAKKSLYLQMNSLRAEDTALYYCAKDIQYGNYYYGMDVWGQGTTVTVSSTREDLKNVFPPEVAVFEPSEAEISHTQKATLVCLATGFYPDHVELSWWVNGKEVHSGVCTDPQPLKEQPALNDSRYCLSSRLRVSATFWQNPRNHFRCQVQFYGLSENDEWTQDRAKPVTQIVSAEAWGRADCGFTSESYQQGVLSATNLSVIGFRILLLKVAGFNLLMTLRLWSS

SEQ ID NO: 44128 - protein, 894 aa, synthetic construct
MALPVTALLLPLALLLHAARPEVQLVESGGGLVQPGGSLRLSCAASGFSFSDFWMSWVRQAPGKGLEWVATISQAGSEKDYVDSVKGRFTISRDNAKKSLYLQMNSLRAEDTAVYYCASGVYSFDYRGQGTLVTVSSGTGGGGSGGGGSGGGGSEFEIVLTQSPATLSLSPGERATLSCRASQSVSSYLAWYQQKPGQAPRLLIYDASNRATGIPARFSGSGSGTDFTLTISSLEPEDFAVYYCQQRSNWPITFGQGTRLEIKLEDLKNVFPPEVAVFEPSEAEISHTQKATLVCLATGFYPDHVELSWWVNGKEVHSGVCTDPQPLKEQPALNDSRYCLSSRLRVSATFWQNPRNHFRCQVQFYGLSENDEWTQDRAKPVTQIVSAEAWGRADCGFTSESYQQGVLSATNLSVIGFRILLLKVAGFNLLMTLRLWSSRAKRSGSGATNFSLLKQAGDVEENPGPTSMDWIWRILFLVGAATGAHSGPQLQLQESGPGLVKPSETLSLTCTVSGDSISSGDYYWGWIRQPPGKGLEWIGHIYYSGVTYYNPSLKSRVTISVDTSRNQFSLKLSSVTAADTAVYYCTREDSSNWRSRGQGTLVTVSSGSGGGGSGGGGSGGGGSFEEVQLVESGGGLVQPGRSLRLSCAASGFTFNDYAMHWVRQAPGKGLEWVSTISWNSGSIGYADSVKGRFTISRDNAKKSLYLQMNSLRAEDTALYYCAKDIQYGNYYYGMDVWGQGTTVTVSSTRIQNPDPAVYQLRDSKSSDKSVCLFTDFDSQTNVSQSKDSDVYITDKCVLDMRSMDFKSNSAVAWSNKSDFACANAFNNSIIPEDTFFPSPESSCDVKLVEKSFETDTNLNFQILYEILLGKATLYAVLVSALVLMAMVKRKDSRG

SEQ ID NO: 44129 - protein, 898 aa, synthetic construct
MALPVTALLLPLALLLHAARPEVQLVESGGGLVQPGGSLRLSCAASGFSFSDFWMSWVRQAPGKGLEWVATISQAGSEKDYVDSVKGRFTISRDNAKKSLYLQMNSLRAEDTAVYYCASGVYSFDYRGQGTLVTVSSGTGGGGSGGGGSGGGGSEFEIVLTQSPATLSLSPGERATLSCRASQSVSSYLAWYQQKPGQAPRLLIYDASNRATGIPARFSGSGSGTDFTLTISSLEPEDFAVYYCQQRSNWPITFGQGTRLEIKLEIQNPDPAVYQLRDSKSSDKSVCLFTDFDSQTNVSQSKDSDVYITDKCVLDMRSMDFKSNSAVAWSNKSDFACANAFNNSIIPEDTFFPSPESSCDVKLVEKSFETDTNLNFQILYEILLGKATLYAVLVSALVLMAMVKRKDSRGRAKRSGSGVKQTLNFDLLKLAGDVESNPGPTSMDWIWRILFLVGAATGAHSGPQLQLQESGPGLVKPSETLSLTCTVSGDSISSGDYYWGWIRQPPGKGLEWIGHIYYSGVTYYNPSLKSRVTISVDTSRNQFSLKLSSVTAADTAVYYCTREDSSNWRSRGQGTLVTVSSGSGGGGSGGGGSGGGGSFEEVQLVESGGGLVQPGRSLRLSCAASGFTFNDYAMHWVRQAPGKGLEWVSTISWNSGSIGYADSVKGRFTISRDNAKKSLYLQMNSLRAEDTALYYCAKDIQYGNYYYGMDVWGQGTTVTVSSTREDLKNVFPPEVAVFEPSEAEISHTQKATLVCLATGFYPDHVELSWWVNGKEVHSGVCTDPQPLKEQPALNDSRYCLSSRLRVSATFWQNPRNHFRCQVQFYGLSENDEWTQDRAKPVTQIVSAEAWGRADCGFTSESYQQGVLSATNLSVIGFRILLLKVAGFNLLMTLRLWSS

SEQ ID NO: 44130 - protein, 726 aa, synthetic construct
MALPVTALLLPLALLLHAARPEIVLTQSPATLSLSPGERATLSCRASQSVSSYLAWYQQKPGQAPRLLIYDASNRATGIPARFSGSGSGTDFTLTISSLEPEDFAVYYCQQRSNWPITFGQGTRLEIKLEDLKNVFPPEVAVFEPSEAEISHTQKATLVCLATGFYPDHVELSWWVNGKEVHSGVCTDPQPLKEQPALNDSRYCLSSRLRVSATFWQNPRNHFRCQVQFYGLSENDEWTQDRAKPVTQIVSAEAWGRADDVIKIHWQEKKSNTILGSQEGNTMKTNDTYMKFSWLTVPEKSLDKEHRCIVRHENNKNGVDQEIIFPPIKTDVITMDPKDNCSKDANDTLLLQLTNTSAYYMYLLLLLKSVVYFAIITCCLLMAMVKRKDSRGRAKRSGSGATNFSLLKQAGDVEENPGPTSMDWIWRILFLVGAATGAHSFEEVQLVESGGGLVQPGRSLRLSCAASGFTFNDYAMHWVRQAPGKGLEWVSTISWNSGSIGYADSVKGRFTISRDNAKKSLYLQMNSLRAEDTALYYCAKDIQYGNYYYGMDVWGQGTTVTVSSTRIQNPDPAVYQLRDSKSSDKSVCLFTDFDSQTNVSQSKDSDVYITDKCVLDMRSMDFKSNSAVAWSNKSDFACANAFNNSIIPEDTFFPSPESSDSTDHVKPKETENTKQPSKSCHKPKAIVHTEKVNMMSLTVLGLRMLFAKTVAVNFLLTAKLFFLLTA

SEQ ID NO: 44131 - protein, 730 aa, synthetic construct
MALPVTALLLPLALLLHAARPEIVLTQSPATLSLSPGERATLSCRASQSVSSYLAWYQQKPGQAPRLLIYDASNRATGIPARFSGSGSGTDFTLTISSLEPEDFAVYYCQQRSNWPITFGQGTRLEIKLEIQNPDPAVYQLRDSKSSDKSVCLFTDFDSQTNVSQSKDSDVYITDKCVLDMRSMDFKSNSAVAWSNKSDFACANAFNNSIIPEDTFFPSPESSDSTDHVKPKETENTKQPSKSCHKPKAIVHTEKVNMMSLTVLGLRMLFAKTVAVNFLLTAKLFFLLTARAKRSGSGVKQTLNFDLLKLAGDVESNPGPTSMDWIWRILFLVGAATGAHSFEEVQLVESGGGLVQPGRSLRLSCAASGFTFNDYAMHWVRQAPGKGLEWVSTISWNSGSIGYADSVKGRFTISRDNAKKSLYLQMNSLRAEDTALYYCAKDIQYGNYYYGMDVWGQGTTVTVSSTREDLKNVFPPEVAVFEPSEAEISHTQKATLVCLATGFYPDHVELSWWVNGKEVHSGVCTDPQPLKEQPALNDSRYCLSSRLRVSATFWQNPRNHFRCQVQFYGLSENDEWTQDRAKPVTQIVSAEAWGRADDVIKIHWQEKKSNTILGSQEGNTMKTNDTYMKFSWLTVPEKSLDKEHRCIVRHENNKNGVDQEIIFPPIKTDVITMDPKDNCSKDANDTLLLQLTNTSAYYMYLLLLLKSVVYFAIITCCLLMAMVKRKDSRG

SEQ ID NO: 44132 - protein, 861 aa, synthetic construct
MALPVTALLLPLALLLHAARPEVQLVESGGGLVQPGGSLRLSCAASGFSFSDFWMSWVRQAPGKGLEWVATISQAGSEKDYVDSVKGRFTISRDNAKKSLYLQMNSLRAEDTAVYYCASGVYSFDYRGQGTLVTVSSGTGGGGSGGGGSGGGGSEFEIVLTQSPATLSLSPGERATLSCRASQSVSSYLAWYQQKPGQAPRLLIYDASNRATGIPARFSGSGSGTDFTLTISSLEPEDFAVYYCQQRSNWPITFGQGTRLEIKLEDLKNVFPPEVAVFEPSEAEISHTQKATLVCLATGFYPDHVELSWWVNGKEVHSGVCTDPQPLKEQPALNDSRYCLSSRLRVSATFWQNPRNHFRCQVQFYGLSENDEWTQDRAKPVTQIVSAEAWGRADDVIKIHWQEKKSNTILGSQEGNTMKTNDTYMKFSWLTVPEKSLDKEHRCIVRHENNKNGVDQEIIFPPIKTDVITMDPKDNCSKDANDTLLLQLTNTSAYYMYLLLLLKSVVYFAIITCCLLMAMVKRKDSRGRAKRSGSGATNFSLLKQAGDVEENPGPTSMDWIWRILFLVGAATGAHSFEEVQLVESGGGLVQPGRSLRLSCAASGFTFNDYAMHWVRQAPGKGLEWVSTISWNSGSIGYADSVKGRFTISRDNAKKSLYLQMNSLRAEDTALYYCAKDIQYGNYYYGMDVWGQGTTVTVSSTRIQNPDPAVYQLRDSKSSDKSVCLFTDFDSQTNVSQSKDSDVYITDKCVLDMRSMDFKSNSAVAWSNKSDFACANAFNNSIIPEDTFFPSPESSDSTDHVKPKETENTKQPSKSCHKPKAIVHTEKVNMMSLTVLGLRMLFAKTVAVNFLLTAKLFFLLTA

SEQ ID NO: 44133 - protein, 865 aa, synthetic construct
MALPVTALLLPLALLLHAARPEVQLVESGGGLVQPGGSLRLSCAASGFSFSDFWMSWVRQAPGKGLEWVATISQAGSEKDYVDSVKGRFTISRDNAKKSLYLQMNSLRAEDTAVYYCASGVYSFDYRGQGTLVTVSSGTGGGGSGGGGSGGGGSEFEIVLTQSPATLSLSPGERATLSCRASQSVSSYLAWYQQKPGQAPRLLIYDASNRATGIPARFSGSGSGTDFTLTISSLEPEDFAVYYCQQRSNWPITFGQGTRLEIKLEIQNPDPAVYQLRDSKSSDKSVCLFTDFDSQTNVSQSKDSDVYITDKCVLDMRSMDFKSNSAVAWSNKSDFACANAFNNSIIPEDTFFPSPESSDSTDHVKPKETENTKQPSKSCHKPKAIVHTEKVNMMSLTVLGLRMLFAKTVAVNFLLTAKLFFLLTARAKRSGSGVKQTLNFDLLKLAGDVESNPGPTSMDWIWRILFLVGAATGAHSFEEVQLVESGGGLVQPGRSLRLSCAASGFTFNDYAMHWVRQAPGKGLEWVSTISWNSGSIGYADSVKGRFTISRDNAKKSLYLQMNSLRAEDTALYYCAKDIQYGNYYYGMDVWGQGTTVTVSSTREDLKNVFPPEVAVFEPSEAEISHTQKATLVCLATGFYPDHVELSWWVNGKEVHSGVCTDPQPLKEQPALNDSRYCLSSRLRVSATFWQNPRNHFRCQVQFYGLSENDEWTQDRAKPVTQIVSAEAWGRADDVIKIHWQEKKSNTILGSQEGNTMKTNDTYMKFSWLTVPEKSLDKEHRCIVRHENNKNGVDQEIIFPPIKTDVITMDPKDNCSKDANDTLLLQLTNTSAYYMYLLLLLKSVVYFAIITCCLLMAMVKRKDSRG

SEQ ID NO: 44134 - protein, 998 aa, synthetic construct
MALPVTALLLPLALLLHAARPEVQLVESGGGLVQPGGSLRLSCAASGFSFSDFWMSWVRQAPGKGLEWVATISQAGSEKDYVDSVKGRFTISRDNAKKSLYLQMNSLRAEDTAVYYCASGVYSFDYRGQGTLVTVSSGTGGGGSGGGGSGGGGSEFEIVLTQSPATLSLSPGERATLSCRASQSVSSYLAWYQQKPGQAPRLLIYDASNRATGIPARFSGSGSGTDFTLTISSLEPEDFAVYYCQQRSNWPITFGQGTRLEIKLEDLKNVFPPEVAVFEPSEAEISHTQKATLVCLATGFYPDHVELSWWVNGKEVHSGVCTDPQPLKEQPALNDSRYCLSSRLRVSATFWQNPRNHFRCQVQFYGLSENDEWTQDRAKPVTQIVSAEAWGRADDVIKIHWQEKKSNTILGSQEGNTMKTNDTYMKFSWLTVPEKSLDKEHRCIVRHENNKNGVDQEIIFPPIKTDVITMDPKDNCSKDANDTLLLQLTNTSAYYMYLLLLLKSVVYFAIITCCLLMAMVKRKDSRGRAKRSGSGATNFSLLKQAGDVEENPGPTSMDWIWRILFLVGAATGAHSGPQLQLQESGPGLVKPSETLSLTCTVSGDSISSGDYYWGWIRQPPGKGLEWIGHIYYSGVTYYNPSLKSRVTISVDTSRNQFSLKLSSVTAADTAVYYCTREDSSNWRSRGQGTLVTVSSGSGGGGSGGGGSGGGGSFEEVQLVESGGGLVQPGRSLRLSCAASGFTFNDYAMHWVRQAPGKGLEWVSTISWNSGSIGYADSVKGRFTISRDNAKKSLYLQMNSLRAEDTALYYCAKDIQYGNYYYGMDVWGQGTTVTVSSTRIQNPDPAVYQLRDSKSSDKSVCLFTDFDSQTNVSQSKDSDVYITDKCVLDMRSMDFKSNSAVAWSNKSDFACANAFNNSIIPEDTFFPSPESSDSTDHVKPKETENTKQPSKSCHKPKAIVHTEKVNMMSLTVLGLRMLFAKTVAVNFLLTAKLFFLLTA

SEQ ID NO: 44135 - protein, 1002 aa, synthetic construct
MALPVTALLLPLALLLHAARPEVQLVESGGGLVQPGGSLRLSCAASGFSFSDFWMSWVRQAPGKGLEWVATISQAGSEKDYVDSVKGRFTISRDNAKKSLYLQMNSLRAEDTAVYYCASGVYSFDYRGQGTLVTVSSGTGGGGSGGGGSGGGGSEFEIVLTQSPATLSLSPGERATLSCRASQSVSSYLAWYQQKPGQAPRLLIYDASNRATGIPARFSGSGSGTDFTLTISSLEPEDFAVYYCQQRSNWPITFGQGTRLEIKLEIQNPDPAVYQLRDSKSSDKSVCLFTDFDSQTNVSQSKDSDVYITDKCVLDMRSMDFKSNSAVAWSNKSDFACANAFNNSIIPEDTFFPSPESSDSTDHVKPKETENTKQPSKSCHKPKAIVHTEKVNMMSLTVLGLRMLFAKTVAVNFLLTAKLFFLLTARAKRSGSGVKQTLNFDLLKLAGDVESNPGPTSMDWIWRILFLVGAATGAHSGPQLQLQESGPGLVKPSETLSLTCTVSGDSISSGDYYWGWIRQPPGKGLEWIGHIYYSGVTYYNPSLKSRVTISVDTSRNQFSLKLSSVTAADTAVYYCTREDSSNWRSRGQGTLVTVSSGSGGGGSGGGGSGGGGSFEEVQLVESGGGLVQPGRSLRLSCAASGFTFNDYAMHWVRQAPGKGLEWVSTISWNSGSIGYADSVKGRFTISRDNAKKSLYLQMNSLRAEDTALYYCAKDIQYGNYYYGMDVWGQGTTVTVSSTREDLKNVFPPEVAVFEPSEAEISHTQKATLVCLATGFYPDHVELSWWVNGKEVHSGVCTDPQPLKEQPALNDSRYCLSSRLRVSATFWQNPRNHFRCQVQFYGLSENDEWTQDRAKPVTQIVSAEAWGRADDVIKIHWQEKKSNTILGSQEGNTMKTNDTYMKFSWLTVPEKSLDKEHRCIVRHENNKNGVDQEIIFPPIKTDVITMDPKDNCSKDANDTLLLQLTNTSAYYMYLLLLLKSVVYFAIITCCLLMAMVKRKDSRG

SEQ ID NO: 44136 - protein, 724 aa, synthetic construct
MALPVTALLLPLALLLHAARPEIVLTQSPATLSLSPGERATLSCRASQSVSSYLAWYQQKPGQAPRLLIYDASNRATGIPARFSGSGSGTDFTLTISSLEPEDFAVYYCQQRSNWPITFGQGTRLEIKLEDLKNVFPPEVAVFEPSEAEISHTQKATLVCLATGFYPDHVELSWWVNGKEVHSGVCTDPQPLKEQPALNDSRYCLSSRLRVSATFWQNPRNHFRCQVQFYGLSENDEWTQDRAKPVTQIVSAEAWGRADDVIKIHWQEKKSNTILGSQEGNTMKTNDTYMKFSWLTVPEKSLDKEHRCIVRHENNKNGVDQEIIFPPIKTDVITMDPKDNCSKDANDTLLLQLTNTSAYYMYLLLLLKSVVYFAIITCCLLRRTAFCCNGEKSRAKRSGSGATNFSLLKQAGDVEENPGPTSMDWIWRILFLVGAATGAHSFEEVQLVESGGGLVQPGRSLRLSCAASGFTFNDYAMHWVRQAPGKGLEWVSTISWNSGSIGYADSVKGRFTISRDNAKKSLYLQMNSLRAEDTALYYCAKDIQYGNYYYGMDVWGQGTTVTVSSTRIQNPDPAVYQLRDSKSSDKSVCLFTDFDSQTNVSQSKDSDVYITDKCVLDMRSMDFKSNSAVAWSNKSDFACANAFNNSIIPEDTFFPSPESSDSTDHVKPKETENTKQPSKSCHKPKAIVHTEKVNMMSLTVLGLRMLFAKTVAVNFLLTAKLFFL

SEQ ID NO: 44137 - protein, 728 aa, synthetic construct
MALPVTALLLPLALLLHAARPEIVLTQSPATLSLSPGERATLSCRASQSVSSYLAWYQQKPGQAPRLLIYDASNRATGIPARFSGSGSGTDFTLTISSLEPEDFAVYYCQQRSNWPITFGQGTRLEIKLEIQNPDPAVYQLRDSKSSDKSVCLFTDFDSQTNVSQSKDSDVYITDKCVLDMRSMDFKSNSAVAWSNKSDFACANAFNNSIIPEDTFFPSPESSDSTDHVKPKETENTKQPSKSCHKPKAIVHTEKVNMMSLTVLGLRMLFAKTVAVNFLLTAKLFFLRAKRSGSGVKQTLNFDLLKLAGDVESNPGPTSMDWIWRILFLVGAATGAHSFEEVQLVESGGGLVQPGRSLRLSCAASGFTFNDYAMHWVRQAPGKGLEWVSTISWNSGSIGYADSVKGRFTISRDNAKKSLYLQMNSLRAEDTALYYCAKDIQYGNYYYGMDVWGQGTTVTVSSTREDLKNVFPPEVAVFEPSEAEISHTQKATLVCLATGFYPDHVELSWWVNGKEVHSGVCTDPQPLKEQPALNDSRYCLSSRLRVSATFWQNPRNHFRCQVQFYGLSENDEWTQDRAKPVTQIVSAEAWGRADDVIKIHWQEKKSNTILGSQEGNTMKTNDTYMKFSWLTVPEKSLDKEHRCIVRHENNKNGVDQEIIFPPIKTDVITMDPKDNCSKDANDTLLLQLTNTSAYYMYLLLLLKSVVYFAIITCCLLRRTAFCCNGEKS

SEQ ID NO: 44138 - protein, 859 aa, synthetic construct
MALPVTALLLPLALLLHAARPEVQLVESGGGLVQPGGSLRLSCAASGFSFSDFWMSWVRQAPGKGLEWVATISQAGSEKDYVDSVKGRFTISRDNAKKSLYLQMNSLRAEDTAVYYCASGVYSFDYRGQGTLVTVSSGTGGGGSGGGGSGGGGSEFEIVLTQSPATLSLSPGERATLSCRASQSVSSYLAWYQQKPGQAPRLLIYDASNRATGIPARFSGSGSGTDFTLTISSLEPEDFAVYYCQQRSNWPITFGQGTRLEIKLEDLKNVFPPEVAVFEPSEAEISHTQKATLVCLATGFYPDHVELSWWVNGKEVHSGVCTDPQPLKEQPALNDSRYCLSSRLRVSATFWQNPRNHFRCQVQFYGLSENDEWTQDRAKPVTQIVSAEAWGRADDVIKIHWQEKKSNTILGSQEGNTMKTNDTYMKFSWLTVPEKSLDKEHRCIVRHENNKNGVDQEIIFPPIKTDVITMDPKDNCSKDANDTLLLQLTNTSAYYMYLLLLLKSVVYFAIITCCLLRRTAFCCNGEKSRAKRSGSGATNFSLLKQAGDVEENPGPTSMDWIWRILFLVGAATGAHSFEEVQLVESGGGLVQPGRSLRLSCAASGFTFNDYAMHWVRQAPGKGLEWVSTISWNSGSIGYADSVKGRFTISRDNAKKSLYLQMNSLRAEDTALYYCAKDIQYGNYYYGMDVWGQGTTVTVSSTRIQNPDPAVYQLRDSKSSDKSVCLFTDFDSQTNVSQSKDSDVYITDKCVLDMRSMDFKSNSAVAWSNKSDFACANAFNNSIIPEDTFFPSPESSDSTDHVKPKETENTKQPSKSCHKPKAIVHTEKVNMMSLTVLGLRMLFAKTVAVNFLLTAKLFFL

SEQ ID NO: 44139 - protein, 996 aa, synthetic construct
MALPVTALLLPLALLLHAARPEVQLVESGGGLVQPGGSLRLSCAASGFSFSDFWMSWVRQAPGKGLEWVATISQAGSEKDYVDSVKGRFTISRDNAKKSLYLQMNSLRAEDTAVYYCASGVYSFDYRGQGTLVTVSSGTGGGGSGGGGSGGGGSEFEIVLTQSPATLSLSPGERATLSCRASQSVSSYLAWYQQKPGQAPRLLIYDASNRATGIPARFSGSGSGTDFTLTISSLEPEDFAVYYCQQRSNWPITFGQGTRLEIKLEDLKNVFPPEVAVFEPSEAEISHTQKATLVCLATGFYPDHVELSWWVNGKEVHSGVCTDPQPLKEQPALNDSRYCLSSRLRVSATFWQNPRNHFRCQVQFYGLSENDEWTQDRAKPVTQIVSAEAWGRADDVIKIHWQEKKSNTILGSQEGNTMKTNDTYMKFSWLTVPEKSLDKEHRCIVRHENNKNGVDQEIIFPPIKTDVITMDPKDNCSKDANDTLLLQLTNTSAYYMYLLLLLKSVVYFAIITCCLLRRTAFCCNGEKSRAKRSGSGATNFSLLKQAGDVEENPGPTSMDWIWRILFLVGAATGAHSGPQLQLQESGPGLVKPSETLSLTCTVSGDSISSGDYYWGWIRQPPGKGLEWIGHIYYSGVTYYNPSLKSRVTISVDTSRNQFSLKLSSVTAADTAVYYCTREDSSNWRSRGQGTLVTVSSGSGGGGSGGGGSGGGGSFEEVQLVESGGGLVQPGRSLRLSCAASGFTFNDYAMHWVRQAPGKGLEWVSTISWNSGSIGYADSVKGRFTISRDNAKKSLYLQMNSLRAEDTALYYCAKDIQYGNYYYGMDVWGQGTTVTVSSTRIQNPDPAVYQLRDSKSSDKSVCLFTDFDSQTNVSQSKDSDVYITDKCVLDMRSMDFKSNSAVAWSNKSDFACANAFNNSIIPEDTFFPSPESSDSTDHVKPKETENTKQPSKSCHKPKAIVHTEKVNMMSLTVLGLRMLFAKTVAVNFLLTAKLFFL

SEQ ID NO: 44140 - protein, 622 aa, synthetic construct
MALPVTALLLPLALLLHAARPEIVLTQSPATLSLSPGERATLSCRASQSVSSYLAWYQQKPGQAPRLLIYDASNRATGIPARFSGSGSGTDFTLTISSLEPEDFAVYYCQQRSNWPITFGQGTRLEIKLEDLKNVFPPEVAVFEPSEAEISHTQKATLVCLATGFYPDHVELSWWVNGKEVHSGVSTDPQPLKEQPALNDSRYCLSSRLRVSATFWQNPRNHFRCQVQFYGLSENDEWTQDRAKPVTQIVSAEAWGRADCDVKLVEKSFETDTNLNFQNLSVIGFRILLLKVAGFNLLMTLRLWSSRAKRSGSGATNFSLLKQAGDVEENPGPTSMDWIWRILFLVGAATGAHSFEEVQLVESGGGLVQPGRSLRLSCAASGFTFNDYAMHWVRQAPGKGLEWVSTISWNSGSIGYADSVKGRFTISRDNAKKSLYLQMNSLRAEDTALYYCAKDIQYGNYYYGMDVWGQGTTVTVSSTRIQNPDPAVYQLRDSKSSDKSVCLFTDFDSQTNVSQSKDSDVYITDKTVLDMRSMDFKSNSAVAWSNKSDFACANAFNNSIIPEDTFFPSPESSCGFTSESYQQGVLSATILYEILLGKATLYAVLVSALVLMAMVKRKDSRG

SEQ ID NO: 44141 - protein, 622 aa, synthetic construct
MALPVTALLLPLALLLHAARPEIVLTQSPATLSLSPGERATLSCRASQSVSSYLAWYQQKPGQAPRLLIYDASNRATGIPARFSGSGSGTDFTLTISSLEPEDFAVYYCQQRSNWPITFGQGTRLEIKLEDLKNVFPPEVAVFEPSEAEISHTQKATLVCLATGFYPDHVELSWWVNGKEVHSGVSTDPQPLKEQPALNDSRYCLSSRLRVSATFWQNPRNHFRCQVQFYGLSENDEWTQDRAKPVTQIVSAEAWGRADCGFTSESYQQGVLSATNLSVIGFRILLLKVAGFNLLMTLRLWSSRAKRSGSGATNFSLLKQAGDVEENPGPTSMDWIWRILFLVGAATGAHSFEEVQLVESGGGLVQPGRSLRLSCAASGFTFNDYAMHWVRQAPGKGLEWVSTISWNSGSIGYADSVKGRFTISRDNAKKSLYLQMNSLRAEDTALYYCAKDIQYGNYYYGMDVWGQGTTVTVSSTRIQNPDPAVYQLRDSKSSDKSVCLFTDFDSQTNVSQSKDSDVYITDKTVLDMRSMDFKSNSAVAWSNKSDFACANAFNNSIIPEDTFFPSPESSCDVKLVEKSFETDTNLNFQILYEILLGKATLYAVLVSALVLMAMVKRKDSRG

SEQ ID NO: 44142 - protein, 726 aa, synthetic construct
MALPVTALLLPLALLLHAARPEIVLTQSPATLSLSPGERATLSCRASQSVSSYLAWYQQKPGQAPRLLIYDASNRATGIPARFSGSGSGTDFTLTISSLEPEDFAVYYCQQRSNWPITFGQGTRLEIKLEDLKNVFPPEVAVFEPSEAEISHTQKATLVCLATGFYPDHVELSWWVNGKEVHSGVSTDPQPLKEQPALNDSRYCLSSRLRVSATFWQNPRNHFRCQVQFYGLSENDEWTQDRAKPVTQIVSAEAWGRADDVIKIHWQEKKSNTILGSQEGNTMKTNDTYMKFSWLTVPEKSLDKEHRCIVRHENNKNGVDQEIIFPPIKTDVITMDPKDNCSKDANDTLLLQLTNTSAYYMYLLLLLKSVVYFAIITCCLLMAMVKRKDSRGRAKRSGSGATNFSLLKQAGDVEENPGPTSMDWIWRILFLVGAATGAHSFEEVQLVESGGGLVQPGRSLRLSCAASGFTFNDYAMHWVRQAPGKGLEWVSTISWNSGSIGYADSVKGRFTISRDNAKKSLYLQMNSLRAEDTALYYCAKDIQYGNYYYGMDVWGQGTTVTVSSTRIQNPDPAVYQLRDSKSSDKSVCLFTDFDSQTNVSQSKDSDVYITDKTVLDMRSMDFKSNSAVAWSNKSDFACANAFNNSIIPEDTFFPSPESSDSTDHVKPKETENTKQPSKSCHKPKAIVHTEKVNMMSLTVLGLRMLFAKTVAVNFLLTAKLFFLLTA

SEQ ID NO: 44143 - protein, 724 aa, synthetic construct
MALPVTALLLPLALLLHAARPEIVLTQSPATLSLSPGERATLSCRASQSVSSYLAWYQQKPGQAPRLLIYDASNRATGIPARFSGSGSGTDFTLTISSLEPEDFAVYYCQQRSNWPITFGQGTRLEIKLEDLKNVFPPEVAVFEPSEAEISHTQKATLVCLATGFYPDHVELSWWVNGKEVHSGVSTDPQPLKEQPALNDSRYCLSSRLRVSATFWQNPRNHFRCQVQFYGLSENDEWTQDRAKPVTQIVSAEAWGRADDVIKIHWQEKKSNTILGSQEGNTMKTNDTYMKFSWLTVPEKSLDKEHRCIVRHENNKNGVDQEIIFPPIKTDVITMDPKDNCSKDANDTLLLQLTNTSAYYMYLLLLLKSVVYFAIITCCLLRRTAFCCNGEKSRAKRSGSGATNFSLLKQAGDVEENPGPTSMDWIWRILFLVGAATGAHSFEEVQLVESGGGLVQPGRSLRLSCAASGFTFNDYAMHWVRQAPGKGLEWVSTISWNSGSIGYADSVKGRFTISRDNAKKSLYLQMNSLRAEDTALYYCAKDIQYGNYYYGMDVWGQGTTVTVSSTRIQNPDPAVYQLRDSKSSDKSVCLFTDFDSQTNVSQSKDSDVYITDKTVLDMRSMDFKSNSAVAWSNKSDFACANAFNNSIIPEDTFFPSPESSDSTDHVKPKETENTKQPSKSCHKPKAIVHTEKVNMMSLTVLGLRMLFAKTVAVNFLLTAKLFFL

SEQ ID NO: 44144 - protein, 867 aa, synthetic construct
MALPVTALLLPLALLLHAARPLEEDLKNVFPPEVAVFEPSEAEISHTQKATLVCLATGFYPDHVELSWWVNGKEVHSGVCTDPQPLKEQPALNDSRYCLSSRLRVSATFWQNPRNHFRCQVQFYGLSENDEWTQDRAKPVTQIVSAEAWGRADCGFTSESYQQGVLSATNLSVIGFRILLLKVAGFNLLMTLRLWSSRAKRSGSGATNFSLLKQAGDVEENPGPTSMALPVTALLLPLALLLHAARPEIVLTQSPATLSLSPGERATLSCRASQSVSSYLAWYQQKPGQAPRLLIYDASNRATGIPARFSGSGSGTDFTLTISSLEPEDFAVYYCQQRSNWPITFGQGTRLEIKGGGGSGGGGSGGGGSEVQLVESGGGLVQPGRSLRLSCAASGFTFNDYAMHWVRQAPGKGLEWVSTISWNSGSIGYADSVKGRFTISRDNAKKSLYLQMNSLRAEDTALYYCAKDIQYGNYYYGMDVWGQGTTVTVSSTRIQNPDPAVYQLRDSKSSDKSVCLFTDFDSQTNVSQSKDSDVYITDKCVLDMRSMDFKSNSAVAWSNKSDFACANAFNNSIIPEDTFFPSPESSCDVKLVEKSFETDTNLNFQILYEVIGFRILLLKVAGFNLLMTLRLWSSRAKRSGSGVKQTLNFDLLKLAGDVESNPGPSRGHMTEYKPTVRLATRDDVPRAVRTLAAAFADYPATRHTVDPDRHIERVTELQELFLTRVGLDIGKVWVADDGAAVAVWTTPESVEAGAVFAEIGPRMAELSGSRLAAQQQMEGLLAPHRPKEPAWFLATVGVSPDHQGKGLGSAVVLPGVEAAERAGVPAFLETSAPRNLPFYERLGFTVTADVEVPEGPRTWCMTRKPGA

SEQ ID NO: 44145 - protein, 867 aa, synthetic construct
MALPVTALLLPLALLLHAARPLEIQNPDPAVYQLRDSKSSDKSVCLFTDFDSQTNVSQSKDSDVYITDKCVLDMRSMDFKSNSAVAWSNKSDFACANAFNNSIIPEDTFFPSPESSCDVKLVEKSFETDTNLNFQILYEVIGFRILLLKVAGFNLLMTLRLWSSRAKRSGSGATNFSLLKQAGDVEENPGPTSMALPVTALLLPLALLLHAARPEIVLTQSPATLSLSPGERATLSCRASQSVSSYLAWYQQKPGQAPRLLIYDASNRATGIPARFSGSGSGTDFTLTISSLEPEDFAVYYCQQRSNWPITFGQGTRLEIKGGGGSGGGGSGGGGSEVQLVESGGGLVQPGRSLRLSCAASGFTFNDYAMHWVRQAPGKGLEWVSTISWNSGSIGYADSVKGRFTISRDNAKKSLYLQMNSLRAEDTALYYCAKDIQYGNYYYGMDVWGQGTTVTVSSTREDLKNVFPPEVAVFEPSEAEISHTQKATLVCLATGFYPDHVELSWWVNGKEVHSGVCTDPQPLKEQPALNDSRYCLSSRLRVSATFWQNPRNHFRCQVQFYGLSENDEWTQDRAKPVTQIVSAEAWGRADCGFTSESYQQGVLSATNLSVIGFRILLLKVAGFNLLMTLRLWSSRAKRSGSGVKQTLNFDLLKLAGDVESNPGPSRGHMTEYKPTVRLATRDDVPRAVRTLAAAFADYPATRHTVDPDRHIERVTELQELFLTRVGLDIGKVWVADDGAAVAVWTTPESVEAGAVFAEIGPRMAELSGSRLAAQQQMEGLLAPHRPKEPAWFLATVGVSPDHQGKGLGSAVVLPGVEAAERAGVPAFLETSAPRNLPFYERLGFTVTADVEVPEGPRTWCMTRKPGA

SEQ ID NO: 44146 - protein, 867 aa, synthetic construct; identical to SEQ ID NO: 44144

SEQ ID NO: 44147 - protein, 975 aa, synthetic construct
MALPVTALLLPLALLLHAARPLEEDLKNVFPPEVAVFEPSEAEISHTQKATLVCLATGFYPDHVELSWWVNGKEVHSGVSTDPQPLKEQPALNDSRYCLSSRLRVSATFWQNPRNHFRCQVQFYGLSENDEWTQDRAKPVTQIVSAEAWGRADDVIKIHWQEKKSNTILGSQEGNTMKTNDTYMKFSWLTVPEKSLDKEHRCIVRHENNKNGVDQEIIFPPIKTDVITMDPKDNCSKDANDTLLLQLTNTSAYYMYLLLLLKSVVYFAIITCCLLMAMVKRKDSRGRAKRSGSGATNFSLLKQAGDVEENPGPTSMALPVTALLLPLALLLHAARPEIVLTQSPATLSLSPGERATLSCRASQSVSSYLAWYQQKPGQAPRLLIYDASNRATGIPARFSGSGSGTDFTLTISSLEPEDFAVYYCQQRSNWPITFGQGTRLEIKGGGGSGGGGSGGGGSEVQLVESGGGLVQPGRSLRLSCAASGFTFNDYAMHWVRQAPGKGLEWVSTISWNSGSIGYADSVKGRFTISRDNAKKSLYLQMNSLRAEDTALYYCAKDIQYGNYYYGMDVWGQGTTVTVSSTRIQNPDPAVYQLRDSKSSDKSVCLFTDFDSQTNVSQSKDSDVYITDKTVLDMRSMDFKSNSAVAWSNKSDFACANAFNNSIIPEDTFFPSPESSDSTDHVKPKETENTKQPSKSCHKPKAIVHTEKVNMMSLTVLGLRMLFAKTVAVNFLLTAKLFFLLTARAKRSGSGVKQTLNFDLLKLAGDVESNPGPSRGHMTEYKPTVRLATRDDVPRAVRTLAAAFADYPATRHTVDPDRHIERVTELQELFLTRVGLDIGKVWVADDGAAVAVWTTPESVEAGAVFAEIGPRMAELSGSRLAAQQQMEGLLAPHRPKEPAWFLATVGVSPDHQGKGLGSAVVLPGVEAAERAGVPAFLETSAPRNLPFYERLGFTVTADVEVPEGPRTWCMTRKPGA

SEQ ID NO: 44148 - protein, 975 aa, synthetic construct
MALPVTALLLPLALLLHAARPLEIQNPDPAVYQLRDSKSSDKSVCLFTDFDSQTNVSQSKDSDVYITDKTVLDMRSMDFKSNSAVAWSNKSDFACANAFNNSIIPEDTFFPSPESSDSTDHVKPKETENTKQPSKSCHKPKAIVHTEKVNMMSLTVLGLRMLFAKTVAVNFLLTAKLFFLLTARAKRSGSGATNFSLLKQAGDVEENPGPTSMALPVTALLLPLALLLHAARPEIVLTQSPATLSLSPGERATLSCRASQSVSSYLAWYQQKPGQAPRLLIYDASNRATGIPARFSGSGSGTDFTLTISSLEPEDFAVYYCQQRSNWPITFGQGTRLEIKGGGGSGGGGSGGGGSEVQLVESGGGLVQPGRSLRLSCAASGFTFNDYAMHWVRQAPGKGLEWVSTISWNSGSIGYADSVKGRFTISRDNAKKSLYLQMNSLRAEDTALYYCAKDIQYGNYYYGMDVWGQGTTVTVSSTREDLKNVFPPEVAVFEPSEAEISHTQKATLVCLATGFYPDHVELSWWVNGKEVHSGVSTDPQPLKEQPALNDSRYCLSSRLRVSATFWQNPRNHFRCQVQFYGLSENDEWTQDRAKPVTQIVSAEAWGRADDVIKIHWQEKKSNTILGSQEGNTMKTNDTYMKFSWLTVPEKSLDKEHRCIVRHENNKNGVDQEIIFPPIKTDVITMDPKDNCSKDANDTLLLQLTNTSAYYMYLLLLLKSVVYFAIITCCLLMAMVKRKDSRGRAKRSGSGVKQTLNFDLLKLAGDVESNPGPSRGHMTEYKPTVRLATRDDVPRAVRTLAAAFADYPATRHTVDPDRHIERVTELQELFLTRVGLDIGKVWVADDGAAVAVWTTPESVEAGAVFAEIGPRMAELSGSRLAAQQQMEGLLAPHRPKEPAWFLATVGVSPDHQGKGLGSAVVLPGVEAAERAGVPAFLETSAPRNLPFYERLGFTVTADVEVPEGPRTWCMTRKPGA

SEQ ID NO: 44149 - protein, 973 aa, synthetic construct
MALPVTALLLPLALLLHAARPLEEDLKNVFPPEVAVFEPSEAEISHTQKATLVCLATGFYPDHVELSWWVNGKEVHSGVCTDPQPLKEQPALNDSRYCLSSRLRVSATFWQNPRNHFRCQVQFYGLSENDEWTQDRAKPVTQIVSAEAWGRADDVIKIHWQEKKSNTILGSQEGNTMKTNDTYMKFSWLTVPEKSLDKEHRCIVRHENNKNGVDQEIIFPPIKTDVITMDPKDNCSKDANDTLLLQLTNTSAYYMYLLLLLKSVVYFAIITCCLLRRTAFCCNGEKSRAKRSGSGATNFSLLKQAGDVEENPGPTSMALPVTALLLPLALLLHAARPEIVLTQSPATLSLSPGERATLSCRASQSVSSYLAWYQQKPGQAPRLLIYDASNRATGIPARFSGSGSGTDFTLTISSLEPEDFAVYYCQQRSNWPITFGQGTRLEIKGGGGSGGGGSGGGGSEVQLVESGGGLVQPGRSLRLSCAASGFTFNDYAMHWVRQAPGKGLEWVSTISWNSGSIGYADSVKGRFTISRDNAKKSLYLQMNSLRAEDTALYYCAKDIQYGNYYYGMDVWGQGTTVTVSSTRIQNPDPAVYQLRDSKSSDKSVCLFTDFDSQTNVSQSKDSDVYITDKCVLDMRSMDFKSNSAVAWSNKSDFACANAFNNSIIPEDTFFPSPESSDSTDHVKPKETENTKQPSKSCHKPKAIVHTEKVNMMSLTVLGLRMLFAKTVAVNFLLTAKLFFLRAKRSGSGVKQTLNFDLLKLAGDVESNPGPSRGHMTEYKPTVRLATRDDVPRAVRTLAAAFADYPATRHTVDPDRHIERVTELQELFLTRVGLDIGKVWVADDGAAVAVWTTPESVEAGAVFAEIGPRMAELSGSRLAAQQQMEGLLAPHRPKEPAWFLATVGVSPDHQGKGLGSAVVLPGVEAAERAGVPAFLETSAPRNLPFYERLGFTVTADVEVPEGPRTWCMTRKPGA

SEQ ID NO: 44150 - protein, 973 aa, synthetic construct
MALPVTALLLPLALLLHAARPLEIQNPDPAVYQLRDSKSSDKSVCLFTDFDSQTNVSQSKDSDVYITDKCVLDMRSMDFKSNSAVAWSNKSDFACANAFNNSIIPEDTFFPSPESSDSTDHVKPKETENTKQPSKSCHKPKAIVHTEKVNMMSLTVLGLRMLFAKTVAVNFLLTAKLFFLRAKRSGSGATNFSLLKQAGDVEENPGPTSMALPVTALLLPLALLLHAARPEIVLTQSPATLSLSPGERATLSCRASQSVSSYLAWYQQKPGQAPRLLIYDASNRATGIPARFSGSGSGTDFTLTISSLEPEDFAVYYCQQRSNWPITFGQGTRLEIKGGGGSGGGGSGGGGSEVQLVESGGGLVQPGRSLRLSCAASGFTFNDYAMHWVRQAPGKGLEWVSTISWNSGSIGYADSVKGRFTISRDNAKKSLYLQMNSLRAEDTALYYCAKDIQYGNYYYGMDVWGQGTTVTVSSTREDLKNVFPPEVAVFEPSEAEISHTQKATLVCLATGFYPDHVELSWWVNGKEVHSGVCTDPQPLKEQPALNDSRYCLSSRLRVSATFWQNPRNHFRCQVQFYGLSENDEWTQDRAKPVTQIVSAEAWGRADDVIKIHWQEKKSNTILGSQEGNTMKTNDTYMKFSWLTVPEKSLDKEHRCIVRHENNKNGVDQEIIFPPIKTDVITMDPKDNCSKDANDTLLLQLTNTSAYYMYLLLLLKSVVYFAIITCCLLRRTAFCCNGEKSRAKRSGSGVKQTLNFDLLKLAGDVESNPGPSRGHMTEYKPTVRLATRDDVPRAVRTLAAAFADYPATRHTVDPDRHIERVTELQELFLTRVGLDIGKVWVADDGAAVAVWTTPESVEAGAVFAEIGPRMAELSGSRLAAQQQMEGLLAPHRPKEPAWFLATVGVSPDHQGKGLGSAVVLPGVEAAERAGVPAFLETSAPRNLPFYERLGFTVTADVEVPEGPRTWCMTRKPGA

SEQ ID NO: 44151 - protein, 973 aa, synthetic construct
MALPVTALLLPLALLLHAARPLEEDLKNVFPPEVAVFEPSEAEISHTQKATLVCLATGFYPDHVELSWWVNGKEVHSGVSTDPQPLKEQPALNDSRYCLSSRLRVSATFWQNPRNHFRCQVQFYGLSENDEWTQDRAKPVTQIVSAEAWGRADDVIKIHWQEKKSNTILGSQEGNTMKTNDTYMKFSWLTVPEKSLDKEHRCIVRHENNKNGVDQEIIFPPIKTDVITMDPKDNCSKDANDTLLLQLTNTSAYYMYLLLLLKSVVYFAIITCCLLRRTAFCCNGEKSRAKRSGSGATNFSLLKQAGDVEENPGPTSMALPVTALLLPLALLLHAARPEIVLTQSPATLSLSPGERATLSCRASQSVSSYLAWYQQKPGQAPRLLIYDASNRATGIPARFSGSGSGTDFTLTISSLEPEDFAVYYCQQRSNWPITFGQGTRLEIKGGGGSGGGGSGGGGSEVQLVESGGGLVQPGRSLRLSCAASGFTFNDYAMHWVRQAPGKGLEWVSTISWNSGSIGYADSVKGRFTISRDNAKKSLYLQMNSLRAEDTALYYCAKDIQYGNYYYGMDVWGQGTTVTVSSTRIQNPDPAVYQLRDSKSSDKSVCLFTDFDSQTNVSQSKDSDVYITDKTVLDMRSMDFKSNSAVAWSNKSDFACANAFNNSIIPEDTFFPSPESSDSTDHVKPKETENTKQPSKSCHKPKAIVHTEKVNMMSLTVLGLRMLFAKTVAVNFLLTAKLFFLRAKRSGSGVKQTLNFDLLKLAGDVESNPGPSRGHMTEYKPTVRLATRDDVPRAVRTLAAAFADYPATRHTVDPDRHIERVTELQELFLTRVGLDIGKVWVADDGAAVAVWTTPESVEAGAVFAEIGPRMAELSGSRLAAQQQMEGLLAPHRPKEPAWFLATVGVSPDHQGKGLGSAVVLPGVEAAERAGVPAFLETSAPRNLPFYERLGFTVTADVEVPEGPRTWCMTRKPGA

SEQ ID NO: 44152 - protein, 973 aa, synthetic construct
MALPVTALLLPLALLLHAARPLEIQNPDPAVYQLRDSKSSDKSVCLFTDFDSQTNVSQSKDSDVYITDKTVLDMRSMDFKSNSAVAWSNKSDFACANAFNNSIIPEDTFFPSPESSDSTDHVKPKETENTKQPSKSCHKPKAIVHTEKVNMMSLTVLGLRMLFAKTVAVNFLLTAKLFFLRAKRSGSGATNFSLLKQAGDVEENPGPTSMALPVTALLLPLALLLHAARPEIVLTQSPATLSLSPGERATLSCRASQSVSSYLAWYQQKPGQAPRLLIYDASNRATGIPARFSGSGSGTDFTLTISSLEPEDFAVYYCQQRSNWPITFGQGTRLEIKGGGGSGGGGSGGGGSEVQLVESGGGLVQPGRSLRLSCAASGFTFNDYAMHWVRQAPGKGLEWVSTISWNSGSIGYADSVKGRFTISRDNAKKSLYLQMNSLRAEDTALYYCAKDIQYGNYYYGMDVWGQGTTVTVSSTREDLKNVFPPEVAVFEPSEAEISHTQKATLVCLATGFYPDHVELSWWVNGKEVHSGVSTDPQPLKEQPALNDSRYCLSSRLRVSATFWQNPRNHFRCQVQFYGLSENDEWTQDRAKPVTQIVSAEAWGRADDVIKIHWQEKKSNTILGSQEGNTMKTNDTYMKFSWLTVPEKSLDKEHRCIVRHENNKNGVDQEIIFPPIKTDVITMDPKDNCSKDANDTLLLQLTNTSAYYMYLLLLLKSVVYFAIITCCLLRRTAFCCNGEKSRAKRSGSGVKQTLNFDLLKLAGDVESNPGPSRGHMTEYKPTVRLATRDDVPRAVRTLAAAFADYPATRHTVDPDRHIERVTELQELFLTRVGLDIGKVWVADDGAAVAVWTTPESVEAGAVFAEIGPRMAELSGSRLAAQQQMEGLLAPHRPKEPAWFLATVGVSPDHQGKGLGSAVVLPGVEAAERAGVPAFLETSAPRNLPFYERLGFTVTADVEVPEGPRTWCMTRKPGA

SEQ ID NO: 44153 - protein, 871 aa, synthetic construct
MALPVTALLLPLALLLHAARPLEEDLKNVFPPEVAVFEPSKAEIAHTQKATLVCLATGFYPDHVELSWWVNGKEVHSGVCTDPQPLKEQPALNDSRYCLSSRLRVSATFWQNPRNHFRCQVQFYGLSENDEWTQDRAKPVTQIVSAEAWGRADCGITSASYHQGVLSATILYEILLGKATLYAVLVSALVLMAMVKRKDSRGRAKRSGSGATNFSLLKQAGDVEENPGPTSMALPVTALLLPLALLLHAARPEIVLTQSPATLSLSPGERATLSCRASQSVSSYLAWYQQKPGQAPRLLIYDASNRATGIPARFSGSGSGTDFTLTISSLEPEDFAVYYCQQRSNWPITFGQGTRLEIKGGGGSGGGGSGGGGSEVQLVESGGGLVQPGRSLRLSCAASGFTFNDYAMHWVRQAPGKGLEWVSTISWNSGSIGYADSVKGRFTISRDNAKKSLYLQMNSLRAEDTALYYCAKDIQYGNYYYGMDVWGQGTTVTVSSTRIQNPDPAVYQLRDSKSSDKSVCLFTDFDSQTNVSQSKDSDVYITDKCVLDMRSMDFKSNSAVAWSNKSDFACANAFNNSIIPEDTFFPSSDVPCDVKLVEKSFETDTNLNFQNLSVIGFRILLLKVAGFNLLMTLRLWSSRAKRSGSGVKQTLNFDLLKLAGDVESNPGPSRGHMTEYKPTVRLATRDDVPRAVRTLAAAFADYPATRHTVDPDRHIERVTELQELFLTRVGLDIGKVWVADDGAAVAVWTTPESVEAGAVFAEIGPRMAELSGSRLAAQQQMEGLLAPHRPKEPAWFLATVGVSPDHQGKGLGSAVVLPGVEAAERAGVPAFLETSAPRNLPFYERLGFTVTADVEVPEGPRTWCMTRKPGA

SEQ ID NO: 44154 - protein, 871 aa, synthetic construct
MALPVTALLLPLALLLHAARPLEIQNPDPAVYQLRDSKSSDKSVCLFTDFDSQTNVSQSKDSDVYITDKCVLDMRSMDFKSNSAVAWSNKSDFACANAFNNSIIPEDTFFPSSDVPCDVKLVEKSFETDTNLNFQNLSVIGFRILLLKVAGFNLLMTLRLWSSRAKRSGSGATNFSLLKQAGDVEENPGPTSMALPVTALLLPLALLLHAARPEIVLTQSPATLSLSPGERATLSCRASQSVSSYLAWYQQKPGQAPRLLIYDASNRATGIPARFSGSGSGTDFTLTISSLEPEDFAVYYCQQRSNWPITFGQGTRLEIKGGGGSGGGGSGGGGSEVQLVESGGGLVQPGRSLRLSCAASGFTFNDYAMHWVRQAPGKGLEWVSTISWNSGSIGYADSVKGRFTISRDNAKKSLYLQMNSLRAEDTALYYCAKDIQYGNYYYGMDVWGQGTTVTVSSTREDLKNVFPPEVAVFEPSKAEIAHTQKATLVCLATGFYPDHVELSWWVNGKEVHSGVCTDPQPLKEQPALNDSRYCLSSRLRVSATFWQNPRNHFRCQVQFYGLSENDEWTQDRAKPVTQIVSAEAWGRADCGITSASYHQGVLSATILYEILLGKATLYAVLVSALVLMAMVKRKDSRGRAKRSGSGVKQTLNFDLLKLAGDVESNPGPSRGHMTEYKPTVRLATRDDVPRAVRTLAAAFADYPATRHTVDPDRHIERVTELQELFLTRVGLDIGKVWVADDGAAVAVWTTPESVEAGAVFAEIGPRMAELSGSRLAAQQQMEGLLAPHRPKEPAWFLATVGVSPDHQGKGLGSAVVLPGVEAAERAGVPAFLETSAPRNLPFYERLGFTVTADVEVPEGPRTWCMTRKPGA

SEQ ID NO: 44155 - protein, 764 aa, synthetic construct
MALPVTALLLPLALLLHAARPLEQSFGLLDPKLCYLLDGILFIYGVILTALFLRVKFSRSADAPAYQQGQNQLYNELNLGRREEYDVLDKRRGRDPEMGGKPQRRKNPQEGLYNELQKDKMAEAYSEIGMKGERRRGKGHDGLYQGLSTATKDTYDALHMQALPPRRAKRSGSGATNFSLLKQAGDVEENPGPTSMALPVTALLLPLALLLHAARPEIVLTQSPATLSLSPGERATLSCRASQSVSSYLAWYQQKPGQAPRLLIYDASNRATGIPARFSGSGSGTDFTLTISSLEPEDFAVYYCQQRSNWPITFGQGTRLEIKGGGGSGGGGSGGGGSEVQLVESGGGLVQPGRSLRLSCAASGFTFNDYAMHWVRQAPGKGLEWVSTISWNSGSIGYADSVKGRFTISRDNAKKSLYLQMNSLRAEDTALYYCAKDIQYGNYYYGMDVWGQGTTVTVSSTRELGEPQLCYILDAILFLYGIVLTLLYCRLKIQVRKAAITSYEKSDGVYTGLSTRNQETYETLKHEKPPQRAKRSGSGVKQTLNFDLLKLAGDVESNPGPSRGHMTEYKPTVRLATRDDVPRAVRTLAAAFADYPATRHTVDPDRHIERVTELQELFLTRVGLDIGKVWVADDGAAVAVWTTPESVEAGAVFAEIGPRMAELSGSRLAAQQQMEGLLAPHRPKEPAWFLATVGVSPDHQGKGLGSAVVLPGVEAAERAGVPAFLETSAPRNLPFYERLGFTVTADVEVPEGPRTWCMTRKPGA

SEQ ID NO: 44156 - protein, 975 aa, synthetic construct; identical to SEQ ID NO: 44147

SEQ ID NO: 44157 - protein, 975 aa, synthetic construct; identical to SEQ ID NO: 44148

SEQ ID NO: 44158 - protein, 974 aa, synthetic construct
MALPVTALLLPLALLLHAARPLEEEDLKNVFPPEVAVFEPSEAEISHTQKATLVCLATGFYPDHVELSWWVNGKEVHSGVCTDPQPLKEQPALNDSRYCLSSRLRVSATFWQNPRNHFRCQVQFYGLSENDEWTQDRAKPVTQIVSAEAWGRADDVIKIHWQEKKSNTILGSQEGNTMKTNDTYMKFSWLTVPEKSLDKEHRCIVRHENNKNGVDQEIIFPPIKTDVITMDPKDNCSKDANDTLLLQLTNTSAYYMYLLLLLKSVVYFAIITCCLLRRTAFCCNGEKSRAKRSGSGATNFSLLKQAGDVEENPGPTSMALPVTALLLPLALLLHAARPEIVLTQSPATLSLSPGERATLSCRASQSVSSYLAWYQQKPGQAPRLLIYDASNRATGIPARFSGSGSGTDFTLTISSLEPEDFAVYYCQQRSNWPITFGQGTRLEIKGGGGSGGGGSGGGGSEVQLVESGGGLVQPGRSLRLSCAASGFTFNDYAMHWVRQAPGKGLEWVSTISWNSGSIGYADSVKGRFTISRDNAKKSLYLQMNSLRAEDTALYYCAKDIQYGNYYYGMDVWGQGTTVTVSSTRIQNPDPAVYQLRDSKSSDKSVCLFTDFDSQTNVSQSKDSDVYITDKCVLDMRSMDFKSNSAVAWSNKSDFACANAFNNSIIPEDTFFPSPESSDSTDHVKPKETENTKQPSKSCHKPKAIVHTEKVNMMSLTVLGLRMLFAKTVAVNFLLTAKLFFLRAKRSGSGVKQTLNFDLLKLAGDVESNPGPSRGHMTEYKPTVRLATRDDVPRAVRTLAAAFADYPATRHTVDPDRHIERVTELQELFLTRVGLDIGKVWVADDGAAVAVWTTPESVEAGAVFAEIGPRMAELSGSRLAAQQQMEGLLAPHRPKEPAWFLATVGVSPDHQGKGLGSAVVLPGVEAAERAGVPAFLETSAPRNLPFYERLGFTVTADVEVPEGPRTWCMTRKPGA

SEQ ID NO: 44159 - protein, 974 aa, synthetic construct
MALPVTALLLPLALLLHAARPLEIQNPDPAVYQLRDSKSSDKSVCLFTDFDSQTNVSQSKDSDVYITDKCVLDMRSMDFKSNSAVAWSNKSDFACANAFNNSIIPEDTFFPSPESSDSTDHVKPKETENTKQPSKSCHKPKAIVHTEKVNMMSLTVLGLRMLFAKTVAVNFLLTAKLFFLRAKRSGSGATNFSLLKQAGDVEENPGPTSMALPVTALLLPLALLLHAARPEIVLTQSPATLSLSPGERATLSCRASQSVSSYLAWYQQKPGQAPRLLIYDASNRATGIPARFSGSGSGTDFTLTISSLEPEDFAVYYCQQRSNWPITFGQGTRLEIKGGGGSGGGGSGGGGSEVQLVESGGGLVQPGRSLRLSCAASGFTFNDYAMHWVRQAPGKGLEWVSTISWNSGSIGYADSVKGRFTISRDNAKKSLYLQMNSLRAEDTALYYCAKDIQYGNYYYGMDVWGQGTTVTVSSTREEDLKNVFPPEVAVFEPSEAEISHTQKATLVCLATGFYPDHVELSWWVNGKEVHSGVCTDPQPLKEQPALNDSRYCLSSRLRVSATFWQNPRNHFRCQVQFYGLSENDEWTQDRAKPVTQIVSAEAWGRADDVIKIHWQEKKSNTILGSQEGNTMKTNDTYMKFSWLTVPEKSLDKEHRCIVRHENNKNGVDQEIIFPPIKTDVITMDPKDNCSKDANDTLLLQLTNTSAYYMYLLLLLKSVVYFAIITCCLLRRTAFCCNGEKSRAKRSGSGVKQTLNFDLLKLAGDVESNPGPSRGHMTEYKPTVRLATRDDVPRAVRTLAAAFADYPATRHTVDPDRHIERVTELQELFLTRVGLDIGKVWVADDGAAVAVWTTPESVEAGAVFAEIGPRMAELSGSRLAAQQQMEGLLAPHRPKEPAWFLATVGVSPDHQGKGLGSAVVLPGVEAAERAGVPAFLETSAPRNLPFYERLGFTVTADVEVPEGPRTWCMTRKPGA

SEQ ID NO: 44160 - protein, 871 aa, synthetic construct
MALPVTALLLPLALLLHAARPLEEDLKNVFPPEVAVFEPSEAEISHTQKATLVCLATGFYPDHVELSWWVNGKEVHSGVSTDPQPLKEQPALNDSRYCLSSRLRVSATFWQNPRNHFRCQVQFYGLSENDEWTQDRAKPVTQIVSAEAWGRADCGFTSESYQQGVLSATNLSVIGFRILLLKVAGFNLLMTLRLWSSRAKRSGSGATNFSLLKQAGDVEENPGPTSMALPVTALLLPLALLLHAARPEIVLTQSPATLSLSPGERATLSCRASQSVSSYLAWYQQKPGQAPRLLIYDASNRATGIPARFSGSGSGTDFTLTISSLEPEDFAVYYCQQRSNWPITFGQGTRLEIKGGGGSGGGGSGGGGSEVQLVESGGGLVQPGRSLRLSCAASGFTFNDYAMHWVRQAPGKGLEWVSTISWNSGSIGYADSVKGRFTISRDNAKKSLYLQMNSLRAEDTALYYCAKDIQYGNYYYGMDVWGQGTTVTVSSTRIQNPDPAVYQLRDSKSSDKSVCLFTDFDSQTNVSQSKDSDVYITDKTVLDMRSMDFKSNSAVAWSNKSDFACANAFNNSIIPEDTFFPSPESSCDVKLVEKSFETDTNLNFQILYEILLGKATLYAVLVSALVLMAMVKRKDSRGRAKRSGSGVKQTLNFDLLKLAGDVESNPGPSRGHMTEYKPTVRLATRDDVPRAVRTLAAAFADYPATRHTVDPDRHIERVTELQELFLTRVGLDIGKVWVADDGAAVAVWTTPESVEAGAVFAEIGPRMAELSGSRLAAQQQMEGLLAPHRPKEPAWFLATVGVSPDHQGKGLGSAVVLPGVEAAERAGVPAFLETSAPRNLPFYERLGFTVTADVEVPEGPRTWCMTRKPGA

SEQ ID NO: 44161 - protein, 871 aa, synthetic construct
MALPVTALLLPLALLLHAARPLEIQNPDPAVYQLRDSKSSDKSVCLFTDFDSQTNVSQSKDSDVYITDKTVLDMRSMDFKSNSAVAWSNKSDFACANAFNNSIIPEDTFFPSPESSCDVKLVEKSFETDTNLNFQILYEILLGKATLYAVLVSALVLMAMVKRKDSRGRAKRSGSGATNFSLLKQAGDVEENPGPTSMALPVTALLLPLALLLHAARPEIVLTQSPATLSLSPGERATLSCRASQSVSSYLAWYQQKPGQAPRLLIYDASNRATGIPARFSGSGSGTDFTLTISSLEPEDFAVYYCQQRSNWPITFGQGTRLEIKGGGGSGGGGSGGGGSEVQLVESGGGLVQPGRSLRLSCAASGFTFNDYAMHWVRQAPGKGLEWVSTISWNSGSIGYADSVKGRFTISRDNAKKSLYLQMNSLRAEDTALYYCAKDIQYGNYYYGMDVWGQGTTVTVSSTREDLKNVFPPEVAVFEPSEAEISHTQKATLVCLATGFYPDHVELSWWVNGKEVHSGVSTDPQPLKEQPALNDSRYCLSSRLRVSATFWQNPRNHFRCQVQFYGLSENDEWTQDRAKPVTQIVSAEAWGRADCGFTSESYQQGVLSATNLSVIGFRILLLKVAGFNLLMTLRLWSSRAKRSGSGVKQTLNFDLLKLAGDVESNPGPSRGHMTEYKPTVRLATRDDVPRAVRTLAAAFADYPATRHTVDPDRHIERVTELQELFLTRVGLDIGKVWVADDGAAVAVWTTPESVEAGAVFAEIGPRMAELSGSRLAAQQQMEGLLAPHRPKEPAWFLATVGVSPDHQGKGLGSAVVLPGVEAAERAGVPAFLETSAPRNLPFYERLGFTVTADVEVPEGPRTWCMTRKPGA

SEQ ID NO: 44162 - protein, 871 aa, synthetic construct
MALPVTALLLPLALLLHAARPLEEDLKNVFPPEVAVFEPSEAEISHTQKATLVCLATGFYPDHVELSWWVNGKEVHSGVCTDPQPLKEQPALNDSRYCLSSRLRVSATFWQNPRNHFRCQVQFYGLSENDEWTQDRAKPVTQIVSAEAWGRADCDVKLVEKSFETDTNLNFQNLSVIGFRILLLKVAGFNLLMTLRLWSSRAKRSGSGATNFSLLKQAGDVEENPGPTSMALPVTALLLPLALLLHAARPEIVLTQSPATLSLSPGERATLSCRASQSVSSYLAWYQQKPGQAPRLLIYDASNRATGIPARFSGSGSGTDFTLTISSLEPEDFAVYYCQQRSNWPITFGQGTRLEIKGGGGSGGGGSGGGGSEVQLVESGGGLVQPGRSLRLSCAASGFTFNDYAMHWVRQAPGKGLEWVSTISWNSGSIGYADSVKGRFTISRDNAKKSLYLQMNSLRAEDTALYYCAKDIQYGNYYYGMDVWGQGTTVTVSSTRIQNPDPAVYQLRDSKSSDKSVCLFTDFDSQTNVSQSKDSDVYITDKCVLDMRSMDFKSNSAVAWSNKSDFACANAFNNSIIPEDTFFPSPESSCGFTSESYQQGVLSATILYEILLGKATLYAVLVSALVLMAMVKRKDSRGRAKRSGSGVKQTLNFDLLKLAGDVESNPGPSRGHMTEYKPTVRLATRDDVPRAVRTLAAAFADYPATRHTVDPDRHIERVTELQELFLTRVGLDIGKVWVADDGAAVAVWTTPESVEAGAVFAEIGPRMAELSGSRLAAQQQMEGLLAPHRPKEPAWFLATVGVSPDHQGKGLGSAVVLPGVEAAERAGVPAFLETSAPRNLPFYERLGFTVTADVEVPEGPRTWCMTRKPGA

SEQ ID NO: 44163 - protein, 871 aa, synthetic construct
MALPVTALLLPLALLLHAARPLEEDLKNVFPPEVAVFEPSEAEISHTQKATLVCLATGFYPDHVELSWWVNGKEVHSGVSTDPQPLKEQPALNDSRYCLSSRLRVSATFWQNPRNHFRCQVQFYGLSENDEWTQDRAKPVTQIVSAEAWGRADCDVKLVEKSFETDTNLNFQNLSVIGFRILLLKVAGFNLLMTLRLWSSRAKRSGSGATNFSLLKQAGDVEENPGPTSMALPVTALLLPLALLLHAARPEIVLTQSPATLSLSPGERATLSCRASQSVSSYLAWYQQKPGQAPRLLIYDASNRATGIPARFSGSGSGTDFTLTISSLEPEDFAVYYCQQRSNWPITFGQGTRLEIKGGGGSGGGGSGGGGSEVQLVESGGGLVQPGRSLRLSCAASGFTFNDYAMHWVRQAPGKGLEWVSTISWNSGSIGYADSVKGRFTISRDNAKKSLYLQMNSLRAEDTALYYCAKDIQYGNYYYGMDVWGQGTTVTVSSTRIQNPDPAVYQLRDSKSSDKSVCLFTDFDSQTNVSQSKDSDVYITDKTVLDMRSMDFKSNSAVAWSNKSDFACANAFNNSIIPEDTFFPSPESSCGFTSESYQQGVLSATILYEILLGKATLYAVLVSALVLMAMVKRKDSRGRAKRSGSGVKQTLNFDLLKLAGDVESNPGPSRGHMTEYKPTVRLATRDDVPRAVRTLAAAFADYPATRHTVDPDRHIERVTELQELFLTRVGLDIGKVWVADDGAAVAVWTTPESVEAGAVFAEIGPRMAELSGSRLAAQQQMEGLLAPHRPKEPAWFLATVGVSPDHQGKGLGSAVVLPGVEAAERAGVPAFLETSAPRNLPFYERLGFTVTADVEVPEGPRTWCMTRKPGA

SEQ ID NO: 44164 - protein, 974 aa, synthetic construct
MALPVTALLLPLALLLHAARPLEEEDLKNVFPPEVAVFEPSEAEISHTQKATLVCLATGFYPDHVELSWWVNGKEVHSGVSTDPQPLKEQPALNDSRYCLSSRLRVSATFWQNPRNHFRCQVQFYGLSENDEWTQDRAKPVTQIVSAEAWGRADDVIKIHWQEKKSNTILGSQEGNTMKTNDTYMKFSWLTVPEKSLDKEHRCIVRHENNKNGVDQEIIFPPIKTDVITMDPKDNCSKDANDTLLLQLTNTSAYYMYLLLLLKSVVYFAIITCCLLRRTAFCCNGEKSRAKRSGSGATNFSLLKQAGDVEENPGPTSMALPVTALLLPLALLLHAARPEIVLTQSPATLSLSPGERATLSCRASQSVSSYLAWYQQKPGQAPRLLIYDASNRATGIPARFSGSGSGTDFTLTISSLEPEDFAVYYCQQRSNWPITFGQGTRLEIKGGGGSGGGGSGGGGSEVQLVESGGGLVQPGRSLRLSCAASGFTFNDYAMHWVRQAPGKGLEWVSTISWNSGSIGYADSVKGRFTISRDNAKKSLYLQMNSLRAEDTALYYCAKDIQYGNYYYGMDVWGQGTTVTVSSTRIQNPDPAVYQLRDSKSSDKSVCLFTDFDSQTNVSQSKDSDVYITDKTVLDMRSMDFKSNSAVAWSNKSDFACANAFNNSIIPEDTFFPSPESSDSTDHVKPKETENTKQPSKSCHKPKAIVHTEKVNMMSLTVLGLRMLFAKTVAVNFLLTAKLFFLRAKRSGSGVKQTLNFDLLKLAGDVESNPGPSRGHMTEYKPTVRLATRDDVPRAVRTLAAAFADYPATRHTVDPDRHIERVTELQELFLTRVGLDIGKVWVADDGAAVAVWTTPESVEAGAVFAEIGPRMAELSGSRLAAQQQMEGLLAPHRPKEPAWFLATVGVSPDHQGKGLGSAVVLPGVEAAERAGVPAFLETSAPRNLPFYERLGFTVTADVEVPEGPRTWCMTRKPGA

SEQ ID NO: 44165 - protein, 871 aa, synthetic construct
MALPVTALLLPLALLLHAARPLEEDLKNVFPPEVAVFEPSEAEISHTQKATLVCLATGFYPDHVELSWWVNGKEVHSGVCTDPQPLKEQPALNDSRYCLSSRLRVSATFWQNPRNHFRCQVQFYGLSENDEWTQDRAKPVTQIVSAEAWGRADCGFTSESYQQGVLSATNLSVIGFRILLLKVAGFNLLMTLRLWSSRAKRSGSGATNFSLLKQAGDVEENPGPTSMALPVTALLLPLALLLHAARPEIVLTQSPATLSLSPGERATLSCRASQSVSSYLAWYQQKPGQAPRLLIYDASNRATGIPARFSGSGSGTDFTLTISSLEPEDFAVYYCQQRSNWPITFGQGTRLEIKGGGGSGGGGSGGGGSEVQLVESGGGLVQPGRSLRLSCAASGFTFNDYAMHWVRQAPGKGLEWVSTISWNSGSIGYADSVKGRFTISRDNAKKSLYLQMNSLRAEDTALYYCAKDIQYGNYYYGMDVWGQGTTVTVSSTRIQNPDPAVYQLRDSKSSDKSVCLFTDFDSQTNVSQSKDSDVYITDKCVLDMRSMDFKSNSAVAWSNKSDFACANAFNNSIIPEDTFFPSPESSCDVKLVEKSFETDTNLNFQILYEILLGKATLYAVLVSALVLMAMVKRKDSRGRAKRSGSGVKQTLNFDLLKLAGDVESNPGPSRGHMTEYKPTVRLATRDDVPRAVRTLAAAFADYPATRHTVDPDRHIERVTELQELFLTRVGLDIGKVWVADDGAAVAVWTTPESVEAGAVFAEIGPRMAELSGSRLAAQQQMEGLLAPHRPKEPAWFLATVGVSPDHQGKGLGSAVVLPGVEAAERAGVPAFLETSAPRNLPFYERLGFTVTADVEVPEGPRTWCMTRKPGA

SEQ ID NO: 44166 - protein, 900 aa, synthetic construct
MALPVTALLLPLALLLHAARPLEEEDLKNVFPPEVAVFEPSEAEISHTQKATLVCLATGFYPDHVELSWWVNGKEVHSGVCTDPQPLKEQPALNDSRYCLSSRLRVSATFWQNPRNHFRCQVQFYGLSENDEWTQDRAKPVTQIVSAEAWGRADCGFTSESYQQGVLSATNLSVIGFRILLLKVAGFNLLMTLRLWSSRAKRSGSGATNFSLLKQAGDVEENPGPTSMALPVTALLLPLALLLHAARPEIVLTQSPATLSLSPGERATLSCRASQSVSSYLAWYQQKPGQAPRLLIYDASNRATGIPARFSGSGSGTDFTLTISSLEPEDFAVYYCQQRSNWPITFGQGTRLEIKGGGGSGGGGSGGGGSEVQLVESGGGLVQPGRSLRLSCAASGFTFNDYAMHWVRQAPGKGLEWVSTISWNSGSIGYADSVKGRFTISRDNAKKSLYLQMNSLRAEDTALYYCAKDIQYGNYYYGMDVWGQGTTVTVSSTRGQPKANPTVTLFPPSSEELQANKATLVCLISDFYPGAVTVAWKADGSPVKAGVETTKPSKQSNNKYAASSYLSLTPEQWKSHRSYSCQVTHEGSTVEKTVAPTECSPIKTDVITMDPKDNCSKDANDTLLLQLTNTSAYYMYLLLLLKSVVYFAIITCCLLRRTAFCCNGEKSRAKRSGSGVKQTLNFDLLKLAGDVESNPGPSRGHMTEYKPTVRLATRDDVPRAVRTLAAAFADYPATRHTVDPDRHIERVTELQELFLTRVGLDIGKVWVADDGAAVAVWTTPESVEAGAVFAEIGPRMAELSGSRLAAQQQMEGLLAPHRPKEPAWFLATVGVSPDHQGKGLGSAVVLPGVEAAERAGVPAFLETSAPRNLPFYERLGFTVTADVEVPEGPRTWCMTRKPGA

SEQ ID NO: 44167 - protein, 900 aa, synthetic construct
MALPVTALLLPLALLLHAARPLEGQPKANPTVTLFPPSSEELQANKATLVCLISDFYPGAVTVAWKADGSPVKAGVETTKPSKQSNNKYAASSYLSLTPEQWKSHRSYSCQVTHEGSTVEKTVAPTECSPIKTDVITMDPKDNCSKDANDTLLLQLTNTSAYYMYLLLLLKSVVYFAIITCCLLRRTAFCCNGEKSRAKRSGSGATNFSLLKQAGDVEENPGPTSMALPVTALLLPLALLLHAARPEIVLTQSPATLSLSPGERATLSCRASQSVSSYLAWYQQKPGQAPRLLIYDASNRATGIPARFSGSGSGTDFTLTISSLEPEDFAVYYCQQRSNWPITFGQGTRLEIKGGGGSGGGGSGGGGSEVQLVESGGGLVQPGRSLRLSCAASGFTFNDYAMHWVRQAPGKGLEWVSTISWNSGSIGYADSVKGRFTISRDNAKKSLYLQMNSLRAEDTALYYCAKDIQYGNYYYGMDVWGQGTTVTVSSTREEDLKNVFPPEVAVFEPSEAEISHTQKATLVCLATGFYPDHVELSWWVNGKEVHSGVCTDPQPLKEQPALNDSRYCLSSRLRVSATFWQNPRNHFRCQVQFYGLSENDEWTQDRAKPVTQIVSAEAWGRADCGFTSESYQQGVLSATNLSVIGFRILLLKVAGFNLLMTLRLWSSRAKRSGSGVKQTLNFDLLKLAGDVESNPGPSRGHMTEYKPTVRLATRDDVPRAVRTLAAAFADYPATRHTVDPDRHIERVTELQELFLTRVGLDIGKVWVADDGAAVAVWTTPESVEAGAVFAEIGPRMAELSGSRLAAQQQMEGLLAPHRPKEPAWFLATVGVSPDHQGKGLGSAVVLPGVEAAERAGVPAFLETSAPRNLPFYERLGFTVTADVEVPEGPRTWCMTRKPGA

SEQ ID NO: 44168 - protein, 897 aa, synthetic construct
MALPVTALLLPLALLLHAARPLEEASTKGPSVFPLAPSSKSTSGGTAALGCLVKDYFPEPVTVSWNSGALTSGVHTFPAVLQSSGLYSLSSVVTVPSSSLGTQTYICNVNHKPSNTKVDKRVEPKSCPIKTDVITMDPKDNCSKDANDTLLLQLTNTSAYYMYLLLLLKSVVYFAIITCCLLRRTAFCCNGEKSRAKRSGSGATNFSLLKQAGDVEENPGPTSMALPVTALLLPLALLLHAARPEIVLTQSPATLSLSPGERATLSCRASQSVSSYLAWYQQKPGQAPRLLIYDASNRATGIPARFSGSGSGTDFTLTISSLEPEDFAVYYCQQRSNWPITFGQGTRLEIKGGGGSGGGGSGGGGSEVQLVESGGGLVQPGRSLRLSCAASGFTFNDYAMHWVRQAPGKGLEWVSTISWNSGSIGYADSVKGRFTISRDNAKKSLYLQMNSLRAEDTALYYCAKDIQYGNYYYGMDVWGQGTTVTVSSTRGQPKANPTVTLFPPSSEELQANKATLVCLISDFYPGAVTVAWKADGSPVKAGVETTKPSKQSNNKYAASSYLSLTPEQWKSHRSYSCQVTHEGSTVEKTVAPTECSEVKTDSTDHVKPKETENTKQPSKSCHKPKAIVHTEKVNMMSLTVLGLRMLFAKTVAVNFLLTAKLFFLRAKRSGSGVKQTLNFDLLKLAGDVESNPGPSRGHMTEYKPTVRLATRDDVPRAVRTLAAAFADYPATRHTVDPDRHIERVTELQELFLTRVGLDIGKVWVADDGAAVAVWTTPESVEAGAVFAEIGPRMAELSGSRLAAQQQMEGLLAPHRPKEPAWFLATVGVSPDHQGKGLGSAVVLPGVEAAERAGVPAFLETSAPRNLPFYERLGFTVTADVEVPEGPRTWCMTRKPGA

SEQ ID NO: 44169 - protein, 875 aa, synthetic construct
MALPVTALLLPLALLLHAARPLEEASTKGPSVFPLAPSSKSTSGGTAALGCLVKDYFPEPVTVSWNSGALTSGVHTFPAVLQSSGLYSLSSVVTVPSSSLGTQTYICNVNHKPSNTKVDKRVEPKSCGRADCGFTSESYQQGVLSATILYEILLGKATLYAVLVSALVLMAMVKRKDSRGRAKRSGSGATNFSLLKQAGDVEENPGPTSMALPVTALLLPLALLLHAARPEIVLTQSPATLSLSPGERATLSCRASQSVSSYLAWYQQKPGQAPRLLIYDASNRATGIPARFSGSGSGTDFTLTISSLEPEDFAVYYCQQRSNWPITFGQGTRLEIKGGGGSGGGGSGGGGSEVQLVESGGGLVQPGRSLRLSCAASGFTFNDYAMHWVRQAPGKGLEWVSTISWNSGSIGYADSVKGRFTISRDNAKKSLYLQMNSLRAEDTALYYCAKDIQYGNYYYGMDVWGQGTTVTVSSTRGQPKANPTVTLFPPSSEELQANKATLVCLISDFYPGAVTVAWKADGSPVKAGVETTKPSKQSNNKYAASSYLSLTPEQWKSHRSYSCQVTHEGSTVEKTVAPTECSIPEDTFFPSPESSCDVKLVEKSFETDTNLNFQNLSVIGFRILLLKVAGFNLLMTLRLWSSRAKRSGSGVKQTLNFDLLKLAGDVESNPGPSRGHMTEYKPTVRLATRDDVPRAVRTLAAAFADYPATRHTVDPDRHIERVTELQELFLTRVGLDIGKVWVADDGAAVAVWTTPESVEAGAVFAEIGPRMAELSGSRLAAQQQMEGLLAPHRPKEPAWFLATVGVSPDHQGKGLGSAVVLPGVEAAERAGVPAFLETSAPRNLPFYERLGFTVTADVEVPEGPRTWCMTRKPGA

SEQ ID NO: 44170 - protein, 875 aa, synthetic construct
MALPVTALLLPLALLLHAARPLEEASTKGPSVFPLAPSSKSTSGGTAALGCLVKDYFPEPVTVSWNSGALTSGVHTFPAVLQSSGLYSLSSVVTVPSSSLGTQTYICNVNHKPSNTKVDKRVEPKSCIPEDTFFPSPESSCDVKLVEKSFETDTNLNFQNLSVIGFRILLLKVAGFNLLMTLRLWSSRAKRSGSGATNFSLLKQAGDVEENPGPTSMALPVTALLLPLALLLHAARPEIVLTQSPATLSLSPGERATLSCRASQSVSSYLAWYQQKPGQAPRLLIYDASNRATGIPARFSGSGSGTDFTLTISSLEPEDFAVYYCQQRSNWPITFGQGTRLEIKGGGGSGGGGSGGGGSEVQLVESGGGLVQPGRSLRLSCAASGFTFNDYAMHWVRQAPGKGLEWVSTISWNSGSIGYADSVKGRFTISRDNAKKSLYLQMNSLRAEDTALYYCAKDIQYGNYYYGMDVWGQGTTVTVSSTRGQPKANPTVTLFPPSSEELQANKATLVCLISDFYPGAVTVAWKADGSPVKAGVETTKPSKQSNNKYAASSYLSLTPEQWKSHRSYSCQVTHEGSTVEKTVAPTECSGRADCGFTSESYQQGVLSATILYEILLGKATLYAVLVSALVLMAMVKRKDSRGRAKRSGSGVKQTLNFDLLKLAGDVESNPGPSRGHMTEYKPTVRLATRDDVPRAVRTLAAAFADYPATRHTVDPDRHIERVTELQELFLTRVGLDIGKVWVADDGAAVAVWTTPESVEAGAVFAEIGPRMAELSGSRLAAQQQMEGLLAPHRPKEPAWFLATVGVSPDHQGKGLGSAVVLPGVEAAERAGVPAFLETSAPRNLPFYERLGFTVTADVEVPEGPRTWCMTRKPGA

SEQ ID NO: 44171 - protein, 622 aa, synthetic construct
MALPVTALLLPLALLLHAARPEIVLTQSPATLSLSPGERATLSCRASQSVSSYLAWYQQKPGQAPRLLIYDASNRATGIPARFSGSGSGTDFTLTISSLEPEDFAVYYCQQRSNWPITFGQGTRLEIKLEDLKNVFPPEVAVFEPSEAEISHTQKATLVCLATGFYPDHVELSWWVNGKEVHSGVCTDPQPLKEQPALNDSRYCLSSRLRVSATFWQNPRNHFRCQVQFYGLSENDEWTQDRAKPVTQIVSAEAWGRADSGFTSESYQQGVLSATILYEILLGKATLYAVLVSALVLMAMVKRKDSRGRAKRSGSGATNFSLLKQAGDVEENPGPTSMDWIWRILFLVGAATGAHSFEEVQLVESGGGLVQPGRSLRLSCAASGFTFNDYAMHWVRQAPGKGLEWVSTISWNSGSIGYADSVKGRFTISRDNAKKSLYLQMNSLRAEDTALYYCAKDIQYGNYYYGMDVWGQGTTVTVSSTRIQNPDPAVYQLRDSKSSDKSVCLFTDFDSQTNVSQSKDSDVYITDKCVLDMRSMDFKSNSAVAWSNKSDFACANAFNNSIIPEDTFFPSPESSSDVKLVEKSFETDTNLNFQNLSVIGFRILLLKVAGFNLLMTLRLWSS

SEQ ID NO: 44172 - protein, 901 aa, synthetic construct
MALPVTALLLPLALLLHAARPEVQLLESGGGLVQPGGSLRLSCAASGRTFSMGWYRQAPGKGLEFVSAITYSGGSPYYADSVKGRFTISRDNSKNTVYLQMNSLRAEDTAVYYCAANPTYGSDWNAENWGQGTLVTVSSGTGGGGSGGGGSGGGGSEFEIVLTQSPATLSLSPGERATLSCRASQSVSSYLAWYQQKPGQAPRLLIYDASNRATGIPARFSGSGSGTDFTLTISSLEPEDFAVYYCQQRSNWPITFGQGTRLEIKLEIQNPDPAVYQLRDSKSSDKSVCLFTDFDSQTNVSQSKDSDVYITDKCVLDMRSMDFKSNSAVAWSNKSDFACANAFNNSIIPEDTFFPSSDVPCDVKLVEKSFETDTNLNFQNLSVIGFRILLLKVAGFNLLMTLRLWSSRAKRSGSGVKQTLNFDLLKLAGDVESNPGPTSTMDWIWRILFLVGAATGTHSGPEVQLVESGGGLVQPGGSLRLSCAASGRTFTMGWYRQAPGKEREFVAAISLSPTLAYYADSVKGRFTISRDNSKNTVVLQMNSLRAEDTALYYCAADRKSVMSIRPDYWGQGTLVTVSSGSGGGGSGGGGSGGGGSFEEVQLVESGGGLVQPGRSLRLSCAASGFTFNDYAMHWVRQAPGKGLEWVSTISWNSGSIGYADSVKGRFTISRDNAKKSLYLQMNSLRAEDTALYYCAKDIQYGNYYYGMDVWGQGTTVTVSSTREDLKNVFPPEVAVFEPSKAEIAHTQKATLVCLATGFYPDHVELSWWVNGKEVHSGVCTDPQPLKEQPALNDSRYCLSSRLRVSATFWQNPRNHFRCQVQFYGLSENDEWTQDRAKPVTQIVSAEAWGRADCGITSASYHQGVLSATILYEILLGKATLYAVLVSALVLMAMVKRKDSRG

SEQ ID NO: 44173 - protein, 901 aa, synthetic construct
MALPVTALLLPLALLLHAARPEVQLVESGGGLVQAGGSLRLSCAASGRTFSMGWFRQAPGKEREFVAAITYSGGSPYYADSVKGRFTISRDNAKNTVYLQMNSLKPEDTAVYYCAANPTYGSDWNAENWGQGTQVTVSSGTGGGGSGGGGSGGGGSEFEIVLTQSPATLSLSPGERATLSCRASQSVSSYLAWYQQKPGQAPRLLIYDASNRATGIPARFSGSGSGTDFTLTISSLEPEDFAVYYCQQRSNWPITFGQGTRLEIKLEIQNPDPAVYQLRDSKSSDKSVCLFTDFDSQTNVSQSKDSDVYITDKCVLDMRSMDFKSNSAVAWSNKSDFACANAFNNSIIPEDTFFPSSDVPCDVKLVEKSFETDTNLNFQNLSVIGFRILLLKVAGFNLLMTLRLWSSRAKRSGSGVKQTLNFDLLKLAGDVESNPGPTSTMDWIWRILFLVGAATGAHSGPEVQLVESGGGLVQPGGSLRLSCAASGRTFTMGWYRQAPGKEREFVAAISLSPTLAYYADSVKGRFTISRDNSKNTVVLQMNSLRAEDTALYYCAADRKSVMSIRPDYWGQGTLVTVSSGSGGGGSGGGGSGGGGSFEEVQLVESGGGLVQPGRSLRLSCAASGFTFNDYAMHWVRQAPGKGLEWVSTISWNSGSIGYADSVKGRFTISRDNAKKSLYLQMNSLRAEDTALYYCAKDIQYGNYYYGMDVWGQGTTVTVSSTREDLKNVFPPEVAVFEPSKAEIAHTQKATLVCLATGFYPDHVELSWWVNGKEVHSGVCTDPQPLKEQPALNDSRYCLSSRLRVSATFWQNPRNHFRCQVQFYGLSENDEWTQDRAKPVTQIVSAEAWGRADCGITSASYHQGVLSATILYEILLGKATLYAVLVSALVLMAMVKRKDSRG

SEQ ID NO: 44174 - protein, 898 aa, synthetic construct
MALPVTALLLPLALLLHAARPEVQLVESGGGLVQAGGSLRLSCAASGRTFSMGWFRQAPGKEREFVAAITYSGGSPYYADSVKGRFTISRDNAKNTVYLQMNSLKPEDTAVYYCAANPTYGSDWNAENWGQGTQVTVSSGTGGGGSGGGGSGGGGSEFEIVLTQSPATLSLSPGERATLSCRASQSVSSYLAWYQQKPGQAPRLLIYDASNRATGIPARFSGSGSGTDFTLTISSLEPEDFAVYYCQQRSNWPITFGQGTRLEIKLEDLKNVFPPEVAVFEPSEAEISHTQKATLVCLATGFYPDHVELSWWVNGKEVHSGVCTDPQPLKEQPALNDSRYCLSSRLRVSATFWQNPRNHFRCQVQFYGLSENDEWTQDRAKPVTQIVSAEAWGRADCGFTSESYQQGVLSATILYEILLGKATLYAVLVSALVLMAMVKRKDSRGRAKRSGSGATNFSLLKQAGDVEENPGPTSATMDWIWRILFLVGAATGAHSGPEVQLVESGGGLVQAGGSLRLSCAASGRTFTMGWFRQAPGKEREFVAAISLSPTLAYYADSVKGRFTISRDNAKNTVVLQMNSLKPEDTALYYCAADRKSVMSIRPDYWGQGTQVTVSSGSGGGGSGGGGSGGGGSFEEVQLVESGGGLVQPGRSLRLSCAASGFTFNDYAMHWVRQAPGKGLEWVSTISWNSGSIGYADSVKGRFTISRDNAKKSLYLQMNSLRAEDTALYYCAKDIQYGNYYYGMDVWGQGTTVTVSSTRIQNPDPAVYQLRDSKSSDKSVCLFTDFDSQTNVSQSKDSDVYITDKCVLDMRSMDFKSNSAVAWSNKSDFACANAFNNSIIPEDTFFPSPESSCDVKLVEKSFETDTNLNFQNLSVIGFRILLLKVAGFNLLMTLRLWSS

SEQ ID NO: 44175 - protein, 769 aa, synthetic construct
MALPVTALLLPLALLLHAARPEVQLVESGGGLVQPGGSLRLSCEASGFASDDYIIGWFRQAPGKEREGVSCISSKYANTVYTDSVKGRFRLSRGTAKNTVYLQMSALKPEDTAVYYCAMDSRRVTCPEISTMHRNFDSWGQGTLVTVSSGTGGGGSGGGGSGGGGSEFEIVLTQSPATLSLSPGERATLSCRASQSVSSYLAWYQQKPGQAPRLLIYDASNRATGIPARFSGSGSGTDFTLTISSLEPEDFAVYYCQQRSNWPITFGQGTRLEIKLEDLKNVFPPEVAVFEPSKAEIAHTQKATLVCLATGFYPDHVELSWWVNGKEVHSGVCTDPQPLKEQPALNDSRYCLSSRLRVSATFWQNPRNHFRCQVQFYGLSENDEWTQDRAKPVTQIVSAEAWGRADCGITSASYHQGVLSATILYEILLGKATLYAVLVSALVLMAMVKRKDSRGRAKRSGSGATNFSLLKQAGDVEENPGPTSMDWIWRILFLVGAATGAHSFEEVQLVESGGGLVQPGRSLRLSCAASGFTFNDYAMHWVRQAPGKGLEWVSTISWNSGSIGYADSVKGRFTISRDNAKKSLYLQMNSLRAEDTALYYCAKDIQYGNYYYGMDVWGQGTTVTVSSTRIQNPDPAVYQLRDSKSSDKSVCLFTDFDSQTNVSQSKDSDVYITDKCVLDMRSMDFKSNSAVAWSNKSDFACANAFNNSIIPEDTFFPSSDVPCDVKLVEKSFETDTNLNFQNLSVIGFRILLLKVAGFNLLMTLRLWSS

SEQ ID NO: 44176 - protein, 760 aa, synthetic construct
MALPVTALLLPLALLLHAARPEIVLTQSPATLSLSPGERATLSCRASQSVSSYLAWYQQKPGQAPRLLIYDASNRATGIPARFSGSGSGTDFTLTISSLEPEDFAVYYCQQRSNWPITFGQGTRLEIKLEDLKNVFPPEVAVFEPSEAEISHTQKATLVCLATGFYPDHVELSWWVNGKEVHSGVCTDPQPLKEQPALNDSRYCLSSRLRVSATFWQNPRNHFRCQVQFYGLSENDEWTQDRAKPVTQIVSAEAWGRADCGFTSESYQQGVLSATILYEILLGKATLYAVLVSALVLMAMVKRKDSRGRAKRSGSGATNFSLLKQAGDVEENPGPTSTMDWIWRILFLVGAATGAHSGPEVQLVESGGGLVQPGGSLRLSCAASGRTFTMGWYRQAPGKEREFVAAISLSPTLAYYADSVKGRFTISRDNSKNTVVLQMNSLRAEDTALYYCAADRKSVMSIRPDYWGQGTLVTVSSGSGGGGSGGGGSGGGGSFEEVQLVESGGGLVQPGRSLRLSCAASGFTFNDYAMHWVRQAPGKGLEWVSTISWNSGSIGYADSVKGRFTISRDNAKKSLYLQMNSLRAEDTALYYCAKDIQYGNYYYGMDVWGQGTTVTVSSTRIQNPDPAVYQLRDSKSSDKSVCLFTDFDSQTNVSQSKDSDVYITDKCVLDMRSMDFKSNSAVAWSNKSDFACANAFNNSIIPEDTFFPSPESSCDVKLVEKSFETDTNLNFQNLSVIGFRILLLKVAGFNLLMTLRLWSS

SEQ ID NO: 44177 - protein, 767 aa, synthetic construct
MALPVTALLLPLALLLHAARPEIVLTQSPATLSLSPGERATLSCRASQSVSSYLAWYQQKPGQAPRLLIYDASNRATGIPARFSGSGSGTDFTLTISSLEPEDFAVYYCQQRSNWPITFGQGTRLEIKLEDLKNVFPPEVAVFEPSEAEISHTQKATLVCLATGFYPDHVELSWWVNGKEVHSGVCTDPQPLKEQPALNDSRYCLSSRLRVSATFWQNPRNHFRCQVQFYGLSENDEWTQDRAKPVTQIVSAEAWGRADCGFTSESYQQGVLSATILYEILLGKATLYAVLVSALVLMAMVKRKDSRGRAKRSGSGATNFSLLKQAGDVEENPGPTSTMDWIWRILFLVGAATGAHSGPQVQLVESGGGLVQPGGSLRLSCAASGNINSRNCMGWFRQAPGKGREGVAAIGQVTGRTYYVDSVKGRFTISLDNSKNTLYLQMNSLRAEDTAVYYCAAAPGCLLSALRSADYRNWGQGTLVTVSSGSGGGGSGGGGSGGGGSFEEVQLVESGGGLVQPGRSLRLSCAASGFTFNDYAMHWVRQAPGKGLEWVSTISWNSGSIGYADSVKGRFTISRDNAKKSLYLQMNSLRAEDTALYYCAKDIQYGNYYYGMDVWGQGTTVTVSSTRIQNPDPAVYQLRDSKSSDKSVCLFTDFDSQTNVSQSKDSDVYITDKCVLDMRSMDFKSNSAVAWSNKSDFACANAFNNSIIPEDTFFPSPESSCDVKLVEKSFETDTNLNFQNLSVIGFRILLLKVAGFNLLMTLRLWSS

SEQ ID NO: 44178 - protein, 767 aa, synthetic construct
MALPVTALLLPLALLLHAARPEIVLTQSPATLSLSPGERATLSCRASQSVSSYLAWYQQKPGQAPRLLIYDASNRATGIPARFSGSGSGTDFTLTISSLEPEDFAVYYCQQRSNWPITFGQGTRLEIKLEDLKNVFPPEVAVFEPSEAEISHTQKATLVCLATGFYPDHVELSWWVNGKEVHSGVCTDPQPLKEQPALNDSRYCLSSRLRVSATFWQNPRNHFRCQVQFYGLSENDEWTQDRAKPVTQIVSAEAWGRADCGFTSESYQQGVLSATILYEILLGKATLYAVLVSALVLMAMVKRKDSRGRAKRSGSGATNFSLLKQAGDVEENPGPTSTMDWIWRILFLVGAATGAHSGPQVQLVESGGGSVQAGGSLRLSCGASGNISSRNCMGWFRQAPGKEREGVAAIGQVTGRSYYVDSVKGRFTISLDNAKNTLYLQMNTLKPEDTAMYYCAAAPGCLLSALRSADYRNWGQGTQVTVSSGSGGGGSGGGGSGGGGSFEEVQLVESGGGLVQPGRSLRLSCAASGFTFNDYAMHWVRQAPGKGLEWVSTISWNSGSIGYADSVKGRFTISRDNAKKSLYLQMNSLRAEDTALYYCAKDIQYGNYYYGMDVWGQGTTVTVSSTRIQNPDPAVYQLRDSKSSDKSVCLFTDFDSQTNVSQSKDSDVYITDKCVLDMRSMDFKSNSAVAWSNKSDFACANAFNNSIIPEDTFFPSPESSCDVKLVEKSFETDTNLNFQNLSVIGFRILLLKVAGFNLLMTLRLWSS

SEQ ID NO: 44179 - protein, 908 aa, synthetic construct
MALPVTALLLPLALLLHAARPEVQLVESGGGLVQAGGSLRLSCAASGRTFSMGWFRQAPGKEREFVAAITYSGGSPYYADSVKGRFTISRDNAKNTVYLQMNSLKPEDTAVYYCAANPTYGSDWNAENWGQGTQVTVSSGTGGGGSGGGGSGGGGSEFEIVLTQSPATLSLSPGERATLSCRASQSVSSYLAWYQQKPGQAPRLLIYDASNRATGIPARFSGSGSGTDFTLTISSLEPEDFAVYYCQQRSNWPITFGQGTRLEIKLEIQNPDPAVYQLRDSKSSDKSVCLFTDFDSQTNVSQSKDSDVYITDKCVLDMRSMDFKSNSAVAWSNKSDFACANAFNNSIIPEDTFFPSSDVPCDVKLVEKSFETDTNLNFQNLSVIGFRILLLKVAGFNLLMTLRLWSSRAKRSGSGVKQTLNFDLLKLAGDVESNPGPTSTMDWIWRILFLVGAATGAHSGPQVQLVESGGGSVQAGGSLRLSCGASGNISSRNCMGWFRQAPGKEREGVAAIGQVTGRSYYVDSVKGRFTISLDNAKNTLYLQMNTLKPEDTAMYYCAAAPGCLLSALRSADYRNWGQGTQVTVSSGSGGGGSGGGGSGGGGSFEEVQLVESGGGLVQPGRSLRLSCAASGFTFNDYAMHWVRQAPGKGLEWVSTISWNSGSIGYADSVKGRFTISRDNAKKSLYLQMNSLRAEDTALYYCAKDIQYGNYYYGMDVWGQGTTVTVSSTREDLKNVFPPEVAVFEPSKAEIAHTQKATLVCLATGFYPDHVELSWWVNGKEVHSGVCTDPQPLKEQPALNDSRYCLSSRLRVSATFWQNPRNHFRCQVQFYGLSENDEWTQDRAKPVTQIVSAEAWGRADCGITSASYHQGVLSATILYEILLGKATLYAVLVSALVLMAMVKRKDSRG

SEQ ID NO: 44180 - protein, 905 aa, synthetic construct
MALPVTALLLPLALLLHAARPQVQLVESGGGSVQAGGSLRLSCGASGNISSRNCMGWFRQAPGKEREGVAAIGQVTGRSYYVDSVKGRFTISLDNAKNTLYLQMNTLKPEDTAMYYCAAAPGCLLSALRSADYRNWGQGTQVTVSSGTGGGGSGGGGSGGGGSEFEIVLTQSPATLSLSPGERATLSCRASQSVSSYLAWYQQKPGQAPRLLIYDASNRATGIPARFSGSGSGTDFTLTISSLEPEDFAVYYCQQRSNWPITFGQGTRLEIKLEDLKNVFPPEVAVFEPSEAEISHTQKATLVCLATGFYPDHVELSWWVNGKEVHSGVCTDPQPLKEQPALNDSRYCLSSRLRVSATFWQNPRNHFRCQVQFYGLSENDEWTQDRAKPVTQIVSAEAWGRADCGFTSESYQQGVLSATILYEILLGKATLYAVLVSALVLMAMVKRKDSRGRAKRSGSGATNFSLLKQAGDVEENPGPTSATMDWIWRILFLVGAATGAHSGPEVQLVESGGGLVQAGGSLRLSCAASGRTFTMGWFRQAPGKEREFVAAISLSPTLAYYADSVKGRFTISRDNAKNTVVLQMNSLKPEDTALYYCAADRKSVMSIRPDYWGQGTQVTVSSGSGGGGSGGGGSGGGGSFEEVQLVESGGGLVQPGRSLRLSCAASGFTFNDYAMHWVRQAPGKGLEWVSTISWNSGSIGYADSVKGRFTISRDNAKKSLYLQMNSLRAEDTALYYCAKDIQYGNYYYGMDVWGQGTTVTVSSTRIQNPDPAVYQLRDSKSSDKSVCLFTDFDSQTNVSQSKDSDVYITDKCVLDMRSMDFKSNSAVAWSNKSDFACANAFNNSIIPEDTFFPSPESSCDVKLVEKSFETDTNLNFQNLSVIGFRILLLKVAGFNLLMTLRLWSS

SEQ ID NO: 44181 - protein, 768 aa, synthetic construct
MALPVTALLLPLALLLHAARPQVQLVESGGGSVQAGGSLRLSCGASGNISSRNCMGWFRQAPGKEREGVAAIGQVTGRSYYVDSVKGRFTISLDNAKNTLYLQMNTLKPEDTAMYYCAAAPGCLLSALRSADYRNWGQGTQVTVSSGTGGGGSGGGGSGGGGSEFEIVLTQSPATLSLSPGERATLSCRASQSVSSYLAWYQQKPGQAPRLLIYDASNRATGIPARFSGSGSGTDFTLTISSLEPEDFAVYYCQQRSNWPITFGQGTRLEIKLEDLKNVFPPEVAVFEPSEAEISHTQKATLVCLATGFYPDHVELSWWVNGKEVHSGVCTDPQPLKEQPALNDSRYCLSSRLRVSATFWQNPRNHFRCQVQFYGLSENDEWTQDRAKPVTQIVSAEAWGRADCGFTSESYQQGVLSATILYEILLGKATLYAVLVSALVLMAMVKRKDSRGRAKRSGSGATNFSLLKQAGDVEENPGPTSATMDWIWRILFLVGAATGAHSFEEVQLVESGGGLVQPGRSLRLSCAASGFTFNDYAMHWVRQAPGKGLEWVSTISWNSGSIGYADSVKGRFTISRDNAKKSLYLQMNSLRAEDTALYYCAKDIQYGNYYYGMDVWGQGTTVTVSSTRIQNPDPAVYQLRDSKSSDKSVCLFTDFDSQTNVSQSKDSDVYITDKCVLDMRSMDFKSNSAVAWSNKSDFACANAFNNSIIPEDTFFPSPESSCDVKLVEKSFETDTNLNFQNLSVIGFRILLLKVAGFNLLMTLRLWSS

SEQ ID NO: 44182 - protein, 768 aa, synthetic construct
MALPVTALLLPLALLLHAARPQVQLVESGGGVVQPGGSLRLSCAASGLSFSTYTVAWFRQAPGKGLEGVAAIPYTSQHMVYTDSVRGRFTISRDNSKNTLYLQMNSLRAEDTAVYYCATDRRPGTSMLAINGYNRWGQGTTVTVSSGTGGGGSGGGGSGGGGSEFEIVLTQSPATLSLSPGERATLSCRASQSVSSYLAWYQQKPGQAPRLLIYDASNRATGIPARFSGSGSGTDFTLTISSLEPEDFAVYYCQQRSNWPITFGQGTRLEIKLEDLKNVFPPEVAVFEPSEAEISHTQKATLVCLATGFYPDHVELSWWVNGKEVHSGVCTDPQPLKEQPALNDSRYCLSSRLRVSATFWQNPRNHFRCQVQFYGLSENDEWTQDRAKPVTQIVSAEAWGRADCGFTSESYQQGVLSATILYEILLGKATLYAVLVSALVLMAMVKRKDSRGRAKRSGSGATNFSLLKQAGDVEENPGPTSATMDWIWRILFLVGAATGAHSFEEVQLVESGGGLVQPGRSLRLSCAASGFTFNDYAMHWVRQAPGKGLEWVSTISWNSGSIGYADSVKGRFTISRDNAKKSLYLQMNSLRAEDTALYYCAKDIQYGNYYYGMDVWGQGTTVTVSSTRIQNPDPAVYQLRDSKSSDKSVCLFTDFDSQTNVSQSKDSDVYITDKCVLDMRSMDFKSNSAVAWSNKSDFACANAFNNSIIPEDTFFPSPESSCDVKLVEKSFETDTNLNFQNLSVIGFRILLLKVAGFNLLMTLRLWSS

SEQ ID NO: 44183 - protein, 767 aa, synthetic construct
MALPVTALLLPLALLLHAARPEIVLTQSPATLSLSPGERATLSCRASQSVSSYLAWYQQKPGQAPRLLIYDASNRATGIPARFSGSGSGTDFTLTISSLEPEDFAVYYCQQRSNWPITFGQGTRLEIKLEDLKNVFPPEVAVFEPSEAEISHTQKATLVCLATGFYPDHVELSWWVNGKEVHSGVCTDPQPLKEQPALNDSRYCLSSRLRVSATFWQNPRNHFRCQVQFYGLSENDEWTQDRAKPVTQIVSAEAWGRADCGFTSESYQQGVLSATILYEILLGKATLYAVLVSALVLMAMVKRKDSRGRAKRSGSGATNFSLLKQAGDVEENPGPTSTMDWIWRILFLVGAATGAHSGPQVQLVESGGGVVQPGGSLRLSCAASGLSFSTYTVAWFRQAPGKGLEGVAAIPYTSQHMVYTDSVRGRFTISRDNSKNTLYLQMNSLRAEDTAVYYCATDRRPGTSMLAINGYNRWGQGTTVTVSSGSGGGGSGGGGSGGGGSFEEVQLVESGGGLVQPGRSLRLSCAASGFTFNDYAMHWVRQAPGKGLEWVSTISWNSGSIGYADSVKGRFTISRDNAKKSLYLQMNSLRAEDTALYYCAKDIQYGNYYYGMDVWGQGTTVTVSSTRIQNPDPAVYQLRDSKSSDKSVCLFTDFDSQTNVSQSKDSDVYITDKCVLDMRSMDFKSNSAVAWSNKSDFACANAFNNSIIPEDTFFPSPESSCDVKLVEKSFETDTNLNFQNLSVIGFRILLLKVAGFNLLMTLRLWSS

SEQ ID NO: 44184 - protein, 769 aa, synthetic construct
MALPVTALLLPLALLLHAARPEIVLTQSPATLSLSPGERATLSCRASQSVSSYLAWYQQKPGQAPRLLIYDASNRATGIPARFSGSGSGTDFTLTISSLEPEDFAVYYCQQRSNWPITFGQGTRLEIKLEDLKNVFPPEVAVFEPSEAEISHTQKATLVCLATGFYPDHVELSWWVNGKEVHSGVCTDPQPLKEQPALNDSRYCLSSRLRVSATFWQNPRNHFRCQVQFYGLSENDEWTQDRAKPVTQIVSAEAWGRADCGFTSESYQQGVLSATILYEILLGKATLYAVLVSALVLMAMVKRKDSRGRAKRSGSGATNFSLLKQAGDVEENPGPTSTMDWIWRILFLVGAATGAHSGPEVQLVESGGGSVQAGGSLRLSCAASGYTYSINCMGWFRQAPGKEREGVAAISTGGGRTDYRDSVKGRFTISQDNAKNTVYLQMNSLKPEDTAMYYCAGKTTYPGYGCGLGRSAYNYWGQGTQVTVSSGSGGGGSGGGGSGGGGSFEEVQLVESGGGLVQPGRSLRLSCAASGFTFNDYAMHWVRQAPGKGLEWVSTISWNSGSIGYADSVKGRFTISRDNAKKSLYLQMNSLRAEDTALYYCAKDIQYGNYYYGMDVWGQGTTVTVSSTRIQNPDPAVYQLRDSKSSDKSVCLFTDFDSQTNVSQSKDSDVYITDKCVLDMRSMDFKSNSAVAWSNKSDFACANAFNNSIIPEDTFFPSPESSCDVKLVEKSFETDTNLNFQNLSVIGFRILLLKVAGFNLLMTLRLWSS

SEQ ID NO: 44185 - protein, 622 aa, synthetic construct
MALPVTALLLPLALLLHAARPEIVLTQSPATLSLSPGERATLSCRASQSVSSYLAWYQQKPGQAPRLLIYDASNRATGIPARFSGSGSGTDFTLTISSLEPEDFAVYYCQQRSNWPITFGQGTRLEIKLEDLKHVFPPEVAVFEPSDAEIWHTQKATLVCLATGFYPDHVELSWWVNGKEVHSGVSTDPQPLKEQPALNDSRYCLSSRLRVSATFWQNPRNHFRCQVQFYGLSENDEWTQDRAKPVTQIVSAEAWGRADCGFTSESYQQGVLSATILYEILLGKATLYAVLVSALVLMAMVKRKDSRGRAKRSGSGATNFSLLKQAGDVEENPGPTSMDWIWRILFLVGAATGAHSFEEVQLVESGGGLVQPGRSLRLSCAASGFTFNDYAMHWVRQAPGKGLEWVSTISWNSGSIGYADSVKGRFTISRDNAKKSLYLQMNSLRAEDTALYYCAKDIQYGNYYYGMDVWGQGTTVTVSSTRIQNPDPAVYQLRDSKSSDKSVCLFTDFDSQTNVSQSKDSDVYITDKTVLDMRSMDFKSNSAVAWSSKSDFACANAFNNSIIPEDTFFPSPEMACDVKLVEKSFETDTNLNFQNLLVIWLRILLLKVAGFNLLMTLRLWSS

SEQ ID NO: 44186 - protein, 622 aa, synthetic construct
MALPVTALLLPLALLLHAARPEIVLTQSPATLSLSPGERATLSCRASQSVSSYLAWYQQKPGQAPRLLIYDASNRATGIPARFSGSGSGTDFTLTISSLEPEDFAVYYCQQRSNWPITFGQGTRLEIKLEDLKHVFPPEVAVFEPSDAEIWHTQKATLVCLATGFYPDHVELSWWVNGKEVHSGVSTDPQPLKEQPALNDSRYCLSSRLRVSATFWQNPRNHFRCQVQFYGLSENDEWTQDRAKPVTQIVSAEAWGRADCGFTSESYQQGVLSATILYEILLGKATLYAVLVSALVLMAMVKRKDSRGRAKRSGSGATNFSLLKQAGDVEENPGPTSMDWIWRILFLVGAATGAHSFEEVQLVESGGGLVQPGRSLRLSCAASGFTFNDYAMHWVRQAPGKGLEWVSTISWNSGSIGYADSVKGRFTISRDNAKKSLYLQMNSLRAEDTALYYCAKDIQYGNYYYGMDVWGQGTTVTVSSTRIQNPDPAVYQLRDSKSSDKSVCLFTDFDSQTNVSQSKDSDVYITDKTVLDMRSMDFKSNSAVAWSTKSDFACANAFNNSIIPEDTFFPSPEVVCDVKLVEKSFETDTNLNFQNLVVIGARILLLKVAGFNLLMTLRLWSS

SEQ ID NO: 44187 - protein, 622 aa, synthetic construct
MALPVTALLLPLALLLHAARPEIVLTQSPATLSLSPGERATLSCRASQSVSSYLAWYQQKPGQAPRLLIYDASNRATGIPARFSGSGSGTDFTLTISSLEPEDFAVYYCQQRSNWPITFGQGTRLEIKLEDLKNVFPPEVAVFEPSKAEISRTQKATLVCLATGFYPPHVELSWWVNGKEVHDGVCTDPQPLKEQPALNDSRYCLSSRLRVSATFWQNPRNHFRCQVQFYGLSENDEWTQDRAKPVTQIVSAEAWGRADCGFTSESYQQGVLSATILYEILLGKATLYAVLVSALVLMAMVKRKDSRGRAKRSGSGATNFSLLKQAGDVEENPGPTSMDWIWRILFLVGAATGAHSFEEVQLVESGGGLVQPGRSLRLSCAASGFTFNDYAMHWVRQAPGKGLEWVSTISWNSGSIGYADSVKGRFTISRDNAKKSLYLQMNSLRAEDTALYYCAKDIQYGNYYYGMDVWGQGTTVTVSSTRIQNPDPAVYQLRDSKSSDKFVCLFTDFDSQINVSQSKDSDVYITDKCVLDMRSMDFKSNSAVAWSNKSDFTCANAFNNSIIPEDTFFPSPESSCDVKLVEKSFETDTNLNFQNLSVIGFRILLLKVAGFNLLMTLRLWSS

SEQ ID NO: 44188 - protein, 764 aa, synthetic construct
MALPVTALLLPLALLLHAARPEIVLTQSPATLSLSPGERATLSCRASQSVSSYLAWYQQKPGQAPRLLIYDASNRATGIPARFSGSGSGTDFTLTISSLEPEDFAVYYCQQRSNWPITFGQGTRLEIKLEDLKNVFPPEVAVFEPSEAEISHTQKATLVCLATGFYPDHVELSWWVNGKEVHSGVCTDPQPLKEQPALNDSRYCLSSRLRVSATFWQNPRNHFRCQVQFYGLSENDEWTQDRAKPVTQIVSAEAWGRADCGFTSESYQQGVLSATILYEILLGKATLYAVLVSALVLMAMVKRKDSRGRAKRSGSGATNFSLLKQAGDVEENPGPTSTMDWIWRILFLVGAATGAHSGPQVQLQESGPGLVKPSQTLSLTCTVSGASITTGEYYWNWFRQPPGKGLEWMGAIAASGSTTYSPSFESRTSISRDTSKNQFSLKLSSVTAADTAVYYCGRSFGVAAVTTGQNRGQGTLVTVSSGSGGGGSGGGGSGGGGSFEEVQLVESGGGLVQPGRSLRLSCAASGFTFNDYAMHWVRQAPGKGLEWVSTISWNSGSIGYADSVKGRFTISRDNAKKSLYLQMNSLRAEDTALYYCAKDIQYGNYYYGMDVWGQGTTVTVSSTRIQNPDPAVYQLRDSKSSDKSVCLFTDFDSQTNVSQSKDSDVYITDKCVLDMRSMDFKSNSAVAWSNKSDFACANAFNNSIIPEDTFFPSPESSCDVKLVEKSFETDTNLNFQNLSVIGFRILLLKVAGFNLLMTLRLWSS

SEQ ID NO: 44189 - protein, 905 aa, synthetic construct
MALPVTALLLPLALLLHAARPQVQLQESGPGLVKPSQTLSLTCTVSGGSITTGEFYWNWFRQPPGKGLEWMGAIAASGSTTYSPSFESRTSISRDTSKNQFSLKLSSVTAADTAVYYCGRSFGVAAVTTGQNRGQGTLVTVSSGTGGGGSGGGGSGGGGSEFEIVLTQSPATLSLSPGERATLSCRASQSVSSYLAWYQQKPGQAPRLLIYDASNRATGIPARFSGSGSGTDFTLTISSLEPEDFAVYYCQQRSNWPITFGQGTRLEIKLEIQNPDPAVYQLRDSKSSDKSVCLFTDFDSQTNVSQSKDSDVYITDKCVLDMRSMDFKSNSAVAWSNKSDFACANAFNNSIIPEDTFFPSSDVPCDVKLVEKSFETDTNLNFQNLSVIGFRILLLKVAGFNLLMTLRLWSSRAKRSGSGVKQTLNFDLLKLAGDVESNPGPTSTMDWIWRILFLVGAATGAHSGPEVQLVESGGGLVQPGGSLRLSCAASGRTFTMGWYRQAPGKEREFVAAISLSPTLAYYADSVKGRFTISRDNSKNTVVLQMNSLRAEDTALYYCAADRKSVMSIRPDYWGQGTLVTVSSGSGGGGSGGGGSGGGGSFEEVQLVESGGGLVQPGRSLRLSCAASGFTFNDYAMHWVRQAPGKGLEWVSTISWNSGSIGYADSVKGRFTISRDNAKKSLYLQMNSLRAEDTALYYCAKDIQYGNYYYGMDVWGQGTTVTVSSTREDLKNVFPPEVAVFEPSKAEIAHTQKATLVCLATGFYPDHVELSWWVNGKEVHSGVCTDPQPLKEQPALNDSRYCLSSRLRVSATFWQNPRNHFRCQVQFYGLSENDEWTQDRAKPVTQIVSAEAWGRADCGITSASYHQGVLSATILYEILLGKATLYAVLVSALVLMAMVKRKDSRG

SEQ ID NO: 44190 - protein, 768 aa, synthetic construct
MALPVTALLLPLALLLHAARPQVQLQESGPGLVKPSQTLSLTCTVSGGSITTGEFYWNWFRQPPGKGLEWMGAIAASGSTTYSPSFESRTSISRDTSKNQFSLKLSSVTAADTAVYYCGRSFGVAAVTTGQNRGQGTLVTVSSGTGGGGSGGGGSGGGGSEFEIVLTQSPATLSLSPGERATLSCRASQSVSSYLAWYQQKPGQAPRLLIYDASNRATGIPARFSGSGSGTDFTLTISSLEPEDFAVYYCQQRSNWPITFGQGTRLEIKLEIQNPDPAVYQLRDSKSSDKSVCLFTDFDSQTNVSQSKDSDVYITDKCVLDMRSMDFKSNSAVAWSNKSDFACANAFNNSIIPEDTFFPSSDVPCDVKLVEKSFETDTNLNFQNLSVIGFRILLLKVAGFNLLMTLRLWSSRAKRSGSGVKQTLNFDLLKLAGDVESNPGPTSTMDWIWRILFLVGAATGAHSFEEVQLVESGGGLVQPGRSLRLSCAASGFTFNDYAMHWVRQAPGKGLEWVSTISWNSGSIGYADSVKGRFTISRDNAKKSLYLQMNSLRAEDTALYYCAKDIQYGNYYYGMDVWGQGTTVTVSSTREDLKNVFPPEVAVFEPSKAEIAHTQKATLVCLATGFYPDHVELSWWVNGKEVHSGVCTDPQPLKEQPALNDSRYCLSSRLRVSATFWQNPRNHFRCQVQFYGLSENDEWTQDRAKPVTQIVSAEAWGRADCGITSASYHQGVLSATILYEILLGKATLYAVLVSALVLMAMVKRKDSRG

SEQ ID NO: 44191 - protein, 901 aa, synthetic construct
MALPVTALLLPLALLLHAARPEVQLVESGGGLVQAGGSLRLSCAASGRTFSMGWFRQAPGKEREFVAAITYSGGSPYYADSVKGRFTISRDNAKNTVYLQMNSLKPEDTAVYYCAANPTYGSDWNAENWGQGTQVTVSSGTGGGGSGGGGSGGGGSEFEIVLTQSPATLSLSPGERATLSCRASQSVSSYLAWYQQKPGQAPRLLIYDASNRATGIPARFSGSGSGTDFTLTISSLEPEDFAVYYCQQRSNWPITFGQGTRLEIKLEDLKNVFPPEVAVFEPSEAEISHTQKATLVCLATGFYPDHVELSWWVNGKEVHSGVCTDPQPLKEQPALNDSRYCLSSRLRVSATFWQNPRNHFRCQVQFYGLSENDEWTQDRAKPVTQIVSAEAWGRADCGFTSESYQQGVLSATILYEILLGKATLYAVLVSALVLMAMVKRKDSRGRAKRSGSGATNFSLLKQAGDVEENPGPTSTMDWIWRILFLVGAATGAHSGPQVQLQESGPGLVKPSQTLSLTCTVSGASITTGEYYWNWFRQPPGKGLEWMGAIAASGSTTYSPSFESRTSISRDTSKNQFSLKLSSVTAADTAVYYCGRSFGVAAVTTGQNRGQGTLVTVSSGSGGGGSGGGGSGGGGSFEEVQLVESGGGLVQPGRSLRLSCAASGFTFNDYAMHWVRQAPGKGLEWVSTISWNSGSIGYADSVKGRFTISRDNAKKSLYLQMNSLRAEDTALYYCAKDIQYGNYYYGMDVWGQGTTVTVSSTRIQNPDPAVYQLRDSKSSDKSVCLFTDFDSQTNVSQSKDSDVYITDKCVLDMRSMDFKSNSAVAWSNKSDFACANAFNNSIIPEDTFFPSPESSCDVKLVEKSFETDTNLNFQNLSVIGFRILLLKVAGFNLLMTLRLWSS

SEQ ID NO: 44192 - protein, 908 aa, synthetic construct
MALPVTALLLPLALLLHAARPEVQLVESGGGLVQAGGSLRLSCAASGRTFSMGWFRQAPGKEREFVAAITYSGGSPYYADSVKGRFTISRDNAKNTVYLQMNSLKPEDTAVYYCAANPTYGSDWNAENWGQGTQVTVSSGTGGGGSGGGGSGGGGSEFEIVLTQSPATLSLSPGERATLSCRASQSVSSYLAWYQQKPGQAPRLLIYDASNRATGIPARFSGSGSGTDFTLTISSLEPEDFAVYYCQQRSNWPITFGQGTRLEIKLEIQNPDPAVYQLRDSKSSDKSVCLFTDFDSQTNVSQSKDSDVYITDKCVLDMRSMDFKSNSAVAWSNKSDFACANAFNNSIIPEDTFFPSSDVPCDVKLVEKSFETDTNLNFQNLSVIGFRILLLKVAGFNLLMTLRLWSSRAKRSGSGVKQTLNFDLLKLAGDVESNPGPTSTMDWIWRILFLVGAATGAHSGPQVQLVESGGGLVQPGGSLRLSCAASGNINSRNCMGWFRQAPGKGREGVAAIGQVTGRTYYVDSVKGRFTISLDNSKNTLYLQMNSLRAEDTAVYYCAAAPGCLLSALRSADYRNWGQGTLVTVSSGSGGGGSGGGGSGGGGSFEEVQLVESGGGLVQPGRSLRLSCAASGFTFNDYAMHWVRQAPGKGLEWVSTISWNSGSIGYADSVKGRFTISRDNAKKSLYLQMNSLRAEDTALYYCAKDIQYGNYYYGMDVWGQGTTVTVSSTREDLKNVFPPEVAVFEPSKAEIAHTQKATLVCLATGFYPDHVELSWWVNGKEVHSGVCTDPQPLKEQPALNDSRYCLSSRLRVSATFWQNPRNHFRCQVQFYGLSENDEWTQDRAKPVTQIVSAEAWGRADCGITSASYHQGVLSATILYEILLGKATLYAVLVSALVLMAMVKRKDSRG

SEQ ID NO: 44193 - protein, 904 aa, synthetic construct
MALPVTALLLPLALLLHAARPEVQLVESGGGLVQAGGSLRLSCAASGRTFSMGWFRQAPGKEREFVAAITYSGGSPYYADSVKGRFTISRDNAKNTVYLQMNSLKPEDTAVYYCAANPTYGSDWNAENWGQGTQVTVSSGTGGGGSGGGGSGGGGSEFEIVLTQSPATLSLSPGERATLSCRASQSVSSYLAWYQQKPGQAPRLLIYDASNRATGIPARFSGSGSGTDFTLTISSLEPEDFAVYYCQQRSNWPITFGQGTRLEIKLEDLKNVFPPEVAVFEPSEAEISHTQKATLVCLATGFYPDHVELSWWVNGKEVHSGVCTDPQPLKEQPALNDSRYCLSSRLRVSATFWQNPRNHFRCQVQFYGLSENDEWTQDRAKPVTQIVSAEAWGRADCGFTSESYQQGVLSATILYEILLGKATLYAVLVSALVLMAMVKRKDSRGRAKRSGSGATNFSLLKQAGDVEENPGPTSTMDWIWRILFLVGAATGAHSGPQVQLVESGGGLVQPGGSLRLSCAASGNINSRNCMGWFRQAPGKGREGVAAIGQVTGRTYYVDSVKGRFTISLDNSKNTLYLQMNSLRAEDTAVYYCAAAPGCLLSALRSADYRNWGQGTLVTVSSGSGGGGSGGGGSGGGGSFEEVQLVESGGGLVQPGRSLRLSCAASGFTFNDYAMHWVRQAPGKGLEWVSTISWNSGSIGYADSVKGRFTISRDNAKKSLYLQMNSLRAEDTALYYCAKDIQYGNYYYGMDVWGQGTTVTVSSTRIQNPDPAVYQLRDSKSSDKSVCLFTDFDSQTNVSQSKDSDVYITDKCVLDMRSMDFKSNSAVAWSNKSDFACANAFNNSIIPEDTFFPSPESSCDVKLVEKSFETDTNLNFQNLSVIGFRILLLKVAGFNLLMTLRLWSS

SEQ ID NO: 44194 - protein, 904 aa, synthetic construct
MALPVTALLLPLALLLHAARPEVQLVESGGGLVQAGGSLRLSCAASGRTFTMGWFRQAPGKEREFVAAISLSPTLAYYADSVKGRFTISRDNAKNTVVLQMNSLKPEDTALYYCAADRKSVMSIRPDYWGQGTQVTVSSGTGGGGSGGGGSGGGGSEFEIVLTQSPATLSLSPGERATLSCRASQSVSSYLAWYQQKPGQAPRLLIYDASNRATGIPARFSGSGSGTDFTLTISSLEPEDFAVYYCQQRSNWPITFGQGTRLEIKLEDLKNVFPPEVAVFEPSEAEISHTQKATLVCLATGFYPDHVELSWWVNGKEVHSGVCTDPQPLKEQPALNDSRYCLSSRLRVSATFWQNPRNHFRCQVQFYGLSENDEWTQDRAKPVTQIVSAEAWGRADCGFTSESYQQGVLSATILYEILLGKATLYAVLVSALVLMAMVKRKDSRGRAKRSGSGATNFSLLKQAGDVEENPGPTSTMDWIWRILFLVGAATGAHSGPQVQLVESGGGLVQPGGSLRLSCAASGNINSRNCMGWFRQAPGKGREGVAAIGQVTGRTYYVDSVKGRFTISLDNSKNTLYLQMNSLRAEDTAVYYCAAAPGCLLSALRSADYRNWGQGTLVTVSSGSGGGGSGGGGSGGGGSFEEVQLVESGGGLVQPGRSLRLSCAASGFTFNDYAMHWVRQAPGKGLEWVSTISWNSGSIGYADSVKGRFTISRDNAKKSLYLQMNSLRAEDTALYYCAKDIQYGNYYYGMDVWGQGTTVTVSSTRIQNPDPAVYQLRDSKSSDKSVCLFTDFDSQTNVSQSKDSDVYITDKCVLDMRSMDFKSNSAVAWSNKSDFACANAFNNSIIPEDTFFPSPESSCDVKLVEKSFETDTNLNFQNLSVIGFRILLLKVAGFNLLMTLRLWSS

SEQ ID NO: 44195 - protein, 908 aa, synthetic construct
MALPVTALLLPLALLLHAARPQVQLQESGPGLVKPSQTLSLTCTVSGGSITTGEFYWNWFRQPPGKGLEWMGAIAASGSTTYSPSFESRTSISRDTSKNQFSLKLSSVTAADTAVYYCGRSFGVAAVTTGQNRGQGTLVTVSSGTGGGGSGGGGSGGGGSEFEIVLTQSPATLSLSPGERATLSCRASQSVSSYLAWYQQKPGQAPRLLIYDASNRATGIPARFSGSGSGTDFTLTISSLEPEDFAVYYCQQRSNWPITFGQGTRLEIKLEDLKNVFPPEVAVFEPSEAEISHTQKATLVCLATGFYPDHVELSWWVNGKEVHSGVCTDPQPLKEQPALNDSRYCLSSRLRVSATFWQNPRNHFRCQVQFYGLSENDEWTQDRAKPVTQIVSAEAWGRADCGFTSESYQQGVLSATILYEILLGKATLYAVLVSALVLMAMVKRKDSRGRAKRSGSGATNFSLLKQAGDVEENPGPTSTMDWIWRILFLVGAATGAHSGPQVQLVESGGGLVQPGGSLRLSCAASGNINSRNCMGWFRQAPGKGREGVAAIGQVTGRTYYVDSVKGRFTISLDNSKNTLYLQMNSLRAEDTAVYYCAAAPGCLLSALRSADYRNWGQGTLVTVSSGSGGGGSGGGGSGGGGSFEEVQLVESGGGLVQPGRSLRLSCAASGFTFNDYAMHWVRQAPGKGLEWVSTISWNSGSIGYADSVKGRFTISRDNAKKSLYLQMNSLRAEDTALYYCAKDIQYGNYYYGMDVWGQGTTVTVSSTRIQNPDPAVYQLRDSKSSDKSVCLFTDFDSQTNVSQSKDSDVYITDKCVLDMRSMDFKSNSAVAWSNKSDFACANAFNNSIIPEDTFFPSPESSCDVKLVEKSFETDTNLNFQNLSVIGFRILLLKVAGFNLLMTLRLWSS

SEQ ID NO: 44196 - protein, 490 aa, synthetic construct
MALPVTALLLPLALLLHAARPIQMTQSPSSLSASVGDRVTITCRSSQSIVHSVGNTFLEWYQQKPGKAPKLLIYKVSNRFSGVPSRFSGSGSGTDFTLTISSLQPEDFATYYCFQGSQFPYTFGQGTKVEIKRGGGGSGGGGSGGGGSEVQLVESGGGLVQPGGSLRLSCAASGYEFSRSWMNWVRQAPGKGLEWVGRIYPGDGDTNYSGKFKGRFTISADTSKNTAYLQMNSLRAEDTAVYYCARDGSSWDWYFDVWGQGTLVTVSSTRKIEVMYPPPYLDNEKSNGTIIHVKGKHLCPSPLFPGPSKPFWVLVVVGGVLACYSLLVTVAFIIFWVRSKRSRLLHSDYMNMTPRRPGPTRKHYQPYAPPRDFAAYRSRVKFSRSADAPAYQQGQNQLYNELNLGRREEYDVLDKRRGRDPEMGGKPRRKNPQEGLYNELQKDKMAEAYSEIGMKGERRRGKGHDGLYQGLSTATKDTYDALHMQALPPR

SEQ ID NO: 44197 - protein, 496 aa, synthetic construct
MALPVTALLLPLALLLHAARPIQMTQSPSSLSASVGDRVTITCRSSQSIVHSVGNTFLEWYQQKPGKAPKLLIYKVSNRFSGVPSRFSGSGSGTDFTLTISSLQPEDFATYYCFQGSQFPYTFGQGTKVEIKRGGGGSGGGGSGGGGSEVQLVESGGGLVQPGGSLRLSCAASGYEFSRSWMNWVRQAPGKGLEWVGRIYPGDGDTNYSGKFKGRFTISADTSKNTAYLQMNSLRAEDTAVYYCARDGSSWDWYFDVWGQGTLVTVSSTRAKPTTTPAPRPPTPAPTIASQPLSLRPEACRPAAGGAVHTRGLDFACDIYIWAPLAGTCGVLLLSLVITLYCKRGRKKLLYIFKQPFMRPVQTTQEEDGCSCRFPEEEEGGCELRVKFSRSADAPAYQQGQNQLYNELNLGRREEYDVLDKRRGRDPEMGGKPRRKNPQEGLYNELQKDKMAEAYSEIGMKGERRRGKGHDGLYQGLSTATKDTYDALHMQALPPR

SEQ ID NO: 44198 - protein, 496 aa, synthetic construct
MALPVTALLLPLALLLHAARPEVQLVESGGGLVQPGGSLRLSCAASGYEFSRSWMNWVRQAPGKGLEWVGRIYPGDGDTNYSGKFKGRFTISADTSKNTAYLQMNSLRAEDTAVYYCARDGSSWDWYFDVWGQGTLVTVSSGGGGSGGGGSGGGGSIQMTQSPSSLSASVGDRVTITCRSSQSIVHSVGNTFLEWYQQKPGKAPKLLIYKVSNRFSGVPSRFSGSGSGTDFTLTISSLQPEDFATYYCFQGSQFPYTFGQGTKVEIKRTRAKPTTTPAPRPPTPAPTIASQPLSLRPEACRPAAGGAVHTRGLDFACDIYIWAPLAGTCGVLLLSLVITLYCKRGRKKLLYIFKQPFMRPVQTTQEEDGCSCRFPEEEEGGCELRVKFSRSADAPAYQQGQNQLYNELNLGRREEYDVLDKRRGRDPEMGGKPRRKNPQEGLYNELQKDKMAEAYSEIGMKGERRRGKGHDGLYQGLSTATKDTYDALHMQALPPR

SEQ ID NO: 44199 - protein, 629 aa, synthetic construct
MALPVTALLLPLALLLHAARPIQMTQSPSSLSASVGDRVTITCRSSQSIVHSVGNTFLEWYQQKPGKAPKLLIYKVSNRFSGVPSRFSGSGSGTDFTLTISSLQPEDFATYYCFQGSQFPYTFGQGTKVEIKRLEIQNPDPAVYQLRDSKSSDKSVCLFTDFDSQTNVSQSKDSDVYITDKCVLDMRSMDFKSNSAVAWSNKSDFACANAFNNSIIPEDTFFPSSDVPCDVKLVEKSFETDTNLNFQNLSVIGFRILLLKVAGFNLLMTLRLWSSRAKRSGSGVKQTLNFDLLKLAGDVESNPGPTSMDWIWRILFLVGAATGAHSFEEVQLVESGGGLVQPGGSLRLSCAASGYEFSRSWMNWVRQAPGKGLEWVGRIYPGDGDTNYSGKFKGRFTISADTSKNTAYLQMNSLRAEDTAVYYCARDGSSWDWYFDVWGQGTLVTVSSTREDLKNVFPPEVAVFEPSKAEIAHTQKATLVCLATGFYPDHVELSWWVNGKEVHSGVCTDPQPLKEQPALNDSRYCLSSRLRVSATFWQNPRNHFRCQVQFYGLSENDEWTQDRAKPVTQIVSAEAWGRADCGITSASYHQGVLSATILYEILLGKATLYAVLVSALVLMAMVKRKDSRG

SEQ ID NO: 44200 - protein, 625 aa, synthetic construct
MALPVTALLLPLALLLHAARPIQMTQSPSSLSASVGDRVTITCRSSQSIVHSVGNTFLEWYQQKPGKAPKLLIYKVSNRFSGVPSRFSGSGSGTDFTLTISSLQPEDFATYYCFQGSQFPYTFGQGTKVEIKRLEDLKNVFPPEVAVFEPSKAEIAHTQKATLVCLATGFYPDHVELSWWVNGKEVHSGVCTDPQPLKEQPALNDSRYCLSSRLRVSATFWQNPRNHFRCQVQFYGLSENDEWTQDRAKPVTQIVSAEAWGRADCGITSASYHQGVLSATILYEILLGKATLYAVLVSALVLMAMVKRKDSRGRAKRSGSGATNFSLLKQAGDVEENPGPTSMDWIWRILFLVGAATGAHSFEEVQLVESGGGLVQPGGSLRLSCAASGYEFSRSWMNWVRQAPGKGLEWVGRIYPGDGDTNYSGKFKGRFTISADTSKNTAYLQMNSLRAEDTAVYYCARDGSSWDWYFDVWGQGTLVTVSSTRIQNPDPAVYQLRDSKSSDKSVCLFTDFDSQTNVSQSKDSDVYITDKCVLDMRSMDFKSNSAVAWSNKSDFACANAFNNSIIPEDTFFPSSDVPCDVKLVEKSFETDTNLNFQNLSVIGFRILLLKVAGFNLLMTLRLWSS

SEQ ID NO: 44201 - protein, 625 aa, synthetic construct
MALPVTALLLPLALLLHAARPIQMTQSPSSLSASVGDRVTITCRSSQSIVHSVGNTFLEWYQQKPGKAPKLLIYKVSNRFSGVPSRFSGSGSGTDFTLTISSLQPEDFATYYCFQGSQFPYTFGQGTKVEIKRLEDLKNVFPPEVAVFEPSEAEISHTQKATLVCLATGFYPDHVELSWWVNGKEVHSGVCTDPQPLKEQPALNDSRYCLSSRLRVSATFWQNPRNHFRCQVQFYGLSENDEWTQDRAKPVTQIVSAEAWGRADCGFTSESYQQGVLSATILYEILLGKATLYAVLVSALVLMAMVKRKDSRGRAKRSGSGATNFSLLKQAGDVEENPGPTSMDWIWRILFLVGAATGAHSFEEVQLVESGGGLVQPGGSLRLSCAASGYEFSRSWMNWVRQAPGKGLEWVGRIYPGDGDTNYSGKFKGRFTISADTSKNTAYLQMNSLRAEDTAVYYCARDGSSWDWYFDVWGQGTLVTVSSTRIQNPDPAVYQLRDSKSSDKSVCLFTDFDSQTNVSQSKDSDVYITDKCVLDMRSMDFKSNSAVAWSNKSDFACANAFNNSIIPEDTFFPSPESSCDVKLVEKSFETDTNLNFQNLSVIGFRILLLKVAGFNLLMTLRLWSS

SEQ ID NO: 44202 - protein, 629 aa, synthetic construct
MALPVTALLLPLALLLHAARPIQMTQSPSSLSASVGDRVTITCRSSQSIVHSVGNTFLEWYQQKPGKAPKLLIYKVSNRFSGVPSRFSGSGSGTDFTLTISSLQPEDFATYYCFQGSQFPYTFGQGTKVEIKRLEIQNPDPAVYQLRDSKSSDKSVCLFTDFDSQTNVSQSKDSDVYITDKCVLDMRSMDFKSNSAVAWSNKSDFACANAFNNSIIPEDTFFPSPESSCDVKLVEKSFETDTNLNFQNLSVIGFRILLLKVAGFNLLMTLRLWSSRAKRSGSGVKQTLNFDLLKLAGDVESNPGPTSMDWIWRILFLVGAATGAHSFEEVQLVESGGGLVQPGGSLRLSCAASGYEFSRSWMNWVRQAPGKGLEWVGRIYPGDGDTNYSGKFKGRFTISADTSKNTAYLQMNSLRAEDTAVYYCARDGSSWDWYFDVWGQGTLVTVSSTREDLKNVFPPEVAVFEPSEAEISHTQKATLVCLATGFYPDHVELSWWVNGKEVHSGVCTDPQPLKEQPALNDSRYCLSSRLRVSATFWQNPRNHFRCQVQFYGLSENDEWTQDRAKPVTQIVSAEAWGRADCGFTSESYQQGVLSATILYEILLGKATLYAVLVSALVLMAMVKRKDSRG

SEQ ID NO: 44203 - protein, 641 aa, synthetic construct
MALPVTALLLPLALLLHAARPLEEDLKNVFPPEVAVFEPSKAEIAHTQKATLVCLATGFYPDHVELSWWVNGKEVHSGVCTDPQPLKEQPALNDSRYCLSSRLRVSATFWQNPRNHFRCQVQFYGLSENDEWTQDRAKPVTQIVSAEAWGRADCGITSASYHQGVLSATILYEILLGKATLYAVLVSALVLMAMVKRKDSRGRAKRSGSGATNFSLLKQAGDVEENPGPTSMALPVTALLLPLALLLHAARPIQMTQSPSSLSASVGDRVTITCRSSQSIVHSVGNTFLEWYQQKPGKAPKLLIYKVSNRFSGVPSRFSGSGSGTDFTLTISSLQPEDFATYYCFQGSQFPYTFGQGTKVEIKRGGGGSGGGGSGGGGSEVQLVESGGGLVQPGGSLRLSCAASGYEFSRSWMNWVRQAPGKGLEWVGRIYPGDGDTNYSGKFKGRFTISADTSKNTAYLQMNSLRAEDTAVYYCARDGSSWDWYFDVWGQGTLVTVSSTRIQNPDPAVYQLRDSKSSDKSVCLFTDFDSQTNVSQSKDSDVYITDKCVLDMRSMDFKSNSAVAWSNKSDFACANAFNNSIIPEDTFFPSSDVPCDVKLVEKSFETDTNLNFQNLSVIGFRILLLKVAGFNLLMTLRLWSS

SEQ ID NO: 44204 - protein, 648 aa, synthetic construct
MALPVTALLLPLALLLHAARPLEGSGDRPDPAVYQLRDSKSSDKSVCLFTDFDSQTNVSQSKDSDVYITDKCVLDMRSMDFKSNSAVAWSNKSDFACANAFNNSIIPEDTFFPSPESSCDVKLVEKSFETDTNLNFQNLSVIGFRILLLKVAGFNLLMTLRLWSSSSRAKRSGSGVKQTLNFDLLKLAGDVESNPGPTSMALPVTALLLPLALLLHAARPIQMTQSPSSLSASVGDRVTITCRSSQSIVHSVGNTFLEWYQQKPGKAPKLLIYKVSNRFSGVPSRFSGSGSGTDFTLTISSLQPEDFATYYCFQGSQFPYTFGQGTKVEIKRGGGGSGGGGSGGGGSEVQLVESGGGLVQPGGSLRLSCAASGYEFSRSWMNWVRQAPGKGLEWVGRIYPGDGDTNYSGKFKGRFTISADTSKNTAYLQMNSLRAEDTAVYYCARDGSSWDWYFDVWGQGTLVTVSSTREDLKNVFPPEVAVFEPSEAEISHTQKATLVCLATGFYPDHVELSWWVNGKEVHSGVCTDPQPLKEQPALNDSRYCLSSRLRVSATFWQNPRNHFRCQVQFYGLSENDEWTQDRAKPVTQIVSAEAWGRADCGFTSESYQQGVLSATILYEILLGKATLYAVLVSALVLMAMVKRKDSRG

SEQ ID NO: 44205 - protein, 625 aa, synthetic construct
MALPVTALLLPLALLLHAARPIQMTQSPSSLSASVGDRVTITCRSSQSIVHSVGNTFLEWYQQKPGKAPKLLIYKVSNRFSGVPSRFSGSGSGTDFTLTISSLQPEDFATYYCFQGSQFPYTFGQGTKVEIKRLEDLKNVFPPEVAVFEPSEAEISHTQKATLVCLATGFYPDHVELSWWVNGKEVHSGVSTDPQPLKEQPALNDSRYCLSSRLRVSATFWQNPRNHFRCQVQFYGLSENDEWTQDRAKPVTQIVSAEAWGRADCGFTSESYQQGVLSATILYEILLGKATLYAVLVSALVLMAMVKRKDSRGRAKRSGSGATNFSLLKQAGDVEENPGPTSMDWIWRILFLVGAATGAHSFEEVQLVESGGGLVQPGGSLRLSCAASGYEFSRSWMNWVRQAPGKGLEWVGRIYPGDGDTNYSGKFKGRFTISADTSKNTAYLQMNSLRAEDTAVYYCARDGSSWDWYFDVWGQGTLVTVSSTRIQNPDPAVYQLRDSKSSDKSVCLFTDFDSQTNVSQSKDSDVYITDKTVLDMRSMDFKSNSAVAWSNKSDFACANAFNNSIIPEDTFFPSPESSCDVKLVEKSFETDTNLNFQNLSVIGFRILLLKVAGFNLLMTLRLWSS

SEQ ID NO: 44206 - protein, 633 aa, synthetic construct
MALPVTALLLPLALLLHAARPIQMTQSPSSLSASVGDRVTITCRSSQSIVHSVGNTFLEWYQQKPGKAPKLLIYKVSNRFSGVPSRFSGSGSGTDFTLTISSLQPEDFATYYCFQGSQFPYTFGQGTKVEIKRLEDKQLDADVSPKPTIFLPSIAETKLQKAGTYLCLLEKFFPDVIKIHWQEKKSNTILGSQEGNTMKTNDTYMKFSWLTVPEKSLDKEHRCIVRHENNKNGVDQEIIFPPIKTDVITMDPKDNCSKDANDTLLLQLTNTSAYYMYLLLLLKSVVYFAIITCCLLRRTAFCCNGEKSRAKRSGSGATNFSLLKQAGDVEENPGPTSMDWIWRILFLVGAATGAHSFEEVQLVESGGGLVQPGGSLRLSCAASGYEFSRSWMNWVRQAPGKGLEWVGRIYPGDGDTNYSGKFKGRFTISADTSKNTAYLQMNSLRAEDTAVYYCARDGSSWDWYFDVWGQGTLVTVSSTRSQPHTKPSVFVMKNGTNVACLVKEFYPKDIRINLVSSKKITEFDPAIVISPSGKYNAVKLGKYEDSNSVTCSVQHDNKTVHSTDFEVKTDSTDHVKPKETENTKQPSKSCHKPKAIVHTEKVNMMSLTVLGLRMLFAKTVAVNFLLTAKLFFL

SEQ ID NO: 44207 - protein, 633 aa, synthetic construct
MALPVTALLLPLALLLHAARPIQMTQSPSSLSASVGDRVTITCRSSQSIVHSVGNTFLEWYQQKPGKAPKLLIYKVSNRFSGVPSRFSGSGSGTDFTLTISSLQPEDFATYYCFQGSQFPYTFGQGTKVEIKRLESQPHTKPSVFVMKNGTNVACLVKEFYPKDIRINLVSSKKITEFDPAIVISPSGKYNAVKLGKYEDSNSVTCSVQHDNKTVHSTDFEVKTDSTDHVKPKETENTKQPSKSCHKPKAIVHTEKVNMMSLTVLGLRMLFAKTVAVNFLLTAKLFFLRAKRSGSGATNFSLLKQAGDVEENPGPTSMDWIWRILFLVGAATGAHSFEEVQLVESGGGLVQPGGSLRLSCAASGYEFSRSWMNWVRQAPGKGLEWVGRIYPGDGDTNYSGKFKGRFTISADTSKNTAYLQMNSLRAEDTAVYYCARDGSSWDWYFDVWGQGTLVTVSSTRDKQLDADVSPKPTIFLPSIAETKLQKAGTYLCLLEKFFPDVIKIHWQEKKSNTILGSQEGNTMKTNDTYMKFSWLTVPEKSLDKEHRCIVRHENNKNGVDQEIIFPPIKTDVITMDPKDNCSKDANDTLLLQLTNTSAYYMYLLLLLKSVVYFAIITCCLLRRTAFCCNGEKS

SEQ ID NO: 44208 - protein, 648 aa, synthetic construct
MALPVTALLLPLALLLHAARPLEDKQLDADVSPKPTIFLPSIAETKLQKAGTYLCLLEKFFPDVIKIHWQEKKSNTILGSQEGNTMKTNDTYMKFSWLTVPEKSLDKEHRCIVRHENNKNGVDQEIIFPPIKTDVITMDPKDNCSKDANDTLLLQLTNTSAYYMYLLLLLKSVVYFAIITCCLLRRTAFCCNGEKSRAKRSGSGATNFSLLKQAGDVEENPGPTSMALPVTALLLPLALLLHAARPIQMTQSPSSLSASVGDRVTITCRSSQSIVHSVGNTFLEWYQQKPGKAPKLLIYKVSNRFSGVPSRFSGSGSGTDFTLTISSLQPEDFATYYCFQGSQFPYTFGQGTKVEIKRGGGGSGGGGSGGGGSEVQLVESGGGLVQPGGSLRLSCAASGYEFSRSWMNWVRQAPGKGLEWVGRIYPGDGDTNYSGKFKGRFTISADTSKNTAYLQMNSLRAEDTAVYYCARDGSSWDWYFDVWGQGTLVTVSSTRSQPHTKPSVFVMKNGTNVACLVKEFYPKDIRINLVSSKKITEFDPAIVISPSGKYNAVKLGKYEDSNSVTCSVQHDNKTVHSTDFEVKTDSTDHVKPKETENTKQPSKSCHKPKAIVHTEKVNMMSLTVLGLRMLFAKTVAVNFLLTAKLFFL

SEQ ID NO: 44209 - protein, 802 aa, synthetic construct
MALPVTALLLPLALLLHAARPIQMTQSPSSLSASVGDRVTITCRSSQSIVHSVGNTFLEWYQQKPGKAPKLLIYKVSNRFSGVPSRFSGSGSGTDFTLTISSLQPEDFATYYCFQGSQFPYTFGQGTKVEIKRGQPKANPTVTLFPPSSEELQANKATLVCLISDFYPGAVTVAWKADGSPVKAGVETTKPSKQSNNKYAASSYLSLTPEQWKSHRSYSCQVTHEGSTVEKTVAPTECSGSQSFGLLDPKLCYLLDGILFIYGVILTALFLRVKFSRSADAPAYQQGQNQLYNELNLGRREEYDVLDKRRGRDPEMGGKPQRRKNPQEGLYNELQKDKMAEAYSEIGMKGERRRGKGHDGLYQGLSTATKDTYDALHMQALPPRRAKRSGSGATNFSLLKQAGDVEENPGPTSMDWIWRILFLVGAATGAHSFEEVQLVESGGGLVQPGGSLRLSCAASGYEFSRSWMNWVRQAPGKGLEWVGRIYPGDGDTNYSGKFKGRFTISADTSKNTAYLQMNSLRAEDTAVYYCARDGSSWDWYFDVWGQGTLVTVSSASTKGPSVFPLAPSSKSTSGGTAALGCLVKDYFPEPVTVSWNSGALTSGVHTFPAVLQSSGLYSLSSVVTVPSSSLGTQTYICNVNHKPSNTKVDKRVEPKSCGTQSFGLLDPKLCYLLDGILFIYGVILTALFLRVKFSRSADAPAYQQGQNQLYNELNLGRREEYDVLDKRRGRDPEMGGKPQRRKNPQEGLYNELQKDKMAEAYSEIGMKGERRRGKGHDGLYQGLSTATKDTYDALHMQALPPR

SEQ ID NO: 44210 - protein, 821 aa, synthetic construct
MALPVTALLLPLALLLHAARPIQMTQSPSSLSASVGDRVTITCRSSQSIVHSVGNTFLEWYQQKPGKAPKLLIYKVSNRFSGVPSRFSGSGSGTDFTLTISSLQPEDFATYYCFQGSQFPYTFGQGTKVEIKRLEDLKNVFPPEVAVFEPSEAEISHTQKATLVCLATGFYPDHVELSWWVNGKEVHSGVSTDPQPLKEQPALNDSRYCLSSRLRVSATFWQNPRNHFRCQVQFYGLSENDEWTQDRAKPVTQIVSAEAWGRADCGSQSFGLLDPKLCYLLDGILFIYGVILTALFLRVKFSRSADAPAYQQGQNQLYNELNLGRREEYDVLDKRRGRDPEMGGKPQRRKNPQEGLYNELQKDKMAEAYSEIGMKGERRRGKGHDGLYQGLSTATKDTYDALHMQALPPRRAKRSGSGATNFSLLKQAGDVEENPGPTSMDWIWRILFLVGAATGAHSFEEVQLVESGGGLVQPGGSLRLSCAASGYEFSRSWMNWVRQAPGKGLEWVGRIYPGDGDTNYSGKFKGRFTISADTSKNTAYLQMNSLRAEDTAVYYCARDGSSWDWYFDVWGQGTLVTVSSTRIQNPDPAVYQLRDSKSSDKSVCLFTDFDSQTNVSQSKDSDVYITDKTVLDMRSMDFKSNSAVAWSNKSDFACANAFNNSIIPEDTFFPSPESSCGTQSFGLLDPKLCYLLDGILFIYGVILTALFLRVKFSRSADAPAYQQGQNQLYNELNLGRREEYDVLDKRRGRDPEMGGKPQRRKNPQEGLYNELQKDKMAEAYSEIGMKGERRRGKGHDGLYQGLSTATKDTYDALHMQALPPR

SEQ ID NO: 44211 - protein, 863 aa, synthetic construct
MALPVTALLLPLALLLHAARPIQMTQSPSSLSASVGDRVTITCRSSQSIVHSVGNTFLEWYQQKPGKAPKLLIYKVSNRFSGVPSRFSGSGSGTDFTLTISSLQPEDFATYYCFQGSQFPYTFGQGTKVEIKRLEEDLKNVFPPEVAVFEPSEAEISHTQKATLVCLATGFYPDHVELSWWVNGKEVHSGVSTDPQPLKEQPALNDSRYCLSSRLRVSATFWQNPRNHFRCQVQFYGLSENDEWTQDRAKPVTQIVSAEAWGRADCGSQSFGLLDPKLCYLLDGILFIYGVILTALFLRVKFSRSADAPAYQQGQNQLYNELNLGRREEYDVLDKRRGRDPEMGGKPQRRKNPQEGLYNELQKDKMAEAYSEIGMKGERRRGKGHDGLYQGLSTATKDTYDALHMQALPPRRAKRSGSGATNFSLLKQAGDVEENPGPTSMDWIWRILFLVGAATGAHSFEEVQLVESGGGLVQPGGSLRLSCAASGYEFSRSWMNWVRQAPGKGLEWVGRIYPGDGDTNYSGKFKGRFTISADTSKNTAYLQMNSLRAEDTAVYYCARDGSSWDWYFDVWGQGTLVTVSSTRIQNPDPAVYQLRDSKSSDKSVCLFTDFDSQTNVSQSKDSDVYITDKTVLDMRSMDFKSNSAVAWSNKSDFACANAFNNSIIPEDTFFPSPESSCGTQSFGLLDPKLCYLLDGILFIYGVILTALFLRSKRSRLLHSDYMNMTPRRPGPTRKHYQPYAPPRDFAAYRSRVKFSRSADAPAYQQGQNQLYNELNLGRREEYDVLDKRRGRDPEMGGKPQRRKNPQEGLYNELQKDKMAEAYSEIGMKGERRRGKGHDGLYQGLSTATKDTYDALHMQALPPR

SEQ ID NO: 44212 - protein, 906 aa, synthetic construct
MALPVTALLLPLALLLHAARPIQMTQSPSSLSASVGDRVTITCRSSQSIVHSVGNTFLEWYQQKPGKAPKLLIYKVSNRFSGVPSRFSGSGSGTDFTLTISSLQPEDFATYYCFQGSQFPYTFGQGTKVEIKRLEEDLKNVFPPEVAVFEPSEAEISHTQKATLVCLATGFYPDHVELSWWVNGKEVHSGVSTDPQPLKEQPALNDSRYCLSSRLRVSATFWQNPRNHFRCQVQFYGLSENDEWTQDRAKPVTQIVSAEAWGRADCGSQSFGLLDPKLCYLLDGILFIYGVILTALFLKRGRKKLLYIFKQPFMRPVQTTQEEDGCSCRFPEEEEGGCELRVKFSRSADAPAYQQGQNQLYNELNLGRREEYDVLDKRRGRDPEMGGKPQRRKNPQEGLYNELQKDKMAEAYSEIGMKGERRRGKGHDGLYQGLSTATKDTYDALHMQALPPRRAKRSGSGATNFSLLKQAGDVEENPGPTSMDWIWRILFLVGAATGAHSFEEVQLVESGGGLVQPGGSLRLSCAASGYEFSRSWMNWVRQAPGKGLEWVGRIYPGDGDTNYSGKFKGRFTISADTSKNTAYLQMNSLRAEDTAVYYCARDGSSWDWYFDVWGQGTLVTVSSTRIQNPDPAVYQLRDSKSSDKSVCLFTDFDSQTNVSQSKDSDVYITDKTVLDMRSMDFKSNSAVAWSNKSDFACANAFNNSIIPEDTFFPSPESSCGTQSFGLLDPKLCYLLDGILFIYGVILTALFLKRGRKKLLYIFKQPFMRPVQTTQEEDGCSCRFPEEEEGGCELRVKFSRSADAPAYQQGQNQLYNELNLGRREEYDVLDKRRGRDPEMGGKPQRRKNPQEGLYNELQKDKMAEAYSEIGMKGERRRGKGHDGLYQGLSTATKDTYDALHMQALPPR

SEQ ID NO: 44213 - protein, 593 aa, synthetic construct
MALPVTALLLPLALLLHAARPIQMTQSPSSLSASVGDRVTITCRSSQSIVHSVGNTFLEWYQQKPGKAPKLLIYKVSNRFSGVPSRFSGSGSGTDFTLTISSLQPEDFATYYCFQGSQFPYTFGQGTKVEIKRLEQSFGLLDPKLCYLLDGILFIYGVILTALFLRVKFSRSADAPAYQQGQNQLYNELNLGRREEYDVLDKRRGRDPEMGGKPQRRKNPQEGLYNELQKDKMAEAYSEIGMKGERRRGKGHDGLYQGLSTATKDTYDALHMQALPPRRAKRSGSGATNFSLLKQAGDVEENPGPTSMDWIWRILFLVGAATGAHSFEEVQLVESGGGLVQPGGSLRLSCAASGYEFSRSWMNWVRQAPGKGLEWVGRIYPGDGDTNYSGKFKGRFTISADTSKNTAYLQMNSLRAEDTAVYYCARDGSSWDWYFDVWGQGTLVTVSSTRQSFGLLDPKLCYLLDGILFIYGVILTALFLRVKFSRSADAPAYQQGQNQLYNELNLGRREEYDVLDKRRGRDPEMGGKPQRRKNPQEGLYNELQKDKMAEAYSEIGMKGERRRGKGHDGLYQGLSTATKDTYDALHMQALPPR

SEQ ID NO: 44214 - protein, 651 aa, synthetic construct
MALPVTALLLPLALLLHAARPIQMTQSPSSLSASVGDRVTITCRSSQSIVHSVGNTFLEWYQQKPGKAPKLLIYKVSNRFSGVPSRFSGSGSGTDFTLTISSLQPEDFATYYCFQGSQFPYTFGQGTKVEIKRLEGQPKANPTVTLFPPSSEELQANKATLVCLISDFYPGAVTVAWKADGSPVKAGVETTKPSKQSNNKYAASSYLSLTPEQWKSHRSYSCQVTHEGSTVEKTVAPTECSPIKTDVITMDPKDNCSKDANDTLLLQLTNTSAYYMYLLLLLKSVVYFAIITCCLLRRTAFCCNGEKSRAKRSGSGATNFSLLKQAGDVEENPGPTSMDWIWRILFLVGAATGAHSFEEVQLVESGGGLVQPGGSLRLSCAASGYEFSRSWMNWVRQAPGKGLEWVGRIYPGDGDTNYSGKFKGRFTISADTSKNTAYLQMNSLRAEDTAVYYCARDGSSWDWYFDVWGQGTLVTVSSTRASTKGPSVFPLAPSSKSTSGGTAALGCLVKDYFPEPVTVSWNSGALTSGVHTFPAVLQSSGLYSLSSVVTVPSSSLGTQTYICNVNHKPSNTKVDKRVEPKSCEVKTDSTDHVKPKETENTKQPSKSCHKPKAIVHTEKVNMMSLTVLGLRMLFAKTVAVNFLLTAKLFFL

SEQ ID NO: 44215 - protein, 629 aa, synthetic construct
MALPVTALLLPLALLLHAARPIQMTQSPSSLSASVGDRVTITCRSSQSIVHSVGNTFLEWYQQKPGKAPKLLIYKVSNRFSGVPSRFSGSGSGTDFTLTISSLQPEDFATYYCFQGSQFPYTFGQGTKVEIKRLEGQPKANPTVTLFPPSSEELQANKATLVCLISDFYPGAVTVAWKADGSPVKAGVETTKPSKQSNNKYAASSYLSLTPEQWKSHRSYSCQVTHEGSTVEKTVAPTECSGRADCGITSASYHQGVLSATILYEILLGKATLYAVLVSALVLMAMVKRKDSRGRAKRSGSGATNFSLLKQAGDVEENPGPTSMDWIWRILFLVGAATGAHSFEEVQLVESGGGLVQPGGSLRLSCAASGYEFSRSWMNWVRQAPGKGLEWVGRIYPGDGDTNYSGKFKGRFTISADTSKNTAYLQMNSLRAEDTAVYYCARDGSSWDWYFDVWGQGTLVTVSSTRASTKGPSVFPLAPSSKSTSGGTAALGCLVKDYFPEPVTVSWNSGALTSGVHTFPAVLQSSGLYSLSSVVTVPSSSLGTQTYICNVNHKPSNTKVDKRVEPKSCIPEDTFFPSSDVPCDVKLVEKSFETDTNLNFQNLSVIGFRILLLKVAGFNLLMTLRLWSS

SEQ ID NO: 44216 - protein, 629 aa, synthetic construct
MALPVTALLLPLALLLHAARPIQMTQSPSSLSASVGDRVTITCRSSQSIVHSVGNTFLEWYQQKPGKAPKLLIYKVSNRFSGVPSRFSGSGSGTDFTLTISSLQPEDFATYYCFQGSQFPYTFGQGTKVEIKRLEGQPKANPTVTLFPPSSEELQANKATLVCLISDFYPGAVTVAWKADGSPVKAGVETTKPSKQSNNKYAASSYLSLTPEQWKSHRSYSCQVTHEGSTVEKTVAPTECSGRADCGFTSESYQQGVLSATILYEILLGKATLYAVLVSALVLMAMVKRKDSRGRAKRSGSGATNFSLLKQAGDVEENPGPTSMDWIWRILFLVGAATGAHSFEEVQLVESGGGLVQPGGSLRLSCAASGYEFSRSWMNWVRQAPGKGLEWVGRIYPGDGDTNYSGKFKGRFTISADTSKNTAYLQMNSLRAEDTAVYYCARDGSSWDWYFDVWGQGTLVTVSSTRASTKGPSVFPLAPSSKSTSGGTAALGCLVKDYFPEPVTVSWNSGALTSGVHTFPAVLQSSGLYSLSSVVTVPSSSLGTQTYICNVNHKPSNTKVDKRVEPKSCIPEDTFFPSPESSCDVKLVEKSFETDTNLNFQNLSVIGFRILLLKVAGFNLLMTLRLWSS

SEQ ID NO: 44217 - protein, 455 aa, synthetic construct
MALPVTALLLPLALLLHAARPIQMTQSPSSLSASVGDRVTITCRSSQSIVHSVGNTFLEWYQQKPGKAPKLLIYKVSNRFSGVPSRFSGSGSGTDFTLTISSLQPEDFATYYCFQGSQFPYTFGQGTKVEIKRGGGGSGGGGSGGGGSEVQLVESGGGLVQPGGSLRLSCAASGYEFSRSWMNWVRQAPGKGLEWVGRIYPGDGDTNYSGKFKGRFTISADTSKNTAYLQMNSLRAEDTAVYYCARDGSSWDWYFDVWGQGTLVTVSSTRDGNEEMGGITQTPYKVSISGTTVILTCPQYPGSEILWQHNDKNIGGDEDDKNIGSDEDHLSLKEFSELEQSGYYVCYPRGSKPEDANFYLYLRARVCENCMEMDVMSVATIVIVDICITGGLLLLVYYWSKNRKAKAKPVTRGAGAGGRQRGQNKERPPPVPNPDYEPIRKGQRDLYSGLNQRRI

SEQ ID NO: 44218 - protein, 420 aa, synthetic construct
MALPVTALLLPLALLLHAARPIQMTQSPSSLSASVGDRVTITCRSSQSIVHSVGNTFLEWYQQKPGKAPKLLIYKVSNRFSGVPSRFSGSGSGTDFTLTISSLQPEDFATYYCFQGSQFPYTFGQGTKVEIKRGGGGSGGGGSGGGGSEVQLVESGGGLVQPGGSLRLSCAASGYEFSRSWMNWVRQAPGKGLEWVGRIYPGDGDTNYSGKFKGRFTISADTSKNTAYLQMNSLRAEDTAVYYCARDGSSWDWYFDVWGQGTLVTVSSTRFKIPIEELEDRVFVNCNTSITWVEGTVGTLLSDITRLDLGKRILDPRGIYRCNGTDIYKDKESTVQVHYRMCQSCVELDPATVAGIIVTDVIATLLLALGVFCFAGHETGRLSGAADTQALLRNDQVYQPLRDRDDAQYSHLGGNWARNK

SEQ ID NO: 44219 - protein, 430 aa, synthetic construct
MALPVTALLLPLALLLHAARPIQMTQSPSSLSASVGDRVTITCRSSQSIVHSVGNTFLEWYQQKPGKAPKLLIYKVSNRFSGVPSRFSGSGSGTDFTLTISSLQPEDFATYYCFQGSQFPYTFGQGTKVEIKRGGGGSGGGGSGGGGSEVQLVESGGGLVQPGGSLRLSCAASGYEFSRSWMNWVRQAPGKGLEWVGRIYPGDGDTNYSGKFKGRFTISADTSKNTAYLQMNSLRAEDTAVYYCARDGSSWDWYFDVWGQGTLVTVSSTRQSIKGNHLVKVYDYQEDGSVLLTCDAEAKNITWFKDGKMIGFLTEDKKKWNLGSNAKDPRGMYQCKGSQNKSKPLQVYYRMCQNCIELNAATISGFLFAEIVSIFVLAVGVYFIAGQDGVRQSRASDKQTLLPNDQLYQPLKDREDDQYSHLQGNQLRRN

SEQ ID NO: 44220 - protein, 413 aa, synthetic construct
MALPVTALLLPLALLLHAARPIQMTQSPSSLSASVGDRVTITCRSSQSIVHSVGNTFLEWYQQKPGKAPKLLIYKVSNRFSGVPSRFSGSGSGTDFTLTISSLQPEDFATYYCFQGSQFPYTFGQGTKVEIKRGGGGSGGGGSGGGGSEVQLVESGGGLVQPGGSLRLSCAASGYEFSRSWMNWVRQAPGKGLEWVGRIYPGDGDTNYSGKFKGRFTISADTSKNTAYLQMNSLRAEDTAVYYCARDGSSWDWYFDVWGQGTLVTVSSTRQSFGLLDPKLCYLLDGILFIYGVILTALFLRVKFSRSADAPAYQQGQNQLYNELNLGRREEYDVLDKRRGRDPEMGGKPQRRKNPQEGLYNELQKDKMAEAYSEIGMKGERRRGKGHDGLYQGLSTATKDTYDALHMQALPPR

SEQ ID NO: 44221 - protein, 508 aa, synthetic construct
MALPVTALLLPLALLLHAARPIQMTQSPSSLSASVGDRVTITCRSSQSIVHSVGNTFLEWYQQKPGKAPKLLIYKVSNRFSGVPSRFSGSGSGTDFTLTISSLQPEDFATYYCFQGSQFPYTFGQGTKVEIKRGGGGSGGGGSGGGGSEVQLVESGGGLVQPGGSLRLSCAASGYEFSRSWMNWVRQAPGKGLEWVGRIYPGDGDTNYSGKFKGRFTISADTSKNTAYLQMNSLRAEDTAVYYCARDGSSWDWYFDVWGQGTLVTVSSTRGMRTEDLPKAVVFLEPQWYRVLEKDSVTLKCQGAYSPEDNSTQWFHNESLISSQASSYFIDAATVDDSGEYRCQTNLSTLSDPVQLEVHIGWLLLQAPRWVFKEEDPIHLRCHSWKNTALHKVTYLQNGKGRKYFHHNSDFYIPKATLKDSGSYFCRGLVGSKNVSSETVNITITQGLAVPTISSFFPPGYQVSFCLVMVLLFAVDTGLYFSVKTNIRSSTRDWKDHKFKWRKDPQDK

SEQ ID NO: 44222 - protein, 483 aa, synthetic construct
MALPVTALLLPLALLLHAARPIQMTQSPSSLSASVGDRVTITCRSSQSIVHSVGNTFLEWYQQKPGKAPKLLIYKVSNRFSGVPSRFSGSGSGTDFTLTISSLQPEDFATYYCFQGSQFPYTFGQGTKVEIKRGGGGSGGGGSGGGGSEVQLVESGGGLVQPGGSLRLSCAASGYEFSRSWMNWVRQAPGKGLEWVGRIYPGDGDTNYSGKFKGRFTISADTSKNTAYLQMNSLRAEDTAVYYCARDGSSWDWYFDVWGQGTLVTVSSTRGMRTEDLPKAVVFLEPQWYRVLEKDSVTLKCQGAYSPEDNSTQWFHNESLISSQASSYFIDAATVDDSGEYRCQTNLSTLSDPVQLEVHIGWLLLQAPRWVFKEEDPIHLRCHSWKNTALHKVTYLQNGKGRKYFHHNSDFYIPKATLKDSGSYFCRGLVGSKNVSSETVNITITQGLAVPTISSFFPPGYQVSFCLVMVLLFAVDTGLYFSV

SEQ ID NO: 44223 - protein, 484 aa, synthetic construct
MALPVTALLLPLALLLHAARPIQMTQSPSSLSASVGDRVTITCRSSQSIVHSVGNTFLEWYQQKPGKAPKLLIYKVSNRFSGVPSRFSGSGSGTDFTLTISSLQPEDFATYYCFQGSQFPYTFGQGTKVEIKRGGGGSGGGGSGGGGSEVQLVESGGGLVQPGGSLRLSCAASGYEFSRSWMNWVRQAPGKGLEWVGRIYPGDGDTNYSGKFKGRFTISADTSKNTAYLQMNSLRAEDTAVYYCARDGSSWDWYFDVWGQGTLVTVSSTRGMRTEDLPKAVVFLEPQWYRVLEKDSVTLKCQGAYSPEDNSTQWFHNESLISSQASSYFIDAATVDDSGEYRCQTNLSTLSDPVQLEVHIGWLLLQAPRWVFKEEDPIHLRCHSWKNTALHKVTYLQNGKGRKYFHHNSDFYIPKATLKDSGSYFCRGLVGSKNVSSETVNITITQGLAVPTISSFFPPGYQVSFCLVMVLLFAVDTGLYFSVK

SEQ ID NO: 44224 - protein, 728 aa, synthetic construct
MALPVTALLLPLALLLHAARPIQMTQSPSSLSASVGDRVTITCRSSQSIVHSVGNTFLEWYQQKPGKAPKLLIYKVSNRFSGVPSRFSGSGSGTDFTLTISSLQPEDFATYYCFQGSQFPYTFGQGTKVEIKRLEGQPKANPTVTLFPPSSEELQANKATLVCLISDFYPGAVTVAWKADGSPVKAGVETTKPSKQSNNKYAASSYLSLTPEQWKSHRSYSCQVTHEGSTVEKTVAPTECSGSQSFGLLDPKLCYLLDGILFIYGVILTALFLRVKFSRSADAPAYQQGQNQLYNELNLGRREEYDVLDKRRGRDPEMGGKPQRRKNPQEGLYNELQKDKMAEAYSEIGMKGERRRGKGHDGLYQGLSTATKDTYDALHMQALPPRRAKRSGSGATNFSLLKQAGDVEENPGPTSMDWIWRILFLVGAATGAHSFEEVQLVESGGGLVQPGGSLRLSCAASGYEFSRSWMNWVRQAPGKGLEWVGRIYPGDGDTNYSGKFKGRFTISADTSKNTAYLQMNSLRAEDTAVYYCARDGSSWDWYFDVWGQGTLVTVSSTRASTKGPSVFPLAPSSKSTSGGTAALGCLVKDYFPEPVTVSWNSGALTSGVHTFPAVLQSSGLYSLSSVVTVPSSSLGTQTYICNVNHKPSNTKVDKRVEPKSCGTITQGLAVSTISSFFPPGYQVSFCLVMVLLFAVDTGLYFSVKTNIRSSTRDWKDHKFKWRKDPQDK

SEQ ID NO: 44225 - protein, 743 aa, synthetic construct
MALPVTALLLPLALLLHAARPIQMTQSPSSLSASVGDRVTITCRSSQSIVHSVGNTFLEWYQQKPGKAPKLLIYKVSNRFSGVPSRFSGSGSGTDFTLTISSLQPEDFATYYCFQGSQFPYTFGQGTKVEIKRLEDLKNVFPPEVAVFEPSEAEISHTQKATLVCLATGFYPDHVELSWWVNGKEVHSGVSTDPQPLKEQPALNDSRYCLSSRLRVSATFWQNPRNHFRCQVQFYGLSENDEWTQDRAKPVTQIVSAEAWGRADCGSQSFGLLDPKLCYLLDGILFIYGVILTALFLRVKFSRSADAPAYQQGQNQLYNELNLGRREEYDVLDKRRGRDPEMGGKPQRRKNPQEGLYNELQKDKMAEAYSEIGMKGERRRGKGHDGLYQGLSTATKDTYDALHMQALPPRRAKRSGSGATNFSLLKQAGDVEENPGPTSMDWIWRILFLVGAATGAHSFEEVQLVESGGGLVQPGGSLRLSCAASGYEFSRSWMNWVRQAPGKGLEWVGRIYPGDGDTNYSGKFKGRFTISADTSKNTAYLQMNSLRAEDTAVYYCARDGSSWDWYFDVWGQGTLVTVSSTRIQNPDPAVYQLRDSKSSDKSVCLFTDFDSQTNVSQSKDSDVYITDKTVLDMRSMDFKSNSAVAWSNKSDFACANAFNNSIIPEDTFFPSPESSCGTITQGLAVSTISSFFPPGYQVSFCLVMVLLFAVDTGLYFSVKTNIRSSTRDWKDHKFKWRKDPQDK

SEQ ID NO: 44226 - protein, 718 aa, synthetic construct
MALPVTALLLPLALLLHAARPIQMTQSPSSLSASVGDRVTITCRSSQSIVHSVGNTFLEWYQQKPGKAPKLLIYKVSNRFSGVPSRFSGSGSGTDFTLTISSLQPEDFATYYCFQGSQFPYTFGQGTKVEIKRLEDLKNVFPPEVAVFEPSEAEISHTQKATLVCLATGFYPDHVELSWWVNGKEVHSGVSTDPQPLKEQPALNDSRYCLSSRLRVSATFWQNPRNHFRCQVQFYGLSENDEWTQDRAKPVTQIVSAEAWGRADCGSQSFGLLDPKLCYLLDGILFIYGVILTALFLRVKFSRSADAPAYQQGQNQLYNELNLGRREEYDVLDKRRGRDPEMGGKPQRRKNPQEGLYNELQKDKMAEAYSEIGMKGERRRGKGHDGLYQGLSTATKDTYDALHMQALPPRRAKRSGSGATNFSLLKQAGDVEENPGPTSMDWIWRILFLVGAATGAHSFEEVQLVESGGGLVQPGGSLRLSCAASGYEFSRSWMNWVRQAPGKGLEWVGRIYPGDGDTNYSGKFKGRFTISADTSKNTAYLQMNSLRAEDTAVYYCARDGSSWDWYFDVWGQGTLVTVSSTRIQNPDPAVYQLRDSKSSDKSVCLFTDFDSQTNVSQSKDSDVYITDKTVLDMRSMDFKSNSAVAWSNKSDFACANAFNNSIIPEDTFFPSPESSCGTITQGLAVSTISSFFPPGYQVSFCLVMVLLFAVDTGLYFSV

SEQ ID NO: 44227 - protein, 719 aa, synthetic construct
MALPVTALLLPLALLLHAARPIQMTQSPSSLSASVGDRVTITCRSSQSIVHSVGNTFLEWYQQKPGKAPKLLIYKVSNRFSGVPSRFSGSGSGTDFTLTISSLQPEDFATYYCFQGSQFPYTFGQGTKVEIKRLEDLKNVFPPEVAVFEPSEAEISHTQKATLVCLATGFYPDHVELSWWVNGKEVHSGVSTDPQPLKEQPALNDSRYCLSSRLRVSATFWQNPRNHFRCQVQFYGLSENDEWTQDRAKPVTQIVSAEAWGRADCGSQSFGLLDPKLCYLLDGILFIYGVILTALFLRVKFSRSADAPAYQQGQNQLYNELNLGRREEYDVLDKRRGRDPEMGGKPQRRKNPQEGLYNELQKDKMAEAYSEIGMKGERRRGKGHDGLYQGLSTATKDTYDALHMQALPPRRAKRSGSGATNFSLLKQAGDVEENPGPTSMDWIWRILFLVGAATGAHSFEEVQLVESGGGLVQPGGSLRLSCAASGYEFSRSWMNWVRQAPGKGLEWVGRIYPGDGDTNYSGKFKGRFTISADTSKNTAYLQMNSLRAEDTAVYYCARDGSSWDWYFDVWGQGTLVTVSSTRIQNPDPAVYQLRDSKSSDKSVCLFTDFDSQTNVSQSKDSDVYITDKTVLDMRSMDFKSNSAVAWSNKSDFACANAFNNSIIPEDTFFPSPESSCGTITQGLAVSTISSFFPPGYQVSFCLVMVLLFAVDTGLYFSVK

SEQ ID NO: 44228 - protein, 720 aa, synthetic construct
MALPVTALLLPLALLLHAARPIQMTQSPSSLSASVGDRVTITCRSSQSIVHSVGNTFLEWYQQKPGKAPKLLIYKVSNRFSGVPSRFSGSGSGTDFTLTISSLQPEDFATYYCFQGSQFPYTFGQGTKVEIKRLEDLKNVFPPEVAVFEPSEAEISHTQKATLVCLATGFYPDHVELSWWVNGKEVHSGVSTDPQPLKEQPALNDSRYCLSSRLRVSATFWQNPRNHFRCQVQFYGLSENDEWTQDRAKPVTQIVSAEAWGRADCGSQSFGLLDPKLCYLLDGILFIYGVILTALFLRVKFSRSADAPAYQQGQNQLYNELNLGRREEYDVLDKRRGRDPEMGGKPQRRKNPQEGLYNELQKDKMAEAYSEIGMKGERRRGKGHDGLYQGLSTATKDTYDALHMQALPPRRAKRSGSGATNFSLLKQAGDVEENPGPTSMDWIWRILFLVGAATGAHSFEEVQLVESGGGLVQPGGSLRLSCAASGYEFSRSWMNWVRQAPGKGLEWVGRIYPGDGDTNYSGKFKGRFTISADTSKNTAYLQMNSLRAEDTAVYYCARDGSSWDWYFDVWGQGTLVTVSSTRIQNPDPAVYQLRDSKSSDKSVCLFTDFDSQTNVSQSKDSDVYITDKTVLDMRSMDFKSNSAVAWSNKSDFACANAFNNSIIPEDTFFPSPESSCGTITQGLAVSTISSFFPPGYQVSFCLVMVLLFAVDTGLYFSVKT

SEQ ID NO: 44229 - protein, 656 aa, synthetic construct
MALPVTALLLPLALLLHAARPIQMTQSPSSLSASVGDRVTITCRSSQSIVHSVGNTFLEWYQQKPGKAPKLLIYKVSNRFSGVPSRFSGSGSGTDFTLTISSLQPEDFATYYCFQGSQFPYTFGQGTKVEIKRLEGQPKANPTVTLFPPSSEELQANKATLVCLISDFYPGAVTVAWKADGSPVKAGVETTKPSKQSNNKYAASSYLSLTPEQWKSHRSYSCQVTHEGSTVEKTVAPTECSGSLGEPQLCYILDAILFLYGIVLTLLYCRLKIQVRKAAITSYEKSDGVYTGLSTRNQETYETLKHEKPPQRAKRSGSGATNFSLLKQAGDVEENPGPTSMDWIWRILFLVGAATGAHSFEEVQLVESGGGLVQPGGSLRLSCAASGYEFSRSWMNWVRQAPGKGLEWVGRIYPGDGDTNYSGKFKGRFTISADTSKNTAYLQMNSLRAEDTAVYYCARDGSSWDWYFDVWGQGTLVTVSSTRASTKGPSVFPLAPSSKSTSGGTAALGCLVKDYFPEPVTVSWNSGALTSGVHTFPAVLQSSGLYSLSSVVTVPSSSLGTQTYICNVNHKPSNTKVDKRVEPKSCGTLGEPQLCYILDAILFLYGIVLTLLYCRLKIQVRKAAITSYEKSDGVYTGLSTRNQETYETLKHEKPPQ

SEQ ID NO: 44230 - protein, 626 aa, synthetic construct
MALPVTALLLPLALLLHAARPIQMTQSPSSLSASVGDRVTITCRSSQSIVHSVGNTFLEWYQQKPGKAPKLLIYKVSNRFSGVPSRFSGSGSGTDFTLTISSLQPEDFATYYCFQGSQFPYTFGQGTKVEIKRLEDLKNVFPPEVAVFEPSEAEISHTQKATLVCLATGFYPDHVELSWWVNGKEVHSGVCTDPQPLKEQPALNDSRYCLSSRLRVSATFWQNPRNHFRCQVQFYGLSENDEWTQDRAKPVTQIVSAEAWGRADCGFTSESYQQGVLSAYYMYLLLLLKSVVYFAIITCCLLRRTAFCCNGEKSRAKRSGSGATNFSLLKQAGDVEENPGPTSMDWIWRILFLVGAATGAHSFEEVQLVESGGGLVQPGGSLRLSCAASGYEFSRSWMNWVRQAPGKGLEWVGRIYPGDGDTNYSGKFKGRFTISADTSKNTAYLQMNSLRAEDTAVYYCARDGSSWDWYFDVWGQGTLVTVSSTRIQNPDPAVYQLRDSKSSDKSVCLFTDFDSQTNVSQSKDSDVYITDKCVLDMRSMDFKSNSAVAWSNKSDFACANAFNNSIIPEDTFFPSPESSCDVKLVEKSFETDTNLNFQNLSVIGFRILLLKVAGFNLLMTLRLWSS

SEQ ID NO: 44231 - protein, 632 aa, synthetic construct
MALPVTALLLPLALLLHAARPIQMTQSPSSLSASVGDRVTITCRSSQSIVHSVGNTFLEWYQQKPGKAPKLLIYKVSNRFSGVPSRFSGSGSGTDFTLTISSLQPEDFATYYCFQGSQFPYTFGQGTKVEIKRLEDKQLDADVSPKPTIFLPSIAETKLQKAGTYLCLLEKFFPDVIKIHWQEKKSNTILGSQEGNTMKTNDTYMKFSWLTVPEKSLDKEHRCIVRHENNKNGVDQEIIFPPIKTDVITMDPKDNCSKDANDTLLLQLTNTSAYYMYEILLGKATLYAVLVSALVLMAMVKRKDSRGRAKRSGSGATNFSLLKQAGDVEENPGPTSMDWIWRILFLVGAATGAHSFEEVQLVESGGGLVQPGGSLRLSCAASGYEFSRSWMNWVRQAPGKGLEWVGRIYPGDGDTNYSGKFKGRFTISADTSKNTAYLQMNSLRAEDTAVYYCARDGSSWDWYFDVWGQGTLVTVSSTRSQPHTKPSVFVMKNGTNVACLVKEFYPKDIRINLVSSKKITEFDPAIVISPSGKYNAVKLGKYEDSNSVTCSVQHDNKTVHSTDFEVKTDSTDHVKPKETENTKQPSKSCHKPKAIVHTEKVNMMSLTVIGFRILLLKVAGFNLLMTLRLWSS

SEQ ID NO: 44232 - protein, 632 aa, synthetic construct
MALPVTALLLPLALLLHAARPIQMTQSPSSLSASVGDRVTITCRSSQSIVHSVGNTFLEWYQQKPGKAPKLLIYKVSNRFSGVPSRFSGSGSGTDFTLTISSLQPEDFATYYCFQGSQFPYTFGQGTKVEIKRLEDKQLDADVSPKPTIFLPSIAETKLQKAGTYLCLLEKFFPDVIKIHWQEKKSNTILGSQEGNTMKTNDTYMKFSWLTVPEKSLDKEHRCIVRHENNKNGVDQEIIFPPIKTDVITMDPKDNCSKDANDTLLLQLTNTSATILYEILLGKATLYAVLVSALVLMAMVKRKDSRGRAKRSGSGATNFSLLKQAGDVEENPGPTSMDWIWRILFLVGAATGAHSFEEVQLVESGGGLVQPGGSLRLSCAASGYEFSRSWMNWVRQAPGKGLEWVGRIYPGDGDTNYSGKFKGRFTISADTSKNTAYLQMNSLRAEDTAVYYCARDGSSWDWYFDVWGQGTLVTVSSTRSQPHTKPSVFVMKNGTNVACLVKEFYPKDIRINLVSSKKITEFDPAIVISPSGKYNAVKLGKYEDSNSVTCSVQHDNKTVHSTDFEVKTDSTDHVKPKETENTKQPSKSCHKPKAIVHTEKVNMMSLTVIGFRILLLKVAGFNLLMTLRLWSS

SEQ ID NO: 44233 - protein, 632 aa, synthetic construct
MALPVTALLLPLALLLHAARPIQMTQSPSSLSASVGDRVTITCRSSQSIVHSVGNTFLEWYQQKPGKAPKLLIYKVSNRFSGVPSRFSGSGSGTDFTLTISSLQPEDFATYYCFQGSQFPYTFGQGTKVEIKRLEDKQLDADVSPKPTIFLPSIAETKLQKAGTYLCLLEKFFPDVIKIHWQEKKSNTILGSQEGNTMKTNDTYMKFSWLTVPEKSLDKEHRCIVRHENNKNGVDQEIIFPPIKTDVITMDPKDNCSKDANDTLLLQLTNTSAYYMYEILLGKATLYAVLVSALVLMAMVKRKDSRGRAKRSGSGATNFSLLKQAGDVEENPGPTSMDWIWRILFLVGAATGAHSFEEVQLVESGGGLVQPGGSLRLSCAASGYEFSRSWMNWVRQAPGKGLEWVGRIYPGDGDTNYSGKFKGRFTISADTSKNTAYLQMNSLRAEDTAVYYCARDGSSWDWYFDVWGQGTLVTVSSTRSQPHTKPSVFVMKNGTNVACLVKEFYPKDIRINLVSSKKITEFDPAIVISPSGKYNAVKLGKYEDSNSVTCSVQHDNKTVHSTDFEVKTDSTDHVKPKETENTKQPSKSCHKPKAIVHTEKVNMMSLTVLGFRILLLKVAGFNLLMTLRLWSS

SEQ ID NO: 44234 - protein, 632 aa, synthetic construct
MALPVTALLLPLALLLHAARPIQMTQSPSSLSASVGDRVTITCRSSQSIVHSVGNTFLEWYQQKPGKAPKLLIYKVSNRFSGVPSRFSGSGSGTDFTLTISSLQPEDFATYYCFQGSQFPYTFGQGTKVEIKRLEDKQLDADVSPKPTIFLPSIAETKLQKAGTYLCLLEKFFPDVIKIHWQEKKSNTILGSQEGNTMKTNDTYMKFSWLTVPEKSLDKEHRCIVRHENNKNGVDQEIIFPPIKTDVITMDPKDNCSKDANDTLLLQLTNTSATILYEILLGKATLYAVLVSALVLMAMVKRKDSRGRAKRSGSGATNFSLLKQAGDVEENPGPTSMDWIWRILFLVGAATGAHSFEEVQLVESGGGLVQPGGSLRLSCAASGYEFSRSWMNWVRQAPGKGLEWVGRIYPGDGDTNYSGKFKGRFTISADTSKNTAYLQMNSLRAEDTAVYYCARDGSSWDWYFDVWGQGTLVTVSSTRSQPHTKPSVFVMKNGTNVACLVKEFYPKDIRINLVSSKKITEFDPAIVISPSGKYNAVKLGKYEDSNSVTCSVQHDNKTVHSTDFEVKTDSTDHVKPKETENTKQPSKSCHKPKAIVHTEKVNMMSLTVLGFRILLLKVAGFNLLMTLRLWSS

SEQ ID NO: 44235 - protein, 626 aa, synthetic construct
MALPVTALLLPLALLLHAARPIQMTQSPSSLSASVGDRVTITCRSSQSIVHSVGNTFLEWYQQKPGKAPKLLIYKVSNRFSGVPSRFSGSGSGTDFTLTISSLQPEDFATYYCFQGSQFPYTFGQGTKVEIKRLEDLKNVFPPEVAVFEPSEAEISHTQKATLVCLATGFYPDHVELSWWVNGKEVHSGVCTDPQPLKEQPALNDSRYCLSSRLRVSATFWQNPRNHFRCQVQFYGLSENDEWTQDRAKPVTQIVSAEAWGRADCGFTSESYQQGVLSATILYLLLLLKSVVYFAIITCCLLRRTAFCCNGEKSRAKRSGSGATNFSLLKQAGDVEENPGPTSMDWIWRILFLVGAATGAHSFEEVQLVESGGGLVQPGGSLRLSCAASGYEFSRSWMNWVRQAPGKGLEWVGRIYPGDGDTNYSGKFKGRFTISADTSKNTAYLQMNSLRAEDTAVYYCARDGSSWDWYFDVWGQGTLVTVSSTRIQNPDPAVYQLRDSKSSDKSVCLFTDFDSQTNVSQSKDSDVYITDKCVLDMRSMDFKSNSAVAWSNKSDFACANAFNNSIIPEDTFFPSPESSCDVKLVEKSFETDTNLNFQNLSVIGLRMLFAKTVAVNFLLTAKLFFL

SEQ ID NO: 44236 - protein, 655 aa, synthetic construct
MALPVTALLLPLALLLHAARPIQMTQSPSSLSASVGDRVTITCRSSQSIVHSVGNTFLEWYQQKPGKAPKLLIYKVSNRFSGVPSRFSGSGSGTDFTLTISSLQPEDFATYYCFQGSQFPYTFGQGTKVEIKRLEDLKNVFPPEVAVFEPSEAEISHTQKATLVCLATGFYPDHVELSWWVNGKEVHSGVSTDPQPLKEQPALNDSRYCLSSRLRVSATFWQNPRNHFRCQVQFYGLSENDEWTQDRAKPVTQIVSAEAWGRADCGSSKDANDTLLLQLTNTSAYYMYLLLLLKSVVYFAIITCCLLRRTAFCCNGEKSRAKRSGSGATNFSLLKQAGDVEENPGPTSMDWIWRILFLVGAATGAHSFEEVQLVESGGGLVQPGGSLRLSCAASGYEFSRSWMNWVRQAPGKGLEWVGRIYPGDGDTNYSGKFKGRFTISADTSKNTAYLQMNSLRAEDTAVYYCARDGSSWDWYFDVWGQGTLVTVSSTRIQNPDPAVYQLRDSKSSDKSVCLFTDFDSQTNVSQSKDSDVYITDKTVLDMRSMDFKSNSAVAWSNKSDFACANAFNNSIIPEDTFFPSPESSCGTEVKTDSTDHVKPKETENTKQPSKSCHKPKAIVHTEKVNMMSLTVLGLRMLFAKTVAVNFLLTAKLFFL

SEQ ID NO: 44237 - protein, 625 aa, synthetic construct
MALPVTALLLPLALLLHAARPIQMTQSPSSLSASVGDRVTITCRSSQSIVHSVGNTFLEWYQQKPGKAPKLLIYKVSNRFSGVPSRFSGSGSGTDFTLTISSLQPEDFATYYCFQGSQFPYTFGQGTKVEIKRLEDLKNVFPPEVAVFEPSEAEISHTQKATLVCLATGFYPDHVELSWWVNGKEVHSGVCTDPQPLKEQPALNDSRYCLSSRLRVSATFWQNPRNHFRCQVQFYGLSENDEWTQDRAKPVTQIVSAEAWGRADCDVKLVEKSFETDTNLNFQNLSVIGFRILLLKVAGFNLLMTLRLWSSRAKRSGSGATNFSLLKQAGDVEENPGPTSMDWIWRILFLVGAATGAHSFEEVQLVESGGGLVQPGGSLRLSCAASGYEFSRSWMNWVRQAPGKGLEWVGRIYPGDGDTNYSGKFKGRFTISADTSKNTAYLQMNSLRAEDTAVYYCARDGSSWDWYFDVWGQGTLVTVSSTRIQNPDPAVYQLRDSKSSDKSVCLFTDFDSQTNVSQSKDSDVYITDKCVLDMRSMDFKSNSAVAWSNKSDFACANAFNNSIIPEDTFFPSPESSCGFTSESYQQGVLSATILYEILLGKATLYAVLVSALVLMAMVKRKDSRG

SEQ ID NO: 44238 - protein, 625 aa, synthetic construct
MALPVTALLLPLALLLHAARPIQMTQSPSSLSASVGDRVTITCRSSQSIVHSVGNTFLEWYQQKPGKAPKLLIYKVSNRFSGVPSRFSGSGSGTDFTLTISSLQPEDFATYYCFQGSQFPYTFGQGTKVEIKRLEDLKNVFPPEVAVFEPSEAEISHTQKATLVCLATGFYPDHVELSWWVNGKEVHSGVCTDPQPLKEQPALNDSRYCLSSRLRVSATFWQNPRNHFRCQVQFYGLSENDEWTQDRAKPVTQIVSAEAWGRADCGFTSESYQQGVLSATNLSVIGFRILLLKVAGFNLLMTLRLWSSRAKRSGSGATNFSLLKQAGDVEENPGPTSMDWIWRILFLVGAATGAHSFEEVQLVESGGGLVQPGGSLRLSCAASGYEFSRSWMNWVRQAPGKGLEWVGRIYPGDGDTNYSGKFKGRFTISADTSKNTAYLQMNSLRAEDTAVYYCARDGSSWDWYFDVWGQGTLVTVSSTRIQNPDPAVYQLRDSKSSDKSVCLFTDFDSQTNVSQSKDSDVYITDKCVLDMRSMDFKSNSAVAWSNKSDFACANAFNNSIIPEDTFFPSPESSCDVKLVEKSFETDTNLNFQILYEILLGKATLYAVLVSALVLMAMVKRKDSRG

SEQ ID NO: 44239 - protein, 625 aa, synthetic construct; identical to SEQ ID NO: 44237

SEQ ID NO: 44240 - protein, 625 aa, synthetic construct; identical to SEQ ID NO: 44238

SEQ ID NO: 44241 - protein, 625 aa, synthetic construct; identical to SEQ ID NO: 44237

SEQ ID NO: 44242 - protein, 628 aa, synthetic construct
MALPVTALLLPLALLLHAARPIQMTQSPSSLSASVGDRVTITCRSSQSIVHSVGNTFLEWYQQKPGKAPKLLIYKVSNRFSGVPSRFSGSGSGTDFTLTISSLQPEDFATYYCFQGSQFPYTFGQGTKVEIKRLEADVSPKPTIFLPSIAETKLQKAGTYLCLLEKFFPDVIKIHWQEKKSNTILGSQEGNTMKTNDTYMKFSWLTVPEKSLDKEHRCIVRHENNKNGVDQEIIFPPIKTDVITMDPKDNCSKDANDTLLLQLTNTSAYYMYLLLLLKSVVYFAIITCCLLRRTAFCCNGEKSRAKRSGSGATNFSLLKQAGDVEENPGPTSMDWIWRILFLVGAATGAHSFEEVQLVESGGGLVQPGGSLRLSCAASGYEFSRSWMNWVRQAPGKGLEWVGRIYPGDGDTNYSGKFKGRFTISADTSKNTAYLQMNSLRAEDTAVYYCARDGSSWDWYFDVWGQGTLVTVSSTRSQPHTKPSVFVMKNGTNVACLVKEFYPKDIRINLVSSKKITEFDPAIVISPSGKYNAVKLGKYEDSNSVTCSVQHDNKTVHSTDFEVKTDSTDHVKPKETENTKQPSKSCHKPKAIVHTEKVNMMSLTVIGFRILLLKVAGFNLLMTLRLWSS

SEQ ID NO: 44243 - protein, 628 aa, synthetic construct
MALPVTALLLPLALLLHAARPIQMTQSPSSLSASVGDRVTITCRSSQSIVHSVGNTFLEWYQQKPGKAPKLLIYKVSNRFSGVPSRFSGSGSGTDFTLTISSLQPEDFATYYCFQGSQFPYTFGQGTKVEIKRLEADVSPKPTIFLPSIAETKLQKAGTYLCLLEKFFPDVIKIHWQEKKSNTILGSQEGNTMKTNDTYMKFSWLTVPEKSLDKEHRCIVRHENNKNGVDQEIIFPPIKTDVITMDPKDNCSKDANDTLLLQLTNTSAYYMYLLLLLKSVVYFAIITCCLLRRTAFCCNGEKSRAKRSGSGATNFSLLKQAGDVEENPGPTSMDWIWRILFLVGAATGAHSFEEVQLVESGGGLVQPGGSLRLSCAASGYEFSRSWMNWVRQAPGKGLEWVGRIYPGDGDTNYSGKFKGRFTISADTSKNTAYLQMNSLRAEDTAVYYCARDGSSWDWYFDVWGQGTLVTVSSTRSQPHTKPSVFVMKNGTNVACLVKEFYPKDIRINLVSSKKITEFDPAIVISPSGKYNAVKLGKYEDSNSVTCSVQHDNKTVHSTDFEVKTDSTDHVKPKETENTKQPSKSCHKPKAIVHTEKVNMMSLTVLGFRILLLKVAGFNLLMTLRLWSS

SEQ ID NO: 44244 - protein, 625 aa, synthetic construct; identical to SEQ ID NO: 44237

SEQ ID NO: 44245 - protein, 629 aa, synthetic construct
MALPVTALLLPLALLLHAARPIQMTQSPSSLSASVGDRVTITCRSSQSIVHSVGNTFLEWYQQKPGKAPKLLIYKVSNRFSGVPSRFSGSGSGTDFTLTISSLQPEDFATYYCFQGSQFPYTFGQGTKVEIKRLEIQNPDPAVYQLRDSKSSDKSVCLFTDFDSQTNVSQSKDSDVYITDKCVLDMRSMDFKSNSAVAWSNKSDFACANAFNNSIIPEDTFFPSPESSCGFTSESYQQGVLSATILYEILLGKATLYAVLVSALVLMAMVKRKDSRGRAKRSGSGVKQTLNFDLLKLAGDVESNPGPTSMDWIWRILFLVGAATGAHSFEEVQLVESGGGLVQPGGSLRLSCAASGYEFSRSWMNWVRQAPGKGLEWVGRIYPGDGDTNYSGKFKGRFTISADTSKNTAYLQMNSLRAEDTAVYYCARDGSSWDWYFDVWGQGTLVTVSSTREDLKNVFPPEVAVFEPSEAEISHTQKATLVCLATGFYPDHVELSWWVNGKEVHSGVCTDPQPLKEQPALNDSRYCLSSRLRVSATFWQNPRNHFRCQVQFYGLSENDEWTQDRAKPVTQIVSAEAWGRADCDVKLVEKSFETDTNLNFQNLSVIGFRILLLKVAGFNLLMTLRLWSS

SEQ ID NO: 44246 - protein, 760 aa, synthetic construct
MALPVTALLLPLALLLHAARPEVQLVESGGGLVQPGGSLRLSCAASGFSFSDFWMSWVRQAPGKGLEWVATISQAGSEKDYVDSVKGRFTISRDNAKKSLYLQMNSLRAEDTAVYYCASGVYSFDYRGQGTLVTVSSGTGGGGSGGGGSGGGGSEFIQMTQSPSSLSASVGDRVTITCRSSQSIVHSVGNTFLEWYQQKPGKAPKLLIYKVSNRFSGVPSRFSGSGSGTDFTLTISSLQPEDFATYYCFQGSQFPYTFGQGTKVEIKRLEDLKNVFPPEVAVFEPSEAEISHTQKATLVCLATGFYPDHVELSWWVNGKEVHSGVCTDPQPLKEQPALNDSRYCLSSRLRVSATFWQNPRNHFRCQVQFYGLSENDEWTQDRAKPVTQIVSAEAWGRADCDVKLVEKSFETDTNLNFQNLSVIGFRILLLKVAGFNLLMTLRLWSSRAKRSGSGATNFSLLKQAGDVEENPGPTSMDWIWRILFLVGAATGAHSFEEVQLVESGGGLVQPGGSLRLSCAASGYEFSRSWMNWVRQAPGKGLEWVGRIYPGDGDTNYSGKFKGRFTISADTSKNTAYLQMNSLRAEDTAVYYCARDGSSWDWYFDVWGQGTLVTVSSTRIQNPDPAVYQLRDSKSSDKSVCLFTDFDSQTNVSQSKDSDVYITDKCVLDMRSMDFKSNSAVAWSNKSDFACANAFNNSIIPEDTFFPSPESSCGFTSESYQQGVLSATILYEILLGKATLYAVLVSALVLMAMVKRKDSRG

SEQ ID NO: 44247 - protein, 764 aa, synthetic construct
MALPVTALLLPLALLLHAARPEVQLVESGGGLVQPGGSLRLSCAASGFSFSDFWMSWVRQAPGKGLEWVATISQAGSEKDYVDSVKGRFTISRDNAKKSLYLQMNSLRAEDTAVYYCASGVYSFDYRGQGTLVTVSSGTGGGGSGGGGSGGGGSEFIQMTQSPSSLSASVGDRVTITCRSSQSIVHSVGNTFLEWYQQKPGKAPKLLIYKVSNRFSGVPSRFSGSGSGTDFTLTISSLQPEDFATYYCFQGSQFPYTFGQGTKVEIKRLEIQNPDPAVYQLRDSKSSDKSVCLFTDFDSQTNVSQSKDSDVYITDKCVLDMRSMDFKSNSAVAWSNKSDFACANAFNNSIIPEDTFFPSPESSCGFTSESYQQGVLSATILYEILLGKATLYAVLVSALVLMAMVKRKDSRGRAKRSGSGVKQTLNFDLLKLAGDVESNPGPTSMDWIWRILFLVGAATGAHSFEEVQLVESGGGLVQPGGSLRLSCAASGYEFSRSWMNWVRQAPGKGLEWVGRIYPGDGDTNYSGKFKGRFTISADTSKNTAYLQMNSLRAEDTAVYYCARDGSSWDWYFDVWGQGTLVTVSSTREDLKNVFPPEVAVFEPSEAEISHTQKATLVCLATGFYPDHVELSWWVNGKEVHSGVCTDPQPLKEQPALNDSRYCLSSRLRVSATFWQNPRNHFRCQVQFYGLSENDEWTQDRAKPVTQIVSAEAWGRADCDVKLVEKSFETDTNLNFQNLSVIGFRILLLKVAGFNLLMTLRLWSS

SEQ ID NO: 44248 - protein, 897 aa, synthetic construct
MALPVTALLLPLALLLHAARPEVQLVESGGGLVQPGGSLRLSCAASGFSFSDFWMSWVRQAPGKGLEWVATISQAGSEKDYVDSVKGRFTISRDNAKKSLYLQMNSLRAEDTAVYYCASGVYSFDYRGQGTLVTVSSGTGGGGSGGGGSGGGGSEFIQMTQSPSSLSASVGDRVTITCRSSQSIVHSVGNTFLEWYQQKPGKAPKLLIYKVSNRFSGVPSRFSGSGSGTDFTLTISSLQPEDFATYYCFQGSQFPYTFGQGTKVEIKRLEDLKNVFPPEVAVFEPSEAEISHTQKATLVCLATGFYPDHVELSWWVNGKEVHSGVCTDPQPLKEQPALNDSRYCLSSRLRVSATFWQNPRNHFRCQVQFYGLSENDEWTQDRAKPVTQIVSAEAWGRADCDVKLVEKSFETDTNLNFQNLSVIGFRILLLKVAGFNLLMTLRLWSSRAKRSGSGATNFSLLKQAGDVEENPGPTSMDWIWRILFLVGAATGAHSGPQLQLQESGPGLVKPSETLSLTCTVSGDSISSGDYYWGWIRQPPGKGLEWIGHIYYSGVTYYNPSLKSRVTISVDTSRNQFSLKLSSVTAADTAVYYCTREDSSNWRSRGQGTLVTVSSGSGGGGSGGGGSGGGGSFEEVQLVESGGGLVQPGGSLRLSCAASGYEFSRSWMNWVRQAPGKGLEWVGRIYPGDGDTNYSGKFKGRFTISADTSKNTAYLQMNSLRAEDTAVYYCARDGSSWDWYFDVWGQGTLVTVSSTRIQNPDPAVYQLRDSKSSDKSVCLFTDFDSQTNVSQSKDSDVYITDKCVLDMRSMDFKSNSAVAWSNKSDFACANAFNNSIIPEDTFFPSPESSCGFTSESYQQGVLSATILYEILLGKATLYAVLVSALVLMAMVKRKDSRG

SEQ ID NO: 44249 - protein, 901 aa, synthetic construct
MALPVTALLLPLALLLHAARPEVQLVESGGGLVQPGGSLRLSCAASGFSFSDFWMSWVRQAPGKGLEWVATISQAGSEKDYVDSVKGRFTISRDNAKKSLYLQMNSLRAEDTAVYYCASGVYSFDYRGQGTLVTVSSGTGGGGSGGGGSGGGGSEFIQMTQSPSSLSASVGDRVTITCRSSQSIVHSVGNTFLEWYQQKPGKAPKLLIYKVSNRFSGVPSRFSGSGSGTDFTLTISSLQPEDFATYYCFQGSQFPYTFGQGTKVEIKRLEIQNPDPAVYQLRDSKSSDKSVCLFTDFDSQTNVSQSKDSDVYITDKCVLDMRSMDFKSNSAVAWSNKSDFACANAFNNSIIPEDTFFPSPESSCGFTSESYQQGVLSATILYEILLGKATLYAVLVSALVLMAMVKRKDSRGRAKRSGSGVKQTLNFDLLKLAGDVESNPGPTSMDWIWRILFLVGAATGAHSGPQLQLQESGPGLVKPSETLSLTCTVSGDSISSGDYYWGWIRQPPGKGLEWIGHIYYSGVTYYNPSLKSRVTISVDTSRNQFSLKLSSVTAADTAVYYCTREDSSNWRSRGQGTLVTVSSGSGGGGSGGGGSGGGGSFEEVQLVESGGGLVQPGGSLRLSCAASGYEFSRSWMNWVRQAPGKGLEWVGRIYPGDGDTNYSGKFKGRFTISADTSKNTAYLQMNSLRAEDTAVYYCARDGSSWDWYFDVWGQGTLVTVSSTREDLKNVFPPEVAVFEPSEAEISHTQKATLVCLATGFYPDHVELSWWVNGKEVHSGVCTDPQPLKEQPALNDSRYCLSSRLRVSATFWQNPRNHFRCQVQFYGLSENDEWTQDRAKPVTQIVSAEAWGRADCDVKLVEKSFETDTNLNFQNLSVIGFRILLLKVAGFNLLMTLRLWSS

SEQ ID NO: 44250 - protein, 695 aa, synthetic construct
MALPVTALLLPLALLLHAARPIQMTQSPSSLSASVGDRVTITCRSSQSIVHSVGNTFLEWYQQKPGKAPKLLIYKVSNRFSGVPSRFSGSGSGTDFTLTISSLQPEDFATYYCFQGSQFPYTFGQGTKVEIKRLEDLKNVFPPEVAVFEPSEAEISHTQKATLVCLATGFYPDHVELSWWVNGKEVHSGVCTDPQPLKEQPALNDSRYCLSSRLRVSATFWQNPRNHFRCQVQFYGLSENDEWTQDRAKPVTQIVSAEAWGRADCDVKLVEKSFETDTNLNFQNLSVIGFRILLLKVAGFNLLMTLRLWSSRAKRSGSGATNFSLLKQAGDVEENPGPTSMDWIWRILFLVGAATGAHSGPMDPDLEIRAAFLRQRNTALRTEVAELEQEVQRLENEVSQYETRYGPLGGGKGSGGGGSGGGGSGGGGSFEEVQLVESGGGLVQPGGSLRLSCAASGYEFSRSWMNWVRQAPGKGLEWVGRIYPGDGDTNYSGKFKGRFTISADTSKNTAYLQMNSLRAEDTAVYYCARDGSSWDWYFDVWGQGTLVTVSSTRIQNPDPAVYQLRDSKSSDKSVCLFTDFDSQTNVSQSKDSDVYITDKCVLDMRSMDFKSNSAVAWSNKSDFACANAFNNSIIPEDTFFPSPESSCGFTSESYQQGVLSATILYEILLGKATLYAVLVSALVLMAMVKRKDSRG

SEQ ID NO: 44251 - protein, 699 aa, synthetic construct
MALPVTALLLPLALLLHAARPIQMTQSPSSLSASVGDRVTITCRSSQSIVHSVGNTFLEWYQQKPGKAPKLLIYKVSNRFSGVPSRFSGSGSGTDFTLTISSLQPEDFATYYCFQGSQFPYTFGQGTKVEIKRLEIQNPDPAVYQLRDSKSSDKSVCLFTDFDSQTNVSQSKDSDVYITDKCVLDMRSMDFKSNSAVAWSNKSDFACANAFNNSIIPEDTFFPSPESSCGFTSESYQQGVLSATILYEILLGKATLYAVLVSALVLMAMVKRKDSRGRAKRSGSGVKQTLNFDLLKLAGDVESNPGPTSMDWIWRILFLVGAATGAHSGPMDPDLEIRAAFLRQRNTALRTEVAELEQEVQRLENEVSQYETRYGPLGGGKGSGGGGSGGGGSGGGGSFEEVQLVESGGGLVQPGGSLRLSCAASGYEFSRSWMNWVRQAPGKGLEWVGRIYPGDGDTNYSGKFKGRFTISADTSKNTAYLQMNSLRAEDTAVYYCARDGSSWDWYFDVWGQGTLVTVSSTREDLKNVFPPEVAVFEPSEAEISHTQKATLVCLATGFYPDHVELSWWVNGKEVHSGVCTDPQPLKEQPALNDSRYCLSSRLRVSATFWQNPRNHFRCQVQFYGLSENDEWTQDRAKPVTQIVSAEAWGRADCDVKLVEKSFETDTNLNFQNLSVIGFRILLLKVAGFNLLMTLRLWSS

SEQ ID NO: 44252 - protein, 672 aa, synthetic construct
MALPVTALLLPLALLLHAARPIQMTQSPSSLSASVGDRVTITCRSSQSIVHSVGNTFLEWYQQKPGKAPKLLIYKVSNRFSGVPSRFSGSGSGTDFTLTISSLQPEDFATYYCFQGSQFPYTFGQGTKVEIKRLEDLKNVFPPEVAVFEPSEAEISHTQKATLVCLATGFYPDHVELSWWVNGKEVHSGVCTDPQPLKEQPALNDSRYCLSSRLRVSATFWQNPRNHFRCQVQFYGLSENDEWTQDRAKPVTQIVSAEAWGRADCDVKLVEKSFETDTNLNFQNLSVIGFRILLLKVAGFNLLMTLRLWSSRAKRSGSGATNFSLLKQAGDVEENPGPTSMDWIWRILFLVGAATGAHSGPEVAALEKEVAALEKEVAALEKEVAALEKGSGGGGSGGGGSGGGGSFEEVQLVESGGGLVQPGGSLRLSCAASGYEFSRSWMNWVRQAPGKGLEWVGRIYPGDGDTNYSGKFKGRFTISADTSKNTAYLQMNSLRAEDTAVYYCARDGSSWDWYFDVWGQGTLVTVSSTRIQNPDPAVYQLRDSKSSDKSVCLFTDFDSQTNVSQSKDSDVYITDKCVLDMRSMDFKSNSAVAWSNKSDFACANAFNNSIIPEDTFFPSPESSCGFTSESYQQGVLSATILYEILLGKATLYAVLVSALVLMAMVKRKDSRG

SEQ ID NO: 44253 - protein, 676 aa, synthetic construct
MALPVTALLLPLALLLHAARPIQMTQSPSSLSASVGDRVTITCRSSQSIVHSVGNTFLEWYQQKPGKAPKLLIYKVSNRFSGVPSRFSGSGSGTDFTLTISSLQPEDFATYYCFQGSQFPYTFGQGTKVEIKRLEIQNPDPAVYQLRDSKSSDKSVCLFTDFDSQTNVSQSKDSDVYITDKCVLDMRSMDFKSNSAVAWSNKSDFACANAFNNSIIPEDTFFPSPESSCGFTSESYQQGVLSATILYEILLGKATLYAVLVSALVLMAMVKRKDSRGRAKRSGSGVKQTLNFDLLKLAGDVESNPGPTSMDWIWRILFLVGAATGAHSGPEVAALEKEVAALEKEVAALEKEVAALEKGSGGGGSGGGGSGGGGSFEEVQLVESGGGLVQPGGSLRLSCAASGYEFSRSWMNWVRQAPGKGLEWVGRIYPGDGDTNYSGKFKGRFTISADTSKNTAYLQMNSLRAEDTAVYYCARDGSSWDWYFDVWGQGTLVTVSSTREDLKNVFPPEVAVFEPSEAEISHTQKATLVCLATGFYPDHVELSWWVNGKEVHSGVCTDPQPLKEQPALNDSRYCLSSRLRVSATFWQNPRNHFRCQVQFYGLSENDEWTQDRAKPVTQIVSAEAWGRADCDVKLVEKSFETDTNLNFQNLSVIGFRILLLKVAGFNLLMTLRLWSS

SEQ ID NO: 44254 - protein, 762 aa, synthetic construct
MALPVTALLLPLALLLHAARPIQMTQSPSSLSASVGDRVTITCRSSQSIVHSVGNTFLEWYQQKPGKAPKLLIYKVSNRFSGVPSRFSGSGSGTDFTLTISSLQPEDFATYYCFQGSQFPYTFGQGTKVEIKRLEDLKNVFPPEVAVFEPSEAEISHTQKATLVCLATGFYPDHVELSWWVNGKEVHSGVCTDPQPLKEQPALNDSRYCLSSRLRVSATFWQNPRNHFRCQVQFYGLSENDEWTQDRAKPVTQIVSAEAWGRADCDVKLVEKSFETDTNLNFQNLSVIGFRILLLKVAGFNLLMTLRLWSSRAKRSGSGATNFSLLKQAGDVEENPGPTSMDWIWRILFLVGAATGAHSGPQVQLQESGGGLAQAGGSLRLSCAASGRTFSMGWFRQAPGKEREFVAAITYSGGSPYYASSVRGRFTISRDNAKNTVYLQMNSLKPEDTAVYYCAANPTYGSDWNAENWGQGTQVTVSSGSGGGGSGGGGSGGGGSFEEVQLVESGGGLVQPGGSLRLSCAASGYEFSRSWMNWVRQAPGKGLEWVGRIYPGDGDTNYSGKFKGRFTISADTSKNTAYLQMNSLRAEDTAVYYCARDGSSWDWYFDVWGQGTLVTVSSTRIQNPDPAVYQLRDSKSSDKSVCLFTDFDSQTNVSQSKDSDVYITDKCVLDMRSMDFKSNSAVAWSNKSDFACANAFNNSIIPEDTFFPSPESSCGFTSESYQQGVLSATILYEILLGKATLYAVLVSALVLMAMVKRKDSRG

SEQ ID NO: 44255 - protein, 766 aa, synthetic construct
MALPVTALLLPLALLLHAARPIQMTQSPSSLSASVGDRVTITCRSSQSIVHSVGNTFLEWYQQKPGKAPKLLIYKVSNRFSGVPSRFSGSGSGTDFTLTISSLQPEDFATYYCFQGSQFPYTFGQGTKVEIKRLEIQNPDPAVYQLRDSKSSDKSVCLFTDFDSQTNVSQSKDSDVYITDKCVLDMRSMDFKSNSAVAWSNKSDFACANAFNNSIIPEDTFFPSPESSCGFTSESYQQGVLSATILYEILLGKATLYAVLVSALVLMAMVKRKDSRGRAKRSGSGVKQTLNFDLLKLAGDVESNPGPTSMDWIWRILFLVGAATGAHSGPQVQLQESGGGLAQAGGSLRLSCAASGRTFSMGWFRQAPGKEREFVAAITYSGGSPYYASSVRGRFTISRDNAKNTVYLQMNSLKPEDTAVYYCAANPTYGSDWNAENWGQGTQVTVSSGSGGGGSGGGGSGGGGSFEEVQLVESGGGLVQPGGSLRLSCAASGYEFSRSWMNWVRQAPGKGLEWVGRIYPGDGDTNYSGKFKGRFTISADTSKNTAYLQMNSLRAEDTAVYYCARDGSSWDWYFDVWGQGTLVTVSSTREDLKNVFPPEVAVFEPSEAEISHTQKATLVCLATGFYPDHVELSWWVNGKEVHSGVCTDPQPLKEQPALNDSRYCLSSRLRVSATFWQNPRNHFRCQVQFYGLSENDEWTQDRAKPVTQIVSAEAWGRADCDVKLVEKSFETDTNLNFQNLSVIGFRILLLKVAGFNLLMTLRLWSS

SEQ ID NO: 44256 - protein, 768 aa, synthetic construct
MALPVTALLLPLALLLHAARPEVQLVESGGSLVQPGGSLRLSCAASGFTFDDYAMSWVRQVPGKGLEWVSSINWSGTHTDYADSVKGRFTISRNNANNTLYLQMNSLKSEDTAVYYCAKNWRDAGTTWFEKSGSAGQGTQVTVSSGTGGGGSGGGGSGGGGSEFIQMTQSPSSLSASVGDRVTITCRSSQSIVHSVGNTFLEWYQQKPGKAPKLLIYKVSNRFSGVPSRFSGSGSGTDFTLTISSLQPEDFATYYCFQGSQFPYTFGQGTKVEIKRLEDLKNVFPPEVAVFEPSEAEISHTQKATLVCLATGFYPDHVELSWWVNGKEVHSGVCTDPQPLKEQPALNDSRYCLSSRLRVSATFWQNPRNHFRCQVQFYGLSENDEWTQDRAKPVTQIVSAEAWGRADCDVKLVEKSFETDTNLNFQNLSVIGFRILLLKVAGFNLLMTLRLWSSRAKRSGSGATNFSLLKQAGDVEENPGPTSMDWIWRILFLVGAATGAHSFEEVQLVESGGGLVQPGGSLRLSCAASGYEFSRSWMNWVRQAPGKGLEWVGRIYPGDGDTNYSGKFKGRFTISADTSKNTAYLQMNSLRAEDTAVYYCARDGSSWDWYFDVWGQGTLVTVSSTRIQNPDPAVYQLRDSKSSDKSVCLFTDFDSQTNVSQSKDSDVYITDKCVLDMRSMDFKSNSAVAWSNKSDFACANAFNNSIIPEDTFFPSPESSCGFTSESYQQGVLSATILYEILLGKATLYAVLVSALVLMAMVKRKDSRG

SEQ ID NO: 44257 - protein, 772 aa, synthetic construct
MALPVTALLLPLALLLHAARPEVQLVESGGSLVQPGGSLRLSCAASGFTFDDYAMSWVRQVPGKGLEWVSSINWSGTHTDYADSVKGRFTISRNNANNTLYLQMNSLKSEDTAVYYCAKNWRDAGTTWFEKSGSAGQGTQVTVSSGTGGGGSGGGGSGGGGSEFIQMTQSPSSLSASVGDRVTITCRSSQSIVHSVGNTFLEWYQQKPGKAPKLLIYKVSNRFSGVPSRFSGSGSGTDFTLTISSLQPEDFATYYCFQGSQFPYTFGQGTKVEIKRLEIQNPDPAVYQLRDSKSSDKSVCLFTDFDSQTNVSQSKDSDVYITDKCVLDMRSMDFKSNSAVAWSNKSDFACANAFNNSIIPEDTFFPSPESSCGFTSESYQQGVLSATILYEILLGKATLYAVLVSALVLMAMVKRKDSRGRAKRSGSGVKQTLNFDLLKLAGDVESNPGPTSMDWIWRILFLVGAATGAHSFEEVQLVESGGGLVQPGGSLRLSCAASGYEFSRSWMNWVRQAPGKGLEWVGRIYPGDGDTNYSGKFKGRFTISADTSKNTAYLQMNSLRAEDTAVYYCARDGSSWDWYFDVWGQGTLVTVSSTREDLKNVFPPEVAVFEPSEAEISHTQKATLVCLATGFYPDHVELSWWVNGKEVHSGVCTDPQPLKEQPALNDSRYCLSSRLRVSATFWQNPRNHFRCQVQFYGLSENDEWTQDRAKPVTQIVSAEAWGRADCDVKLVEKSFETDTNLNFQNLSVIGFRILLLKVAGFNLLMTLRLWSS

SEQ ID NO: 44258 - protein, 766 aa, synthetic construct
MALPVTALLLPLALLLHAARPEVQLLESGGGLVQPGGSLRLSCAASGFIFSSYAMSWVRQAPGKGQEWVSGVSGTGVNTYYADSVKGRFTISRDNSKNTLYLQMNSLRAEDTAVYYCASGKGWDSGSWYEDYRGQGTLVTVSSGTGGGGSGGGGSGGGGSEFIQMTQSPSSLSASVGDRVTITCRSSQSIVHSVGNTFLEWYQQKPGKAPKLLIYKVSNRFSGVPSRFSGSGSGTDFTLTISSLQPEDFATYYCFQGSQFPYTFGQGTKVEIKRLEDLKNVFPPEVAVFEPSEAEISHTQKATLVCLATGFYPDHVELSWWVNGKEVHSGVCTDPQPLKEQPALNDSRYCLSSRLRVSATFWQNPRNHFRCQVQFYGLSENDEWTQDRAKPVTQIVSAEAWGRADCDVKLVEKSFETDTNLNFQNLSVIGFRILLLKVAGFNLLMTLRLWSSRAKRSGSGATNFSLLKQAGDVEENPGPTSMDWIWRILFLVGAATGAHSFEEVQLVESGGGLVQPGGSLRLSCAASGYEFSRSWMNWVRQAPGKGLEWVGRIYPGDGDTNYSGKFKGRFTISADTSKNTAYLQMNSLRAEDTAVYYCARDGSSWDWYFDVWGQGTLVTVSSTRIQNPDPAVYQLRDSKSSDKSVCLFTDFDSQTNVSQSKDSDVYITDKCVLDMRSMDFKSNSAVAWSNKSDFACANAFNNSIIPEDTFFPSPESSCGFTSESYQQGVLSATILYEILLGKATLYAVLVSALVLMAMVKRKDSRG

SEQ ID NO: 44259 - protein, 770 aa, synthetic construct
MALPVTALLLPLALLLHAARPEVQLLESGGGLVQPGGSLRLSCAASGFIFSSYAMSWVRQAPGKGQEWVSGVSGTGVNTYYADSVKGRFTISRDNSKNTLYLQMNSLRAEDTAVYYCASGKGWDSGSWYEDYRGQGTLVTVSSGTGGGGSGGGGSGGGGSEFIQMTQSPSSLSASVGDRVTITCRSSQSIVHSVGNTFLEWYQQKPGKAPKLLIYKVSNRFSGVPSRFSGSGSGTDFTLTISSLQPEDFATYYCFQGSQFPYTFGQGTKVEIKRLEIQNPDPAVYQLRDSKSSDKSVCLFTDFDSQTNVSQSKDSDVYITDKCVLDMRSMDFKSNSAVAWSNKSDFACANAFNNSIIPEDTFFPSPESSCGFTSESYQQGVLSATILYEILLGKATLYAVLVSALVLMAMVKRKDSRGRAKRSGSGVKQTLNFDLLKLAGDVESNPGPTSMDWIWRILFLVGAATGAHSFEEVQLVESGGGLVQPGGSLRLSCAASGYEFSRSWMNWVRQAPGKGLEWVGRIYPGDGDTNYSGKFKGRFTISADTSKNTAYLQMNSLRAEDTAVYYCARDGSSWDWYFDVWGQGTLVTVSSTREDLKNVFPPEVAVFEPSEAEISHTQKATLVCLATGFYPDHVELSWWVNGKEVHSGVCTDPQPLKEQPALNDSRYCLSSRLRVSATFWQNPRNHFRCQVQFYGLSENDEWTQDRAKPVTQIVSAEAWGRADCDVKLVEKSFETDTNLNFQNLSVIGFRILLLKVAGFNLLMTLRLWSS

SEQ ID NO: 44260 - protein, 734 aa, synthetic construct
MALPVTALLLPLALLLHAARPMLPAPKNLVVSRITEDSARLSWTAPDAAFDSFPIRYIETLIWGEAIWLDVPGSERSYDLTGLKPGTEYAVVITGVKGGRFSSPLVASFTTGTGGGGSGGGGSGGGGSEFIQMTQSPSSLSASVGDRVTITCRSSQSIVHSVGNTFLEWYQQKPGKAPKLLIYKVSNRFSGVPSRFSGSGSGTDFTLTISSLQPEDFATYYCFQGSQFPYTFGQGTKVEIKRLEDLKNVFPPEVAVFEPSEAEISHTQKATLVCLATGFYPDHVELSWWVNGKEVHSGVCTDPQPLKEQPALNDSRYCLSSRLRVSATFWQNPRNHFRCQVQFYGLSENDEWTQDRAKPVTQIVSAEAWGRADCDVKLVEKSFETDTNLNFQNLSVIGFRILLLKVAGFNLLMTLRLWSSRAKRSGSGATNFSLLKQAGDVEENPGPTSMDWIWRILFLVGAATGAHSFEEVQLVESGGGLVQPGGSLRLSCAASGYEFSRSWMNWVRQAPGKGLEWVGRIYPGDGDTNYSGKFKGRFTISADTSKNTAYLQMNSLRAEDTAVYYCARDGSSWDWYFDVWGQGTLVTVSSTRIQNPDPAVYQLRDSKSSDKSVCLFTDFDSQTNVSQSKDSDVYITDKCVLDMRSMDFKSNSAVAWSNKSDFACANAFNNSIIPEDTFFPSPESSCGFTSESYQQGVLSATILYEILLGKATLYAVLVSALVLMAMVKRKDSRG

SEQ ID NO: 44261 - protein, 738 aa, synthetic construct
MALPVTALLLPLALLLHAARPMLPAPKNLVVSRITEDSARLSWTAPDAAFDSFPIRYIETLIWGEAIWLDVPGSERSYDLTGLKPGTEYAVVITGVKGGRFSSPLVASFTTGTGGGGSGGGGSGGGGSEFIQMTQSPSSLSASVGDRVTITCRSSQSIVHSVGNTFLEWYQQKPGKAPKLLIYKVSNRFSGVPSRFSGSGSGTDFTLTISSLQPEDFATYYCFQGSQFPYTFGQGTKVEIKRLEIQNPDPAVYQLRDSKSSDKSVCLFTDFDSQTNVSQSKDSDVYITDKCVLDMRSMDFKSNSAVAWSNKSDFACANAFNNSIIPEDTFFPSPESSCGFTSESYQQGVLSATILYEILLGKATLYAVLVSALVLMAMVKRKDSRGRAKRSGSGVKQTLNFDLLKLAGDVESNPGPTSMDWIWRILFLVGAATGAHSFEEVQLVESGGGLVQPGGSLRLSCAASGYEFSRSWMNWVRQAPGKGLEWVGRIYPGDGDTNYSGKFKGRFTISADTSKNTAYLQMNSLRAEDTAVYYCARDGSSWDWYFDVWGQGTLVTVSSTREDLKNVFPPEVAVFEPSEAEISHTQKATLVCLATGFYPDHVELSWWVNGKEVHSGVCTDPQPLKEQPALNDSRYCLSSRLRVSATFWQNPRNHFRCQVQFYGLSENDEWTQDRAKPVTQIVSAEAWGRADCDVKLVEKSFETDTNLNFQNLSVIGFRILLLKVAGFNLLMTLRLWSS

SEQ ID NO: 44262 - protein, 763 aa, synthetic construct
MALPVTALLLPLALLLHAARPEVQLVESGGGLVQPGGSLRLSCAASGFNIKDTCIGWVRRAPGKEEELVAKICKYSGHTRYADSVKGRFTISADTSKNTAYLQMNSLRAEDTAVYYCAAVSVRDGHYNYWGQGTTVTVSSGTGGGGSGGGGSGGGGSEFIQMTQSPSSLSASVGDRVTITCRSSQSIVHSVGNTFLEWYQQKPGKAPKLLIYKVSNRFSGVPSRFSGSGSGTDFTLTISSLQPEDFATYYCFQGSQFPYTFGQGTKVEIKRLEDLKNVFPPEVAVFEPSEAEISHTQKATLVCLATGFYPDHVELSWWVNGKEVHSGVCTDPQPLKEQPALNDSRYCLSSRLRVSATFWQNPRNHFRCQVQFYGLSENDEWTQDRAKPVTQIVSAEAWGRADCDVKLVEKSFETDTNLNFQNLSVIGFRILLLKVAGFNLLMTLRLWSSRAKRSGSGATNFSLLKQAGDVEENPGPTSMDWIWRILFLVGAATGAHSFEEVQLVESGGGLVQPGGSLRLSCAASGYEFSRSWMNWVRQAPGKGLEWVGRIYPGDGDTNYSGKFKGRFTISADTSKNTAYLQMNSLRAEDTAVYYCARDGSSWDWYFDVWGQGTLVTVSSTRIQNPDPAVYQLRDSKSSDKSVCLFTDFDSQTNVSQSKDSDVYITDKCVLDMRSMDFKSNSAVAWSNKSDFACANAFNNSIIPEDTFFPSPESSCGFTSESYQQGVLSATILYEILLGKATLYAVLVSALVLMAMVKRKDSRG

SEQ ID NO: 44263 - protein, 767 aa, synthetic construct
MALPVTALLLPLALLLHAARPEVQLVESGGGLVQPGGSLRLSCAASGFNIKDTCIGWVRRAPGKEEELVAKICKYSGHTRYADSVKGRFTISADTSKNTAYLQMNSLRAEDTAVYYCAAVSVRDGHYNYWGQGTTVTVSSGTGGGGSGGGGSGGGGSEFIQMTQSPSSLSASVGDRVTITCRSSQSIVHSVGNTFLEWYQQKPGKAPKLLIYKVSNRFSGVPSRFSGSGSGTDFTLTISSLQPEDFATYYCFQGSQFPYTFGQGTKVEIKRLEIQNPDPAVYQLRDSKSSDKSVCLFTDFDSQTNVSQSKDSDVYITDKCVLDMRSMDFKSNSAVAWSNKSDFACANAFNNSIIPEDTFFPSPESSCGFTSESYQQGVLSATILYEILLGKATLYAVLVSALVLMAMVKRKDSRGRAKRSGSGVKQTLNFDLLKLAGDVESNPGPTSMDWIWRILFLVGAATGAHSFEEVQLVESGGGLVQPGGSLRLSCAASGYEFSRSWMNWVRQAPGKGLEWVGRIYPGDGDTNYSGKFKGRFTISADTSKNTAYLQMNSLRAEDTAVYYCARDGSSWDWYFDVWGQGTLVTVSSTREDLKNVFPPEVAVFEPSEAEISHTQKATLVCLATGFYPDHVELSWWVNGKEVHSGVCTDPQPLKEQPALNDSRYCLSSRLRVSATFWQNPRNHFRCQVQFYGLSENDEWTQDRAKPVTQIVSAEAWGRADCDVKLVEKSFETDTNLNFQNLSVIGFRILLLKVAGFNLLMTLRLWSS

SEQ ID NO: 44264 - protein, 1134 aa, synthetic construct
MALPVTALLLPLALLLHAARPEVQLVESGGGLVQAGGSLRLSCAASGRTFSMGWFRQAPGKEREFVAAITYSGGSPYYADSVKGRFTISRDNAKNTVYLQMNSLKPEDTAVYYCAANPTYGSDWNAENWGQGTQVTVSSGTGGGGSGGGGSGGGGSEFIQMTQSPSSLSASVGDRVTITCRSSQSIVHSVGNTFLEWYQQKPGKAPKLLIYKVSNRFSGVPSRFSGSGSGTDFTLTISSLQPEDFATYYCFQGSQFPYTFGQGTKVEIKRLEDLKNVFPPEVAVFEPSEAEISHTQKATLVCLATGFYPDHVELSWWVNGKEVHSGVCTDPQPLKEQPALNDSRYCLSSRLRVSATFWQNPRNHFRCQVQFYGLSENDEWTQDRAKPVTQIVSAEAWGRADCDVKLVEKSFETDTNLNFQNLSVIGFRILLLKVAGFNLLMTLRLWSSRAKRSGSGATNFSLLKQAGDVEENPGPTSATMDWIWRILFLVGAATGAHSGPEVQLVESGGGLVQAGGSLRLSCAASGRTFTMGWFRQAPGKEREFVAAISLSPTLAYYADSVKGRFTISRDNAKNTVVLQMNSLKPEDTALYYCAADRKSVMSIRPDYWGQGTQVTVSSGSGGGGSGGGGSGGGGSFEEVQLVESGGGLVQPGGSLRLSCAASGYEFSRSWMNWVRQAPGKGLEWVGRIYPGDGDTNYSGKFKGRFTISADTSKNTAYLQMNSLRAEDTAVYYCARDGSSWDWYFDVWGQGTLVTVSSTRIQNPDPAVYQLRDSKSSDKSVCLFTDFDSQTNVSQSKDSDVYITDKCVLDMRSMDFKSNSAVAWSNKSDFACANAFNNSIIPEDTFFPSPESSCGFTSESYQQGVLSATILYEILLGKATLYAVLVSALVLMAMVKRKDSRGRAKRSGSGVKQTLNFDLLKLAGDVESNPGPSRGHMTEYKPTVRLATRDDVPRAVRTLAAAFADYPATRHTVDPDRHIERVTELQELFLTRVGLDIGKVWVADDGAAVAVWTTPESVEAGAVFAEIGPRMAELSGSRLAAQQQMEGLLAPHRPKEPAWFLATVGVSPDHQGKGLGSAVVLPGVEAAERAGVPAFLETSAPRNLPFYERLGFTVTADVEVPEGPRTWCMTRKPGA

SEQ ID NO: 44265 - protein, 772 aa, synthetic construct
MALPVTALLLPLALLLHAARPEVQLVESGGGLVQPGGSLRLSCAASGFASDYYIIGWFRQAPGKEREGVSCISSRYANTNYADSVKGRFTISRDNAKNTVYLQMNSLKPEDTAVYYCAADTRRYTCPDIATMHRNFDSWGQGTLVTVSSGTGGGGSGGGGSGGGGSEFIQMTQSPSSLSASVGDRVTITCRSSQSIVHSVGNTFLEWYQQKPGKAPKLLIYKVSNRFSGVPSRFSGSGSGTDFTLTISSLQPEDFATYYCFQGSQFPYTFGQGTKVEIKRLEDLKNVFPPEVAVFEPSEAEISHTQKATLVCLATGFYPDHVELSWWVNGKEVHSGVCTDPQPLKEQPALNDSRYCLSSRLRVSATFWQNPRNHFRCQVQFYGLSENDEWTQDRAKPVTQIVSAEAWGRADCDVKLVEKSFETDTNLNFQNLSVIGFRILLLKVAGFNLLMTLRLWSSRAKRSGSGATNFSLLKQAGDVEENPGPTSMDWIWRILFLVGAATGAHSFEEVQLVESGGGLVQPGGSLRLSCAASGYEFSRSWMNWVRQAPGKGLEWVGRIYPGDGDTNYSGKFKGRFTISADTSKNTAYLQMNSLRAEDTAVYYCARDGSSWDWYFDVWGQGTLVTVSSTRIQNPDPAVYQLRDSKSSDKSVCLFTDFDSQTNVSQSKDSDVYITDKCVLDMRSMDFKSNSAVAWSNKSDFACANAFNNSIIPEDTFFPSPESSCGFTSESYQQGVLSATILYEILLGKATLYAVLVSALVLMAMVKRKDSRG

SEQ ID NO: 44266 - protein, 772 aa, synthetic construct
MALPVTALLLPLALLLHAARPEVQLVESGGGLVQPGGSLRLSCEASGFASDDYIIGWFRQAPGKEREGVSCISSKYANTVYTDSVKGRFRLSRGTAKNTVYLQMSALKPEDTAVYYCAMDSRRVTCPEISTMHRNFDSWGQGTLVTVSSGTGGGGSGGGGSGGGGSEFIQMTQSPSSLSASVGDRVTITCRSSQSIVHSVGNTFLEWYQQKPGKAPKLLIYKVSNRFSGVPSRFSGSGSGTDFTLTISSLQPEDFATYYCFQGSQFPYTFGQGTKVEIKRLEDLKNVFPPEVAVFEPSEAEISHTQKATLVCLATGFYPDHVELSWWVNGKEVHSGVCTDPQPLKEQPALNDSRYCLSSRLRVSATFWQNPRNHFRCQVQFYGLSENDEWTQDRAKPVTQIVSAEAWGRADCDVKLVEKSFETDTNLNFQNLSVIGFRILLLKVAGFNLLMTLRLWSSRAKRSGSGATNFSLLKQAGDVEENPGPTSMDWIWRILFLVGAATGAHSFEEVQLVESGGGLVQPGGSLRLSCAASGYEFSRSWMNWVRQAPGKGLEWVGRIYPGDGDTNYSGKFKGRFTISADTSKNTAYLQMNSLRAEDTAVYYCARDGSSWDWYFDVWGQGTLVTVSSTRIQNPDPAVYQLRDSKSSDKSVCLFTDFDSQTNVSQSKDSDVYITDKCVLDMRSMDFKSNSAVAWSNKSDFACANAFNNSIIPEDTFFPSPESSCGFTSESYQQGVLSATILYEILLGKATLYAVLVSALVLMAMVKRKDSRG

SEQ ID NO: 44267 - protein, 772 aa, synthetic construct
MALPVTALLLPLALLLHAARPEVQLVESGGGLVQPGGSLRLSCAASGFASDYYIIGWFRQAPGKEREGVSCISSRYANTNYADSVKGRFTISRDNAKNTVYLQMNSLKPEDTAVYYCAADTRRYTCPDIATMHRNFDSWGQGTLVTVSSGTGGGGSGGGGSGGGGSEFIQMTQSPSSLSASVGDRVTITCRSSQSIVHSVGNTFLEWYQQKPGKAPKLLIYKVSNRFSGVPSRFSGSGSGTDFTLTISSLQPEDFATYYCFQGSQFPYTFGQGTKVEIKRLEIQNPDPAVYQLRDSKSSDKSVCLFTDFDSQTNVSQSKDSDVYITDKCVLDMRSMDFKSNSAVAWSNKSDFACANAFNNSIIPEDTFFPSPESSCGFTSESYQQGVLSATILYEILLGKATLYAVLVSALVLMAMVKRKDSRGRAKRSGSGATNFSLLKQAGDVEENPGPTSMDWIWRILFLVGAATGAHSFEEVQLVESGGGLVQPGGSLRLSCAASGYEFSRSWMNWVRQAPGKGLEWVGRIYPGDGDTNYSGKFKGRFTISADTSKNTAYLQMNSLRAEDTAVYYCARDGSSWDWYFDVWGQGTLVTVSSTRDLKNVFPPEVAVFEPSEAEISHTQKATLVCLATGFYPDHVELSWWVNGKEVHSGVCTDPQPLKEQPALNDSRYCLSSRLRVSATFWQNPRNHFRCQVQFYGLSENDEWTQDRAKPVTQIVSAEAWGRADCDVKLVEKSFETDTNLNFQNLSVIGFRILLLKVAGFNLLMTLRLWSS

SEQ ID NO: 44268 - protein, 772 aa, synthetic construct
MALPVTALLLPLALLLHAARPEVQLVESGGGLVQPGGSLRLSCEASGFASDDYIIGWFRQAPGKEREGVSCISSKYANTVYTDSVKGRFRLSRGTAKNTVYLQMSALKPEDTAVYYCAMDSRRVTCPEISTMHRNFDSWGQGTLVTVSSGTGGGGSGGGGSGGGGSEFIQMTQSPSSLSASVGDRVTITCRSSQSIVHSVGNTFLEWYQQKPGKAPKLLIYKVSNRFSGVPSRFSGSGSGTDFTLTISSLQPEDFATYYCFQGSQFPYTFGQGTKVEIKRLEIQNPDPAVYQLRDSKSSDKSVCLFTDFDSQTNVSQSKDSDVYITDKCVLDMRSMDFKSNSAVAWSNKSDFACANAFNNSIIPEDTFFPSPESSCGFTSESYQQGVLSATILYEILLGKATLYAVLVSALVLMAMVKRKDSRGRAKRSGSGATNFSLLKQAGDVEENPGPTSMDWIWRILFLVGAATGAHSFEEVQLVESGGGLVQPGGSLRLSCAASGYEFSRSWMNWVRQAPGKGLEWVGRIYPGDGDTNYSGKFKGRFTISADTSKNTAYLQMNSLRAEDTAVYYCARDGSSWDWYFDVWGQGTLVTVSSTRDLKNVFPPEVAVFEPSEAEISHTQKATLVCLATGFYPDHVELSWWVNGKEVHSGVCTDPQPLKEQPALNDSRYCLSSRLRVSATFWQNPRNHFRCQVQFYGLSENDEWTQDRAKPVTQIVSAEAWGRADCDVKLVEKSFETDTNLNFQNLSVIGFRILLLKVAGFNLLMTLRLWSS

SEQ ID NO: 44269 - protein, 763 aa, synthetic construct
MALPVTALLLPLALLLHAARPQVKLEESGGGLVQPGESLRLSCSASGSIFKVFRVFAMSWYRQGPGKQRELVASISSGETTTYAESVKGRFTISRDNAKNTAYLQMDSLKPEDTAVYYCNADHTFTGDFWGQGTQVTVSSGTGGGGSGGGGSGGGGSEFIQMTQSPSSLSASVGDRVTITCRSSQSIVHSVGNTFLEWYQQKPGKAPKLLIYKVSNRFSGVPSRFSGSGSGTDFTLTISSLQPEDFATYYCFQGSQFPYTFGQGTKVEIKRLEIQNPDPAVYQLRDSKSSDKSVCLFTDFDSQTNVSQSKDSDVYITDKCVLDMRSMDFKSNSAVAWSNKSDFACANAFNNSIIPEDTFFPSPESSCGFTSESYQQGVLSATILYEILLGKATLYAVLVSALVLMAMVKRKDSRGRAKRSGSGATNFSLLKQAGDVEENPGPTSMDWIWRILFLVGAATGAHSFEEVQLVESGGGLVQPGGSLRLSCAASGYEFSRSWMNWVRQAPGKGLEWVGRIYPGDGDTNYSGKFKGRFTISADTSKNTAYLQMNSLRAEDTAVYYCARDGSSWDWYFDVWGQGTLVTVSSTRDLKNVFPPEVAVFEPSEAEISHTQKATLVCLATGFYPDHVELSWWVNGKEVHSGVCTDPQPLKEQPALNDSRYCLSSRLRVSATFWQNPRNHFRCQVQFYGLSENDEWTQDRAKPVTQIVSAEAWGRADCDVKLVEKSFETDTNLNFQNLSVIGFRILLLKVAGFNLLMTLRLWSS

SEQ ID NO: 44270 - protein, 764 aa, synthetic construct
MALPVTALLLPLALLLHAARPIQMTQSPSSLSASVGDRVTITCRSSQSIVHSVGNTFLEWYQQKPGKAPKLLIYKVSNRFSGVPSRFSGSGSGTDFTLTISSLQPEDFATYYCFQGSQFPYTFGQGTKVEIKRLEDLKNVFPPEVAVFEPSEAEISHTQKATLVCLATGFYPDHVELSWWVNGKEVHSGVCTDPQPLKEQPALNDSRYCLSSRLRVSATFWQNPRNHFRCQVQFYGLSENDEWTQDRAKPVTQIVSAEAWGRADCDVKLVEKSFETDTNLNFQNLSVIGFRILLLKVAGFNLLMTLRLWSSRAKRSGSGATNFSLLKQAGDVEENPGPTSATMDWIWRILFLVGAATGAHSGPEVQLVESGGGLVQAGGSLRLSCAASGRTFSMGWFRQAPGKEREFVAAITYSGGSPYYADSVKGRFTISRDNAKNTVYLQMNSLKPEDTAVYYCAANPTYGSDWNAENWGQGTQVTVSSGSGGGGSGGGGSGGGGSFEEVQLVESGGGLVQPGGSLRLSCAASGYEFSRSWMNWVRQAPGKGLEWVGRIYPGDGDTNYSGKFKGRFTISADTSKNTAYLQMNSLRAEDTAVYYCARDGSSWDWYFDVWGQGTLVTVSSTRIQNPDPAVYQLRDSKSSDKSVCLFTDFDSQTNVSQSKDSDVYITDKCVLDMRSMDFKSNSAVAWSNKSDFACANAFNNSIIPEDTFFPSPESSCGFTSESYQQGVLSATILYEILLGKATLYAVLVSALVLMAMVKRKDSRG

SEQ ID NO: 44271 - protein, 765 aa, synthetic construct
MALPVTALLLPLALLLHAARPIQMTQSPSSLSASVGDRVTITCRSSQSIVHSVGNTFLEWYQQKPGKAPKLLIYKVSNRFSGVPSRFSGSGSGTDFTLTISSLQPEDFATYYCFQGSQFPYTFGQGTKVEIKRLEDLKNVFPPEVAVFEPSEAEISHTQKATLVCLATGFYPDHVELSWWVNGKEVHSGVCTDPQPLKEQPALNDSRYCLSSRLRVSATFWQNPRNHFRCQVQFYGLSENDEWTQDRAKPVTQIVSAEAWGRADCDVKLVEKSFETDTNLNFQNLSVIGFRILLLKVAGFNLLMTLRLWSSRAKRSGSGATNFSLLKQAGDVEENPGPTSATMDWIWRILFLVGAATGAHSGPEVQLVESGGGLVQPGGSLRLSCAASGSIFGFNDMAWYRQAPGKQRELVALISRVGVTSSADSVKGRFTISRVNAKDTVYLQMNSLKPEDTAVYYCYMDQRLDGSTLAYWGQGTQVTVSSGSGGGGSGGGGSGGGGSFEEVQLVESGGGLVQPGGSLRLSCAASGYEFSRSWMNWVRQAPGKGLEWVGRIYPGDGDTNYSGKFKGRFTISADTSKNTAYLQMNSLRAEDTAVYYCARDGSSWDWYFDVWGQGTLVTVSSTRIQNPDPAVYQLRDSKSSDKSVCLFTDFDSQTNVSQSKDSDVYITDKCVLDMRSMDFKSNSAVAWSNKSDFACANAFNNSIIPEDTFFPSPESSCGFTSESYQQGVLSATILYEILLGKATLYAVLVSALVLMAMVKRKDSRG

SEQ ID NO: 44272 - protein, 761 aa, synthetic construct
MALPVTALLLPLALLLHAARPIQMTQSPSSLSASVGDRVTITCRSSQSIVHSVGNTFLEWYQQKPGKAPKLLIYKVSNRFSGVPSRFSGSGSGTDFTLTISSLQPEDFATYYCFQGSQFPYTFGQGTKVEIKRLEDLKNVFPPEVAVFEPSEAEISHTQKATLVCLATGFYPDHVELSWWVNGKEVHSGVCTDPQPLKEQPALNDSRYCLSSRLRVSATFWQNPRNHFRCQVQFYGLSENDEWTQDRAKPVTQIVSAEAWGRADCDVKLVEKSFETDTNLNFQNLSVIGFRILLLKVAGFNLLMTLRLWSSRAKRSGSGATNFSLLKQAGDVEENPGPTSATMDWIWRILFLVGAATGAHSGPEVQLVESGGGLVQAGGSLRLSCAASGSVFSGNVMGWYRQAPGKEREWVAAIASGGSIYYRDSVKGRFTISRDNAKNTVYLQMNSLKPEDTAVYYCNSHPPTLPYWGLGTQVTVSSGSGGGGSGGGGSGGGGSFEEVQLVESGGGLVQPGGSLRLSCAASGYEFSRSWMNWVRQAPGKGLEWVGRIYPGDGDTNYSGKFKGRFTISADTSKNTAYLQMNSLRAEDTAVYYCARDGSSWDWYFDVWGQGTLVTVSSTRIQNPDPAVYQLRDSKSSDKSVCLFTDFDSQTNVSQSKDSDVYITDKCVLDMRSMDFKSNSAVAWSNKSDFACANAFNNSIIPEDTFFPSPESSCGFTSESYQQGVLSATILYEILLGKATLYAVLVSALVLMAMVKRKDSRG

SEQ ID NO: 44273 - protein, 759 aa, synthetic construct
MALPVTALLLPLALLLHAARPIQMTQSPSSLSASVGDRVTITCRSSQSIVHSVGNTFLEWYQQKPGKAPKLLIYKVSNRFSGVPSRFSGSGSGTDFTLTISSLQPEDFATYYCFQGSQFPYTFGQGTKVEIKRLEDLKNVFPPEVAVFEPSEAEISHTQKATLVCLATGFYPDHVELSWWVNGKEVHSGVCTDPQPLKEQPALNDSRYCLSSRLRVSATFWQNPRNHFRCQVQFYGLSENDEWTQDRAKPVTQIVSAEAWGRADCDVKLVEKSFETDTNLNFQNLSVIGFRILLLKVAGFNLLMTLRLWSSRAKRSGSGATNFSLLKQAGDVEENPGPTSATMDWIWRILFLVGAATGAHSGPEVQLLESGGGLVQPGGSLRLSCAASGFSFSSYALSWVRQAPGKGLEWVSSIGENDGTTDYADAVKGRFTISRDNSKNTLYLQMNSLRVEDTAVYYCVKDGIHWGQGTLVTVSSGSGGGGSGGGGSGGGGSFEEVQLVESGGGLVQPGGSLRLSCAASGYEFSRSWMNWVRQAPGKGLEWVGRIYPGDGDTNYSGKFKGRFTISADTSKNTAYLQMNSLRAEDTAVYYCARDGSSWDWYFDVWGQGTLVTVSSTRIQNPDPAVYQLRDSKSSDKSVCLFTDFDSQTNVSQSKDSDVYITDKCVLDMRSMDFKSNSAVAWSNKSDFACANAFNNSIIPEDTFFPSPESSCGFTSESYQQGVLSATILYEILLGKATLYAVLVSALVLMAMVKRKDSRG

SEQ ID NO: 44274 - protein, 1128 aa, synthetic construct
MGPRLLFWALLCLLGTGPVEAGVTQSPTHLIKTRGQQATLRCSPISGHTSVYWYQQALGLGLQFLLWYDEGEERNRGNFPPRFSGRQFPNYSSELNVNALELEDSALYLCASSLGGPRGLAGLRGDEQFFGPGTRLTVLEGTGGGGSGGGEFIQMTQSPSSLSASVGDRVTITCRSSQSIVHSVGNTFLEWYQQKPGKAPKLLIYKVSNRFSGVPSRFSGSGSGTDFTLTISSLQPEDFATYYCFQGSQFPYTFGQGTKVEIKRLEDLKNVFPPEVAVFEPSEAEISHTQKATLVCLATGFYPDHVELSWWVNGKEVHSGVCTDPQPLKEQPALNDSRYCLSSRLRVSATFWQNPRNHFRCQVQFYGLSENDEWTQDRAKPVTQIVSAEAWGRADCDVKLVEKSFETDTNLNFQNLSVIGFRILLLKVAGFNLLMTLRLWSSRAKRSGSGATNFSLLKQAGDVEENPGPTSATMDWIWRILFLVGAATGAHSGPEVQLVESGGGLVQAGGSLRLSCAASGRTFSMGWFRQAPGKEREFVAAITYSGGSPYYADSVKGRFTISRDNAKNTVYLQMNSLKPEDTAVYYCAANPTYGSDWNAENWGQGTQVTVSSGSGGGGSGGGGSGGGGSFEEVQLVESGGGLVQPGGSLRLSCAASGYEFSRSWMNWVRQAPGKGLEWVGRIYPGDGDTNYSGKFKGRFTISADTSKNTAYLQMNSLRAEDTAVYYCARDGSSWDWYFDVWGQGTLVTVSSTRIQNPDPAVYQLRDSKSSDKSVCLFTDFDSQTNVSQSKDSDVYITDKCVLDMRSMDFKSNSAVAWSNKSDFACANAFNNSIIPEDTFFPSPESSCGFTSESYQQGVLSATILYEILLGKATLYAVLVSALVLMAMVKRKDSRGRAKRSGSGVKQTLNFDLLKLAGDVESNPGPSRGHMTEYKPTVRLATRDDVPRAVRTLAAAFADYPATRHTVDPDRHIERVTELQELFLTRVGLDIGKVWVADDGAAVAVWTTPESVEAGAVFAEIGPRMAELSGSRLAAQQQMEGLLAPHRPKEPAWFLATVGVSPDHQGKGLGSAVVLPGVEAAERAGVPAFLETSAPRNLPFYERLGFTVTADVEVPEGPRTWCMTRKPGA

SEQ ID NO: 44275 - protein, 1127 aa, synthetic construct
MGPRLLFWALLCLLGTGPVEAGVTQSPTHLIKTRGQQATLRCSPISGHTSVYWYQQALGLGLQFLLWYDEGEERNRGNFPPRFSGRQFPNYSSELNVNALELEDSALYLCASSLGGDELGADGNEQFFGPGTRLTVLEGTGGGGSGGGSEFIQMTQSPSSLSASVGDRVTITCRSSQSIVHSVGNTFLEWYQQKPGKAPKLLIYKVSNRFSGVPSRFSGSGSGTDFTLTISSLQPEDFATYYCFQGSQFPYTFGQGTKVEIKRLEDLKNVFPPEVAVFEPSEAEISHTQKATLVCLATGFYPDHVELSWWVNGKEVHSGVCTDPQPLKEQPALNDSRYCLSSRLRVSATFWQNPRNHFRCQVQFYGLSENDEWTQDRAKPVTQIVSAEAWGRADCDVKLVEKSFETDTNLNFQNLSVIGFRILLLKVAGFNLLMTLRLWSSRAKRSGSGATNFSLLKQAGDVEENPGPTSATMDWIWRILFLVGAATGAHSGPEVQLVESGGGLVQAGGSLRLSCAASGRTFSMGWFRQAPGKEREFVAAITYSGGSPYYADSVKGRFTISRDNAKNTVYLQMNSLKPEDTAVYYCAANPTYGSDWNAENWGQGTQVTVSSGSGGGGSGGGGSGGGGSFEEVQLVESGGGLVQPGGSLRLSCAASGYEFSRSWMNWVRQAPGKGLEWVGRIYPGDGDTNYSGKFKGRFTISADTSKNTAYLQMNSLRAEDTAVYYCARDGSSWDWYFDVWGQGTLVTVSSTRIQNPDPAVYQLRDSKSSDKSVCLFTDFDSQTNVSQSKDSDVYITDKCVLDMRSMDFKSNSAVAWSNKSDFACANAFNNSIIPEDTFFPSPESSCGFTSESYQQGVLSATILYEILLGKATLYAVLVSALVLMAMVKRKDSRGRAKRSGSGVKQTLNFDLLKLAGDVESNPGPSRGHMTEYKPTVRLATRDDVPRAVRTLAAAFADYPATRHTVDPDRHIERVTELQELFLTRVGLDIGKVWVADDGAAVAVWTTPESVEAGAVFAEIGPRMAELSGSRLAAQQQMEGLLAPHRPKEPAWFLATVGVSPDHQGKGLGSAVVLPGVEAAERAGVPAFLETSAPRNLPFYERLGFTVTADVEVPEGPRTWCMTRKPGA

SEQ ID NO: 44276 - protein, 952 aa, synthetic construct
MALPVTALLLPLALLLHAARPIQMTQSPSSLSASVGDRVTITCRSSQSIVHSVGNTFLEWYQQKPGKAPKLLIYKVSNRFSGVPSRFSGSGSGTDFTLTISSLQPEDFATYYCFQGSQFPYTFGQGTKVEIKRLEDLKNVFPPEVAVFEPSEAEISHTQKATLVCLATGFYPDHVELSWWVNGKEVHSGVCTDPQPLKEQPALNDSRYCLSSRLRVSATFWQNPRNHFRCQVQFYGLSENDEWTQDRAKPVTQIVSAEAWGRADCDVKLVEKSFETDTNLNFQNLSVIGFRILLLKVAGFNLLMTLRLWSSRAKRSGSGATNFSLLKQAGDVEENPGPTSATMDWIWRILFLVGAATGAHSGPMGSWLEFYHRLNAIDSRLWALGGSEAELAAFEKEIAAFESELQAYKGKGNPEVESLRDHAAHIREWLQAYRHNGSGGGGSGGGGSGGGGSFEEVQLVESGGGLVQPGGSLRLSCAASGYEFSRSWMNWVRQAPGKGLEWVGRIYPGDGDTNYSGKFKGRFTISADTSKNTAYLQMNSLRAEDTAVYYCARDGSSWDWYFDVWGQGTLVTVSSTRIQNPDPAVYQLRDSKSSDKSVCLFTDFDSQTNVSQSKDSDVYITDKCVLDMRSMDFKSNSAVAWSNKSDFACANAFNNSIIPEDTFFPSPESSCGFTSESYQQGVLSATILYEILLGKATLYAVLVSALVLMAMVKRKDSRGRAKRSGSGVKQTLNFDLLKLAGDVESNPGPSRGHMTEYKPTVRLATRDDVPRAVRTLAAAFADYPATRHTVDPDRHIERVTELQELFLTRVGLDIGKVWVADDGAAVAVWTTPESVEAGAVFAEIGPRMAELSGSRLAAQQQMEGLLAPHRPKEPAWFLATVGVSPDHQGKGLGSAVVLPGVEAAERAGVPAFLETSAPRNLPFYERLGFTVTADVEVPEGPRTWCMTRKPGA

SEQ ID NO: 44277 - protein, 952 aa, synthetic construct
MALPVTALLLPLALLLHAARPACMGSWFEFYDRLNAIDARLWALGGSEAELAAFEKEIAAFESELQAYKGKGNPEVENLRVHAAAIREWLQAYRHNGTGGGGSGGGGSGGGGSEFIQMTQSPSSLSASVGDRVTITCRSSQSIVHSVGNTFLEWYQQKPGKAPKLLIYKVSNRFSGVPSRFSGSGSGTDFTLTISSLQPEDFATYYCFQGSQFPYTFGQGTKVEIKRLEDLKNVFPPEVAVFEPSEAEISHTQKATLVCLATGFYPDHVELSWWVNGKEVHSGVCTDPQPLKEQPALNDSRYCLSSRLRVSATFWQNPRNHFRCQVQFYGLSENDEWTQDRAKPVTQIVSAEAWGRADCDVKLVEKSFETDTNLNFQNLSVIGFRILLLKVAGFNLLMTLRLWSSRAKRSGSGATNFSLLKQAGDVEENPGPTSMDWIWRILFLVGAATGAHSFEEVQLVESGGGLVQPGGSLRLSCAASGYEFSRSWMNWVRQAPGKGLEWVGRIYPGDGDTNYSGKFKGRFTISADTSKNTAYLQMNSLRAEDTAVYYCARDGSSWDWYFDVWGQGTLVTVSSTRIQNPDPAVYQLRDSKSSDKSVCLFTDFDSQTNVSQSKDSDVYITDKCVLDMRSMDFKSNSAVAWSNKSDFACANAFNNSIIPEDTFFPSPESSCGFTSESYQQGVLSATILYEILLGKATLYAVLVSALVLMAMVKRKDSRGRAKRSGSGVKQTLNFDLLKLAGDVESNPGPSRGHMTEYKPTVRLATRDDVPRAVRTLAAAFADYPATRHTVDPDRHIERVTELQELFLTRVGLDIGKVWVADDGAAVAVWTTPESVEAGAVFAEIGPRMAELSGSRLAAQQQMEGLLAPHRPKEPAWFLATVGVSPDHQGKGLGSAVVLPGVEAAERAGVPAFLETSAPRNLPFYERLGFTVTADVEVPEGPRTWCMTRKPGA

SEQ ID NO: 44278 - protein, 1069 aa, synthetic construct
MALPVTALLLPLALLLHAARPACMDPDLEIRAAFLRQRNTALRTEVAELEQEVQRLENEVSQYETRYGPLGGGKGTGGGGSGGGGSGGGGSEFIQMTQSPSSLSASVGDRVTITCRSSQSIVHSVGNTFLEWYQQKPGKAPKLLIYKVSNRFSGVPSRFSGSGSGTDFTLTISSLQPEDFATYYCFQGSQFPYTFGQGTKVEIKRLEDLKNVFPPEVAVFEPSEAEISHTQKATLVCLATGFYPDHVELSWWVNGKEVHSGVCTDPQPLKEQPALNDSRYCLSSRLRVSATFWQNPRNHFRCQVQFYGLSENDEWTQDRAKPVTQIVSAEAWGRADCDVKLVEKSFETDTNLNFQNLSVIGFRILLLKVAGFNLLMTLRLWSSRAKRSGSGATNFSLLKQAGDVEENPGPTSATMDWIWRILFLVGAATGAHSGPEVQLVESGGGLVQAGGSLRLSCAASGRTFSMGWFRQAPGKEREFVAAITYSGGSPYYADSVKGRFTISRDNAKNTVYLQMNSLKPEDTAVYYCAANPTYGSDWNAENWGQGTQVTVSSGSGGGGSGGGGSGGGGSFEEVQLVESGGGLVQPGGSLRLSCAASGYEFSRSWMNWVRQAPGKGLEWVGRIYPGDGDTNYSGKFKGRFTISADTSKNTAYLQMNSLRAEDTAVYYCARDGSSWDWYFDVWGQGTLVTVSSTRIQNPDPAVYQLRDSKSSDKSVCLFTDFDSQTNVSQSKDSDVYITDKCVLDMRSMDFKSNSAVAWSNKSDFACANAFNNSIIPEDTFFPSPESSCGFTSESYQQGVLSATILYEILLGKATLYAVLVSALVLMAMVKRKDSRGRAKRSGSGVKQTLNFDLLKLAGDVESNPGPSRGHMTEYKPTVRLATRDDVPRAVRTLAAAFADYPATRHTVDPDRHIERVTELQELFLTRVGLDIGKVWVADDGAAVAVWTTPESVEAGAVFAEIGPRMAELSGSRLAAQQQMEGLLAPHRPKEPAWFLATVGVSPDHQGKGLGSAVVLPGVEAAERAGVPAFLETSAPRNLPFYERLGFTVTADVEVPEGPRTWCMTRKPGA

SEQ ID NO: 44279 - protein, 952 aa, synthetic construct
MALPVTALLLPLALLLHAARPIQMTQSPSSLSASVGDRVTITCRSSQSIVHSVGNTFLEWYQQKPGKAPKLLIYKVSNRFSGVPSRFSGSGSGTDFTLTISSLQPEDFATYYCFQGSQFPYTFGQGTKVEIKRLEDLKNVFPPEVAVFEPSEAEISHTQKATLVCLATGFYPDHVELSWWVNGKEVHSGVCTDPQPLKEQPALNDSRYCLSSRLRVSATFWQNPRNHFRCQVQFYGLSENDEWTQDRAKPVTQIVSAEAWGRADCDVKLVEKSFETDTNLNFQNLSVIGFRILLLKVAGFNLLMTLRLWSSRAKRSGSGATNFSLLKQAGDVEENPGPTSATMDWIWRILFLVGAATGAHSGPMGSWSEFYDRLHAIHHRLYALGGSEAELAAFEKEIAAFESELQAYKGKGNPEVEALRDTAAFIRTRLQAYRHNGSGGGGSGGGGSGGGGSFEEVQLVESGGGLVQPGGSLRLSCAASGYEFSRSWMNWVRQAPGKGLEWVGRIYPGDGDTNYSGKFKGRFTISADTSKNTAYLQMNSLRAEDTAVYYCARDGSSWDWYFDVWGQGTLVTVSSTRIQNPDPAVYQLRDSKSSDKSVCLFTDFDSQTNVSQSKDSDVYITDKCVLDMRSMDFKSNSAVAWSNKSDFACANAFNNSIIPEDTFFPSPESSCGFTSESYQQGVLSATILYEILLGKATLYAVLVSALVLMAMVKRKDSRGRAKRSGSGVKQTLNFDLLKLAGDVESNPGPSRGHMTEYKPTVRLATRDDVPRAVRTLAAAFADYPATRHTVDPDRHIERVTELQELFLTRVGLDIGKVWVADDGAAVAVWTTPESVEAGAVFAEIGPRMAELSGSRLAAQQQMEGLLAPHRPKEPAWFLATVGVSPDHQGKGLGSAVVLPGVEAAERAGVPAFLETSAPRNLPFYERLGFTVTADVEVPEGPRTWCMTRKPGA

SEQ ID NO: 44280 - protein, 1162 aa, synthetic construct
MALPVTALLLPLALLLHAARPIQMTQSPSSLSASVGDRVTITCRSSQSIVHSVGNTFLEWYQQKPGKAPKLLIYKVSNRFSGVPSRFSGSGSGTDFTLTISSLQPEDFATYYCFQGSQFPYTFGQGTKVEIKRLEDLKNVFPPEVAVFEPSEAEISHTQKATLVCLATGFYPDHVELSWWVNGKEVHSGVCTDPQPLKEQPALNDSRYCLSSRLRVSATFWQNPRNHFRCQVQFYGLSENDEWTQDRAKPVTQIVSAEAWGRADCDVKLVEKSFETDTNLNFQNLSVIGFRILLLKVAGFNLLMTLRLWSSRAKRSGSGATNFSLLKQAGDVEENPGPTSTMDWIWRILFLVGAATGAHSLFNQEVQIPLTESYCGPCPKNWICYKNNCYQFFDESKNWYESQASCMSQNASLLKVYSKEDQDLLKLVKSAHWMGLVHIPTNGSWQWEDGSILSPNLLTIIEMQKGDCALYASSFKGYIENCSTPNTYICMQRTVSGGGGSGGGGSGGGGDLFNQEVQIPLTESYCGPCPKNWICYKNNCYQFFDESKNWYESQASCMSQNASLLKVYSKEDQDLLKLVKSAHWMGLVHIPTNGSWQWEDGSILSPNLLTIIEMQKGDCALYASSFKGYIENCSTPNTYICMQRTVGSGGGGSGGGGSGGGGSFEEVQLVESGGGLVQPGGSLRLSCAASGYEFSRSWMNWVRQAPGKGLEWVGRIYPGDGDTNYSGKFKGRFTISADTSKNTAYLQMNSLRAEDTAVYYCARDGSSWDWYFDVWGQGTLVTVSSTRIQNPDPAVYQLRDSKSSDKSVCLFTDFDSQTNVSQSKDSDVYITDKCVLDMRSMDFKSNSAVAWSNKSDFACANAFNNSIIPEDTFFPSPESSCGFTSESYQQGVLSATILYEILLGKATLYAVLVSALVLMAMVKRKDSRGRAKRSGSGVKQTLNFDLLKLAGDVESNPGPSRGHMTEYKPTVRLATRDDVPRAVRTLAAAFADYPATRHTVDPDRHIERVTELQELFLTRVGLDIGKVWVADDGAAVAVWTTPESVEAGAVFAEIGPRMAELSGSRLAAQQQMEGLLAPHRPKEPAWFLATVGVSPDHQGKGLGSAVVLPGVEAAERAGVPAFLETSAPRNLPFYERLGFTVTADVEVPEGPRTWCMTRKPGA

SEQ ID NO: 44281 - protein, 625 aa, synthetic construct; identical to SEQ ID NO: 44238

SEQ ID NO: 44282 - protein, 629 aa, synthetic construct
MALPVTALLLPLALLLHAARPIQMTQSPSSLSASVGDRVTITCRSSQSIVHSVGNTFLEWYQQKPGKAPKLLIYKVSNRFSGVPSRFSGSGSGTDFTLTISSLQPEDFATYYCFQGSQFPYTFGQGTKVEIKRLEIQNPDPAVYQLRDSKSSDKSVCLFTDFDSQTNVSQSKDSDVYITDKCVLDMRSMDFKSNSAVAWSNKSDFACANAFNNSIIPEDTFFPSPESSCDVKLVEKSFETDTNLNFQILYEILLGKATLYAVLVSALVLMAMVKRKDSRGRAKRSGSGVKQTLNFDLLKLAGDVESNPGPTSMDWIWRILFLVGAATGAHSFEEVQLVESGGGLVQPGGSLRLSCAASGYEFSRSWMNWVRQAPGKGLEWVGRIYPGDGDTNYSGKFKGRFTISADTSKNTAYLQMNSLRAEDTAVYYCARDGSSWDWYFDVWGQGTLVTVSSTREDLKNVFPPEVAVFEPSEAEISHTQKATLVCLATGFYPDHVELSWWVNGKEVHSGVCTDPQPLKEQPALNDSRYCLSSRLRVSATFWQNPRNHFRCQVQFYGLSENDEWTQDRAKPVTQIVSAEAWGRADCGFTSESYQQGVLSATNLSVIGFRILLLKVAGFNLLMTLRLWSS

SEQ ID NO: 44283 - protein, 760 aa, synthetic construct
MALPVTALLLPLALLLHAARPEVQLVESGGGLVQPGGSLRLSCAASGFSFSDFWMSWVRQAPGKGLEWVATISQAGSEKDYVDSVKGRFTISRDNAKKSLYLQMNSLRAEDTAVYYCASGVYSFDYRGQGTLVTVSSGTGGGGSGGGGSGGGGSEFIQMTQSPSSLSASVGDRVTITCRSSQSIVHSVGNTFLEWYQQKPGKAPKLLIYKVSNRFSGVPSRFSGSGSGTDFTLTISSLQPEDFATYYCFQGSQFPYTFGQGTKVEIKRLEDLKNVFPPEVAVFEPSEAEISHTQKATLVCLATGFYPDHVELSWWVNGKEVHSGVCTDPQPLKEQPALNDSRYCLSSRLRVSATFWQNPRNHFRCQVQFYGLSENDEWTQDRAKPVTQIVSAEAWGRADCGFTSESYQQGVLSATNLSVIGFRILLLKVAGFNLLMTLRLWSSRAKRSGSGATNFSLLKQAGDVEENPGPTSMDWIWRILFLVGAATGAHSFEEVQLVESGGGLVQPGGSLRLSCAASGYEFSRSWMNWVRQAPGKGLEWVGRIYPGDGDTNYSGKFKGRFTISADTSKNTAYLQMNSLRAEDTAVYYCARDGSSWDWYFDVWGQGTLVTVSSTRIQNPDPAVYQLRDSKSSDKSVCLFTDFDSQTNVSQSKDSDVYITDKCVLDMRSMDFKSNSAVAWSNKSDFACANAFNNSIIPEDTFFPSPESSCDVKLVEKSFETDTNLNFQILYEILLGKATLYAVLVSALVLMAMVKRKDSRG

SEQ ID NO: 44284 - protein, 764 aa, synthetic construct
MALPVTALLLPLALLLHAARPEVQLVESGGGLVQPGGSLRLSCAASGFSFSDFWMSWVRQAPGKGLEWVATISQAGSEKDYVDSVKGRFTISRDNAKKSLYLQMNSLRAEDTAVYYCASGVYSFDYRGQGTLVTVSSGTGGGGSGGGGSGGGGSEFIQMTQSPSSLSASVGDRVTITCRSSQSIVHSVGNTFLEWYQQKPGKAPKLLIYKVSNRFSGVPSRFSGSGSGTDFTLTISSLQPEDFATYYCFQGSQFPYTFGQGTKVEIKRLEIQNPDPAVYQLRDSKSSDKSVCLFTDFDSQTNVSQSKDSDVYITDKCVLDMRSMDFKSNSAVAWSNKSDFACANAFNNSIIPEDTFFPSPESSCDVKLVEKSFETDTNLNFQILYEILLGKATLYAVLVSALVLMAMVKRKDSRGRAKRSGSGVKQTLNFDLLKLAGDVESNPGPTSMDWIWRILFLVGAATGAHSFEEVQLVESGGGLVQPGGSLRLSCAASGYEFSRSWMNWVRQAPGKGLEWVGRIYPGDGDTNYSGKFKGRFTISADTSKNTAYLQMNSLRAEDTAVYYCARDGSSWDWYFDVWGQGTLVTVSSTREDLKNVFPPEVAVFEPSEAEISHTQKATLVCLATGFYPDHVELSWWVNGKEVHSGVCTDPQPLKEQPALNDSRYCLSSRLRVSATFWQNPRNHFRCQVQFYGLSENDEWTQDRAKPVTQIVSAEAWGRADCGFTSESYQQGVLSATNLSVIGFRILLLKVAGFNLLMTLRLWSS

SEQ ID NO: 44285 - protein, 897 aa, synthetic construct
MALPVTALLLPLALLLHAARPEVQLVESGGGLVQPGGSLRLSCAASGFSFSDFWMSWVRQAPGKGLEWVATISQAGSEKDYVDSVKGRFTISRDNAKKSLYLQMNSLRAEDTAVYYCASGVYSFDYRGQGTLVTVSSGTGGGGSGGGGSGGGGSEFIQMTQSPSSLSASVGDRVTITCRSSQSIVHSVGNTFLEWYQQKPGKAPKLLIYKVSNRFSGVPSRFSGSGSGTDFTLTISSLQPEDFATYYCFQGSQFPYTFGQGTKVEIKRLEDLKNVFPPEVAVFEPSEAEISHTQKATLVCLATGFYPDHVELSWWVNGKEVHSGVCTDPQPLKEQPALNDSRYCLSSRLRVSATFWQNPRNHFRCQVQFYGLSENDEWTQDRAKPVTQIVSAEAWGRADCGFTSESYQQGVLSATNLSVIGFRILLLKVAGFNLLMTLRLWSSRAKRSGSGATNFSLLKQAGDVEENPGPTSMDWIWRILFLVGAATGAHSGPQLQLQESGPGLVKPSETLSLTCTVSGDSISSGDYYWGWIRQPPGKGLEWIGHIYYSGVTYYNPSLKSRVTISVDTSRNQFSLKLSSVTAADTAVYYCTREDSSNWRSRGQGTLVTVSSGSGGGGSGGGGSGGGGSFEEVQLVESGGGLVQPGGSLRLSCAASGYEFSRSWMNWVRQAPGKGLEWVGRIYPGDGDTNYSGKFKGRFTISADTSKNTAYLQMNSLRAEDTAVYYCARDGSSWDWYFDVWGQGTLVTVSSTRIQNPDPAVYQLRDSKSSDKSVCLFTDFDSQTNVSQSKDSDVYITDKCVLDMRSMDFKSNSAVAWSNKSDFACANAFNNSIIPEDTFFPSPESSCDVKLVEKSFETDTNLNFQILYEILLGKATLYAVLVSALVLMAMVKRKDSRG

SEQ ID NO: 44286 - protein, 901 aa, synthetic construct
MALPVTALLLPLALLLHAARPEVQLVESGGGLVQPGGSLRLSCAASGFSFSDFWMSWVRQAPGKGLEWVATISQAGSEKDYVDSVKGRFTISRDNAKKSLYLQMNSLRAEDTAVYYCASGVYSFDYRGQGTLVTVSSGTGGGGSGGGGSGGGGSEFIQMTQSPSSLSASVGDRVTITCRSSQSIVHSVGNTFLEWYQQKPGKAPKLLIYKVSNRFSGVPSRFSGSGSGTDFTLTISSLQPEDFATYYCFQGSQFPYTFGQGTKVEIKRLEIQNPDPAVYQLRDSKSSDKSVCLFTDFDSQTNVSQSKDSDVYITDKCVLDMRSMDFKSNSAVAWSNKSDFACANAFNNSIIPEDTFFPSPESSCDVKLVEKSFETDTNLNFQILYEILLGKATLYAVLVSALVLMAMVKRKDSRGRAKRSGSGVKQTLNFDLLKLAGDVESNPGPTSMDWIWRILFLVGAATGAHSGPQLQLQESGPGLVKPSETLSLTCTVSGDSISSGDYYWGWIRQPPGKGLEWIGHIYYSGVTYYNPSLKSRVTISVDTSRNQFSLKLSSVTAADTAVYYCTREDSSNWRSRGQGTLVTVSSGSGGGGSGGGGSGGGGSFEEVQLVESGGGLVQPGGSLRLSCAASGYEFSRSWMNWVRQAPGKGLEWVGRIYPGDGDTNYSGKFKGRFTISADTSKNTAYLQMNSLRAEDTAVYYCARDGSSWDWYFDVWGQGTLVTVSSTREDLKNVFPPEVAVFEPSEAEISHTQKATLVCLATGFYPDHVELSWWVNGKEVHSGVCTDPQPLKEQPALNDSRYCLSSRLRVSATFWQNPRNHFRCQVQFYGLSENDEWTQDRAKPVTQIVSAEAWGRADCGFTSESYQQGVLSATNLSVIGFRILLLKVAGFNLLMTLRLWSS

SEQ ID NO: 44287 - protein, 729 aa, synthetic construct
MALPVTALLLPLALLLHAARPIQMTQSPSSLSASVGDRVTITCRSSQSIVHSVGNTFLEWYQQKPGKAPKLLIYKVSNRFSGVPSRFSGSGSGTDFTLTISSLQPEDFATYYCFQGSQFPYTFGQGTKVEIKRLEDLKNVFPPEVAVFEPSEAEISHTQKATLVCLATGFYPDHVELSWWVNGKEVHSGVCTDPQPLKEQPALNDSRYCLSSRLRVSATFWQNPRNHFRCQVQFYGLSENDEWTQDRAKPVTQIVSAEAWGRADDVIKIHWQEKKSNTILGSQEGNTMKTNDTYMKFSWLTVPEKSLDKEHRCIVRHENNKNGVDQEIIFPPIKTDVITMDPKDNCSKDANDTLLLQLTNTSAYYMYLLLLLKSVVYFAIITCCLLMAMVKRKDSRGRAKRSGSGATNFSLLKQAGDVEENPGPTSMDWIWRILFLVGAATGAHSFEEVQLVESGGGLVQPGGSLRLSCAASGYEFSRSWMNWVRQAPGKGLEWVGRIYPGDGDTNYSGKFKGRFTISADTSKNTAYLQMNSLRAEDTAVYYCARDGSSWDWYFDVWGQGTLVTVSSTRIQNPDPAVYQLRDSKSSDKSVCLFTDFDSQTNVSQSKDSDVYITDKCVLDMRSMDFKSNSAVAWSNKSDFACANAFNNSIIPEDTFFPSPESSDSTDHVKPKETENTKQPSKSCHKPKAIVHTEKVNMMSLTVLGLRMLFAKTVAVNFLLTAKLFFLLTA

SEQ ID NO: 44288 - protein, 733 aa, synthetic construct
MALPVTALLLPLALLLHAARPIQMTQSPSSLSASVGDRVTITCRSSQSIVHSVGNTFLEWYQQKPGKAPKLLIYKVSNRFSGVPSRFSGSGSGTDFTLTISSLQPEDFATYYCFQGSQFPYTFGQGTKVEIKRLEIQNPDPAVYQLRDSKSSDKSVCLFTDFDSQTNVSQSKDSDVYITDKCVLDMRSMDFKSNSAVAWSNKSDFACANAFNNSIIPEDTFFPSPESSDSTDHVKPKETENTKQPSKSCHKPKAIVHTEKVNMMSLTVLGLRMLFAKTVAVNFLLTAKLFFLLTARAKRSGSGVKQTLNFDLLKLAGDVESNPGPTSMDWIWRILFLVGAATGAHSFEEVQLVESGGGLVQPGGSLRLSCAASGYEFSRSWMNWVRQAPGKGLEWVGRIYPGDGDTNYSGKFKGRFTISADTSKNTAYLQMNSLRAEDTAVYYCARDGSSWDWYFDVWGQGTLVTVSSTREDLKNVFPPEVAVFEPSEAEISHTQKATLVCLATGFYPDHVELSWWVNGKEVHSGVCTDPQPLKEQPALNDSRYCLSSRLRVSATFWQNPRNHFRCQVQFYGLSENDEWTQDRAKPVTQIVSAEAWGRADDVIKIHWQEKKSNTILGSQEGNTMKTNDTYMKFSWLTVPEKSLDKEHRCIVRHENNKNGVDQEIIFPPIKTDVITMDPKDNCSKDANDTLLLQLTNTSAYYMYLLLLLKSVVYFAIITCCLLMAMVKRKDSRG

SEQ ID NO: 44289 - protein, 864 aa, synthetic construct
MALPVTALLLPLALLLHAARPEVQLVESGGGLVQPGGSLRLSCAASGFSFSDFWMSWVRQAPGKGLEWVATISQAGSEKDYVDSVKGRFTISRDNAKKSLYLQMNSLRAEDTAVYYCASGVYSFDYRGQGTLVTVSSGTGGGGSGGGGSGGGGSEFIQMTQSPSSLSASVGDRVTITCRSSQSIVHSVGNTFLEWYQQKPGKAPKLLIYKVSNRFSGVPSRFSGSGSGTDFTLTISSLQPEDFATYYCFQGSQFPYTFGQGTKVEIKRLEDLKNVFPPEVAVFEPSEAEISHTQKATLVCLATGFYPDHVELSWWVNGKEVHSGVCTDPQPLKEQPALNDSRYCLSSRLRVSATFWQNPRNHFRCQVQFYGLSENDEWTQDRAKPVTQIVSAEAWGRADDVIKIHWQEKKSNTILGSQEGNTMKTNDTYMKFSWLTVPEKSLDKEHRCIVRHENNKNGVDQEIIFPPIKTDVITMDPKDNCSKDANDTLLLQLTNTSAYYMYLLLLLKSVVYFAIITCCLLMAMVKRKDSRGRAKRSGSGATNFSLLKQAGDVEENPGPTSMDWIWRILFLVGAATGAHSFEEVQLVESGGGLVQPGGSLRLSCAASGYEFSRSWMNWVRQAPGKGLEWVGRIYPGDGDTNYSGKFKGRFTISADTSKNTAYLQMNSLRAEDTAVYYCARDGSSWDWYFDVWGQGTLVTVSSTRIQNPDPAVYQLRDSKSSDKSVCLFTDFDSQTNVSQSKDSDVYITDKCVLDMRSMDFKSNSAVAWSNKSDFACANAFNNSIIPEDTFFPSPESSDSTDHVKPKETENTKQPSKSCHKPKAIVHTEKVNMMSLTVLGLRMLFAKTVAVNFLLTAKLFFLLTA

SEQ ID NO: 44290 - protein, 868 aa, synthetic construct
MALPVTALLLPLALLLHAARPEVQLVESGGGLVQPGGSLRLSCAASGFSFSDFWMSWVRQAPGKGLEWVATISQAGSEKDYVDSVKGRFTISRDNAKKSLYLQMNSLRAEDTAVYYCASGVYSFDYRGQGTLVTVSSGTGGGGSGGGGSGGGGSEFIQMTQSPSSLSASVGDRVTITCRSSQSIVHSVGNTFLEWYQQKPGKAPKLLIYKVSNRFSGVPSRFSGSGSGTDFTLTISSLQPEDFATYYCFQGSQFPYTFGQGTKVEIKRLEIQNPDPAVYQLRDSKSSDKSVCLFTDFDSQTNVSQSKDSDVYITDKCVLDMRSMDFKSNSAVAWSNKSDFACANAFNNSIIPEDTFFPSPESSDSTDHVKPKETENTKQPSKSCHKPKAIVHTEKVNMMSLTVLGLRMLFAKTVAVNFLLTAKLFFLLTARAKRSGSGVKQTLNFDLLKLAGDVESNPGPTSMDWIWRILFLVGAATGAHSFEEVQLVESGGGLVQPGGSLRLSCAASGYEFSRSWMNWVRQAPGKGLEWVGRIYPGDGDTNYSGKFKGRFTISADTSKNTAYLQMNSLRAEDTAVYYCARDGSSWDWYFDVWGQGTLVTVSSTREDLKNVFPPEVAVFEPSEAEISHTQKATLVCLATGFYPDHVELSWWVNGKEVHSGVCTDPQPLKEQPALNDSRYCLSSRLRVSATFWQNPRNHFRCQVQFYGLSENDEWTQDRAKPVTQIVSAEAWGRADDVIKIHWQEKKSNTILGSQEGNTMKTNDTYMKFSWLTVPEKSLDKEHRCIVRHENNKNGVDQEIIFPPIKTDVITMDPKDNCSKDANDTLLLQLTNTSAYYMYLLLLLKSVVYFAIITCCLLMAMVKRKDSRG

SEQ ID NO: 44291 - protein, 1001 aa, synthetic construct
MALPVTALLLPLALLLHAARPEVQLVESGGGLVQPGGSLRLSCAASGFSFSDFWMSWVRQAPGKGLEWVATISQAGSEKDYVDSVKGRFTISRDNAKKSLYLQMNSLRAEDTAVYYCASGVYSFDYRGQGTLVTVSSGTGGGGSGGGGSGGGGSEFIQMTQSPSSLSASVGDRVTITCRSSQSIVHSVGNTFLEWYQQKPGKAPKLLIYKVSNRFSGVPSRFSGSGSGTDFTLTISSLQPEDFATYYCFQGSQFPYTFGQGTKVEIKRLEDLKNVFPPEVAVFEPSEAEISHTQKATLVCLATGFYPDHVELSWWVNGKEVHSGVCTDPQPLKEQPALNDSRYCLSSRLRVSATFWQNPRNHFRCQVQFYGLSENDEWTQDRAKPVTQIVSAEAWGRADDVIKIHWQEKKSNTILGSQEGNTMKTNDTYMKFSWLTVPEKSLDKEHRCIVRHENNKNGVDQEIIFPPIKTDVITMDPKDNCSKDANDTLLLQLTNTSAYYMYLLLLLKSVVYFAIITCCLLMAMVKRKDSRGRAKRSGSGATNFSLLKQAGDVEENPGPTSMDWIWRILFLVGAATGAHSGPQLQLQESGPGLVKPSETLSLTCTVSGDSISSGDYYWGWIRQPPGKGLEWIGHIYYSGVTYYNPSLKSRVTISVDTSRNQFSLKLSSVTAADTAVYYCTREDSSNWRSRGQGTLVTVSSGSGGGGSGGGGSGGGGSFEEVQLVESGGGLVQPGGSLRLSCAASGYEFSRSWMNWVRQAPGKGLEWVGRIYPGDGDTNYSGKFKGRFTISADTSKNTAYLQMNSLRAEDTAVYYCARDGSSWDWYFDVWGQGTLVTVSSTRIQNPDPAVYQLRDSKSSDKSVCLFTDFDSQTNVSQSKDSDVYITDKCVLDMRSMDFKSNSAVAWSNKSDFACANAFNNSIIPEDTFFPSPESSDSTDHVKPKETENTKQPSKSCHKPKAIVHTEKVNMMSLTVLGLRMLFAKTVAVNFLLTAKLFFLLTA

SEQ ID NO: 44292 - protein, 1005 aa, synthetic construct
MALPVTALLLPLALLLHAARPEVQLVESGGGLVQPGGSLRLSCAASGFSFSDFWMSWVRQAPGKGLEWVATISQAGSEKDYVDSVKGRFTISRDNAKKSLYLQMNSLRAEDTAVYYCASGVYSFDYRGQGTLVTVSSGTGGGGSGGGGSGGGGSEFIQMTQSPSSLSASVGDRVTITCRSSQSIVHSVGNTFLEWYQQKPGKAPKLLIYKVSNRFSGVPSRFSGSGSGTDFTLTISSLQPEDFATYYCFQGSQFPYTFGQGTKVEIKRLEIQNPDPAVYQLRDSKSSDKSVCLFTDFDSQTNVSQSKDSDVYITDKCVLDMRSMDFKSNSAVAWSNKSDFACANAFNNSIIPEDTFFPSPESSDSTDHVKPKETENTKQPSKSCHKPKAIVHTEKVNMMSLTVLGLRMLFAKTVAVNFLLTAKLFFLLTARAKRSGSGVKQTLNFDLLKLAGDVESNPGPTSMDWIWRILFLVGAATGAHSGPQLQLQESGPGLVKPSETLSLTCTVSGDSISSGDYYWGWIRQPPGKGLEWIGHIYYSGVTYYNPSLKSRVTISVDTSRNQFSLKLSSVTAADTAVYYCTREDSSNWRSRGQGTLVTVSSGSGGGGSGGGGSGGGGSFEEVQLVESGGGLVQPGGSLRLSCAASGYEFSRSWMNWVRQAPGKGLEWVGRIYPGDGDTNYSGKFKGRFTISADTSKNTAYLQMNSLRAEDTAVYYCARDGSSWDWYFDVWGQGTLVTVSSTREDLKNVFPPEVAVFEPSEAEISHTQKATLVCLATGFYPDHVELSWWVNGKEVHSGVCTDPQPLKEQPALNDSRYCLSSRLRVSATFWQNPRNHFRCQVQFYGLSENDEWTQDRAKPVTQIVSAEAWGRADDVIKIHWQEKKSNTILGSQEGNTMKTNDTYMKFSWLTVPEKSLDKEHRCIVRHENNKNGVDQEIIFPPIKTDVITMDPKDNCSKDANDTLLLQLTNTSAYYMYLLLLLKSVVYFAIITCCLLMAMVKRKDSRG

SEQ ID NO: 44293 - protein, 727 aa, synthetic construct
MALPVTALLLPLALLLHAARPIQMTQSPSSLSASVGDRVTITCRSSQSIVHSVGNTFLEWYQQKPGKAPKLLIYKVSNRFSGVPSRFSGSGSGTDFTLTISSLQPEDFATYYCFQGSQFPYTFGQGTKVEIKRLEDLKNVFPPEVAVFEPSEAEISHTQKATLVCLATGFYPDHVELSWWVNGKEVHSGVCTDPQPLKEQPALNDSRYCLSSRLRVSATFWQNPRNHFRCQVQFYGLSENDEWTQDRAKPVTQIVSAEAWGRADDVIKIHWQEKKSNTILGSQEGNTMKTNDTYMKFSWLTVPEKSLDKEHRCIVRHENNKNGVDQEIIFPPIKTDVITMDPKDNCSKDANDTLLLQLTNTSAYYMYLLLLLKSVVYFAIITCCLLRRTAFCCNGEKSRAKRSGSGATNFSLLKQAGDVEENPGPTSMDWIWRILFLVGAATGAHSFEEVQLVESGGGLVQPGGSLRLSCAASGYEFSRSWMNWVRQAPGKGLEWVGRIYPGDGDTNYSGKFKGRFTISADTSKNTAYLQMNSLRAEDTAVYYCARDGSSWDWYFDVWGQGTLVTVSSTRIQNPDPAVYQLRDSKSSDKSVCLFTDFDSQTNVSQSKDSDVYITDKCVLDMRSMDFKSNSAVAWSNKSDFACANAFNNSIIPEDTFFPSPESSDSTDHVKPKETENTKQPSKSCHKPKAIVHTEKVNMMSLTVLGLRMLFAKTVAVNFLLTAKLFFL

SEQ ID NO: 44294 - protein, 731 aa, synthetic construct
MALPVTALLLPLALLLHAARPIQMTQSPSSLSASVGDRVTITCRSSQSIVHSVGNTFLEWYQQKPGKAPKLLIYKVSNRFSGVPSRFSGSGSGTDFTLTISSLQPEDFATYYCFQGSQFPYTFGQGTKVEIKRLEIQNPDPAVYQLRDSKSSDKSVCLFTDFDSQTNVSQSKDSDVYITDKCVLDMRSMDFKSNSAVAWSNKSDFACANAFNNSIIPEDTFFPSPESSDSTDHVKPKETENTKQPSKSCHKPKAIVHTEKVNMMSLTVLGLRMLFAKTVAVNFLLTAKLFFLRAKRSGSGVKQTLNFDLLKLAGDVESNPGPTSMDWIWRILFLVGAATGAHSFEEVQLVESGGGLVQPGGSLRLSCAASGYEFSRSWMNWVRQAPGKGLEWVGRIYPGDGDTNYSGKFKGRFTISADTSKNTAYLQMNSLRAEDTAVYYCARDGSSWDWYFDVWGQGTLVTVSSTREDLKNVFPPEVAVFEPSEAEISHTQKATLVCLATGFYPDHVELSWWVNGKEVHSGVCTDPQPLKEQPALNDSRYCLSSRLRVSATFWQNPRNHFRCQVQFYGLSENDEWTQDRAKPVTQIVSAEAWGRADDVIKIHWQEKKSNTILGSQEGNTMKTNDTYMKFSWLTVPEKSLDKEHRCIVRHENNKNGVDQEIIFPPIKTDVITMDPKDNCSKDANDTLLLQLTNTSAYYMYLLLLLKSVVYFAIITCCLLRRTAFCCNGEKS

SEQ ID NO: 44295 - protein, 862 aa, synthetic construct
MALPVTALLLPLALLLHAARPEVQLVESGGGLVQPGGSLRLSCAASGFSFSDFWMSWVRQAPGKGLEWVATISQAGSEKDYVDSVKGRFTISRDNAKKSLYLQMNSLRAEDTAVYYCASGVYSFDYRGQGTLVTVSSGTGGGGSGGGGSGGGGSEFIQMTQSPSSLSASVGDRVTITCRSSQSIVHSVGNTFLEWYQQKPGKAPKLLIYKVSNRFSGVPSRFSGSGSGTDFTLTISSLQPEDFATYYCFQGSQFPYTFGQGTKVEIKRLEDLKNVFPPEVAVFEPSEAEISHTQKATLVCLATGFYPDHVELSWWVNGKEVHSGVCTDPQPLKEQPALNDSRYCLSSRLRVSATFWQNPRNHFRCQVQFYGLSENDEWTQDRAKPVTQIVSAEAWGRADDVIKIHWQEKKSNTILGSQEGNTMKTNDTYMKFSWLTVPEKSLDKEHRCIVRHENNKNGVDQEIIFPPIKTDVITMDPKDNCSKDANDTLLLQLTNTSAYYMYLLLLLKSVVYFAIITCCLLRRTAFCCNGEKSRAKRSGSGATNFSLLKQAGDVEENPGPTSMDWIWRILFLVGAATGAHSFEEVQLVESGGGLVQPGGSLRLSCAASGYEFSRSWMNWVRQAPGKGLEWVGRIYPGDGDTNYSGKFKGRFTISADTSKNTAYLQMNSLRAEDTAVYYCARDGSSWDWYFDVWGQGTLVTVSSTRIQNPDPAVYQLRDSKSSDKSVCLFTDFDSQTNVSQSKDSDVYITDKCVLDMRSMDFKSNSAVAWSNKSDFACANAFNNSIIPEDTFFPSPESSDSTDHVKPKETENTKQPSKSCHKPKAIVHTEKVNMMSLTVLGLRMLFAKTVAVNFLLTAKLFFL

SEQ ID NO: 44296 - protein, 999 aa, synthetic construct
MALPVTALLLPLALLLHAARPEVQLVESGGGLVQPGGSLRLSCAASGFSFSDFWMSWVRQAPGKGLEWVATISQAGSEKDYVDSVKGRFTISRDNAKKSLYLQMNSLRAEDTAVYYCASGVYSFDYRGQGTLVTVSSGTGGGGSGGGGSGGGGSEFIQMTQSPSSLSASVGDRVTITCRSSQSIVHSVGNTFLEWYQQKPGKAPKLLIYKVSNRFSGVPSRFSGSGSGTDFTLTISSLQPEDFATYYCFQGSQFPYTFGQGTKVEIKRLEDLKNVFPPEVAVFEPSEAEISHTQKATLVCLATGFYPDHVELSWWVNGKEVHSGVCTDPQPLKEQPALNDSRYCLSSRLRVSATFWQNPRNHFRCQVQFYGLSENDEWTQDRAKPVTQIVSAEAWGRADDVIKIHWQEKKSNTILGSQEGNTMKTNDTYMKFSWLTVPEKSLDKEHRCIVRHENNKNGVDQEIIFPPIKTDVITMDPKDNCSKDANDTLLLQLTNTSAYYMYLLLLLKSVVYFAIITCCLLRRTAFCCNGEKSRAKRSGSGATNFSLLKQAGDVEENPGPTSMDWIWRILFLVGAATGAHSGPQLQLQESGPGLVKPSETLSLTCTVSGDSISSGDYYWGWIRQPPGKGLEWIGHIYYSGVTYYNPSLKSRVTISVDTSRNQFSLKLSSVTAADTAVYYCTREDSSNWRSRGQGTLVTVSSGSGGGGSGGGGSGGGGSFEEVQLVESGGGLVQPGGSLRLSCAASGYEFSRSWMNWVRQAPGKGLEWVGRIYPGDGDTNYSGKFKGRFTISADTSKNTAYLQMNSLRAEDTAVYYCARDGSSWDWYFDVWGQGTLVTVSSTRIQNPDPAVYQLRDSKSSDKSVCLFTDFDSQTNVSQSKDSDVYITDKCVLDMRSMDFKSNSAVAWSNKSDFACANAFNNSIIPEDTFFPSPESSDSTDHVKPKETENTKQPSKSCHKPKAIVHTEKVNMMSLTVLGLRMLFAKTVAVNFLLTAKLFFL

SEQ ID NO: 44297 - protein, 625 aa, synthetic construct
MALPVTALLLPLALLLHAARPIQMTQSPSSLSASVGDRVTITCRSSQSIVHSVGNTFLEWYQQKPGKAPKLLIYKVSNRFSGVPSRFSGSGSGTDFTLTISSLQPEDFATYYCFQGSQFPYTFGQGTKVEIKRLEDLKNVFPPEVAVFEPSEAEISHTQKATLVCLATGFYPDHVELSWWVNGKEVHSGVSTDPQPLKEQPALNDSRYCLSSRLRVSATFWQNPRNHFRCQVQFYGLSENDEWTQDRAKPVTQIVSAEAWGRADCDVKLVEKSFETDTNLNFQNLSVIGFRILLLKVAGFNLLMTLRLWSSRAKRSGSGATNFSLLKQAGDVEENPGPTSMDWIWRILFLVGAATGAHSFEEVQLVESGGGLVQPGGSLRLSCAASGYEFSRSWMNWVRQAPGKGLEWVGRIYPGDGDTNYSGKFKGRFTISADTSKNTAYLQMNSLRAEDTAVYYCARDGSSWDWYFDVWGQGTLVTVSSTRIQNPDPAVYQLRDSKSSDKSVCLFTDFDSQTNVSQSKDSDVYITDKTVLDMRSMDFKSNSAVAWSNKSDFACANAFNNSIIPEDTFFPSPESSCGFTSESYQQGVLSATILYEILLGKATLYAVLVSALVLMAMVKRKDSRG

SEQ ID NO: 44298 - protein, 625 aa, synthetic construct
MALPVTALLLPLALLLHAARPIQMTQSPSSLSASVGDRVTITCRSSQSIVHSVGNTFLEWYQQKPGKAPKLLIYKVSNRFSGVPSRFSGSGSGTDFTLTISSLQPEDFATYYCFQGSQFPYTFGQGTKVEIKRLEDLKNVFPPEVAVFEPSEAEISHTQKATLVCLATGFYPDHVELSWWVNGKEVHSGVSTDPQPLKEQPALNDSRYCLSSRLRVSATFWQNPRNHFRCQVQFYGLSENDEWTQDRAKPVTQIVSAEAWGRADCGFTSESYQQGVLSATNLSVIGFRILLLKVAGFNLLMTLRLWSSRAKRSGSGATNFSLLKQAGDVEENPGPTSMDWIWRILFLVGAATGAHSFEEVQLVESGGGLVQPGGSLRLSCAASGYEFSRSWMNWVRQAPGKGLEWVGRIYPGDGDTNYSGKFKGRFTISADTSKNTAYLQMNSLRAEDTAVYYCARDGSSWDWYFDVWGQGTLVTVSSTRIQNPDPAVYQLRDSKSSDKSVCLFTDFDSQTNVSQSKDSDVYITDKTVLDMRSMDFKSNSAVAWSNKSDFACANAFNNSIIPEDTFFPSPESSCDVKLVEKSFETDTNLNFQILYEILLGKATLYAVLVSALVLMAMVKRKDSRG

SEQ ID NO: 44299 - protein, 729 aa, synthetic construct
MALPVTALLLPLALLLHAARPIQMTQSPSSLSASVGDRVTITCRSSQSIVHSVGNTFLEWYQQKPGKAPKLLIYKVSNRFSGVPSRFSGSGSGTDFTLTISSLQPEDFATYYCFQGSQFPYTFGQGTKVEIKRLEDLKNVFPPEVAVFEPSEAEISHTQKATLVCLATGFYPDHVELSWWVNGKEVHSGVSTDPQPLKEQPALNDSRYCLSSRLRVSATFWQNPRNHFRCQVQFYGLSENDEWTQDRAKPVTQIVSAEAWGRADDVIKIHWQEKKSNTILGSQEGNTMKTNDTYMKFSWLTVPEKSLDKEHRCIVRHENNKNGVDQEIIFPPIKTDVITMDPKDNCSKDANDTLLLQLTNTSAYYMYLLLLLKSVVYFAIITCCLLMAMVKRKDSRGRAKRSGSGATNFSLLKQAGDVEENPGPTSMDWIWRILFLVGAATGAHSFEEVQLVESGGGLVQPGGSLRLSCAASGYEFSRSWMNWVRQAPGKGLEWVGRIYPGDGDTNYSGKFKGRFTISADTSKNTAYLQMNSLRAEDTAVYYCARDGSSWDWYFDVWGQGTLVTVSSTRIQNPDPAVYQLRDSKSSDKSVCLFTDFDSQTNVSQSKDSDVYITDKTVLDMRSMDFKSNSAVAWSNKSDFACANAFNNSIIPEDTFFPSPESSDSTDHVKPKETENTKQPSKSCHKPKAIVHTEKVNMMSLTVLGLRMLFAKTVAVNFLLTAKLFFLLTA

SEQ ID NO: 44300 - protein, 727 aa, synthetic construct
MALPVTALLLPLALLLHAARPIQMTQSPSSLSASVGDRVTITCRSSQSIVHSVGNTFLEWYQQKPGKAPKLLIYKVSNRFSGVPSRFSGSGSGTDFTLTISSLQPEDFATYYCFQGSQFPYTFGQGTKVEIKRLEDLKNVFPPEVAVFEPSEAEISHTQKATLVCLATGFYPDHVELSWWVNGKEVHSGVSTDPQPLKEQPALNDSRYCLSSRLRVSATFWQNPRNHFRCQVQFYGLSENDEWTQDRAKPVTQIVSAEAWGRADDVIKIHWQEKKSNTILGSQEGNTMKTNDTYMKFSWLTVPEKSLDKEHRCIVRHENNKNGVDQEIIFPPIKTDVITMDPKDNCSKDANDTLLLQLTNTSAYYMYLLLLLKSVVYFAIITCCLLRRTAFCCNGEKSRAKRSGSGATNFSLLKQAGDVEENPGPTSMDWIWRILFLVGAATGAHSFEEVQLVESGGGLVQPGGSLRLSCAASGYEFSRSWMNWVRQAPGKGLEWVGRIYPGDGDTNYSGKFKGRFTISADTSKNTAYLQMNSLRAEDTAVYYCARDGSSWDWYFDVWGQGTLVTVSSTRIQNPDPAVYQLRDSKSSDKSVCLFTDFDSQTNVSQSKDSDVYITDKTVLDMRSMDFKSNSAVAWSNKSDFACANAFNNSIIPEDTFFPSPESSDSTDHVKPKETENTKQPSKSCHKPKAIVHTEKVNMMSLTVLGLRMLFAKTVAVNFLLTAKLFFL

SEQ ID NO: 44301 - protein, 870 aa, synthetic construct
MALPVTALLLPLALLLHAARPLEEDLKNVFPPEVAVFEPSEAEISHTQKATLVCLATGFYPDHVELSWWVNGKEVHSGVCTDPQPLKEQPALNDSRYCLSSRLRVSATFWQNPRNHFRCQVQFYGLSENDEWTQDRAKPVTQIVSAEAWGRADCGFTSESYQQGVLSATNLSVIGFRILLLKVAGFNLLMTLRLWSSRAKRSGSGATNFSLLKQAGDVEENPGPTSMALPVTALLLPLALLLHAARPIQMTQSPSSLSASVGDRVTITCRSSQSIVHSVGNTFLEWYQQKPGKAPKLLIYKVSNRFSGVPSRFSGSGSGTDFTLTISSLQPEDFATYYCFQGSQFPYTFGQGTKVEIKRGGGGSGGGGSGGGGSEVQLVESGGGLVQPGGSLRLSCAASGYEFSRSWMNWVRQAPGKGLEWVGRIYPGDGDTNYSGKFKGRFTISADTSKNTAYLQMNSLRAEDTAVYYCARDGSSWDWYFDVWGQGTLVTVSSTRIQNPDPAVYQLRDSKSSDKSVCLFTDFDSQTNVSQSKDSDVYITDKCVLDMRSMDFKSNSAVAWSNKSDFACANAFNNSIIPEDTFFPSPESSCDVKLVEKSFETDTNLNFQILYEVIGFRILLLKVAGFNLLMTLRLWSSRAKRSGSGVKQTLNFDLLKLAGDVESNPGPSRGHMTEYKPTVRLATRDDVPRAVRTLAAAFADYPATRHTVDPDRHIERVTELQELFLTRVGLDIGKVWVADDGAAVAVWTTPESVEAGAVFAEIGPRMAELSGSRLAAQQQMEGLLAPHRPKEPAWFLATVGVSPDHQGKGLGSAVVLPGVEAAERAGVPAFLETSAPRNLPFYERLGFTVTADVEVPEGPRTWCMTRKPGA

SEQ ID NO: 44302 - protein, 870 aa, synthetic construct
MALPVTALLLPLALLLHAARPLEIQNPDPAVYQLRDSKSSDKSVCLFTDFDSQTNVSQSKDSDVYITDKCVLDMRSMDFKSNSAVAWSNKSDFACANAFNNSIIPEDTFFPSPESSCDVKLVEKSFETDTNLNFQILYEVIGFRILLLKVAGFNLLMTLRLWSSRAKRSGSGATNFSLLKQAGDVEENPGPTSMALPVTALLLPLALLLHAARPIQMTQSPSSLSASVGDRVTITCRSSQSIVHSVGNTFLEWYQQKPGKAPKLLIYKVSNRFSGVPSRFSGSGSGTDFTLTISSLQPEDFATYYCFQGSQFPYTFGQGTKVEIKRGGGGSGGGGSGGGGSEVQLVESGGGLVQPGGSLRLSCAASGYEFSRSWMNWVRQAPGKGLEWVGRIYPGDGDTNYSGKFKGRFTISADTSKNTAYLQMNSLRAEDTAVYYCARDGSSWDWYFDVWGQGTLVTVSSTREDLKNVFPPEVAVFEPSEAEISHTQKATLVCLATGFYPDHVELSWWVNGKEVHSGVCTDPQPLKEQPALNDSRYCLSSRLRVSATFWQNPRNHFRCQVQFYGLSENDEWTQDRAKPVTQIVSAEAWGRADCGFTSESYQQGVLSATNLSVIGFRILLLKVAGFNLLMTLRLWSSRAKRSGSGVKQTLNFDLLKLAGDVESNPGPSRGHMTEYKPTVRLATRDDVPRAVRTLAAAFADYPATRHTVDPDRHIERVTELQELFLTRVGLDIGKVWVADDGAAVAVWTTPESVEAGAVFAEIGPRMAELSGSRLAAQQQMEGLLAPHRPKEPAWFLATVGVSPDHQGKGLGSAVVLPGVEAAERAGVPAFLETSAPRNLPFYERLGFTVTADVEVPEGPRTWCMTRKPGA

SEQ ID NO: 44303 - protein, 870 aa, synthetic construct; identical to SEQ ID NO: 44301

SEQ ID NO: 44304 - protein, 978 aa, synthetic construct
MALPVTALLLPLALLLHAARPLEEDLKNVFPPEVAVFEPSEAEISHTQKATLVCLATGFYPDHVELSWWVNGKEVHSGVSTDPQPLKEQPALNDSRYCLSSRLRVSATFWQNPRNHFRCQVQFYGLSENDEWTQDRAKPVTQIVSAEAWGRADDVIKIHWQEKKSNTILGSQEGNTMKTNDTYMKFSWLTVPEKSLDKEHRCIVRHENNKNGVDQEIIFPPIKTDVITMDPKDNCSKDANDTLLLQLTNTSAYYMYLLLLLKSVVYFAIITCCLLMAMVKRKDSRGRAKRSGSGATNFSLLKQAGDVEENPGPTSMALPVTALLLPLALLLHAARPIQMTQSPSSLSASVGDRVTITCRSSQSIVHSVGNTFLEWYQQKPGKAPKLLIYKVSNRFSGVPSRFSGSGSGTDFTLTISSLQPEDFATYYCFQGSQFPYTFGQGTKVEIKRGGGGSGGGGSGGGGSEVQLVESGGGLVQPGGSLRLSCAASGYEFSRSWMNWVRQAPGKGLEWVGRIYPGDGDTNYSGKFKGRFTISADTSKNTAYLQMNSLRAEDTAVYYCARDGSSWDWYFDVWGQGTLVTVSSTRIQNPDPAVYQLRDSKSSDKSVCLFTDFDSQTNVSQSKDSDVYITDKTVLDMRSMDFKSNSAVAWSNKSDFACANAFNNSIIPEDTFFPSPESSDSTDHVKPKETENTKQPSKSCHKPKAIVHTEKVNMMSLTVLGLRMLFAKTVAVNFLLTAKLFFLLTARAKRSGSGVKQTLNFDLLKLAGDVESNPGPSRGHMTEYKPTVRLATRDDVPRAVRTLAAAFADYPATRHTVDPDRHIERVTELQELFLTRVGLDIGKVWVADDGAAVAVWTTPESVEAGAVFAEIGPRMAELSGSRLAAQQQMEGLLAPHRPKEPAWFLATVGVSPDHQGKGLGSAVVLPGVEAAERAGVPAFLETSAPRNLPFYERLGFTVTADVEVPEGPRTWCMTRKPGA

SEQ ID NO: 44305 - protein, 978 aa, synthetic construct
MALPVTALLLPLALLLHAARPLEIQNPDPAVYQLRDSKSSDKSVCLFTDFDSQTNVSQSKDSDVYITDKTVLDMRSMDFKSNSAVAWSNKSDFACANAFNNSIIPEDTFFPSPESSDSTDHVKPKETENTKQPSKSCHKPKAIVHTEKVNMMSLTVLGLRMLFAKTVAVNFLLTAKLFFLLTARAKRSGSGATNFSLLKQAGDVEENPGPTSMALPVTALLLPLALLLHAARPIQMTQSPSSLSASVGDRVTITCRSSQSIVHSVGNTFLEWYQQKPGKAPKLLIYKVSNRFSGVPSRFSGSGSGTDFTLTISSLQPEDFATYYCFQGSQFPYTFGQGTKVEIKRGGGGSGGGGSGGGGSEVQLVESGGGLVQPGGSLRLSCAASGYEFSRSWMNWVRQAPGKGLEWVGRIYPGDGDTNYSGKFKGRFTISADTSKNTAYLQMNSLRAEDTAVYYCARDGSSWDWYFDVWGQGTLVTVSSTREDLKNVFPPEVAVFEPSEAEISHTQKATLVCLATGFYPDHVELSWWVNGKEVHSGVSTDPQPLKEQPALNDSRYCLSSRLRVSATFWQNPRNHFRCQVQFYGLSENDEWTQDRAKPVTQIVSAEAWGRADDVIKIHWQEKKSNTILGSQEGNTMKTNDTYMKFSWLTVPEKSLDKEHRCIVRHENNKNGVDQEIIFPPIKTDVITMDPKDNCSKDANDTLLLQLTNTSAYYMYLLLLLKSVVYFAIITCCLLMAMVKRKDSRGRAKRSGSGVKQTLNFDLLKLAGDVESNPGPSRGHMTEYKPTVRLATRDDVPRAVRTLAAAFADYPATRHTVDPDRHIERVTELQELFLTRVGLDIGKVWVADDGAAVAVWTTPESVEAGAVFAEIGPRMAELSGSRLAAQQQMEGLLAPHRPKEPAWFLATVGVSPDHQGKGLGSAVVLPGVEAAERAGVPAFLETSAPRNLPFYERLGFTVTADVEVPEGPRTWCMTRKPGA

SEQ ID NO: 44306 - protein, 976 aa, synthetic construct
MALPVTALLLPLALLLHAARPLEEDLKNVFPPEVAVFEPSEAEISHTQKATLVCLATGFYPDHVELSWWVNGKEVHSGVCTDPQPLKEQPALNDSRYCLSSRLRVSATFWQNPRNHFRCQVQFYGLSENDEWTQDRAKPVTQIVSAEAWGRADDVIKIHWQEKKSNTILGSQEGNTMKTNDTYMKFSWLTVPEKSLDKEHRCIVRHENNKNGVDQEIIFPPIKTDVITMDPKDNCSKDANDTLLLQLTNTSAYYMYLLLLLKSVVYFAIITCCLLRRTAFCCNGEKSRAKRSGSGATNFSLLKQAGDVEENPGPTSMALPVTALLLPLALLLHAARPIQMTQSPSSLSASVGDRVTITCRSSQSIVHSVGNTFLEWYQQKPGKAPKLLIYKVSNRFSGVPSRFSGSGSGTDFTLTISSLQPEDFATYYCFQGSQFPYTFGQGTKVEIKRGGGGSGGGGSGGGGSEVQLVESGGGLVQPGGSLRLSCAASGYEFSRSWMNWVRQAPGKGLEWVGRIYPGDGDTNYSGKFKGRFTISADTSKNTAYLQMNSLRAEDTAVYYCARDGSSWDWYFDVWGQGTLVTVSSTRIQNPDPAVYQLRDSKSSDKSVCLFTDFDSQTNVSQSKDSDVYITDKCVLDMRSMDFKSNSAVAWSNKSDFACANAFNNSIIPEDTFFPSPESSDSTDHVKPKETENTKQPSKSCHKPKAIVHTEKVNMMSLTVLGLRMLFAKTVAVNFLLTAKLFFLRAKRSGSGVKQTLNFDLLKLAGDVESNPGPSRGHMTEYKPTVRLATRDDVPRAVRTLAAAFADYPATRHTVDPDRHIERVTELQELFLTRVGLDIGKVWVADDGAAVAVWTTPESVEAGAVFAEIGPRMAELSGSRLAAQQQMEGLLAPHRPKEPAWFLATVGVSPDHQGKGLGSAVVLPGVEAAERAGVPAFLETSAPRNLPFYERLGFTVTADVEVPEGPRTWCMTRKPGA

SEQ ID NO: 44307 - protein, 976 aa, synthetic construct
MALPVTALLLPLALLLHAARPLEIQNPDPAVYQLRDSKSSDKSVCLFTDFDSQTNVSQSKDSDVYITDKCVLDMRSMDFKSNSAVAWSNKSDFACANAFNNSIIPEDTFFPSPESSDSTDHVKPKETENTKQPSKSCHKPKAIVHTEKVNMMSLTVLGLRMLFAKTVAVNFLLTAKLFFLRAKRSGSGATNFSLLKQAGDVEENPGPTSMALPVTALLLPLALLLHAARPIQMTQSPSSLSASVGDRVTITCRSSQSIVHSVGNTFLEWYQQKPGKAPKLLIYKVSNRFSGVPSRFSGSGSGTDFTLTISSLQPEDFATYYCFQGSQFPYTFGQGTKVEIKRGGGGSGGGGSGGGGSEVQLVESGGGLVQPGGSLRLSCAASGYEFSRSWMNWVRQAPGKGLEWVGRIYPGDGDTNYSGKFKGRFTISADTSKNTAYLQMNSLRAEDTAVYYCARDGSSWDWYFDVWGQGTLVTVSSTREDLKNVFPPEVAVFEPSEAEISHTQKATLVCLATGFYPDHVELSWWVNGKEVHSGVCTDPQPLKEQPALNDSRYCLSSRLRVSATFWQNPRNHFRCQVQFYGLSENDEWTQDRAKPVTQIVSAEAWGRADDVIKIHWQEKKSNTILGSQEGNTMKTNDTYMKFSWLTVPEKSLDKEHRCIVRHENNKNGVDQEIIFPPIKTDVITMDPKDNCSKDANDTLLLQLTNTSAYYMYLLLLLKSVVYFAIITCCLLRRTAFCCNGEKSRAKRSGSGVKQTLNFDLLKLAGDVESNPGPSRGHMTEYKPTVRLATRDDVPRAVRTLAAAFADYPATRHTVDPDRHIERVTELQELFLTRVGLDIGKVWVADDGAAVAVWTTPESVEAGAVFAEIGPRMAELSGSRLAAQQQMEGLLAPHRPKEPAWFLATVGVSPDHQGKGLGSAVVLPGVEAAERAGVPAFLETSAPRNLPFYERLGFTVTADVEVPEGPRTWCMTRKPGA

SEQ ID NO: 44308 - protein, 976 aa, synthetic construct
MALPVTALLLPLALLLHAARPLEEDLKNVFPPEVAVFEPSEAEISHTQKATLVCLATGFYPDHVELSWWVNGKEVHSGVSTDPQPLKEQPALNDSRYCLSSRLRVSATFWQNPRNHFRCQVQFYGLSENDEWTQDRAKPVTQIVSAEAWGRADDVIKIHWQEKKSNTILGSQEGNTMKTNDTYMKFSWLTVPEKSLDKEHRCIVRHENNKNGVDQEIIFPPIKTDVITMDPKDNCSKDANDTLLLQLTNTSAYYMYLLLLLKSVVYFAIITCCLLRRTAFCCNGEKSRAKRSGSGATNFSLLKQAGDVEENPGPTSMALPVTALLLPLALLLHAARPIQMTQSPSSLSASVGDRVTITCRSSQSIVHSVGNTFLEWYQQKPGKAPKLLIYKVSNRFSGVPSRFSGSGSGTDFTLTISSLQPEDFATYYCFQGSQFPYTFGQGTKVEIKRGGGGSGGGGSGGGGSEVQLVESGGGLVQPGGSLRLSCAASGYEFSRSWMNWVRQAPGKGLEWVGRIYPGDGDTNYSGKFKGRFTISADTSKNTAYLQMNSLRAEDTAVYYCARDGSSWDWYFDVWGQGTLVTVSSTRIQNPDPAVYQLRDSKSSDKSVCLFTDFDSQTNVSQSKDSDVYITDKTVLDMRSMDFKSNSAVAWSNKSDFACANAFNNSIIPEDTFFPSPESSDSTDHVKPKETENTKQPSKSCHKPKAIVHTEKVNMMSLTVLGLRMLFAKTVAVNFLLTAKLFFLRAKRSGSGVKQTLNFDLLKLAGDVESNPGPSRGHMTEYKPTVRLATRDDVPRAVRTLAAAFADYPATRHTVDPDRHIERVTELQELFLTRVGLDIGKVWVADDGAAVAVWTTPESVEAGAVFAEIGPRMAELSGSRLAAQQQMEGLLAPHRPKEPAWFLATVGVSPDHQGKGLGSAVVLPGVEAAERAGVPAFLETSAPRNLPFYERLGFTVTADVEVPEGPRTWCMTRKPGA

SEQ ID NO: 44309 - protein, 976 aa, synthetic construct
MALPVTALLLPLALLLHAARPLEIQNPDPAVYQLRDSKSSDKSVCLFTDFDSQTNVSQSKDSDVYITDKTVLDMRSMDFKSNSAVAWSNKSDFACANAFNNSIIPEDTFFPSPESSDSTDHVKPKETENTKQPSKSCHKPKAIVHTEKVNMMSLTVLGLRMLFAKTVAVNFLLTAKLFFLRAKRSGSGATNFSLLKQAGDVEENPGPTSMALPVTALLLPLALLLHAARPIQMTQSPSSLSASVGDRVTITCRSSQSIVHSVGNTFLEWYQQKPGKAPKLLIYKVSNRFSGVPSRFSGSGSGTDFTLTISSLQPEDFATYYCFQGSQFPYTFGQGTKVEIKRGGGGSGGGGSGGGGSEVQLVESGGGLVQPGGSLRLSCAASGYEFSRSWMNWVRQAPGKGLEWVGRIYPGDGDTNYSGKFKGRFTISADTSKNTAYLQMNSLRAEDTAVYYCARDGSSWDWYFDVWGQGTLVTVSSTREDLKNVFPPEVAVFEPSEAEISHTQKATLVCLATGFYPDHVELSWWVNGKEVHSGVSTDPQPLKEQPALNDSRYCLSSRLRVSATFWQNPRNHFRCQVQFYGLSENDEWTQDRAKPVTQIVSAEAWGRADDVIKIHWQEKKSNTILGSQEGNTMKTNDTYMKFSWLTVPEKSLDKEHRCIVRHENNKNGVDQEIIFPPIKTDVITMDPKDNCSKDANDTLLLQLTNTSAYYMYLLLLLKSVVYFAIITCCLLRRTAFCCNGEKSRAKRSGSGVKQTLNFDLLKLAGDVESNPGPSRGHMTEYKPTVRLATRDDVPRAVRTLAAAFADYPATRHTVDPDRHIERVTELQELFLTRVGLDIGKVWVADDGAAVAVWTTPESVEAGAVFAEIGPRMAELSGSRLAAQQQMEGLLAPHRPKEPAWFLATVGVSPDHQGKGLGSAVVLPGVEAAERAGVPAFLETSAPRNLPFYERLGFTVTADVEVPEGPRTWCMTRKPGA

SEQ ID NO: 44310 - protein, 874 aa, synthetic construct
MALPVTALLLPLALLLHAARPLEEDLKNVFPPEVAVFEPSKAEIAHTQKATLVCLATGFYPDHVELSWWVNGKEVHSGVCTDPQPLKEQPALNDSRYCLSSRLRVSATFWQNPRNHFRCQVQFYGLSENDEWTQDRAKPVTQIVSAEAWGRADCGITSASYHQGVLSATILYEILLGKATLYAVLVSALVLMAMVKRKDSRGRAKRSGSGATNFSLLKQAGDVEENPGPTSMALPVTALLLPLALLLHAARPIQMTQSPSSLSASVGDRVTITCRSSQSIVHSVGNTFLEWYQQKPGKAPKLLIYKVSNRFSGVPSRFSGSGSGTDFTLTISSLQPEDFATYYCFQGSQFPYTFGQGTKVEIKRGGGGSGGGGSGGGGSEVQLVESGGGLVQPGGSLRLSCAASGYEFSRSWMNWVRQAPGKGLEWVGRIYPGDGDTNYSGKFKGRFTISADTSKNTAYLQMNSLRAEDTAVYYCARDGSSWDWYFDVWGQGTLVTVSSTRIQNPDPAVYQLRDSKSSDKSVCLFTDFDSQTNVSQSKDSDVYITDKCVLDMRSMDFKSNSAVAWSNKSDFACANAFNNSIIPEDTFFPSSDVPCDVKLVEKSFETDTNLNFQNLSVIGFRILLLKVAGFNLLMTLRLWSSRAKRSGSGVKQTLNFDLLKLAGDVESNPGPSRGHMTEYKPTVRLATRDDVPRAVRTLAAAFADYPATRHTVDPDRHIERVTELQELFLTRVGLDIGKVWVADDGAAVAVWTTPESVEAGAVFAEIGPRMAELSGSRLAAQQQMEGLLAPHRPKEPAWFLATVGVSPDHQGKGLGSAVVLPGVEAAERAGVPAFLETSAPRNLPFYERLGFTVTADVEVPEGPRTWCMTRKPGA

SEQ ID NO: 44311 - protein, 874 aa, synthetic construct
MALPVTALLLPLALLLHAARPLEIQNPDPAVYQLRDSKSSDKSVCLFTDFDSQTNVSQSKDSDVYITDKCVLDMRSMDFKSNSAVAWSNKSDFACANAFNNSIIPEDTFFPSSDVPCDVKLVEKSFETDTNLNFQNLSVIGFRILLLKVAGFNLLMTLRLWSSRAKRSGSGATNFSLLKQAGDVEENPGPTSMALPVTALLLPLALLLHAARPIQMTQSPSSLSASVGDRVTITCRSSQSIVHSVGNTFLEWYQQKPGKAPKLLIYKVSNRFSGVPSRFSGSGSGTDFTLTISSLQPEDFATYYCFQGSQFPYTFGQGTKVEIKRGGGGSGGGGSGGGGSEVQLVESGGGLVQPGGSLRLSCAASGYEFSRSWMNWVRQAPGKGLEWVGRIYPGDGDTNYSGKFKGRFTISADTSKNTAYLQMNSLRAEDTAVYYCARDGSSWDWYFDVWGQGTLVTVSSTREDLKNVFPPEVAVFEPSKAEIAHTQKATLVCLATGFYPDHVELSWWVNGKEVHSGVCTDPQPLKEQPALNDSRYCLSSRLRVSATFWQNPRNHFRCQVQFYGLSENDEWTQDRAKPVTQIVSAEAWGRADCGITSASYHQGVLSATILYEILLGKATLYAVLVSALVLMAMVKRKDSRGRAKRSGSGVKQTLNFDLLKLAGDVESNPGPSRGHMTEYKPTVRLATRDDVPRAVRTLAAAFADYPATRHTVDPDRHIERVTELQELFLTRVGLDIGKVWVADDGAAVAVWTTPESVEAGAVFAEIGPRMAELSGSRLAAQQQMEGLLAPHRPKEPAWFLATVGVSPDHQGKGLGSAVVLPGVEAAERAGVPAFLETSAPRNLPFYERLGFTVTADVEVPEGPRTWCMTRKPGA

SEQ ID NO: 44312 - protein, 767 aa, synthetic construct
MALPVTALLLPLALLLHAARPLEQSFGLLDPKLCYLLDGILFIYGVILTALFLRVKFSRSADAPAYQQGQNQLYNELNLGRREEYDVLDKRRGRDPEMGGKPQRRKNPQEGLYNELQKDKMAEAYSEIGMKGERRRGKGHDGLYQGLSTATKDTYDALHMQALPPRRAKRSGSGATNFSLLKQAGDVEENPGPTSMALPVTALLLPLALLLHAARPIQMTQSPSSLSASVGDRVTITCRSSQSIVHSVGNTFLEWYQQKPGKAPKLLIYKVSNRFSGVPSRFSGSGSGTDFTLTISSLQPEDFATYYCFQGSQFPYTFGQGTKVEIKRGGGGSGGGGSGGGGSEVQLVESGGGLVQPGGSLRLSCAASGYEFSRSWMNWVRQAPGKGLEWVGRIYPGDGDTNYSGKFKGRFTISADTSKNTAYLQMNSLRAEDTAVYYCARDGSSWDWYFDVWGQGTLVTVSSTRELGEPQLCYILDAILFLYGIVLTLLYCRLKIQVRKAAITSYEKSDGVYTGLSTRNQETYETLKHEKPPQRAKRSGSGVKQTLNFDLLKLAGDVESNPGPSRGHMTEYKPTVRLATRDDVPRAVRTLAAAFADYPATRHTVDPDRHIERVTELQELFLTRVGLDIGKVWVADDGAAVAVWTTPESVEAGAVFAEIGPRMAELSGSRLAAQQQMEGLLAPHRPKEPAWFLATVGVSPDHQGKGLGSAVVLPGVEAAERAGVPAFLETSAPRNLPFYERLGFTVTADVEVPEGPRTWCMTRKPGA

SEQ ID NO: 44313 - protein, 978 aa, synthetic construct; identical to SEQ ID NO: 44304

SEQ ID NO: 44314 - protein, 978 aa, synthetic construct; identical to SEQ ID NO: 44305

SEQ ID NO: 44315 - protein, 977 aa, synthetic construct
MALPVTALLLPLALLLHAARPLEEEDLKNVFPPEVAVFEPSEAEISHTQKATLVCLATGFYPDHVELSWWVNGKEVHSGVCTDPQPLKEQPALNDSRYCLSSRLRVSATFWQNPRNHFRCQVQFYGLSENDEWTQDRAKPVTQIVSAEAWGRADDVIKIHWQEKKSNTILGSQEGNTMKTNDTYMKFSWLTVPEKSLDKEHRCIVRHENNKNGVDQEIIFPPIKTDVITMDPKDNCSKDANDTLLLQLTNTSAYYMYLLLLLKSVVYFAIITCCLLRRTAFCCNGEKSRAKRSGSGATNFSLLKQAGDVEENPGPTSMALPVTALLLPLALLLHAARPIQMTQSPSSLSASVGDRVTITCRSSQSIVHSVGNTFLEWYQQKPGKAPKLLIYKVSNRFSGVPSRFSGSGSGTDFTLTISSLQPEDFATYYCFQGSQFPYTFGQGTKVEIKRGGGGSGGGGSGGGGSEVQLVESGGGLVQPGGSLRLSCAASGYEFSRSWMNWVRQAPGKGLEWVGRIYPGDGDTNYSGKFKGRFTISADTSKNTAYLQMNSLRAEDTAVYYCARDGSSWDWYFDVWGQGTLVTVSSTRIQNPDPAVYQLRDSKSSDKSVCLFTDFDSQTNVSQSKDSDVYITDKCVLDMRSMDFKSNSAVAWSNKSDFACANAFNNSIIPEDTFFPSPESSDSTDHVKPKETENTKQPSKSCHKPKAIVHTEKVNMMSLTVLGLRMLFAKTVAVNFLLTAKLFFLRAKRSGSGVKQTLNFDLLKLAGDVESNPGPSRGHMTEYKPTVRLATRDDVPRAVRTLAAAFADYPATRHTVDPDRHIERVTELQELFLTRVGLDIGKVWVADDGAAVAVWTTPESVEAGAVFAEIGPRMAELSGSRLAAQQQMEGLLAPHRPKEPAWFLATVGVSPDHQGKGLGSAVVLPGVEAAERAGVPAFLETSAPRNLPFYERLGFTVTADVEVPEGPRTWCMTRKPGA

SEQ ID NO: 44316 - protein, 977 aa, synthetic construct
MALPVTALLLPLALLLHAARPLEIQNPDPAVYQLRDSKSSDKSVCLFTDFDSQTNVSQSKDSDVYITDKCVLDMRSMDFKSNSAVAWSNKSDFACANAFNNSIIPEDTFFPSPESSDSTDHVKPKETENTKQPSKSCHKPKAIVHTEKVNMMSLTVLGLRMLFAKTVAVNFLLTAKLFFLRAKRSGSGATNFSLLKQAGDVEENPGPTSMALPVTALLLPLALLLHAARPIQMTQSPSSLSASVGDRVTITCRSSQSIVHSVGNTFLEWYQQKPGKAPKLLIYKVSNRFSGVPSRFSGSGSGTDFTLTISSLQPEDFATYYCFQGSQFPYTFGQGTKVEIKRGGGGSGGGGSGGGGSEVQLVESGGGLVQPGGSLRLSCAASGYEFSRSWMNWVRQAPGKGLEWVGRIYPGDGDTNYSGKFKGRFTISADTSKNTAYLQMNSLRAEDTAVYYCARDGSSWDWYFDVWGQGTLVTVSSTREEDLKNVFPPEVAVFEPSEAEISHTQKATLVCLATGFYPDHVELSWWVNGKEVHSGVCTDPQPLKEQPALNDSRYCLSSRLRVSATFWQNPRNHFRCQVQFYGLSENDEWTQDRAKPVTQIVSAEAWGRADDVIKIHWQEKKSNTILGSQEGNTMKTNDTYMKFSWLTVPEKSLDKEHRCIVRHENNKNGVDQEIIFPPIKTDVITMDPKDNCSKDANDTLLLQLTNTSAYYMYLLLLLKSVVYFAIITCCLLRRTAFCCNGEKSRAKRSGSGVKQTLNFDLLKLAGDVESNPGPSRGHMTEYKPTVRLATRDDVPRAVRTLAAAFADYPATRHTVDPDRHIERVTELQELFLTRVGLDIGKVWVADDGAAVAVWTTPESVEAGAVFAEIGPRMAELSGSRLAAQQQMEGLLAPHRPKEPAWFLATVGVSPDHQGKGLGSAVVLPGVEAAERAGVPAFLETSAPRNLPFYERLGFTVTADVEVPEGPRTWCMTRKPGA

SEQ ID NO: 44317 - protein, 874 aa, synthetic construct
MALPVTALLLPLALLLHAARPLEEDLKNVFPPEVAVFEPSEAEISHTQKATLVCLATGFYPDHVELSWWVNGKEVHSGVSTDPQPLKEQPALNDSRYCLSSRLRVSATFWQNPRNHFRCQVQFYGLSENDEWTQDRAKPVTQIVSAEAWGRADCGFTSESYQQGVLSATNLSVIGFRILLLKVAGFNLLMTLRLWSSRAKRSGSGATNFSLLKQAGDVEENPGPTSMALPVTALLLPLALLLHAARPIQMTQSPSSLSASVGDRVTITCRSSQSIVHSVGNTFLEWYQQKPGKAPKLLIYKVSNRFSGVPSRFSGSGSGTDFTLTISSLQPEDFATYYCFQGSQFPYTFGQGTKVEIKRGGGGSGGGGSGGGGSEVQLVESGGGLVQPGGSLRLSCAASGYEFSRSWMNWVRQAPGKGLEWVGRIYPGDGDTNYSGKFKGRFTISADTSKNTAYLQMNSLRAEDTAVYYCARDGSSWDWYFDVWGQGTLVTVSSTRIQNPDPAVYQLRDSKSSDKSVCLFTDFDSQTNVSQSKDSDVYITDKTVLDMRSMDFKSNSAVAWSNKSDFACANAFNNSIIPEDTFFPSPESSCDVKLVEKSFETDTNLNFQILYEILLGKATLYAVLVSALVLMAMVKRKDSRGRAKRSGSGVKQTLNFDLLKLAGDVESNPGPSRGHMTEYKPTVRLATRDDVPRAVRTLAAAFADYPATRHTVDPDRHIERVTELQELFLTRVGLDIGKVWVADDGAAVAVWTTPESVEAGAVFAEIGPRMAELSGSRLAAQQQMEGLLAPHRPKEPAWFLATVGVSPDHQGKGLGSAVVLPGVEAAERAGVPAFLETSAPRNLPFYERLGFTVTADVEVPEGPRTWCMTRKPGA

SEQ ID NO: 44318 - protein, 874 aa, synthetic construct
MALPVTALLLPLALLLHAARPLEIQNPDPAVYQLRDSKSSDKSVCLFTDFDSQTNVSQSKDSDVYITDKTVLDMRSMDFKSNSAVAWSNKSDFACANAFNNSIIPEDTFFPSPESSCDVKLVEKSFETDTNLNFQILYEILLGKATLYAVLVSALVLMAMVKRKDSRGRAKRSGSGATNFSLLKQAGDVEENPGPTSMALPVTALLLPLALLLHAARPIQMTQSPSSLSASVGDRVTITCRSSQSIVHSVGNTFLEWYQQKPGKAPKLLIYKVSNRFSGVPSRFSGSGSGTDFTLTISSLQPEDFATYYCFQGSQFPYTFGQGTKVEIKRGGGGSGGGGSGGGGSEVQLVESGGGLVQPGGSLRLSCAASGYEFSRSWMNWVRQAPGKGLEWVGRIYPGDGDTNYSGKFKGRFTISADTSKNTAYLQMNSLRAEDTAVYYCARDGSSWDWYFDVWGQGTLVTVSSTREDLKNVFPPEVAVFEPSEAEISHTQKATLVCLATGFYPDHVELSWWVNGKEVHSGVSTDPQPLKEQPALNDSRYCLSSRLRVSATFWQNPRNHFRCQVQFYGLSENDEWTQDRAKPVTQIVSAEAWGRADCGFTSESYQQGVLSATNLSVIGFRILLLKVAGFNLLMTLRLWSSRAKRSGSGVKQTLNFDLLKLAGDVESNPGPSRGHMTEYKPTVRLATRDDVPRAVRTLAAAFADYPATRHTVDPDRHIERVTELQELFLTRVGLDIGKVWVADDGAAVAVWTTPESVEAGAVFAEIGPRMAELSGSRLAAQQQMEGLLAPHRPKEPAWFLATVGVSPDHQGKGLGSAVVLPGVEAAERAGVPAFLETSAPRNLPFYERLGFTVTADVEVPEGPRTWCMTRKPGA

SEQ ID NO: 44319 - protein, 874 aa, synthetic construct
MALPVTALLLPLALLLHAARPLEEDLKNVFPPEVAVFEPSEAEISHTQKATLVCLATGFYPDHVELSWWVNGKEVHSGVCTDPQPLKEQPALNDSRYCLSSRLRVSATFWQNPRNHFRCQVQFYGLSENDEWTQDRAKPVTQIVSAEAWGRADCDVKLVEKSFETDTNLNFQNLSVIGFRILLLKVAGFNLLMTLRLWSSRAKRSGSGATNFSLLKQAGDVEENPGPTSMALPVTALLLPLALLLHAARPIQMTQSPSSLSASVGDRVTITCRSSQSIVHSVGNTFLEWYQQKPGKAPKLLIYKVSNRFSGVPSRFSGSGSGTDFTLTISSLQPEDFATYYCFQGSQFPYTFGQGTKVEIKRGGGGSGGGGSGGGGSEVQLVESGGGLVQPGGSLRLSCAASGYEFSRSWMNWVRQAPGKGLEWVGRIYPGDGDTNYSGKFKGRFTISADTSKNTAYLQMNSLRAEDTAVYYCARDGSSWDWYFDVWGQGTLVTVSSTRIQNPDPAVYQLRDSKSSDKSVCLFTDFDSQTNVSQSKDSDVYITDKCVLDMRSMDFKSNSAVAWSNKSDFACANAFNNSIIPEDTFFPSPESSCGFTSESYQQGVLSATILYEILLGKATLYAVLVSALVLMAMVKRKDSRGRAKRSGSGVKQTLNFDLLKLAGDVESNPGPSRGHMTEYKPTVRLATRDDVPRAVRTLAAAFADYPATRHTVDPDRHIERVTELQELFLTRVGLDIGKVWVADDGAAVAVWTTPESVEAGAVFAEIGPRMAELSGSRLAAQQQMEGLLAPHRPKEPAWFLATVGVSPDHQGKGLGSAVVLPGVEAAERAGVPAFLETSAPRNLPFYERLGFTVTADVEVPEGPRTWCMTRKPGA

SEQ ID NO: 44320 - protein, 874 aa, synthetic construct
MALPVTALLLPLALLLHAARPLEEDLKNVFPPEVAVFEPSEAEISHTQKATLVCLATGFYPDHVELSWWVNGKEVHSGVSTDPQPLKEQPALNDSRYCLSSRLRVSATFWQNPRNHFRCQVQFYGLSENDEWTQDRAKPVTQIVSAEAWGRADCDVKLVEKSFETDTNLNFQNLSVIGFRILLLKVAGFNLLMTLRLWSSRAKRSGSGATNFSLLKQAGDVEENPGPTSMALPVTALLLPLALLLHAARPIQMTQSPSSLSASVGDRVTITCRSSQSIVHSVGNTFLEWYQQKPGKAPKLLIYKVSNRFSGVPSRFSGSGSGTDFTLTISSLQPEDFATYYCFQGSQFPYTFGQGTKVEIKRGGGGSGGGGSGGGGSEVQLVESGGGLVQPGGSLRLSCAASGYEFSRSWMNWVRQAPGKGLEWVGRIYPGDGDTNYSGKFKGRFTISADTSKNTAYLQMNSLRAEDTAVYYCARDGSSWDWYFDVWGQGTLVTVSSTRIQNPDPAVYQLRDSKSSDKSVCLFTDFDSQTNVSQSKDSDVYITDKTVLDMRSMDFKSNSAVAWSNKSDFACANAFNNSIIPEDTFFPSPESSCGFTSESYQQGVLSATILYEILLGKATLYAVLVSALVLMAMVKRKDSRGRAKRSGSGVKQTLNFDLLKLAGDVESNPGPSRGHMTEYKPTVRLATRDDVPRAVRTLAAAFADYPATRHTVDPDRHIERVTELQELFLTRVGLDIGKVWVADDGAAVAVWTTPESVEAGAVFAEIGPRMAELSGSRLAAQQQMEGLLAPHRPKEPAWFLATVGVSPDHQGKGLGSAVVLPGVEAAERAGVPAFLETSAPRNLPFYERLGFTVTADVEVPEGPRTWCMTRKPGA

SEQ ID NO: 44321 - protein, 977 aa, synthetic construct
MALPVTALLLPLALLLHAARPLEEEDLKNVFPPEVAVFEPSEAEISHTQKATLVCLATGFYPDHVELSWWVNGKEVHSGVSTDPQPLKEQPALNDSRYCLSSRLRVSATFWQNPRNHFRCQVQFYGLSENDEWTQDRAKPVTQIVSAEAWGRADDVIKIHWQEKKSNTILGSQEGNTMKTNDTYMKFSWLTVPEKSLDKEHRCIVRHENNKNGVDQEIIFPPIKTDVITMDPKDNCSKDANDTLLLQLTNTSAYYMYLLLLLKSVVYFAIITCCLLRRTAFCCNGEKSRAKRSGSGATNFSLLKQAGDVEENPGPTSMALPVTALLLPLALLLHAARPIQMTQSPSSLSASVGDRVTITCRSSQSIVHSVGNTFLEWYQQKPGKAPKLLIYKVSNRFSGVPSRFSGSGSGTDFTLTISSLQPEDFATYYCFQGSQFPYTFGQGTKVEIKRGGGGSGGGGSGGGGSEVQLVESGGGLVQPGGSLRLSCAASGYEFSRSWMNWVRQAPGKGLEWVGRIYPGDGDTNYSGKFKGRFTISADTSKNTAYLQMNSLRAEDTAVYYCARDGSSWDWYFDVWGQGTLVTVSSTRIQNPDPAVYQLRDSKSSDKSVCLFTDFDSQTNVSQSKDSDVYITDKTVLDMRSMDFKSNSAVAWSNKSDFACANAFNNSIIPEDTFFPSPESSDSTDHVKPKETENTKQPSKSCHKPKAIVHTEKVNMMSLTVLGLRMLFAKTVAVNFLLTAKLFFLRAKRSGSGVKQTLNFDLLKLAGDVESNPGPSRGHMTEYKPTVRLATRDDVPRAVRTLAAAFADYPATRHTVDPDRHIERVTELQELFLTRVGLDIGKVWVADDGAAVAVWTTPESVEAGAVFAEIGPRMAELSGSRLAAQQQMEGLLAPHRPKEPAWFLATVGVSPDHQGKGLGSAVVLPGVEAAERAGVPAFLETSAPRNLPFYERLGFTVTADVEVPEGPRTWCMTRKPGA

SEQ ID NO: 44322 - protein, 874 aa, synthetic construct
MALPVTALLLPLALLLHAARPLEEDLKNVFPPEVAVFEPSEAEISHTQKATLVCLATGFYPDHVELSWWVNGKEVHSGVCTDPQPLKEQPALNDSRYCLSSRLRVSATFWQNPRNHFRCQVQFYGLSENDEWTQDRAKPVTQIVSAEAWGRADCGFTSESYQQGVLSATNLSVIGFRILLLKVAGFNLLMTLRLWSSRAKRSGSGATNFSLLKQAGDVEENPGPTSMALPVTALLLPLALLLHAARPIQMTQSPSSLSASVGDRVTITCRSSQSIVHSVGNTFLEWYQQKPGKAPKLLIYKVSNRFSGVPSRFSGSGSGTDFTLTISSLQPEDFATYYCFQGSQFPYTFGQGTKVEIKRGGGGSGGGGSGGGGSEVQLVESGGGLVQPGGSLRLSCAASGYEFSRSWMNWVRQAPGKGLEWVGRIYPGDGDTNYSGKFKGRFTISADTSKNTAYLQMNSLRAEDTAVYYCARDGSSWDWYFDVWGQGTLVTVSSTRIQNPDPAVYQLRDSKSSDKSVCLFTDFDSQTNVSQSKDSDVYITDKCVLDMRSMDFKSNSAVAWSNKSDFACANAFNNSIIPEDTFFPSPESSCDVKLVEKSFETDTNLNFQILYEILLGKATLYAVLVSALVLMAMVKRKDSRGRAKRSGSGVKQTLNFDLLKLAGDVESNPGPSRGHMTEYKPTVRLATRDDVPRAVRTLAAAFADYPATRHTVDPDRHIERVTELQELFLTRVGLDIGKVWVADDGAAVAVWTTPESVEAGAVFAEIGPRMAELSGSRLAAQQQMEGLLAPHRPKEPAWFLATVGVSPDHQGKGLGSAVVLPGVEAAERAGVPAFLETSAPRNLPFYERLGFTVTADVEVPEGPRTWCMTRKPGA

SEQ ID NO: 44323 - protein, 903 aa, synthetic construct
MALPVTALLLPLALLLHAARPLEEEDLKNVFPPEVAVFEPSEAEISHTQKATLVCLATGFYPDHVELSWWVNGKEVHSGVCTDPQPLKEQPALNDSRYCLSSRLRVSATFWQNPRNHFRCQVQFYGLSENDEWTQDRAKPVTQIVSAEAWGRADCGFTSESYQQGVLSATNLSVIGFRILLLKVAGFNLLMTLRLWSSRAKRSGSGATNFSLLKQAGDVEENPGPTSMALPVTALLLPLALLLHAARPIQMTQSPSSLSASVGDRVTITCRSSQSIVHSVGNTFLEWYQQKPGKAPKLLIYKVSNRFSGVPSRFSGSGSGTDFTLTISSLQPEDFATYYCFQGSQFPYTFGQGTKVEIKRGGGGSGGGGSGGGGSEVQLVESGGGLVQPGGSLRLSCAASGYEFSRSWMNWVRQAPGKGLEWVGRIYPGDGDTNYSGKFKGRFTISADTSKNTAYLQMNSLRAEDTAVYYCARDGSSWDWYFDVWGQGTLVTVSSTRGQPKANPTVTLFPPSSEELQANKATLVCLISDFYPGAVTVAWKADGSPVKAGVETTKPSKQSNNKYAASSYLSLTPEQWKSHRSYSCQVTHEGSTVEKTVAPTECSPIKTDVITMDPKDNCSKDANDTLLLQLTNTSAYYMYLLLLLKSVVYFAIITCCLLRRTAFCCNGEKSRAKRSGSGVKQTLNFDLLKLAGDVESNPGPSRGHMTEYKPTVRLATRDDVPRAVRTLAAAFADYPATRHTVDPDRHIERVTELQELFLTRVGLDIGKVWVADDGAAVAVWTTPESVEAGAVFAEIGPRMAELSGSRLAAQQQMEGLLAPHRPKEPAWFLATVGVSPDHQGKGLGSAVVLPGVEAAERAGVPAFLETSAPRNLPFYERLGFTVTADVEVPEGPRTWCMTRKPGA

SEQ ID NO: 44324 - protein, 903 aa, synthetic construct
MALPVTALLLPLALLLHAARPLEGQPKANPTVTLFPPSSEELQANKATLVCLISDFYPGAVTVAWKADGSPVKAGVETTKPSKQSNNKYAASSYLSLTPEQWKSHRSYSCQVTHEGSTVEKTVAPTECSPIKTDVITMDPKDNCSKDANDTLLLQLTNTSAYYMYLLLLLKSVVYFAIITCCLLRRTAFCCNGEKSRAKRSGSGATNFSLLKQAGDVEENPGPTSMALPVTALLLPLALLLHAARPIQMTQSPSSLSASVGDRVTITCRSSQSIVHSVGNTFLEWYQQKPGKAPKLLIYKVSNRFSGVPSRFSGSGSGTDFTLTISSLQPEDFATYYCFQGSQFPYTFGQGTKVEIKRGGGGSGGGGSGGGGSEVQLVESGGGLVQPGGSLRLSCAASGYEFSRSWMNWVRQAPGKGLEWVGRIYPGDGDTNYSGKFKGRFTISADTSKNTAYLQMNSLRAEDTAVYYCARDGSSWDWYFDVWGQGTLVTVSSTREEDLKNVFPPEVAVFEPSEAEISHTQKATLVCLATGFYPDHVELSWWVNGKEVHSGVCTDPQPLKEQPALNDSRYCLSSRLRVSATFWQNPRNHFRCQVQFYGLSENDEWTQDRAKPVTQIVSAEAWGRADCGFTSESYQQGVLSATNLSVIGFRILLLKVAGFNLLMTLRLWSSRAKRSGSGVKQTLNFDLLKLAGDVESNPGPSRGHMTEYKPTVRLATRDDVPRAVRTLAAAFADYPATRHTVDPDRHIERVTELQELFLTRVGLDIGKVWVADDGAAVAVWTTPESVEAGAVFAEIGPRMAELSGSRLAAQQQMEGLLAPHRPKEPAWFLATVGVSPDHQGKGLGSAVVLPGVEAAERAGVPAFLETSAPRNLPFYERLGFTVTADVEVPEGPRTWCMTRKPGA

SEQ ID NO: 44325 - protein, 900 aa, synthetic construct
MALPVTALLLPLALLLHAARPLEEASTKGPSVFPLAPSSKSTSGGTAALGCLVKDYFPEPVTVSWNSGALTSGVHTFPAVLQSSGLYSLSSVVTVPSSSLGTQTYICNVNHKPSNTKVDKRVEPKSCPIKTDVITMDPKDNCSKDANDTLLLQLTNTSAYYMYLLLLLKSVVYFAIITCCLLRRTAFCCNGEKSRAKRSGSGATNFSLLKQAGDVEENPGPTSMALPVTALLLPLALLLHAARPIQMTQSPSSLSASVGDRVTITCRSSQSIVHSVGNTFLEWYQQKPGKAPKLLIYKVSNRFSGVPSRFSGSGSGTDFTLTISSLQPEDFATYYCFQGSQFPYTFGQGTKVEIKRGGGGSGGGGSGGGGSEVQLVESGGGLVQPGGSLRLSCAASGYEFSRSWMNWVRQAPGKGLEWVGRIYPGDGDTNYSGKFKGRFTISADTSKNTAYLQMNSLRAEDTAVYYCARDGSSWDWYFDVWGQGTLVTVSSTRGQPKANPTVTLFPPSSEELQANKATLVCLISDFYPGAVTVAWKADGSPVKAGVETTKPSKQSNNKYAASSYLSLTPEQWKSHRSYSCQVTHEGSTVEKTVAPTECSEVKTDSTDHVKPKETENTKQPSKSCHKPKAIVHTEKVNMMSLTVLGLRMLFAKTVAVNFLLTAKLFFLRAKRSGSGVKQTLNFDLLKLAGDVESNPGPSRGHMTEYKPTVRLATRDDVPRAVRTLAAAFADYPATRHTVDPDRHIERVTELQELFLTRVGLDIGKVWVADDGAAVAVWTTPESVEAGAVFAEIGPRMAELSGSRLAAQQQMEGLLAPHRPKEPAWFLATVGVSPDHQGKGLGSAVVLPGVEAAERAGVPAFLETSAPRNLPFYERLGFTVTADVEVPEGPRTWCMTRKPGA

SEQ ID NO: 44326 - protein, 878 aa, synthetic construct
MALPVTALLLPLALLLHAARPLEEASTKGPSVFPLAPSSKSTSGGTAALGCLVKDYFPEPVTVSWNSGALTSGVHTFPAVLQSSGLYSLSSVVTVPSSSLGTQTYICNVNHKPSNTKVDKRVEPKSCGRADCGFTSESYQQGVLSATILYEILLGKATLYAVLVSALVLMAMVKRKDSRGRAKRSGSGATNFSLLKQAGDVEENPGPTSMALPVTALLLPLALLLHAARPIQMTQSPSSLSASVGDRVTITCRSSQSIVHSVGNTFLEWYQQKPGKAPKLLIYKVSNRFSGVPSRFSGSGSGTDFTLTISSLQPEDFATYYCFQGSQFPYTFGQGTKVEIKRGGGGSGGGGSGGGGSEVQLVESGGGLVQPGGSLRLSCAASGYEFSRSWMNWVRQAPGKGLEWVGRIYPGDGDTNYSGKFKGRFTISADTSKNTAYLQMNSLRAEDTAVYYCARDGSSWDWYFDVWGQGTLVTVSSTRGQPKANPTVTLFPPSSEELQANKATLVCLISDFYPGAVTVAWKADGSPVKAGVETTKPSKQSNNKYAASSYLSLTPEQWKSHRSYSCQVTHEGSTVEKTVAPTECSIPEDTFFPSPESSCDVKLVEKSFETDTNLNFQNLSVIGFRILLLKVAGFNLLMTLRLWSSRAKRSGSGVKQTLNFDLLKLAGDVESNPGPSRGHMTEYKPTVRLATRDDVPRAVRTLAAAFADYPATRHTVDPDRHIERVTELQELFLTRVGLDIGKVWVADDGAAVAVWTTPESVEAGAVFAEIGPRMAELSGSRLAAQQQMEGLLAPHRPKEPAWFLATVGVSPDHQGKGLGSAVVLPGVEAAERAGVPAFLETSAPRNLPFYERLGFTVTADVEVPEGPRTWCMTRKPGA

SEQ ID NO: 44327 - protein, 878 aa, synthetic construct
MALPVTALLLPLALLLHAARPLEEASTKGPSVFPLAPSSKSTSGGTAALGCLVKDYFPEPVTVSWNSGALTSGVHTFPAVLQSSGLYSLSSVVTVPSSSLGTQTYICNVNHKPSNTKVDKRVEPKSCIPEDTFFPSPESSCDVKLVEKSFETDTNLNFQNLSVIGFRILLLKVAGFNLLMTLRLWSSRAKRSGSGATNFSLLKQAGDVEENPGPTSMALPVTALLLPLALLLHAARPIQMTQSPSSLSASVGDRVTITCRSSQSIVHSVGNTFLEWYQQKPGKAPKLLIYKVSNRFSGVPSRFSGSGSGTDFTLTISSLQPEDFATYYCFQGSQFPYTFGQGTKVEIKRGGGGSGGGGSGGGGSEVQLVESGGGLVQPGGSLRLSCAASGYEFSRSWMNWVRQAPGKGLEWVGRIYPGDGDTNYSGKFKGRFTISADTSKNTAYLQMNSLRAEDTAVYYCARDGSSWDWYFDVWGQGTLVTVSSTRGQPKANPTVTLFPPSSEELQANKATLVCLISDFYPGAVTVAWKADGSPVKAGVETTKPSKQSNNKYAASSYLSLTPEQWKSHRSYSCQVTHEGSTVEKTVAPTECSGRADCGFTSESYQQGVLSATILYEILLGKATLYAVLVSALVLMAMVKRKDSRGRAKRSGSGVKQTLNFDLLKLAGDVESNPGPSRGHMTEYKPTVRLATRDDVPRAVRTLAAAFADYPATRHTVDPDRHIERVTELQELFLTRVGLDIGKVWVADDGAAVAVWTTPESVEAGAVFAEIGPRMAELSGSRLAAQQQMEGLLAPHRPKEPAWFLATVGVSPDHQGKGLGSAVVLPGVEAAERAGVPAFLETSAPRNLPFYERLGFTVTADVEVPEGPRTWCMTRKPGA

SEQ ID NO: 44328 - protein, 625 aa, synthetic construct
MALPVTALLLPLALLLHAARPIQMTQSPSSLSASVGDRVTITCRSSQSIVHSVGNTFLEWYQQKPGKAPKLLIYKVSNRFSGVPSRFSGSGSGTDFTLTISSLQPEDFATYYCFQGSQFPYTFGQGTKVEIKRLEDLKNVFPPEVAVFEPSEAEISHTQKATLVCLATGFYPDHVELSWWVNGKEVHSGVCTDPQPLKEQPALNDSRYCLSSRLRVSATFWQNPRNHFRCQVQFYGLSENDEWTQDRAKPVTQIVSAEAWGRADSGFTSESYQQGVLSATILYEILLGKATLYAVLVSALVLMAMVKRKDSRGRAKRSGSGATNFSLLKQAGDVEENPGPTSMDWIWRILFLVGAATGAHSFEEVQLVESGGGLVQPGGSLRLSCAASGYEFSRSWMNWVRQAPGKGLEWVGRIYPGDGDTNYSGKFKGRFTISADTSKNTAYLQMNSLRAEDTAVYYCARDGSSWDWYFDVWGQGTLVTVSSTRIQNPDPAVYQLRDSKSSDKSVCLFTDFDSQTNVSQSKDSDVYITDKCVLDMRSMDFKSNSAVAWSNKSDFACANAFNNSIIPEDTFFPSPESSSDVKLVEKSFETDTNLNFQNLSVIGFRILLLKVAGFNLLMTLRLWSS

SEQ ID NO: 44329 - protein, 904 aa, synthetic construct
MALPVTALLLPLALLLHAARPEVQLLESGGGLVQPGGSLRLSCAASGRTFSMGWYRQAPGKGLEFVSAITYSGGSPYYADSVKGRFTISRDNSKNTVYLQMNSLRAEDTAVYYCAANPTYGSDWNAENWGQGTLVTVSSGTGGGGSGGGGSGGGGSEFIQMTQSPSSLSASVGDRVTITCRSSQSIVHSVGNTFLEWYQQKPGKAPKLLIYKVSNRFSGVPSRFSGSGSGTDFTLTISSLQPEDFATYYCFQGSQFPYTFGQGTKVEIKRLEIQNPDPAVYQLRDSKSSDKSVCLFTDFDSQTNVSQSKDSDVYITDKCVLDMRSMDFKSNSAVAWSNKSDFACANAFNNSIIPEDTFFPSSDVPCDVKLVEKSFETDTNLNFQNLSVIGFRILLLKVAGFNLLMTLRLWSSRAKRSGSGVKQTLNFDLLKLAGDVESNPGPTSTMDWIWRILFLVGAATGTHSGPEVQLVESGGGLVQPGGSLRLSCAASGRTFTMGWYRQAPGKEREFVAAISLSPTLAYYADSVKGRFTISRDNSKNTVVLQMNSLRAEDTALYYCAADRKSVMSIRPDYWGQGTLVTVSSGSGGGGSGGGGSGGGGSFEEVQLVESGGGLVQPGGSLRLSCAASGYEFSRSWMNWVRQAPGKGLEWVGRIYPGDGDTNYSGKFKGRFTISADTSKNTAYLQMNSLRAEDTAVYYCARDGSSWDWYFDVWGQGTLVTVSSTREDLKNVFPPEVAVFEPSKAEIAHTQKATLVCLATGFYPDHVELSWWVNGKEVHSGVCTDPQPLKEQPALNDSRYCLSSRLRVSATFWQNPRNHFRCQVQFYGLSENDEWTQDRAKPVTQIVSAEAWGRADCGITSASYHQGVLSATILYEILLGKATLYAVLVSALVLMAMVKRKDSRG

SEQ ID NO: 44330 - protein, 904 aa, synthetic construct
MALPVTALLLPLALLLHAARPEVQLVESGGGLVQAGGSLRLSCAASGRTFSMGWFRQAPGKEREFVAAITYSGGSPYYADSVKGRFTISRDNAKNTVYLQMNSLKPEDTAVYYCAANPTYGSDWNAENWGQGTQVTVSSGTGGGGSGGGGSGGGGSEFIQMTQSPSSLSASVGDRVTITCRSSQSIVHSVGNTFLEWYQQKPGKAPKLLIYKVSNRFSGVPSRFSGSGSGTDFTLTISSLQPEDFATYYCFQGSQFPYTFGQGTKVEIKRLEIQNPDPAVYQLRDSKSSDKSVCLFTDFDSQTNVSQSKDSDVYITDKCVLDMRSMDFKSNSAVAWSNKSDFACANAFNNSIIPEDTFFPSSDVPCDVKLVEKSFETDTNLNFQNLSVIGFRILLLKVAGFNLLMTLRLWSSRAKRSGSGVKQTLNFDLLKLAGDVESNPGPTSTMDWIWRILFLVGAATGAHSGPEVQLVESGGGLVQPGGSLRLSCAASGRTFTMGWYRQAPGKEREFVAAISLSPTLAYYADSVKGRFTISRDNSKNTVVLQMNSLRAEDTALYYCAADRKSVMSIRPDYWGQGTLVTVSSGSGGGGSGGGGSGGGGSFEEVQLVESGGGLVQPGGSLRLSCAASGYEFSRSWMNWVRQAPGKGLEWVGRIYPGDGDTNYSGKFKGRFTISADTSKNTAYLQMNSLRAEDTAVYYCARDGSSWDWYFDVWGQGTLVTVSSTREDLKNVFPPEVAVFEPSKAEIAHTQKATLVCLATGFYPDHVELSWWVNGKEVHSGVCTDPQPLKEQPALNDSRYCLSSRLRVSATFWQNPRNHFRCQVQFYGLSENDEWTQDRAKPVTQIVSAEAWGRADCGITSASYHQGVLSATILYEILLGKATLYAVLVSALVLMAMVKRKDSRG

SEQ ID NO: 44331 - protein, 901 aa, synthetic construct
MALPVTALLLPLALLLHAARPEVQLVESGGGLVQAGGSLRLSCAASGRTFSMGWFRQAPGKEREFVAAITYSGGSPYYADSVKGRFTISRDNAKNTVYLQMNSLKPEDTAVYYCAANPTYGSDWNAENWGQGTQVTVSSGTGGGGSGGGGSGGGGSEFIQMTQSPSSLSASVGDRVTITCRSSQSIVHSVGNTFLEWYQQKPGKAPKLLIYKVSNRFSGVPSRFSGSGSGTDFTLTISSLQPEDFATYYCFQGSQFPYTFGQGTKVEIKRLEDLKNVFPPEVAVFEPSEAEISHTQKATLVCLATGFYPDHVELSWWVNGKEVHSGVCTDPQPLKEQPALNDSRYCLSSRLRVSATFWQNPRNHFRCQVQFYGLSENDEWTQDRAKPVTQIVSAEAWGRADCGFTSESYQQGVLSATILYEILLGKATLYAVLVSALVLMAMVKRKDSRGRAKRSGSGATNFSLLKQAGDVEENPGPTSATMDWIWRILFLVGAATGAHSGPEVQLVESGGGLVQAGGSLRLSCAASGRTFTMGWFRQAPGKEREFVAAISLSPTLAYYADSVKGRFTISRDNAKNTVVLQMNSLKPEDTALYYCAADRKSVMSIRPDYWGQGTQVTVSSGSGGGGSGGGGSGGGGSFEEVQLVESGGGLVQPGGSLRLSCAASGYEFSRSWMNWVRQAPGKGLEWVGRIYPGDGDTNYSGKFKGRFTISADTSKNTAYLQMNSLRAEDTAVYYCARDGSSWDWYFDVWGQGTLVTVSSTRIQNPDPAVYQLRDSKSSDKSVCLFTDFDSQTNVSQSKDSDVYITDKCVLDMRSMDFKSNSAVAWSNKSDFACANAFNNSIIPEDTFFPSPESSCDVKLVEKSFETDTNLNFQNLSVIGFRILLLKVAGFNLLMTLRLWSS

SEQ ID NO: 44332 - protein, 772 aa, synthetic construct
MALPVTALLLPLALLLHAARPEVQLVESGGGLVQPGGSLRLSCEASGFASDDYIIGWFRQAPGKEREGVSCISSKYANTVYTDSVKGRFRLSRGTAKNTVYLQMSALKPEDTAVYYCAMDSRRVTCPEISTMHRNFDSWGQGTLVTVSSGTGGGGSGGGGSGGGGSEFIQMTQSPSSLSASVGDRVTITCRSSQSIVHSVGNTFLEWYQQKPGKAPKLLIYKVSNRFSGVPSRFSGSGSGTDFTLTISSLQPEDFATYYCFQGSQFPYTFGQGTKVEIKRLEDLKNVFPPEVAVFEPSKAEIAHTQKATLVCLATGFYPDHVELSWWVNGKEVHSGVCTDPQPLKEQPALNDSRYCLSSRLRVSATFWQNPRNHFRCQVQFYGLSENDEWTQDRAKPVTQIVSAEAWGRADCGITSASYHQGVLSATILYEILLGKATLYAVLVSALVLMAMVKRKDSRGRAKRSGSGATNFSLLKQAGDVEENPGPTSMDWIWRILFLVGAATGAHSFEEVQLVESGGGLVQPGGSLRLSCAASGYEFSRSWMNWVRQAPGKGLEWVGRIYPGDGDTNYSGKFKGRFTISADTSKNTAYLQMNSLRAEDTAVYYCARDGSSWDWYFDVWGQGTLVTVSSTRIQNPDPAVYQLRDSKSSDKSVCLFTDFDSQTNVSQSKDSDVYITDKCVLDMRSMDFKSNSAVAWSNKSDFACANAFNNSIIPEDTFFPSSDVPCDVKLVEKSFETDTNLNFQNLSVIGFRILLLKVAGFNLLMTLRLWSS

SEQ ID NO: 44333 - protein, 763 aa, synthetic construct
MALPVTALLLPLALLLHAARPIQMTQSPSSLSASVGDRVTITCRSSQSIVHSVGNTFLEWYQQKPGKAPKLLIYKVSNRFSGVPSRFSGSGSGTDFTLTISSLQPEDFATYYCFQGSQFPYTFGQGTKVEIKRLEDLKNVFPPEVAVFEPSEAEISHTQKATLVCLATGFYPDHVELSWWVNGKEVHSGVCTDPQPLKEQPALNDSRYCLSSRLRVSATFWQNPRNHFRCQVQFYGLSENDEWTQDRAKPVTQIVSAEAWGRADCGFTSESYQQGVLSATILYEILLGKATLYAVLVSALVLMAMVKRKDSRGRAKRSGSGATNFSLLKQAGDVEENPGPTSTMDWIWRILFLVGAATGAHSGPEVQLVESGGGLVQPGGSLRLSCAASGRTFTMGWYRQAPGKEREFVAAISLSPTLAYYADSVKGRFTISRDNSKNTVVLQMNSLRAEDTALYYCAADRKSVMSIRPDYWGQGTLVTVSSGSGGGGSGGGGSGGGGSFEEVQLVESGGGLVQPGGSLRLSCAASGYEFSRSWMNWVRQAPGKGLEWVGRIYPGDGDTNYSGKFKGRFTISADTSKNTAYLQMNSLRAEDTAVYYCARDGSSWDWYFDVWGQGTLVTVSSTRIQNPDPAVYQLRDSKSSDKSVCLFTDFDSQTNVSQSKDSDVYITDKCVLDMRSMDFKSNSAVAWSNKSDFACANAFNNSIIPEDTFFPSPESSCDVKLVEKSFETDTNLNFQNLSVIGFRILLLKVAGFNLLMTLRLWSS

SEQ ID NO: 44334 - protein, 770 aa, synthetic construct
MALPVTALLLPLALLLHAARPIQMTQSPSSLSASVGDRVTITCRSSQSIVHSVGNTFLEWYQQKPGKAPKLLIYKVSNRFSGVPSRFSGSGSGTDFTLTISSLQPEDFATYYCFQGSQFPYTFGQGTKVEIKRLEDLKNVFPPEVAVFEPSEAEISHTQKATLVCLATGFYPDHVELSWWVNGKEVHSGVCTDPQPLKEQPALNDSRYCLSSRLRVSATFWQNPRNHFRCQVQFYGLSENDEWTQDRAKPVTQIVSAEAWGRADCGFTSESYQQGVLSATILYEILLGKATLYAVLVSALVLMAMVKRKDSRGRAKRSGSGATNFSLLKQAGDVEENPGPTSTMDWIWRILFLVGAATGAHSGPQVQLVESGGGLVQPGGSLRLSCAASGNINSRNCMGWFRQAPGKGREGVAAIGQVTGRTYYVDSVKGRFTISLDNSKNTLYLQMNSLRAEDTAVYYCAAAPGCLLSALRSADYRNWGQGTLVTVSSGSGGGGSGGGGSGGGGSFEEVQLVESGGGLVQPGGSLRLSCAASGYEFSRSWMNWVRQAPGKGLEWVGRIYPGDGDTNYSGKFKGRFTISADTSKNTAYLQMNSLRAEDTAVYYCARDGSSWDWYFDVWGQGTLVTVSSTRIQNPDPAVYQLRDSKSSDKSVCLFTDFDSQTNVSQSKDSDVYITDKCVLDMRSMDFKSNSAVAWSNKSDFACANAFNNSIIPEDTFFPSPESSCDVKLVEKSFETDTNLNFQNLSVIGFRILLLKVAGFNLLMTLRLWSS

SEQ ID NO: 44335 - protein, 770 aa, synthetic construct
MALPVTALLLPLALLLHAARPIQMTQSPSSLSASVGDRVTITCRSSQSIVHSVGNTFLEWYQQKPGKAPKLLIYKVSNRFSGVPSRFSGSGSGTDFTLTISSLQPEDFATYYCFQGSQFPYTFGQGTKVEIKRLEDLKNVFPPEVAVFEPSEAEISHTQKATLVCLATGFYPDHVELSWWVNGKEVHSGVCTDPQPLKEQPALNDSRYCLSSRLRVSATFWQNPRNHFRCQVQFYGLSENDEWTQDRAKPVTQIVSAEAWGRADCGFTSESYQQGVLSATILYEILLGKATLYAVLVSALVLMAMVKRKDSRGRAKRSGSGATNFSLLKQAGDVEENPGPTSTMDWIWRILFLVGAATGAHSGPQVQLVESGGGSVQAGGSLRLSCGASGNISSRNCMGWFRQAPGKEREGVAAIGQVTGRSYYVDSVKGRFTISLDNAKNTLYLQMNTLKPEDTAMYYCAAAPGCLLSALRSADYRNWGQGTQVTVSSGSGGGGSGGGGSGGGGSFEEVQLVESGGGLVQPGGSLRLSCAASGYEFSRSWMNWVRQAPGKGLEWVGRIYPGDGDTNYSGKFKGRFTISADTSKNTAYLQMNSLRAEDTAVYYCARDGSSWDWYFDVWGQGTLVTVSSTRIQNPDPAVYQLRDSKSSDKSVCLFTDFDSQTNVSQSKDSDVYITDKCVLDMRSMDFKSNSAVAWSNKSDFACANAFNNSIIPEDTFFPSPESSCDVKLVEKSFETDTNLNFQNLSVIGFRILLLKVAGFNLLMTLRLWSS

SEQ ID NO: 44336 - protein, 911 aa, synthetic construct
MALPVTALLLPLALLLHAARPEVQLVESGGGLVQAGGSLRLSCAASGRTFSMGWFRQAPGKEREFVAAITYSGGSPYYADSVKGRFTISRDNAKNTVYLQMNSLKPEDTAVYYCAANPTYGSDWNAENWGQGTQVTVSSGTGGGGSGGGGSGGGGSEFIQMTQSPSSLSASVGDRVTITCRSSQSIVHSVGNTFLEWYQQKPGKAPKLLIYKVSNRFSGVPSRFSGSGSGTDFTLTISSLQPEDFATYYCFQGSQFPYTFGQGTKVEIKRLEIQNPDPAVYQLRDSKSSDKSVCLFTDFDSQTNVSQSKDSDVYITDKCVLDMRSMDFKSNSAVAWSNKSDFACANAFNNSIIPEDTFFPSSDVPCDVKLVEKSFETDTNLNFQNLSVIGFRILLLKVAGFNLLMTLRLWSSRAKRSGSGVKQTLNFDLLKLAGDVESNPGPTSTMDWIWRILFLVGAATGAHSGPQVQLVESGGGSVQAGGSLRLSCGASGNISSRNCMGWFRQAPGKEREGVAAIGQVTGRSYYVDSVKGRFTISLDNAKNTLYLQMNTLKPEDTAMYYCAAAPGCLLSALRSADYRNWGQGTQVTVSSGSGGGGSGGGGSGGGGSFEEVQLVESGGGLVQPGGSLRLSCAASGYEFSRSWMNWVRQAPGKGLEWVGRIYPGDGDTNYSGKFKGRFTISADTSKNTAYLQMNSLRAEDTAVYYCARDGSSWDWYFDVWGQGTLVTVSSTREDLKNVFPPEVAVFEPSKAEIAHTQKATLVCLATGFYPDHVELSWWVNGKEVHSGVCTDPQPLKEQPALNDSRYCLSSRLRVSATFWQNPRNHFRCQVQFYGLSENDEWTQDRAKPVTQIVSAEAWGRADCGITSASYHQGVLSATILYEILLGKATLYAVLVSALVLMAMVKRKDSRG

SEQ ID NO: 44337 - protein, 908 aa, synthetic construct
MALPVTALLLPLALLLHAARPQVQLVESGGGSVQAGGSLRLSCGASGNISSRNCMGWFRQAPGKEREGVAAIGQVTGRSYYVDSVKGRFTISLDNAKNTLYLQMNTLKPEDTAMYYCAAAPGCLLSALRSADYRNWGQGTQVTVSSGTGGGGSGGGGSGGGGSEFIQMTQSPSSLSASVGDRVTITCRSSQSIVHSVGNTFLEWYQQKPGKAPKLLIYKVSNRFSGVPSRFSGSGSGTDFTLTISSLQPEDFATYYCFQGSQFPYTFGQGTKVEIKRLEDLKNVFPPEVAVFEPSEAEISHTQKATLVCLATGFYPDHVELSWWVNGKEVHSGVCTDPQPLKEQPALNDSRYCLSSRLRVSATFWQNPRNHFRCQVQFYGLSENDEWTQDRAKPVTQIVSAEAWGRADCGFTSESYQQGVLSATILYEILLGKATLYAVLVSALVLMAMVKRKDSRGRAKRSGSGATNFSLLKQAGDVEENPGPTSATMDWIWRILFLVGAATGAHSGPEVQLVESGGGLVQAGGSLRLSCAASGRTFTMGWFRQAPGKEREFVAAISLSPTLAYYADSVKGRFTISRDNAKNTVVLQMNSLKPEDTALYYCAADRKSVMSIRPDYWGQGTQVTVSSGSGGGGSGGGGSGGGGSFEEVQLVESGGGLVQPGGSLRLSCAASGYEFSRSWMNWVRQAPGKGLEWVGRIYPGDGDTNYSGKFKGRFTISADTSKNTAYLQMNSLRAEDTAVYYCARDGSSWDWYFDVWGQGTLVTVSSTRIQNPDPAVYQLRDSKSSDKSVCLFTDFDSQTNVSQSKDSDVYITDKCVLDMRSMDFKSNSAVAWSNKSDFACANAFNNSIIPEDTFFPSPESSCDVKLVEKSFETDTNLNFQNLSVIGFRILLLKVAGFNLLMTLRLWSS

SEQ ID NO: 44338 - protein, 771 aa, synthetic construct
MALPVTALLLPLALLLHAARPQVQLVESGGGSVQAGGSLRLSCGASGNISSRNCMGWFRQAPGKEREGVAAIGQVTGRSYYVDSVKGRFTISLDNAKNTLYLQMNTLKPEDTAMYYCAAAPGCLLSALRSADYRNWGQGTQVTVSSGTGGGGSGGGGSGGGGSEFIQMTQSPSSLSASVGDRVTITCRSSQSIVHSVGNTFLEWYQQKPGKAPKLLIYKVSNRFSGVPSRFSGSGSGTDFTLTISSLQPEDFATYYCFQGSQFPYTFGQGTKVEIKRLEDLKNVFPPEVAVFEPSEAEISHTQKATLVCLATGFYPDHVELSWWVNGKEVHSGVCTDPQPLKEQPALNDSRYCLSSRLRVSATFWQNPRNHFRCQVQFYGLSENDEWTQDRAKPVTQIVSAEAWGRADCGFTSESYQQGVLSATILYEILLGKATLYAVLVSALVLMAMVKRKDSRGRAKRSGSGATNFSLLKQAGDVEENPGPTSATMDWIWRILFLVGAATGAHSFEEVQLVESGGGLVQPGGSLRLSCAASGYEFSRSWMNWVRQAPGKGLEWVGRIYPGDGDTNYSGKFKGRFTISADTSKNTAYLQMNSLRAEDTAVYYCARDGSSWDWYFDVWGQGTLVTVSSTRIQNPDPAVYQLRDSKSSDKSVCLFTDFDSQTNVSQSKDSDVYITDKCVLDMRSMDFKSNSAVAWSNKSDFACANAFNNSIIPEDTFFPSPESSCDVKLVEKSFETDTNLNFQNLSVIGFRILLLKVAGFNLLMTLRLWSS

SEQ ID NO: 44339 - protein, 771 aa, synthetic construct
MALPVTALLLPLALLLHAARPQVQLVESGGGVVQPGGSLRLSCAASGLSFSTYTVAWFRQAPGKGLEGVAAIPYTSQHMVYTDSVRGRFTISRDNSKNTLYLQMNSLRAEDTAVYYCATDRRPGTSMLAINGYNRWGQGTTVTVSSGTGGGGSGGGGSGGGGSEFIQMTQSPSSLSASVGDRVTITCRSSQSIVHSVGNTFLEWYQQKPGKAPKLLIYKVSNRFSGVPSRFSGSGSGTDFTLTISSLQPEDFATYYCFQGSQFPYTFGQGTKVEIKRLEDLKNVFPPEVAVFEPSEAEISHTQKATLVCLATGFYPDHVELSWWVNGKEVHSGVCTDPQPLKEQPALNDSRYCLSSRLRVSATFWQNPRNHFRCQVQFYGLSENDEWTQDRAKPVTQIVSAEAWGRADCGFTSESYQQGVLSATILYEILLGKATLYAVLVSALVLMAMVKRKDSRGRAKRSGSGATNFSLLKQAGDVEENPGPTSATMDWIWRILFLVGAATGAHSFEEVQLVESGGGLVQPGGSLRLSCAASGYEFSRSWMNWVRQAPGKGLEWVGRIYPGDGDTNYSGKFKGRFTISADTSKNTAYLQMNSLRAEDTAVYYCARDGSSWDWYFDVWGQGTLVTVSSTRIQNPDPAVYQLRDSKSSDKSVCLFTDFDSQTNVSQSKDSDVYITDKCVLDMRSMDFKSNSAVAWSNKSDFACANAFNNSIIPEDTFFPSPESSCDVKLVEKSFETDTNLNFQNLSVIGFRILLLKVAGFNLLMTLRLWSS

SEQ ID NO: 44340 - protein, 770 aa, synthetic construct
MALPVTALLLPLALLLHAARPIQMTQSPSSLSASVGDRVTITCRSSQSIVHSVGNTFLEWYQQKPGKAPKLLIYKVSNRFSGVPSRFSGSGSGTDFTLTISSLQPEDFATYYCFQGSQFPYTFGQGTKVEIKRLEDLKNVFPPEVAVFEPSEAEISHTQKATLVCLATGFYPDHVELSWWVNGKEVHSGVCTDPQPLKEQPALNDSRYCLSSRLRVSATFWQNPRNHFRCQVQFYGLSENDEWTQDRAKPVTQIVSAEAWGRADCGFTSESYQQGVLSATILYEILLGKATLYAVLVSALVLMAMVKRKDSRGRAKRSGSGATNFSLLKQAGDVEENPGPTSTMDWIWRILFLVGAATGAHSGPQVQLVESGGGVVQPGGSLRLSCAASGLSFSTYTVAWFRQAPGKGLEGVAAIPYTSQHMVYTDSVRGRFTISRDNSKNTLYLQMNSLRAEDTAVYYCATDRRPGTSMLAINGYNRWGQGTTVTVSSGSGGGGSGGGGSGGGGSFEEVQLVESGGGLVQPGGSLRLSCAASGYEFSRSWMNWVRQAPGKGLEWVGRIYPGDGDTNYSGKFKGRFTISADTSKNTAYLQMNSLRAEDTAVYYCARDGSSWDWYFDVWGQGTLVTVSSTRIQNPDPAVYQLRDSKSSDKSVCLFTDFDSQTNVSQSKDSDVYITDKCVLDMRSMDFKSNSAVAWSNKSDFACANAFNNSIIPEDTFFPSPESSCDVKLVEKSFETDTNLNFQNLSVIGFRILLLKVAGFNLLMTLRLWSS

SEQ ID NO: 44341 - protein, 772 aa, synthetic construct
MALPVTALLLPLALLLHAARPIQMTQSPSSLSASVGDRVTITCRSSQSIVHSVGNTFLEWYQQKPGKAPKLLIYKVSNRFSGVPSRFSGSGSGTDFTLTISSLQPEDFATYYCFQGSQFPYTFGQGTKVEIKRLEDLKNVFPPEVAVFEPSEAEISHTQKATLVCLATGFYPDHVELSWWVNGKEVHSGVCTDPQPLKEQPALNDSRYCLSSRLRVSATFWQNPRNHFRCQVQFYGLSENDEWTQDRAKPVTQIVSAEAWGRADCGFTSESYQQGVLSATILYEILLGKATLYAVLVSALVLMAMVKRKDSRGRAKRSGSGATNFSLLKQAGDVEENPGPTSTMDWIWRILFLVGAATGAHSGPEVQLVESGGGSVQAGGSLRLSCAASGYTYSINCMGWFRQAPGKEREGVAAISTGGGRTDYRDSVKGRFTISQDNAKNTVYLQMNSLKPEDTAMYYCAGKTTYPGYGCGLGRSAYNYWGQGTQVTVSSGSGGGGSGGGGSGGGGSFEEVQLVESGGGLVQPGGSLRLSCAASGYEFSRSWMNWVRQAPGKGLEWVGRIYPGDGDTNYSGKFKGRFTISADTSKNTAYLQMNSLRAEDTAVYYCARDGSSWDWYFDVWGQGTLVTVSSTRIQNPDPAVYQLRDSKSSDKSVCLFTDFDSQTNVSQSKDSDVYITDKCVLDMRSMDFKSNSAVAWSNKSDFACANAFNNSIIPEDTFFPSPESSCDVKLVEKSFETDTNLNFQNLSVIGFRILLLKVAGFNLLMTLRLWSS

SEQ ID NO: 44342 - protein, 625 aa, synthetic construct
MALPVTALLLPLALLLHAARPIQMTQSPSSLSASVGDRVTITCRSSQSIVHSVGNTFLEWYQQKPGKAPKLLIYKVSNRFSGVPSRFSGSGSGTDFTLTISSLQPEDFATYYCFQGSQFPYTFGQGTKVEIKRLEDLKHVFPPEVAVFEPSDAEIWHTQKATLVCLATGFYPDHVELSWWVNGKEVHSGVSTDPQPLKEQPALNDSRYCLSSRLRVSATFWQNPRNHFRCQVQFYGLSENDEWTQDRAKPVTQIVSAEAWGRADCGFTSESYQQGVLSATILYEILLGKATLYAVLVSALVLMAMVKRKDSRGRAKRSGSGATNFSLLKQAGDVEENPGPTSMDWIWRILFLVGAATGAHSFEEVQLVESGGGLVQPGGSLRLSCAASGYEFSRSWMNWVRQAPGKGLEWVGRIYPGDGDTNYSGKFKGRFTISADTSKNTAYLQMNSLRAEDTAVYYCARDGSSWDWYFDVWGQGTLVTVSSTRIQNPDPAVYQLRDSKSSDKSVCLFTDFDSQTNVSQSKDSDVYITDKTVLDMRSMDFKSNSAVAWSSKSDFACANAFNNSIIPEDTFFPSPEMACDVKLVEKSFETDTNLNFQNLLVIWLRILLLKVAGFNLLMTLRLWSS

SEQ ID NO: 44343 - protein, 625 aa, synthetic construct
MALPVTALLLPLALLLHAARPIQMTQSPSSLSASVGDRVTITCRSSQSIVHSVGNTFLEWYQQKPGKAPKLLIYKVSNRFSGVPSRFSGSGSGTDFTLTISSLQPEDFATYYCFQGSQFPYTFGQGTKVEIKRLEDLKHVFPPEVAVFEPSDAEIWHTQKATLVCLATGFYPDHVELSWWVNGKEVHSGVSTDPQPLKEQPALNDSRYCLSSRLRVSATFWQNPRNHFRCQVQFYGLSENDEWTQDRAKPVTQIVSAEAWGRADCGFTSESYQQGVLSATILYEILLGKATLYAVLVSALVLMAMVKRKDSRGRAKRSGSGATNFSLLKQAGDVEENPGPTSMDWIWRILFLVGAATGAHSFEEVQLVESGGGLVQPGGSLRLSCAASGYEFSRSWMNWVRQAPGKGLEWVGRIYPGDGDTNYSGKFKGRFTISADTSKNTAYLQMNSLRAEDTAVYYCARDGSSWDWYFDVWGQGTLVTVSSTRIQNPDPAVYQLRDSKSSDKSVCLFTDFDSQTNVSQSKDSDVYITDKTVLDMRSMDFKSNSAVAWSTKSDFACANAFNNSIIPEDTFFPSPEVVCDVKLVEKSFETDTNLNFQNLVVIGARILLLKVAGFNLLMTLRLWSS

SEQ ID NO: 44344 - protein, 625 aa, synthetic construct
MALPVTALLLPLALLLHAARPIQMTQSPSSLSASVGDRVTITCRSSQSIVHSVGNTFLEWYQQKPGKAPKLLIYKVSNRFSGVPSRFSGSGSGTDFTLTISSLQPEDFATYYCFQGSQFPYTFGQGTKVEIKRLEDLKNVFPPEVAVFEPSKAEISRTQKATLVCLATGFYPPHVELSWWVNGKEVHDGVCTDPQPLKEQPALNDSRYCLSSRLRVSATFWQNPRNHFRCQVQFYGLSENDEWTQDRAKPVTQIVSAEAWGRADCGFTSESYQQGVLSATILYEILLGKATLYAVLVSALVLMAMVKRKDSRGRAKRSGSGATNFSLLKQAGDVEENPGPTSMDWIWRILFLVGAATGAHSFEEVQLVESGGGLVQPGGSLRLSCAASGYEFSRSWMNWVRQAPGKGLEWVGRIYPGDGDTNYSGKFKGRFTISADTSKNTAYLQMNSLRAEDTAVYYCARDGSSWDWYFDVWGQGTLVTVSSTRIQNPDPAVYQLRDSKSSDKFVCLFTDFDSQINVSQSKDSDVYITDKCVLDMRSMDFKSNSAVAWSNKSDFTCANAFNNSIIPEDTFFPSPESSCDVKLVEKSFETDTNLNFQNLSVIGFRILLLKVAGFNLLMTLRLWSS

SEQ ID NO: 44345 - protein, 767 aa, synthetic construct
MALPVTALLLPLALLLHAARPIQMTQSPSSLSASVGDRVTITCRSSQSIVHSVGNTFLEWYQQKPGKAPKLLIYKVSNRFSGVPSRFSGSGSGTDFTLTISSLQPEDFATYYCFQGSQFPYTFGQGTKVEIKRLEDLKNVFPPEVAVFEPSEAEISHTQKATLVCLATGFYPDHVELSWWVNGKEVHSGVCTDPQPLKEQPALNDSRYCLSSRLRVSATFWQNPRNHFRCQVQFYGLSENDEWTQDRAKPVTQIVSAEAWGRADCGFTSESYQQGVLSATILYEILLGKATLYAVLVSALVLMAMVKRKDSRGRAKRSGSGATNFSLLKQAGDVEENPGPTSTMDWIWRILFLVGAATGAHSGPQVQLQESGPGLVKPSQTLSLTCTVSGASITTGEYYWNWFRQPPGKGLEWMGAIAASGSTTYSPSFESRTSISRDTSKNQFSLKLSSVTAADTAVYYCGRSFGVAAVTTGQNRGQGTLVTVSSGSGGGGSGGGGSGGGGSFEEVQLVESGGGLVQPGGSLRLSCAASGYEFSRSWMNWVRQAPGKGLEWVGRIYPGDGDTNYSGKFKGRFTISADTSKNTAYLQMNSLRAEDTAVYYCARDGSSWDWYFDVWGQGTLVTVSSTRIQNPDPAVYQLRDSKSSDKSVCLFTDFDSQTNVSQSKDSDVYITDKCVLDMRSMDFKSNSAVAWSNKSDFACANAFNNSIIPEDTFFPSPESSCDVKLVEKSFETDTNLNFQNLSVIGFRILLLKVAGFNLLMTLRLWSS

SEQ ID NO: 44346 - protein, 908 aa, synthetic construct
MALPVTALLLPLALLLHAARPQVQLQESGPGLVKPSQTLSLTCTVSGGSITTGEFYWNWFRQPPGKGLEWMGAIAASGSTTYSPSFESRTSISRDTSKNQFSLKLSSVTAADTAVYYCGRSFGVAAVTTGQNRGQGTLVTVSSGTGGGGSGGGGSGGGGSEFIQMTQSPSSLSASVGDRVTITCRSSQSIVHSVGNTFLEWYQQKPGKAPKLLIYKVSNRFSGVPSRFSGSGSGTDFTLTISSLQPEDFATYYCFQGSQFPYTFGQGTKVEIKRLEIQNPDPAVYQLRDSKSSDKSVCLFTDFDSQTNVSQSKDSDVYITDKCVLDMRSMDFKSNSAVAWSNKSDFACANAFNNSIIPEDTFFPSSDVPCDVKLVEKSFETDTNLNFQNLSVIGFRILLLKVAGFNLLMTLRLWSSRAKRSGSGVKQTLNFDLLKLAGDVESNPGPTSTMDWIWRILFLVGAATGAHSGPEVQLVESGGGLVQPGGSLRLSCAASGRTFTMGWYRQAPGKEREFVAAISLSPTLAYYADSVKGRFTISRDNSKNTVVLQMNSLRAEDTALYYCAADRKSVMSIRPDYWGQGTLVTVSSGSGGGGSGGGGSGGGGSFEEVQLVESGGGLVQPGGSLRLSCAASGYEFSRSWMNWVRQAPGKGLEWVGRIYPGDGDTNYSGKFKGRFTISADTSKNTAYLQMNSLRAEDTAVYYCARDGSSWDWYFDVWGQGTLVTVSSTREDLKNVFPPEVAVFEPSKAEIAHTQKATLVCLATGFYPDHVELSWWVNGKEVHSGVCTDPQPLKEQPALNDSRYCLSSRLRVSATFWQNPRNHFRCQVQFYGLSENDEWTQDRAKPVTQIVSAEAWGRADCGITSASYHQGVLSATILYEILLGKATLYAVLVSALVLMAMVKRKDSRG

SEQ ID NO: 44347 - protein, 771 aa, synthetic construct
MALPVTALLLPLALLLHAARPQVQLQESGPGLVKPSQTLSLTCTVSGGSITTGEFYWNWFRQPPGKGLEWMGAIAASGSTTYSPSFESRTSISRDTSKNQFSLKLSSVTAADTAVYYCGRSFGVAAVTTGQNRGQGTLVTVSSGTGGGGSGGGGSGGGGSEFIQMTQSPSSLSASVGDRVTITCRSSQSIVHSVGNTFLEWYQQKPGKAPKLLIYKVSNRFSGVPSRFSGSGSGTDFTLTISSLQPEDFATYYCFQGSQFPYTFGQGTKVEIKRLEIQNPDPAVYQLRDSKSSDKSVCLFTDFDSQTNVSQSKDSDVYITDKCVLDMRSMDFKSNSAVAWSNKSDFACANAFNNSIIPEDTFFPSSDVPCDVKLVEKSFETDTNLNFQNLSVIGFRILLLKVAGFNLLMTLRLWSSRAKRSGSGVKQTLNFDLLKLAGDVESNPGPTSTMDWIWRILFLVGAATGAHSFEEVQLVESGGGLVQPGGSLRLSCAASGYEFSRSWMNWVRQAPGKGLEWVGRIYPGDGDTNYSGKFKGRFTISADTSKNTAYLQMNSLRAEDTAVYYCARDGSSWDWYFDVWGQGTLVTVSSTREDLKNVFPPEVAVFEPSKAEIAHTQKATLVCLATGFYPDHVELSWWVNGKEVHSGVCTDPQPLKEQPALNDSRYCLSSRLRVSATFWQNPRNHFRCQVQFYGLSENDEWTQDRAKPVTQIVSAEAWGRADCGITSASYHQGVLSATILYEILLGKATLYAVLVSALVLMAMVKRKDSRG

SEQ ID NO: 44348 - protein, 904 aa, synthetic construct
MALPVTALLLPLALLLHAARPEVQLVESGGGLVQAGGSLRLSCAASGRTFSMGWFRQAPGKEREFVAAITYSGGSPYYADSVKGRFTISRDNAKNTVYLQMNSLKPEDTAVYYCAANPTYGSDWNAENWGQGTQVTVSSGTGGGGSGGGGSGGGGSEFIQMTQSPSSLSASVGDRVTITCRSSQSIVHSVGNTFLEWYQQKPGKAPKLLIYKVSNRFSGVPSRFSGSGSGTDFTLTISSLQPEDFATYYCFQGSQFPYTFGQGTKVEIKRLEDLKNVFPPEVAVFEPSEAEISHTQKATLVCLATGFYPDHVELSWWVNGKEVHSGVCTDPQPLKEQPALNDSRYCLSSRLRVSATFWQNPRNHFRCQVQFYGLSENDEWTQDRAKPVTQIVSAEAWGRADCGFTSESYQQGVLSATILYEILLGKATLYAVLVSALVLMAMVKRKDSRGRAKRSGSGATNFSLLKQAGDVEENPGPTSTMDWIWRILFLVGAATGAHSGPQVQLQESGPGLVKPSQTLSLTCTVSGASITTGEYYWNWFRQPPGKGLEWMGAIAASGSTTYSPSFESRTSISRDTSKNQFSLKLSSVTAADTAVYYCGRSFGVAAVTTGQNRGQGTLVTVSSGSGGGGSGGGGSGGGGSFEEVQLVESGGGLVQPGGSLRLSCAASGYEFSRSWMNWVRQAPGKGLEWVGRIYPGDGDTNYSGKFKGRFTISADTSKNTAYLQMNSLRAEDTAVYYCARDGSSWDWYFDVWGQGTLVTVSSTRIQNPDPAVYQLRDSKSSDKSVCLFTDFDSQTNVSQSKDSDVYITDKCVLDMRSMDFKSNSAVAWSNKSDFACANAFNNSIIPEDTFFPSPESSCDVKLVEKSFETDTNLNFQNLSVIGFRILLLKVAGFNLLMTLRLWSS

SEQ ID NO: 44349 - protein, 911 aa, synthetic construct
MALPVTALLLPLALLLHAARPEVQLVESGGGLVQAGGSLRLSCAASGRTFSMGWFRQAPGKEREFVAAITYSGGSPYYADSVKGRFTISRDNAKNTVYLQMNSLKPEDTAVYYCAANPTYGSDWNAENWGQGTQVTVSSGTGGGGSGGGGSGGGGSEFIQMTQSPSSLSASVGDRVTITCRSSQSIVHSVGNTFLEWYQQKPGKAPKLLIYKVSNRFSGVPSRFSGSGSGTDFTLTISSLQPEDFATYYCFQGSQFPYTFGQGTKVEIKRLEIQNPDPAVYQLRDSKSSDKSVCLFTDFDSQTNVSQSKDSDVYITDKCVLDMRSMDFKSNSAVAWSNKSDFACANAFNNSIIPEDTFFPSSDVPCDVKLVEKSFETDTNLNFQNLSVIGFRILLLKVAGFNLLMTLRLWSSRAKRSGSGVKQTLNFDLLKLAGDVESNPGPTSTMDWIWRILFLVGAATGAHSGPQVQLVESGGGLVQPGGSLRLSCAASGNINSRNCMGWFRQAPGKGREGVAAIGQVTGRTYYVDSVKGRFTISLDNSKNTLYLQMNSLRAEDTAVYYCAAAPGCLLSALRSADYRNWGQGTLVTVSSGSGGGGSGGGGSGGGGSFEEVQLVESGGGLVQPGGSLRLSCAASGYEFSRSWMNWVRQAPGKGLEWVGRIYPGDGDTNYSGKFKGRFTISADTSKNTAYLQMNSLRAEDTAVYYCARDGSSWDWYFDVWGQGTLVTVSSTREDLKNVFPPEVAVFEPSKAEIAHTQKATLVCLATGFYPDHVELSWWVNGKEVHSGVCTDPQPLKEQPALNDSRYCLSSRLRVSATFWQNPRNHFRCQVQFYGLSENDEWTQDRAKPVTQIVSAEAWGRADCGITSASYHQGVLSATILYEILLGKATLYAVLVSALVLMAMVKRKDSRG

SEQ ID NO: 44350 - protein, 907 aa, synthetic construct
MALPVTALLLPLALLLHAARPEVQLVESGGGLVQAGGSLRLSCAASGRTFSMGWFRQAPGKEREFVAAITYSGGSPYYADSVKGRFTISRDNAKNTVYLQMNSLKPEDTAVYYCAANPTYGSDWNAENWGQGTQVTVSSGTGGGGSGGGGSGGGGSEFIQMTQSPSSLSASVGDRVTITCRSSQSIVHSVGNTFLEWYQQKPGKAPKLLIYKVSNRFSGVPSRFSGSGSGTDFTLTISSLQPEDFATYYCFQGSQFPYTFGQGTKVEIKRLEDLKNVFPPEVAVFEPSEAEISHTQKATLVCLATGFYPDHVELSWWVNGKEVHSGVCTDPQPLKEQPALNDSRYCLSSRLRVSATFWQNPRNHFRCQVQFYGLSENDEWTQDRAKPVTQIVSAEAWGRADCGFTSESYQQGVLSATILYEILLGKATLYAVLVSALVLMAMVKRKDSRGRAKRSGSGATNFSLLKQAGDVEENPGPTSTMDWIWRILFLVGAATGAHSGPQVQLVESGGGLVQPGGSLRLSCAASGNINSRNCMGWFRQAPGKGREGVAAIGQVTGRTYYVDSVKGRFTISLDNSKNTLYLQMNSLRAEDTAVYYCAAAPGCLLSALRSADYRNWGQGTLVTVSSGSGGGGSGGGGSGGGGSFEEVQLVESGGGLVQPGGSLRLSCAASGYEFSRSWMNWVRQAPGKGLEWVGRIYPGDGDTNYSGKFKGRFTISADTSKNTAYLQMNSLRAEDTAVYYCARDGSSWDWYFDVWGQGTLVTVSSTRIQNPDPAVYQLRDSKSSDKSVCLFTDFDSQTNVSQSKDSDVYITDKCVLDMRSMDFKSNSAVAWSNKSDFACANAFNNSIIPEDTFFPSPESSCDVKLVEKSFETDTNLNFQNLSVIGFRILLLKVAGFNLLMTLRLWSS

SEQ ID NO: 44351 - protein, 907 aa, synthetic construct
MALPVTALLLPLALLLHAARPEVQLVESGGGLVQAGGSLRLSCAASGRTFTMGWFRQAPGKEREFVAAISLSPTLAYYADSVKGRFTISRDNAKNTVVLQMNSLKPEDTALYYCAADRKSVMSIRPDYWGQGTQVTVSSGTGGGGSGGGGSGGGGSEFIQMTQSPSSLSASVGDRVTITCRSSQSIVHSVGNTFLEWYQQKPGKAPKLLIYKVSNRFSGVPSRFSGSGSGTDFTLTISSLQPEDFATYYCFQGSQFPYTFGQGTKVEIKRLEDLKNVFPPEVAVFEPSEAEISHTQKATLVCLATGFYPDHVELSWWVNGKEVHSGVCTDPQPLKEQPALNDSRYCLSSRLRVSATFWQNPRNHFRCQVQFYGLSENDEWTQDRAKPVTQIVSAEAWGRADCGFTSESYQQGVLSATILYEILLGKATLYAVLVSALVLMAMVKRKDSRGRAKRSGSGATNFSLLKQAGDVEENPGPTSTMDWIWRILFLVGAATGAHSGPQVQLVESGGGLVQPGGSLRLSCAASGNINSRNCMGWFRQAPGKGREGVAAIGQVTGRTYYVDSVKGRFTISLDNSKNTLYLQMNSLRAEDTAVYYCAAAPGCLLSALRSADYRNWGQGTLVTVSSGSGGGGSGGGGSGGGGSFEEVQLVESGGGLVQPGGSLRLSCAASGYEFSRSWMNWVRQAPGKGLEWVGRIYPGDGDTNYSGKFKGRFTISADTSKNTAYLQMNSLRAEDTAVYYCARDGSSWDWYFDVWGQGTLVTVSSTRIQNPDPAVYQLRDSKSSDKSVCLFTDFDSQTNVSQSKDSDVYITDKCVLDMRSMDFKSNSAVAWSNKSDFACANAFNNSIIPEDTFFPSPESSCDVKLVEKSFETDTNLNFQNLSVIGFRILLLKVAGFNLLMTLRLWSS

SEQ ID NO: 44352 - protein, 911 aa, synthetic construct
MALPVTALLLPLALLLHAARPQVQLQESGPGLVKPSQTLSLTCTVSGGSITTGEFYWNWFRQPPGKGLEWMGAIAASGSTTYSPSFESRTSISRDTSKNQFSLKLSSVTAADTAVYYCGRSFGVAAVTTGQNRGQGTLVTVSSGTGGGGSGGGGSGGGGSEFIQMTQSPSSLSASVGDRVTITCRSSQSIVHSVGNTFLEWYQQKPGKAPKLLIYKVSNRFSGVPSRFSGSGSGTDFTLTISSLQPEDFATYYCFQGSQFPYTFGQGTKVEIKRLEDLKNVFPPEVAVFEPSEAEISHTQKATLVCLATGFYPDHVELSWWVNGKEVHSGVCTDPQPLKEQPALNDSRYCLSSRLRVSATFWQNPRNHFRCQVQFYGLSENDEWTQDRAKPVTQIVSAEAWGRADCGFTSESYQQGVLSATILYEILLGKATLYAVLVSALVLMAMVKRKDSRGRAKRSGSGATNFSLLKQAGDVEENPGPTSTMDWIWRILFLVGAATGAHSGPQVQLVESGGGLVQPGGSLRLSCAASGNINSRNCMGWFRQAPGKGREGVAAIGQVTGRTYYVDSVKGRFTISLDNSKNTLYLQMNSLRAEDTAVYYCAAAPGCLLSALRSADYRNWGQGTLVTVSSGSGGGGSGGGGSGGGGSFEEVQLVESGGGLVQPGGSLRLSCAASGYEFSRSWMNWVRQAPGKGLEWVGRIYPGDGDTNYSGKFKGRFTISADTSKNTAYLQMNSLRAEDTAVYYCARDGSSWDWYFDVWGQGTLVTVSSTRIQNPDPAVYQLRDSKSSDKSVCLFTDFDSQTNVSQSKDSDVYITDKCVLDMRSMDFKSNSAVAWSNKSDFACANAFNNSIIPEDTFFPSPESSCDVKLVEKSFETDTNLNFQNLSVIGFRILLLKVAGFNLLMTLRLWSS

SEQ ID NO: 44353 - protein, 494 aa, synthetic construct
MALPVTALLLPLALLLHAARPELQSVLTQPPSASGTPGQRVTISCSGSSSNIGSNYVNWYQQLPGTAPKLLIYGDYQRPSGVPDRFSGSKSGTSASLAISGLRSEDEADYYCATRDDSLSGSVVFGTGTKLTVLGGGGGSGGGGSGGGGSEVQLVQSGAEVKKPGESLKISCKGSGYGFTSYWIGWVRQMPGKGLEWMGIIHPDDSDTKYSPSFQGQVTISADKSISTAYLQWSSLKASDTAMYYCASSYLRGLWGGYFDFWGQGTLVTVSSTRKIEVMYPPPYLDNEKSNGTIIHVKGKHLCPSPLFPGPSKPFWVLVVVGGVLACYSLLVTVAFIIFWVRSKRSRLLHSDYMNMTPRRPGPTRKHYQPYAPPRDFAAYRSRVKFSRSADAPAYQQGQNQLYNELNLGRREEYDVLDKRRGRDPEMGGKPRRKNPQEGLYNELQKDKMAEAYSEIGMKGERRRGKGHDGLYQGLSTATKDTYDALHMQALPPR

SEQ ID NO: 44354 - protein, 500 aa, synthetic construct
MALPVTALLLPLALLLHAARPELQSVLTQPPSASGTPGQRVTISCSGSSSNIGSNYVNWYQQLPGTAPKLLIYGDYQRPSGVPDRFSGSKSGTSASLAISGLRSEDEADYYCATRDDSLSGSVVFGTGTKLTVLGGGGGSGGGGSGGGGSEVQLVQSGAEVKKPGESLKISCKGSGYGFTSYWIGWVRQMPGKGLEWMGIIHPDDSDTKYSPSFQGQVTISADKSISTAYLQWSSLKASDTAMYYCASSYLRGLWGGYFDFWGQGTLVTVSSTRAKPTTTPAPRPPTPAPTIASQPLSLRPEACRPAAGGAVHTRGLDFACDIYIWAPLAGTCGVLLLSLVITLYCKRGRKKLLYIFKQPFMRPVQTTQEEDGCSCRFPEEEEGGCELRVKFSRSADAPAYQQGQNQLYNELNLGRREEYDVLDKRRGRDPEMGGKPRRKNPQEGLYNELQKDKMAEAYSEIGMKGERRRGKGHDGLYQGLSTATKDTYDALHMQALPPR

SEQ ID NO: 44355 - protein, 500 aa, synthetic construct
MALPVTALLLPLALLLHAARPEVQLVQSGAEVKKPGESLKISCKGSGYGFTSYWIGWVRQMPGKGLEWMGIIHPDDSDTKYSPSFQGQVTISADKSISTAYLQWSSLKASDTAMYYCASSYLRGLWGGYFDFWGQGTLVTVSSGGGGSGGGGSGGGGSELQSVLTQPPSASGTPGQRVTISCSGSSSNIGSNYVNWYQQLPGTAPKLLIYGDYQRPSGVPDRFSGSKSGTSASLAISGLRSEDEADYYCATRDDSLSGSVVFGTGTKLTVLGTRAKPTTTPAPRPPTPAPTIASQPLSLRPEACRPAAGGAVHTRGLDFACDIYIWAPLAGTCGVLLLSLVITLYCKRGRKKLLYIFKQPFMRPVQTTQEEDGCSCRFPEEEEGGCELRVKFSRSADAPAYQQGQNQLYNELNLGRREEYDVLDKRRGRDPEMGGKPRRKNPQEGLYNELQKDKMAEAYSEIGMKGERRRGKGHDGLYQGLSTATKDTYDALHMQALPPR

SEQ ID NO: 44356 - protein, 633 aa, synthetic construct
MALPVTALLLPLALLLHAARPELQSVLTQPPSASGTPGQRVTISCSGSSSNIGSNYVNWYQQLPGTAPKLLIYGDYQRPSGVPDRFSGSKSGTSASLAISGLRSEDEADYYCATRDDSLSGSVVFGTGTKLTVLGLEIQNPDPAVYQLRDSKSSDKSVCLFTDFDSQTNVSQSKDSDVYITDKCVLDMRSMDFKSNSAVAWSNKSDFACANAFNNSIIPEDTFFPSSDVPCDVKLVEKSFETDTNLNFQNLSVIGFRILLLKVAGFNLLMTLRLWSSRAKRSGSGVKQTLNFDLLKLAGDVESNPGPTSMDWIWRILFLVGAATGAHSFEEVQLVQSGAEVKKPGESLKISCKGSGYGFTSYWIGWVRQMPGKGLEWMGIIHPDDSDTKYSPSFQGQVTISADKSISTAYLQWSSLKASDTAMYYCASSYLRGLWGGYFDFWGQGTLVTVSSTREDLKNVFPPEVAVFEPSKAEIAHTQKATLVCLATGFYPDHVELSWWVNGKEVHSGVCTDPQPLKEQPALNDSRYCLSSRLRVSATFWQNPRNHFRCQVQFYGLSENDEWTQDRAKPVTQIVSAEAWGRADCGITSASYHQGVLSATILYEILLGKATLYAVLVSALVLMAMVKRKDSRG

SEQ ID NO: 44357 - protein, 629 aa, synthetic construct
MALPVTALLLPLALLLHAARPELQSVLTQPPSASGTPGQRVTISCSGSSSNIGSNYVNWYQQLPGTAPKLLIYGDYQRPSGVPDRFSGSKSGTSASLAISGLRSEDEADYYCATRDDSLSGSVVFGTGTKLTVLGLEDLKNVFPPEVAVFEPSKAEIAHTQKATLVCLATGFYPDHVELSWWVNGKEVHSGVCTDPQPLKEQPALNDSRYCLSSRLRVSATFWQNPRNHFRCQVQFYGLSENDEWTQDRAKPVTQIVSAEAWGRADCGITSASYHQGVLSATILYEILLGKATLYAVLVSALVLMAMVKRKDSRGRAKRSGSGATNFSLLKQAGDVEENPGPTSMDWIWRILFLVGAATGAHSFEEVQLVQSGAEVKKPGESLKISCKGSGYGFTSYWIGWVRQMPGKGLEWMGIIHPDDSDTKYSPSFQGQVTISADKSISTAYLQWSSLKASDTAMYYCASSYLRGLWGGYFDFWGQGTLVTVSSTRIQNPDPAVYQLRDSKSSDKSVCLFTDFDSQTNVSQSKDSDVYITDKCVLDMRSMDFKSNSAVAWSNKSDFACANAFNNSIIPEDTFFPSSDVPCDVKLVEKSFETDTNLNFQNLSVIGFRILLLKVAGFNLLMTLRLWSS

SEQ ID NO: 44358 - protein, 629 aa, synthetic construct; identical to SEQ ID NO: 20801

SEQ ID NO: 44359 - protein, 633 aa, synthetic construct; identical to SEQ ID NO: 20803

SEQ ID NO: 44360 - protein, 645 aa, synthetic construct
MALPVTALLLPLALLLHAARPLEEDLKNVFPPEVAVFEPSKAEIAHTQKATLVCLATGFYPDHVELSWWVNGKEVHSGVCTDPQPLKEQPALNDSRYCLSSRLRVSATFWQNPRNHFRCQVQFYGLSENDEWTQDRAKPVTQIVSAEAWGRADCGITSASYHQGVLSATILYEILLGKATLYAVLVSALVLMAMVKRKDSRGRAKRSGSGATNFSLLKQAGDVEENPGPTSMALPVTALLLPLALLLHAARPELQSVLTQPPSASGTPGQRVTISCSGSSSNIGSNYVNWYQQLPGTAPKLLIYGDYQRPSGVPDRFSGSKSGTSASLAISGLRSEDEADYYCATRDDSLSGSVVFGTGTKLTVLGGGGGSGGGGSGGGGSEVQLVQSGAEVKKPGESLKISCKGSGYGFTSYWIGWVRQMPGKGLEWMGIIHPDDSDTKYSPSFQGQVTISADKSISTAYLQWSSLKASDTAMYYCASSYLRGLWGGYFDFWGQGTLVTVSSTRIQNPDPAVYQLRDSKSSDKSVCLFTDFDSQTNVSQSKDSDVYITDKCVLDMRSMDFKSNSAVAWSNKSDFACANAFNNSIIPEDTFFPSSDVPCDVKLVEKSFETDTNLNFQNLSVIGFRILLLKVAGFNLLMTLRLWSS

SEQ ID NO: 44361 - protein, 652 aa, synthetic construct
MALPVTALLLPLALLLHAARPLEGSGDRPDPAVYQLRDSKSSDKSVCLFTDFDSQTNVSQSKDSDVYITDKCVLDMRSMDFKSNSAVAWSNKSDFACANAFNNSIIPEDTFFPSPESSCDVKLVEKSFETDTNLNFQNLSVIGFRILLLKVAGFNLLMTLRLWSSSSRAKRSGSGVKQTLNFDLLKLAGDVESNPGPTSMALPVTALLLPLALLLHAARPELQSVLTQPPSASGTPGQRVTISCSGSSSNIGSNYVNWYQQLPGTAPKLLIYGDYQRPSGVPDRFSGSKSGTSASLAISGLRSEDEADYYCATRDDSLSGSVVFGTGTKLTVLGGGGGSGGGGSGGGGSEVQLVQSGAEVKKPGESLKISCKGSGYGFTSYWIGWVRQMPGKGLEWMGIIHPDDSDTKYSPSFQGQVTISADKSISTAYLQWSSLKASDTAMYYCASSYLRGLWGGYFDFWGQGTLVTVSSTREDLKNVFPPEVAVFEPSEAEISHTQKATLVCLATGFYPDHVELSWWVNGKEVHSGVCTDPQPLKEQPALNDSRYCLSSRLRVSATFWQNPRNHFRCQVQFYGLSENDEWTQDRAKPVTQIVSAEAWGRADCGFTSESYQQGVLSATILYEILLGKATLYAVLVSALVLMAMVKRKDSRG

SEQ ID NO: 44362 - protein, 629 aa, synthetic construct
MALPVTALLLPLALLLHAARPELQSVLTQPPSASGTPGQRVTISCSGSSSNIGSNYVNWYQQLPGTAPKLLIYGDYQRPSGVPDRFSGSKSGTSASLAISGLRSEDEADYYCATRDDSLSGSVVFGTGTKLTVLGLEDLKNVFPPEVAVFEPSEAEISHTQKATLVCLATGFYPDHVELSWWVNGKEVHSGVSTDPQPLKEQPALNDSRYCLSSRLRVSATFWQNPRNHFRCQVQFYGLSENDEWTQDRAKPVTQIVSAEAWGRADCGFTSESYQQGVLSATILYEILLGKATLYAVLVSALVLMAMVKRKDSRGRAKRSGSGATNFSLLKQAGDVEENPGPTSMDWIWRILFLVGAATGAHSFEEVQLVQSGAEVKKPGESLKISCKGSGYGFTSYWIGWVRQMPGKGLEWMGIIHPDDSDTKYSPSFQGQVTISADKSISTAYLQWSSLKASDTAMYYCASSYLRGLWGGYFDFWGQGTLVTVSSTRIQNPDPAVYQLRDSKSSDKSVCLFTDFDSQTNVSQSKDSDVYITDKTVLDMRSMDFKSNSAVAWSNKSDFACANAFNNSIIPEDTFFPSPESSCDVKLVEKSFETDTNLNFQNLSVIGFRILLLKVAGFNLLMTLRLWSS

SEQ ID NO: 44363 - protein, 637 aa, synthetic construct
MALPVTALLLPLALLLHAARPELQSVLTQPPSASGTPGQRVTISCSGSSSNIGSNYVNWYQQLPGTAPKLLIYGDYQRPSGVPDRFSGSKSGTSASLAISGLRSEDEADYYCATRDDSLSGSVVFGTGTKLTVLGLEDKQLDADVSPKPTIFLPSIAETKLQKAGTYLCLLEKFFPDVIKIHWQEKKSNTILGSQEGNTMKTNDTYMKFSWLTVPEKSLDKEHRCIVRHENNKNGVDQEIIFPPIKTDVITMDPKDNCSKDANDTLLLQLTNTSAYYMYLLLLLKSVVYFAIITCCLLRRTAFCCNGEKSRAKRSGSGATNFSLLKQAGDVEENPGPTSMDWIWRILFLVGAATGAHSFEEVQLVQSGAEVKKPGESLKISCKGSGYGFTSYWIGWVRQMPGKGLEWMGIIHPDDSDTKYSPSFQGQVTISADKSISTAYLQWSSLKASDTAMYYCASSYLRGLWGGYFDFWGQGTLVTVSSTRSQPHTKPSVFVMKNGTNVACLVKEFYPKDIRINLVSSKKITEFDPAIVISPSGKYNAVKLGKYEDSNSVTCSVQHDNKTVHSTDFEVKTDSTDHVKPKETENTKQPSKSCHKPKAIVHTEKVNMMSLTVLGLRMLFAKTVAVNFLLTAKLFFL

SEQ ID NO: 44364 - protein, 637 aa, synthetic construct; identical to SEQ ID NO: 20811

SEQ ID NO: 44365 - protein, 652 aa, synthetic construct
MALPVTALLLPLALLLHAARPLEDKQLDADVSPKPTIFLPSIAETKLQKAGTYLCLLEKFFPDVIKIHWQEKKSNTILGSQEGNTMKTNDTYMKFSWLTVPEKSLDKEHRCIVRHENNKNGVDQEIIFPPIKTDVITMDPKDNCSKDANDTLLLQLTNTSAYYMYLLLLLKSVVYFAIITCCLLRRTAFCCNGEKSRAKRSGSGATNFSLLKQAGDVEENPGPTSMALPVTALLLPLALLLHAARPELQSVLTQPPSASGTPGQRVTISCSGSSSNIGSNYVNWYQQLPGTAPKLLIYGDYQRPSGVPDRFSGSKSGTSASLAISGLRSEDEADYYCATRDDSLSGSVVFGTGTKLTVLGGGGGSGGGGSGGGGSEVQLVQSGAEVKKPGESLKISCKGSGYGFTSYWIGWVRQMPGKGLEWMGIIHPDDSDTKYSPSFQGQVTISADKSISTAYLQWSSLKASDTAMYYCASSYLRGLWGGYFDFWGQGTLVTVSSTRSQPHTKPSVFVMKNGTNVACLVKEFYPKDIRINLVSSKKITEFDPAIVISPSGKYNAVKLGKYEDSNSVTCSVQHDNKTVHSTDFEVKTDSTDHVKPKETENTKQPSKSCHKPKAIVHTEKVNMMSLTVLGLRMLFAKTVAVNFLLTAKLFFL

SEQ ID NO: 44366 - protein, 806 aa, synthetic construct
MALPVTALLLPLALLLHAARPELQSVLTQPPSASGTPGQRVTISCSGSSSNIGSNYVNWYQQLPGTAPKLLIYGDYQRPSGVPDRFSGSKSGTSASLAISGLRSEDEADYYCATRDDSLSGSVVFGTGTKLTVLGGQPKANPTVTLFPPSSEELQANKATLVCLISDFYPGAVTVAWKADGSPVKAGVETTKPSKQSNNKYAASSYLSLTPEQWKSHRSYSCQVTHEGSTVEKTVAPTECSGSQSFGLLDPKLCYLLDGILFIYGVILTALFLRVKFSRSADAPAYQQGQNQLYNELNLGRREEYDVLDKRRGRDPEMGGKPQRRKNPQEGLYNELQKDKMAEAYSEIGMKGERRRGKGHDGLYQGLSTATKDTYDALHMQALPPRRAKRSGSGATNFSLLKQAGDVEENPGPTSMDWIWRILFLVGAATGAHSFEEVQLVQSGAEVKKPGESLKISCKGSGYGFTSYWIGWVRQMPGKGLEWMGIIHPDDSDTKYSPSFQGQVTISADKSISTAYLQWSSLKASDTAMYYCASSYLRGLWGGYFDFWGQGTLVTVSSASTKGPSVFPLAPSSKSTSGGTAALGCLVKDYFPEPVTVSWNSGALTSGVHTFPAVLQSSGLYSLSSVVTVPSSSLGTQTYICNVNHKPSNTKVDKRVEPKSCGTQSFGLLDPKLCYLLDGILFIYGVILTALFLRVKFSRSADAPAYQQGQNQLYNELNLGRREEYDVLDKRRGRDPEMGGKPQRRKNPQEGLYNELQKDKMAEAYSEIGMKGERRRGKGHDGLYQGLSTATKDTYDALHMQALPPR

SEQ ID NO: 44367 - protein, 825 aa, synthetic construct; identical to SEQ ID NO: 20814

SEQ ID NO: 44368 - protein, 867 aa, synthetic construct
MALPVTALLLPLALLLHAARPELQSVLTQPPSASGTPGQRVTISCSGSSSNIGSNYVNWYQQLPGTAPKLLIYGDYQRPSGVPDRFSGSKSGTSASLAISGLRSEDEADYYCATRDDSLSGSVVFGTGTKLTVLGLEEDLKNVFPPEVAVFEPSEAEISHTQKATLVCLATGFYPDHVELSWWVNGKEVHSGVSTDPQPLKEQPALNDSRYCLSSRLRVSATFWQNPRNHFRCQVQFYGLSENDEWTQDRAKPVTQIVSAEAWGRADCGSQSFGLLDPKLCYLLDGILFIYGVILTALFLRVKFSRSADAPAYQQGQNQLYNELNLGRREEYDVLDKRRGRDPEMGGKPQRRKNPQEGLYNELQKDKMAEAYSEIGMKGERRRGKGHDGLYQGLSTATKDTYDALHMQALPPRRAKRSGSGATNFSLLKQAGDVEENPGPTSMDWIWRILFLVGAATGAHSFEEVQLVQSGAEVKKPGESLKISCKGSGYGFTSYWIGWVRQMPGKGLEWMGIIHPDDSDTKYSPSFQGQVTISADKSISTAYLQWSSLKASDTAMYYCASSYLRGLWGGYFDFWGQGTLVTVSSTRIQNPDPAVYQLRDSKSSDKSVCLFTDFDSQTNVSQSKDSDVYITDKTVLDMRSMDFKSNSAVAWSNKSDFACANAFNNSIIPEDTFFPSPESSCGTQSFGLLDPKLCYLLDGILFIYGVILTALFLRSKRSRLLHSDYMNMTPRRPGPTRKHYQPYAPPRDFAAYRSRVKFSRSADAPAYQQGQNQLYNELNLGRREEYDVLDKRRGRDPEMGGKPQRRKNPQEGLYNELQKDKMAEAYSEIGMKGERRRGKGHDGLYQGLSTATKDTYDALHMQALPPR

SEQ ID NO: 44369 - protein, 910 aa, synthetic construct
MALPVTALLLPLALLLHAARPELQSVLTQPPSASGTPGQRVTISCSGSSSNIGSNYVNWYQQLPGTAPKLLIYGDYQRPSGVPDRFSGSKSGTSASLAISGLRSEDEADYYCATRDDSLSGSVVFGTGTKLTVLGLEEDLKNVFPPEVAVFEPSEAEISHTQKATLVCLATGFYPDHVELSWWVNGKEVHSGVSTDPQPLKEQPALNDSRYCLSSRLRVSATFWQNPRNHFRCQVQFYGLSENDEWTQDRAKPVTQIVSAEAWGRADCGSQSFGLLDPKLCYLLDGILFIYGVILTALFLKRGRKKLLYIFKQPFMRPVQTTQEEDGCSCRFPEEEEGGCELRVKFSRSADAPAYQQGQNQLYNELNLGRREEYDVLDKRRGRDPEMGGKPQRRKNPQEGLYNELQKDKMAEAYSEIGMKGERRRGKGHDGLYQGLSTATKDTYDALHMQALPPRRAKRSGSGATNFSLLKQAGDVEENPGPTSMDWIWRILFLVGAATGAHSFEEVQLVQSGAEVKKPGESLKISCKGSGYGFTSYWIGWVRQMPGKGLEWMGIIHPDDSDTKYSPSFQGQVTISADKSISTAYLQWSSLKASDTAMYYCASSYLRGLWGGYFDFWGQGTLVTVSSTRIQNPDPAVYQLRDSKSSDKSVCLFTDFDSQTNVSQSKDSDVYITDKTVLDMRSMDFKSNSAVAWSNKSDFACANAFNNSIIPEDTFFPSPESSCGTQSFGLLDPKLCYLLDGILFIYGVILTALFLKRGRKKLLYIFKQPFMRPVQTTQEEDGCSCRFPEEEEGGCELRVKFSRSADAPAYQQGQNQLYNELNLGRREEYDVLDKRRGRDPEMGGKPQRRKNPQEGLYNELQKDKMAEAYSEIGMKGERRRGKGHDGLYQGLSTATKDTYDALHMQALPPR

SEQ ID NO: 44370 - protein, 597 aa, synthetic construct
MALPVTALLLPLALLLHAARPELQSVLTQPPSASGTPGQRVTISCSGSSSNIGSNYVNWYQQLPGTAPKLLIYGDYQRPSGVPDRFSGSKSGTSASLAISGLRSEDEADYYCATRDDSLSGSVVFGTGTKLTVLGLEQSFGLLDPKLCYLLDGILFIYGVILTALFLRVKFSRSADAPAYQQGQNQLYNELNLGRREEYDVLDKRRGRDPEMGGKPQRRKNPQEGLYNELQKDKMAEAYSEIGMKGERRRGKGHDGLYQGLSTATKDTYDALHMQALPPRRAKRSGSGATNFSLLKQAGDVEENPGPTSMDWIWRILFLVGAATGAHSFEEVQLVQSGAEVKKPGESLKISCKGSGYGFTSYWIGWVRQMPGKGLEWMGIIHPDDSDTKYSPSFQGQVTISADKSISTAYLQWSSLKASDTAMYYCASSYLRGLWGGYFDFWGQGTLVTVSSTRQSFGLLDPKLCYLLDGILFIYGVILTALFLRVKFSRSADAPAYQQGQNQLYNELNLGRREEYDVLDKRRGRDPEMGGKPQRRKNPQEGLYNELQKDKMAEAYSEIGMKGERRRGKGHDGLYQGLSTATKDTYDALHMQALPPR

SEQ ID NO: 44371 - protein, 655 aa, synthetic construct; identical to SEQ ID NO: 20821

SEQ ID NO: 44372 - protein, 633 aa, synthetic construct; identical to SEQ ID NO: 20822

SEQ ID NO: 44373 - protein, 633 aa, synthetic construct; identical to SEQ ID NO: 20823

SEQ ID NO: 44374 - protein, 459 aa, synthetic construct; identical to SEQ ID NO: 20824

SEQ ID NO: 44375 - protein, 424 aa, synthetic construct; identical to SEQ ID NO: 20825

SEQ ID NO: 44376 - protein, 434 aa, synthetic construct; identical to SEQ ID NO: 20826

SEQ ID NO: 44377 - protein, 417 aa, synthetic construct; identical to SEQ ID NO: 20827

SEQ ID NO: 44378 - protein, 512 aa, synthetic construct; identical to SEQ ID NO: 20832

SEQ ID NO: 44379 - protein, 487 aa, synthetic construct
MALPVTALLLPLALLLHAARPELQSVLTQPPSASGTPGQRVTISCSGSSSNIGSNYVNWYQQLPGTAPKLLIYGDYQRPSGVPDRFSGSKSGTSASLAISGLRSEDEADYYCATRDDSLSGSVVFGTGTKLTVLGGGGGSGGGGSGGGGSEVQLVQSGAEVKKPGESLKISCKGSGYGFTSYWIGWVRQMPGKGLEWMGIIHPDDSDTKYSPSFQGQVTISADKSISTAYLQWSSLKASDTAMYYCASSYLRGLWGGYFDFWGQGTLVTVSSTRGMRTEDLPKAVVFLEPQWYRVLEKDSVTLKCQGAYSPEDNSTQWFHNESLISSQASSYFIDAATVDDSGEYRCQTNLSTLSDPVQLEVHIGWLLLQAPRWVFKEEDPIHLRCHSWKNTALHKVTYLQNGKGRKYFHHNSDFYIPKATLKDSGSYFCRGLVGSKNVSSETVNITITQGLAVPTISSFFPPGYQVSFCLVMVLLFAVDTGLYFSV

SEQ ID NO: 44380 - protein, 488 aa, synthetic construct
MALPVTALLLPLALLLHAARPELQSVLTQPPSASGTPGQRVTISCSGSSSNIGSNYVNWYQQLPGTAPKLLIYGDYQRPSGVPDRFSGSKSGTSASLAISGLRSEDEADYYCATRDDSLSGSVVFGTGTKLTVLGGGGGSGGGGSGGGGSEVQLVQSGAEVKKPGESLKISCKGSGYGFTSYWIGWVRQMPGKGLEWMGIIHPDDSDTKYSPSFQGQVTISADKSISTAYLQWSSLKASDTAMYYCASSYLRGLWGGYFDFWGQGTLVTVSSTRGMRTEDLPKAVVFLEPQWYRVLEKDSVTLKCQGAYSPEDNSTQWFHNESLISSQASSYFIDAATVDDSGEYRCQTNLSTLSDPVQLEVHIGWLLLQAPRWVFKEEDPIHLRCHSWKNTALHKVTYLQNGKGRKYFHHNSDFYIPKATLKDSGSYFCRGLVGSKNVSSETVNITITQGLAVPTISSFFPPGYQVSFCLVMVLLFAVDTGLYFSVK

SEQ ID NO: 44381 - protein, 732 aa, synthetic construct
MALPVTALLLPLALLLHAARPELQSVLTQPPSASGTPGQRVTISCSGSSSNIGSNYVNWYQQLPGTAPKLLIYGDYQRPSGVPDRFSGSKSGTSASLAISGLRSEDEADYYCATRDDSLSGSVVFGTGTKLTVLGLEGQPKANPTVTLFPPSSEELQANKATLVCLISDFYPGAVTVAWKADGSPVKAGVETTKPSKQSNNKYAASSYLSLTPEQWKSHRSYSCQVTHEGSTVEKTVAPTECSGSQSFGLLDPKLCYLLDGILFIYGVILTALFLRVKFSRSADAPAYQQGQNQLYNELNLGRREEYDVLDKRRGRDPEMGGKPQRRKNPQEGLYNELQKDKMAEAYSEIGMKGERRRGKGHDGLYQGLSTATKDTYDALHMQALPPRRAKRSGSGATNFSLLKQAGDVEENPGPTSMDWIWRILFLVGAATGAHSFEEVQLVQSGAEVKKPGESLKISCKGSGYGFTSYWIGWVRQMPGKGLEWMGIIHPDDSDTKYSPSFQGQVTISADKSISTAYLQWSSLKASDTAMYYCASSYLRGLWGGYFDFWGQGTLVTVSSTRASTKGPSVFPLAPSSKSTSGGTAALGCLVKDYFPEPVTVSWNSGALTSGVHTFPAVLQSSGLYSLSSVVTVPSSSLGTQTYICNVNHKPSNTKVDKRVEPKSCGTITQGLAVSTISSFFPPGYQVSFCLVMVLLFAVDTGLYFSVKTNIRSSTRDWKDHKFKWRKDPQDK

SEQ ID NO: 44382 - protein, 747 aa, synthetic construct
MALPVTALLLPLALLLHAARPELQSVLTQPPSASGTPGQRVTISCSGSSSNIGSNYVNWYQQLPGTAPKLLIYGDYQRPSGVPDRFSGSKSGTSASLAISGLRSEDEADYYCATRDDSLSGSVVFGTGTKLTVLGLEDLKNVFPPEVAVFEPSEAEISHTQKATLVCLATGFYPDHVELSWWVNGKEVHSGVSTDPQPLKEQPALNDSRYCLSSRLRVSATFWQNPRNHFRCQVQFYGLSENDEWTQDRAKPVTQIVSAEAWGRADCGSQSFGLLDPKLCYLLDGILFIYGVILTALFLRVKFSRSADAPAYQQGQNQLYNELNLGRREEYDVLDKRRGRDPEMGGKPQRRKNPQEGLYNELQKDKMAEAYSEIGMKGERRRGKGHDGLYQGLSTATKDTYDALHMQALPPRRAKRSGSGATNFSLLKQAGDVEENPGPTSMDWIWRILFLVGAATGAHSFEEVQLVQSGAEVKKPGESLKISCKGSGYGFTSYWIGWVRQMPGKGLEWMGIIHPDDSDTKYSPSFQGQVTISADKSISTAYLQWSSLKASDTAMYYCASSYLRGLWGGYFDFWGQGTLVTVSSTRIQNPDPAVYQLRDSKSSDKSVCLFTDFDSQTNVSQSKDSDVYITDKTVLDMRSMDFKSNSAVAWSNKSDFACANAFNNSIIPEDTFFPSPESSCGTITQGLAVSTISSFFPPGYQVSFCLVMVLLFAVDTGLYFSVKTNIRSSTRDWKDHKFKWRKDPQDK

SEQ ID NO: 44383 - protein, 722 aa, synthetic construct
MALPVTALLLPLALLLHAARPELQSVLTQPPSASGTPGQRVTISCSGSSSNIGSNYVNWYQQLPGTAPKLLIYGDYQRPSGVPDRFSGSKSGTSASLAISGLRSEDEADYYCATRDDSLSGSVVFGTGTKLTVLGLEDLKNVFPPEVAVFEPSEAEISHTQKATLVCLATGFYPDHVELSWWVNGKEVHSGVSTDPQPLKEQPALNDSRYCLSSRLRVSATFWQNPRNHFRCQVQFYGLSENDEWTQDRAKPVTQIVSAEAWGRADCGSQSFGLLDPKLCYLLDGILFIYGVILTALFLRVKFSRSADAPAYQQGQNQLYNELNLGRREEYDVLDKRRGRDPEMGGKPQRRKNPQEGLYNELQKDKMAEAYSEIGMKGERRRGKGHDGLYQGLSTATKDTYDALHMQALPPRRAKRSGSGATNFSLLKQAGDVEENPGPTSMDWIWRILFLVGAATGAHSFEEVQLVQSGAEVKKPGESLKISCKGSGYGFTSYWIGWVRQMPGKGLEWMGIIHPDDSDTKYSPSFQGQVTISADKSISTAYLQWSSLKASDTAMYYCASSYLRGLWGGYFDFWGQGTLVTVSSTRIQNPDPAVYQLRDSKSSDKSVCLFTDFDSQTNVSQSKDSDVYITDKTVLDMRSMDFKSNSAVAWSNKSDFACANAFNNSIIPEDTFFPSPESSCGTITQGLAVSTISSFFPPGYQVSFCLVMVLLFAVDTGLYFSV

SEQ ID NO: 44384 - protein, 723 aa, synthetic construct
MALPVTALLLPLALLLHAARPELQSVLTQPPSASGTPGQRVTISCSGSSSNIGSNYVNWYQQLPGTAPKLLIYGDYQRPSGVPDRFSGSKSGTSASLAISGLRSEDEADYYCATRDDSLSGSVVFGTGTKLTVLGLEDLKNVFPPEVAVFEPSEAEISHTQKATLVCLATGFYPDHVELSWWVNGKEVHSGVSTDPQPLKEQPALNDSRYCLSSRLRVSATFWQNPRNHFRCQVQFYGLSENDEWTQDRAKPVTQIVSAEAWGRADCGSQSFGLLDPKLCYLLDGILFIYGVILTALFLRVKFSRSADAPAYQQGQNQLYNELNLGRREEYDVLDKRRGRDPEMGGKPQRRKNPQEGLYNELQKDKMAEAYSEIGMKGERRRGKGHDGLYQGLSTATKDTYDALHMQALPPRRAKRSGSGATNFSLLKQAGDVEENPGPTSMDWIWRILFLVGAATGAHSFEEVQLVQSGAEVKKPGESLKISCKGSGYGFTSYWIGWVRQMPGKGLEWMGIIHPDDSDTKYSPSFQGQVTISADKSISTAYLQWSSLKASDTAMYYCASSYLRGLWGGYFDFWGQGTLVTVSSTRIQNPDPAVYQLRDSKSSDKSVCLFTDFDSQTNVSQSKDSDVYITDKTVLDMRSMDFKSNSAVAWSNKSDFACANAFNNSIIPEDTFFPSPESSCGTITQGLAVSTISSFFPPGYQVSFCLVMVLLFAVDTGLYFSVK

SEQ ID NO: 44385 - protein, 724 aa, synthetic construct
MALPVTALLLPLALLLHAARPELQSVLTQPPSASGTPGQRVTISCSGSSSNIGSNYVNWYQQLPGTAPKLLIYGDYQRPSGVPDRFSGSKSGTSASLAISGLRSEDEADYYCATRDDSLSGSVVFGTGTKLTVLGLEDLKNVFPPEVAVFEPSEAEISHTQKATLVCLATGFYPDHVELSWWVNGKEVHSGVSTDPQPLKEQPALNDSRYCLSSRLRVSATFWQNPRNHFRCQVQFYGLSENDEWTQDRAKPVTQIVSAEAWGRADCGSQSFGLLDPKLCYLLDGILFIYGVILTALFLRVKFSRSADAPAYQQGQNQLYNELNLGRREEYDVLDKRRGRDPEMGGKPQRRKNPQEGLYNELQKDKMAEAYSEIGMKGERRRGKGHDGLYQGLSTATKDTYDALHMQALPPRRAKRSGSGATNFSLLKQAGDVEENPGPTSMDWIWRILFLVGAATGAHSFEEVQLVQSGAEVKKPGESLKISCKGSGYGFTSYWIGWVRQMPGKGLEWMGIIHPDDSDTKYSPSFQGQVTISADKSISTAYLQWSSLKASDTAMYYCASSYLRGLWGGYFDFWGQGTLVTVSSTRIQNPDPAVYQLRDSKSSDKSVCLFTDFDSQTNVSQSKDSDVYITDKTVLDMRSMDFKSNSAVAWSNKSDFACANAFNNSIIPEDTFFPSPESSCGTITQGLAVSTISSFFPPGYQVSFCLVMVLLFAVDTGLYFSVKT

SEQ ID NO: 44386 - protein, 660 aa, synthetic construct; identical to SEQ ID NO: 20851

SEQ ID NO: 44387 - protein, 630 aa, synthetic construct
MALPVTALLLPLALLLHAARPELQSVLTQPPSASGTPGQRVTISCSGSSSNIGSNYVNWYQQLPGTAPKLLIYGDYQRPSGVPDRFSGSKSGTSASLAISGLRSEDEADYYCATRDDSLSGSVVFGTGTKLTVLGLEDLKNVFPPEVAVFEPSEAEISHTQKATLVCLATGFYPDHVELSWWVNGKEVHSGVCTDPQPLKEQPALNDSRYCLSSRLRVSATFWQNPRNHFRCQVQFYGLSENDEWTQDRAKPVTQIVSAEAWGRADCGFTSESYQQGVLSAYYMYLLLLLKSVVYFAIITCCLLRRTAFCCNGEKSRAKRSGSGATNFSLLKQAGDVEENPGPTSMDWIWRILFLVGAATGAHSFEEVQLVQSGAEVKKPGESLKISCKGSGYGFTSYWIGWVRQMPGKGLEWMGIIHPDDSDTKYSPSFQGQVTISADKSISTAYLQWSSLKASDTAMYYCASSYLRGLWGGYFDFWGQGTLVTVSSTRIQNPDPAVYQLRDSKSSDKSVCLFTDFDSQTNVSQSKDSDVYITDKCVLDMRSMDFKSNSAVAWSNKSDFACANAFNNSIIPEDTFFPSPESSCDVKLVEKSFETDTNLNFQNLSVIGFRILLLKVAGFNLLMTLRLWSS

SEQ ID NO: 44388 - protein, 636 aa, synthetic construct
MALPVTALLLPLALLLHAARPELQSVLTQPPSASGTPGQRVTISCSGSSSNIGSNYVNWYQQLPGTAPKLLIYGDYQRPSGVPDRFSGSKSGTSASLAISGLRSEDEADYYCATRDDSLSGSVVFGTGTKLTVLGLEDKQLDADVSPKPTIFLPSIAETKLQKAGTYLCLLEKFFPDVIKIHWQEKKSNTILGSQEGNTMKTNDTYMKFSWLTVPEKSLDKEHRCIVRHENNKNGVDQEIIFPPIKTDVITMDPKDNCSKDANDTLLLQLTNTSAYYMYEILLGKATLYAVLVSALVLMAMVKRKDSRGRAKRSGSGATNFSLLKQAGDVEENPGPTSMDWIWRILFLVGAATGAHSFEEVQLVQSGAEVKKPGESLKISCKGSGYGFTSYWIGWVRQMPGKGLEWMGIIHPDDSDTKYSPSFQGQVTISADKSISTAYLQWSSLKASDTAMYYCASSYLRGLWGGYFDFWGQGTLVTVSSTRSQPHTKPSVFVMKNGTNVACLVKEFYPKDIRINLVSSKKITEFDPAIVISPSGKYNAVKLGKYEDSNSVTCSVQHDNKTVHSTDFEVKTDSTDHVKPKETENTKQPSKSCHKPKAIVHTEKVNMMSLTVIGFRILLLKVAGFNLLMTLRLWSS

SEQ ID NO: 44389 - protein, 636 aa, synthetic construct
MALPVTALLLPLALLLHAARPELQSVLTQPPSASGTPGQRVTISCSGSSSNIGSNYVNWYQQLPGTAPKLLIYGDYQRPSGVPDRFSGSKSGTSASLAISGLRSEDEADYYCATRDDSLSGSVVFGTGTKLTVLGLEDKQLDADVSPKPTIFLPSIAETKLQKAGTYLCLLEKFFPDVIKIHWQEKKSNTILGSQEGNTMKTNDTYMKFSWLTVPEKSLDKEHRCIVRHENNKNGVDQEIIFPPIKTDVITMDPKDNCSKDANDTLLLQLTNTSATILYEILLGKATLYAVLVSALVLMAMVKRKDSRGRAKRSGSGATNFSLLKQAGDVEENPGPTSMDWIWRILFLVGAATGAHSFEEVQLVQSGAEVKKPGESLKISCKGSGYGFTSYWIGWVRQMPGKGLEWMGIIHPDDSDTKYSPSFQGQVTISADKSISTAYLQWSSLKASDTAMYYCASSYLRGLWGGYFDFWGQGTLVTVSSTRSQPHTKPSVFVMKNGTNVACLVKEFYPKDIRINLVSSKKITEFDPAIVISPSGKYNAVKLGKYEDSNSVTCSVQHDNKTVHSTDFEVKTDSTDHVKPKETENTKQPSKSCHKPKAIVHTEKVNMMSLTVIGFRILLLKVAGFNLLMTLRLWSS

SEQ ID NO: 44390 - protein, 636 aa, synthetic construct
MALPVTALLLPLALLLHAARPELQSVLTQPPSASGTPGQRVTISCSGSSSNIGSNYVNWYQQLPGTAPKLLIYGDYQRPSGVPDRFSGSKSGTSASLAISGLRSEDEADYYCATRDDSLSGSVVFGTGTKLTVLGLEDKQLDADVSPKPTIFLPSIAETKLQKAGTYLCLLEKFFPDVIKIHWQEKKSNTILGSQEGNTMKTNDTYMKFSWLTVPEKSLDKEHRCIVRHENNKNGVDQEIIFPPIKTDVITMDPKDNCSKDANDTLLLQLTNTSAYYMYEILLGKATLYAVLVSALVLMAMVKRKDSRGRAKRSGSGATNFSLLKQAGDVEENPGPTSMDWIWRILFLVGAATGAHSFEEVQLVQSGAEVKKPGESLKISCKGSGYGFTSYWIGWVRQMPGKGLEWMGIIHPDDSDTKYSPSFQGQVTISADKSISTAYLQWSSLKASDTAMYYCASSYLRGLWGGYFDFWGQGTLVTVSSTRSQPHTKPSVFVMKNGTNVACLVKEFYPKDIRINLVSSKKITEFDPAIVISPSGKYNAVKLGKYEDSNSVTCSVQHDNKTVHSTDFEVKTDSTDHVKPKETENTKQPSKSCHKPKAIVHTEKVNMMSLTVLGFRILLLKVAGFNLLMTLRLWSS

SEQ ID NO: 44391 - protein, 636 aa, synthetic construct
MALPVTALLLPLALLLHAARPELQSVLTQPPSASGTPGQRVTISCSGSSSNIGSNYVNWYQQLPGTAPKLLIYGDYQRPSGVPDRFSGSKSGTSASLAISGLRSEDEADYYCATRDDSLSGSVVFGTGTKLTVLGLEDKQLDADVSPKPTIFLPSIAETKLQKAGTYLCLLEKFFPDVIKIHWQEKKSNTILGSQEGNTMKTNDTYMKFSWLTVPEKSLDKEHRCIVRHENNKNGVDQEIIFPPIKTDVITMDPKDNCSKDANDTLLLQLTNTSATILYEILLGKATLYAVLVSALVLMAMVKRKDSRGRAKRSGSGATNFSLLKQAGDVEENPGPTSMDWIWRILFLVGAATGAHSFEEVQLVQSGAEVKKPGESLKISCKGSGYGFTSYWIGWVRQMPGKGLEWMGIIHPDDSDTKYSPSFQGQVTISADKSISTAYLQWSSLKASDTAMYYCASSYLRGLWGGYFDFWGQGTLVTVSSTRSQPHTKPSVFVMKNGTNVACLVKEFYPKDIRINLVSSKKITEFDPAIVISPSGKYNAVKLGKYEDSNSVTCSVQHDNKTVHSTDFEVKTDSTDHVKPKETENTKQPSKSCHKPKAIVHTEKVNMMSLTVLGFRILLLKVAGFNLLMTLRLWSS

SEQ ID NO: 44392 - protein, 630 aa, synthetic construct
MALPVTALLLPLALLLHAARPELQSVLTQPPSASGTPGQRVTISCSGSSSNIGSNYVNWYQQLPGTAPKLLIYGDYQRPSGVPDRFSGSKSGTSASLAISGLRSEDEADYYCATRDDSLSGSVVFGTGTKLTVLGLEDLKNVFPPEVAVFEPSEAEISHTQKATLVCLATGFYPDHVELSWWVNGKEVHSGVCTDPQPLKEQPALNDSRYCLSSRLRVSATFWQNPRNHFRCQVQFYGLSENDEWTQDRAKPVTQIVSAEAWGRADCGFTSESYQQGVLSATILYLLLLLKSVVYFAIITCCLLRRTAFCCNGEKSRAKRSGSGATNFSLLKQAGDVEENPGPTSMDWIWRILFLVGAATGAHSFEEVQLVQSGAEVKKPGESLKISCKGSGYGFTSYWIGWVRQMPGKGLEWMGIIHPDDSDTKYSPSFQGQVTISADKSISTAYLQWSSLKASDTAMYYCASSYLRGLWGGYFDFWGQGTLVTVSSTRIQNPDPAVYQLRDSKSSDKSVCLFTDFDSQTNVSQSKDSDVYITDKCVLDMRSMDFKSNSAVAWSNKSDFACANAFNNSIIPEDTFFPSPESSCDVKLVEKSFETDTNLNFQNLSVIGLRMLFAKTVAVNFLLTAKLFFL

SEQ ID NO: 44393 - protein, 659 aa, synthetic construct
MALPVTALLLPLALLLHAARPELQSVLTQPPSASGTPGQRVTISCSGSSSNIGSNYVNWYQQLPGTAPKLLIYGDYQRPSGVPDRFSGSKSGTSASLAISGLRSEDEADYYCATRDDSLSGSVVFGTGTKLTVLGLEDLKNVFPPEVAVFEPSEAEISHTQKATLVCLATGFYPDHVELSWWVNGKEVHSGVSTDPQPLKEQPALNDSRYCLSSRLRVSATFWQNPRNHFRCQVQFYGLSENDEWTQDRAKPVTQIVSAEAWGRADCGSSKDANDTLLLQLTNTSAYYMYLLLLLKSVVYFAIITCCLLRRTAFCCNGEKSRAKRSGSGATNFSLLKQAGDVEENPGPTSMDWIWRILFLVGAATGAHSFEEVQLVQSGAEVKKPGESLKISCKGSGYGFTSYWIGWVRQMPGKGLEWMGIIHPDDSDTKYSPSFQGQVTISADKSISTAYLQWSSLKASDTAMYYCASSYLRGLWGGYFDFWGQGTLVTVSSTRIQNPDPAVYQLRDSKSSDKSVCLFTDFDSQTNVSQSKDSDVYITDKTVLDMRSMDFKSNSAVAWSNKSDFACANAFNNSIIPEDTFFPSPESSCGTEVKTDSTDHVKPKETENTKQPSKSCHKPKAIVHTEKVNMMSLTVLGLRMLFAKTVAVNFLLTAKLFFL

SEQ ID NO: 44394 - protein, 629 aa, synthetic construct
MALPVTALLLPLALLLHAARPELQSVLTQPPSASGTPGQRVTISCSGSSSNIGSNYVNWYQQLPGTAPKLLIYGDYQRPSGVPDRFSGSKSGTSASLAISGLRSEDEADYYCATRDDSLSGSVVFGTGTKLTVLGLEDLKNVFPPEVAVFEPSEAEISHTQKATLVCLATGFYPDHVELSWWVNGKEVHSGVCTDPQPLKEQPALNDSRYCLSSRLRVSATFWQNPRNHFRCQVQFYGLSENDEWTQDRAKPVTQIVSAEAWGRADCDVKLVEKSFETDTNLNFQNLSVIGFRILLLKVAGFNLLMTLRLWSSRAKRSGSGATNFSLLKQAGDVEENPGPTSMDWIWRILFLVGAATGAHSFEEVQLVQSGAEVKKPGESLKISCKGSGYGFTSYWIGWVRQMPGKGLEWMGIIHPDDSDTKYSPSFQGQVTISADKSISTAYLQWSSLKASDTAMYYCASSYLRGLWGGYFDFWGQGTLVTVSSTRIQNPDPAVYQLRDSKSSDKSVCLFTDFDSQTNVSQSKDSDVYITDKCVLDMRSMDFKSNSAVAWSNKSDFACANAFNNSIIPEDTFFPSPESSCGFTSESYQQGVLSATILYEILLGKATLYAVLVSALVLMAMVKRKDSRG

SEQ ID NO: 44395 - protein, 629 aa, synthetic construct
MALPVTALLLPLALLLHAARPELQSVLTQPPSASGTPGQRVTISCSGSSSNIGSNYVNWYQQLPGTAPKLLIYGDYQRPSGVPDRFSGSKSGTSASLAISGLRSEDEADYYCATRDDSLSGSVVFGTGTKLTVLGLEDLKNVFPPEVAVFEPSEAEISHTQKATLVCLATGFYPDHVELSWWVNGKEVHSGVCTDPQPLKEQPALNDSRYCLSSRLRVSATFWQNPRNHFRCQVQFYGLSENDEWTQDRAKPVTQIVSAEAWGRADCGFTSESYQQGVLSATNLSVIGFRILLLKVAGFNLLMTLRLWSSRAKRSGSGATNFSLLKQAGDVEENPGPTSMDWIWRILFLVGAATGAHSFEEVQLVQSGAEVKKPGESLKISCKGSGYGFTSYWIGWVRQMPGKGLEWMGIIHPDDSDTKYSPSFQGQVTISADKSISTAYLQWSSLKASDTAMYYCASSYLRGLWGGYFDFWGQGTLVTVSSTRIQNPDPAVYQLRDSKSSDKSVCLFTDFDSQTNVSQSKDSDVYITDKCVLDMRSMDFKSNSAVAWSNKSDFACANAFNNSIIPEDTFFPSPESSCDVKLVEKSFETDTNLNFQILYEILLGKATLYAVLVSALVLMAMVKRKDSRG

SEQ ID NO: 44396 - protein, 629 aa, synthetic construct; identical to SEQ ID NO: 44394

SEQ ID NO: 44397 - protein, 629 aa, synthetic construct; identical to SEQ ID NO: 44395

SEQ ID NO: 44398 - protein, 629 aa, synthetic construct; identical to SEQ ID NO: 44394

SEQ ID NO: 44399 - protein, 632 aa, synthetic construct
MALPVTALLLPLALLLHAARPELQSVLTQPPSASGTPGQRVTISCSGSSSNIGSNYVNWYQQLPGTAPKLLIYGDYQRPSGVPDRFSGSKSGTSASLAISGLRSEDEADYYCATRDDSLSGSVVFGTGTKLTVLGLEADVSPKPTIFLPSIAETKLQKAGTYLCLLEKFFPDVIKIHWQEKKSNTILGSQEGNTMKTNDTYMKFSWLTVPEKSLDKEHRCIVRHENNKNGVDQEIIFPPIKTDVITMDPKDNCSKDANDTLLLQLTNTSAYYMYLLLLLKSVVYFAIITCCLLRRTAFCCNGEKSRAKRSGSGATNFSLLKQAGDVEENPGPTSMDWIWRILFLVGAATGAHSFEEVQLVQSGAEVKKPGESLKISCKGSGYGFTSYWIGWVRQMPGKGLEWMGIIHPDDSDTKYSPSFQGQVTISADKSISTAYLQWSSLKASDTAMYYCASSYLRGLWGGYFDFWGQGTLVTVSSTRSQPHTKPSVFVMKNGTNVACLVKEFYPKDIRINLVSSKKITEFDPAIVISPSGKYNAVKLGKYEDSNSVTCSVQHDNKTVHSTDFEVKTDSTDHVKPKETENTKQPSKSCHKPKAIVHTEKVNMMSLTVIGFRILLLKVAGFNLLMTLRLWSS

SEQ ID NO: 44400 - protein, 632 aa, synthetic construct
MALPVTALLLPLALLLHAARPELQSVLTQPPSASGTPGQRVTISCSGSSSNIGSNYVNWYQQLPGTAPKLLIYGDYQRPSGVPDRFSGSKSGTSASLAISGLRSEDEADYYCATRDDSLSGSVVFGTGTKLTVLGLEADVSPKPTIFLPSIAETKLQKAGTYLCLLEKFFPDVIKIHWQEKKSNTILGSQEGNTMKTNDTYMKFSWLTVPEKSLDKEHRCIVRHENNKNGVDQEIIFPPIKTDVITMDPKDNCSKDANDTLLLQLTNTSAYYMYLLLLLKSVVYFAIITCCLLRRTAFCCNGEKSRAKRSGSGATNFSLLKQAGDVEENPGPTSMDWIWRILFLVGAATGAHSFEEVQLVQSGAEVKKPGESLKISCKGSGYGFTSYWIGWVRQMPGKGLEWMGIIHPDDSDTKYSPSFQGQVTISADKSISTAYLQWSSLKASDTAMYYCASSYLRGLWGGYFDFWGQGTLVTVSSTRSQPHTKPSVFVMKNGTNVACLVKEFYPKDIRINLVSSKKITEFDPAIVISPSGKYNAVKLGKYEDSNSVTCSVQHDNKTVHSTDFEVKTDSTDHVKPKETENTKQPSKSCHKPKAIVHTEKVNMMSLTVLGFRILLLKVAGFNLLMTLRLWSS

SEQ ID NO: 44401 - protein, 629 aa, synthetic construct; identical to SEQ ID NO: 44394

SEQ ID NO: 44402 - protein, 633 aa, synthetic construct
MALPVTALLLPLALLLHAARPELQSVLTQPPSASGTPGQRVTISCSGSSSNIGSNYVNWYQQLPGTAPKLLIYGDYQRPSGVPDRFSGSKSGTSASLAISGLRSEDEADYYCATRDDSLSGSVVFGTGTKLTVLGLEIQNPDPAVYQLRDSKSSDKSVCLFTDFDSQTNVSQSKDSDVYITDKCVLDMRSMDFKSNSAVAWSNKSDFACANAFNNSIIPEDTFFPSPESSCGFTSESYQQGVLSATILYEILLGKATLYAVLVSALVLMAMVKRKDSRGRAKRSGSGVKQTLNFDLLKLAGDVESNPGPTSMDWIWRILFLVGAATGAHSFEEVQLVQSGAEVKKPGESLKISCKGSGYGFTSYWIGWVRQMPGKGLEWMGIIHPDDSDTKYSPSFQGQVTISADKSISTAYLQWSSLKASDTAMYYCASSYLRGLWGGYFDFWGQGTLVTVSSTREDLKNVFPPEVAVFEPSEAEISHTQKATLVCLATGFYPDHVELSWWVNGKEVHSGVCTDPQPLKEQPALNDSRYCLSSRLRVSATFWQNPRNHFRCQVQFYGLSENDEWTQDRAKPVTQIVSAEAWGRADCDVKLVEKSFETDTNLNFQNLSVIGFRILLLKVAGFNLLMTLRLWSS

SEQ ID NO: 44403 - protein, 764 aa, synthetic construct
MALPVTALLLPLALLLHAARPEVQLVESGGGLVQPGGSLRLSCAASGFSFSDFWMSWVRQAPGKGLEWVATISQAGSEKDYVDSVKGRFTISRDNAKKSLYLQMNSLRAEDTAVYYCASGVYSFDYRGQGTLVTVSSGTGGGGSGGGGSGGGGSEFELQSVLTQPPSASGTPGQRVTISCSGSSSNIGSNYVNWYQQLPGTAPKLLIYGDYQRPSGVPDRFSGSKSGTSASLAISGLRSEDEADYYCATRDDSLSGSVVFGTGTKLTVLGLEDLKNVFPPEVAVFEPSEAEISHTQKATLVCLATGFYPDHVELSWWVNGKEVHSGVCTDPQPLKEQPALNDSRYCLSSRLRVSATFWQNPRNHFRCQVQFYGLSENDEWTQDRAKPVTQIVSAEAWGRADCDVKLVEKSFETDTNLNFQNLSVIGFRILLLKVAGFNLLMTLRLWSSRAKRSGSGATNFSLLKQAGDVEENPGPTSMDWIWRILFLVGAATGAHSFEEVQLVQSGAEVKKPGESLKISCKGSGYGFTSYWIGWVRQMPGKGLEWMGIIHPDDSDTKYSPSFQGQVTISADKSISTAYLQWSSLKASDTAMYYCASSYLRGLWGGYFDFWGQGTLVTVSSTRIQNPDPAVYQLRDSKSSDKSVCLFTDFDSQTNVSQSKDSDVYITDKCVLDMRSMDFKSNSAVAWSNKSDFACANAFNNSIIPEDTFFPSPESSCGFTSESYQQGVLSATILYEILLGKATLYAVLVSALVLMAMVKRKDSRG

SEQ ID NO: 44404 - protein, 768 aa, synthetic construct
MALPVTALLLPLALLLHAARPEVQLVESGGGLVQPGGSLRLSCAASGFSFSDFWMSWVRQAPGKGLEWVATISQAGSEKDYVDSVKGRFTISRDNAKKSLYLQMNSLRAEDTAVYYCASGVYSFDYRGQGTLVTVSSGTGGGGSGGGGSGGGGSEFELQSVLTQPPSASGTPGQRVTISCSGSSSNIGSNYVNWYQQLPGTAPKLLIYGDYQRPSGVPDRFSGSKSGTSASLAISGLRSEDEADYYCATRDDSLSGSVVFGTGTKLTVLGLEIQNPDPAVYQLRDSKSSDKSVCLFTDFDSQTNVSQSKDSDVYITDKCVLDMRSMDFKSNSAVAWSNKSDFACANAFNNSIIPEDTFFPSPESSCGFTSESYQQGVLSATILYEILLGKATLYAVLVSALVLMAMVKRKDSRGRAKRSGSGVKQTLNFDLLKLAGDVESNPGPTSMDWIWRILFLVGAATGAHSFEEVQLVQSGAEVKKPGESLKISCKGSGYGFTSYWIGWVRQMPGKGLEWMGIIHPDDSDTKYSPSFQGQVTISADKSISTAYLQWSSLKASDTAMYYCASSYLRGLWGGYFDFWGQGTLVTVSSTREDLKNVFPPEVAVFEPSEAEISHTQKATLVCLATGFYPDHVELSWWVNGKEVHSGVCTDPQPLKEQPALNDSRYCLSSRLRVSATFWQNPRNHFRCQVQFYGLSENDEWTQDRAKPVTQIVSAEAWGRADCDVKLVEKSFETDTNLNFQNLSVIGFRILLLKVAGFNLLMTLRLWSS

SEQ ID NO: 44405 - protein, 901 aa, synthetic construct
MALPVTALLLPLALLLHAARPEVQLVESGGGLVQPGGSLRLSCAASGFSFSDFWMSWVRQAPGKGLEWVATISQAGSEKDYVDSVKGRFTISRDNAKKSLYLQMNSLRAEDTAVYYCASGVYSFDYRGQGTLVTVSSGTGGGGSGGGGSGGGGSEFELQSVLTQPPSASGTPGQRVTISCSGSSSNIGSNYVNWYQQLPGTAPKLLIYGDYQRPSGVPDRFSGSKSGTSASLAISGLRSEDEADYYCATRDDSLSGSVVFGTGTKLTVLGLEDLKNVFPPEVAVFEPSEAEISHTQKATLVCLATGFYPDHVELSWWVNGKEVHSGVCTDPQPLKEQPALNDSRYCLSSRLRVSATFWQNPRNHFRCQVQFYGLSENDEWTQDRAKPVTQIVSAEAWGRADCDVKLVEKSFETDTNLNFQNLSVIGFRILLLKVAGFNLLMTLRLWSSRAKRSGSGATNFSLLKQAGDVEENPGPTSMDWIWRILFLVGAATGAHSGPQLQLQESGPGLVKPSETLSLTCTVSGDSISSGDYYWGWIRQPPGKGLEWIGHIYYSGVTYYNPSLKSRVTISVDTSRNQFSLKLSSVTAADTAVYYCTREDSSNWRSRGQGTLVTVSSGSGGGGSGGGGSGGGGSFEEVQLVQSGAEVKKPGESLKISCKGSGYGFTSYWIGWVRQMPGKGLEWMGIIHPDDSDTKYSPSFQGQVTISADKSISTAYLQWSSLKASDTAMYYCASSYLRGLWGGYFDFWGQGTLVTVSSTRIQNPDPAVYQLRDSKSSDKSVCLFTDFDSQTNVSQSKDSDVYITDKCVLDMRSMDFKSNSAVAWSNKSDFACANAFNNSIIPEDTFFPSPESSCGFTSESYQQGVLSATILYEILLGKATLYAVLVSALVLMAMVKRKDSRG

SEQ ID NO: 44406 - protein, 905 aa, synthetic construct
MALPVTALLLPLALLLHAARPEVQLVESGGGLVQPGGSLRLSCAASGFSFSDFWMSWVRQAPGKGLEWVATISQAGSEKDYVDSVKGRFTISRDNAKKSLYLQMNSLRAEDTAVYYCASGVYSFDYRGQGTLVTVSSGTGGGGSGGGGSGGGGSEFELQSVLTQPPSASGTPGQRVTISCSGSSSNIGSNYVNWYQQLPGTAPKLLIYGDYQRPSGVPDRFSGSKSGTSASLAISGLRSEDEADYYCATRDDSLSGSVVFGTGTKLTVLGLEIQNPDPAVYQLRDSKSSDKSVCLFTDFDSQTNVSQSKDSDVYITDKCVLDMRSMDFKSNSAVAWSNKSDFACANAFNNSIIPEDTFFPSPESSCGFTSESYQQGVLSATILYEILLGKATLYAVLVSALVLMAMVKRKDSRGRAKRSGSGVKQTLNFDLLKLAGDVESNPGPTSMDWIWRILFLVGAATGAHSGPQLQLQESGPGLVKPSETLSLTCTVSGDSISSGDYYWGWIRQPPGKGLEWIGHIYYSGVTYYNPSLKSRVTISVDTSRNQFSLKLSSVTAADTAVYYCTREDSSNWRSRGQGTLVTVSSGSGGGGSGGGGSGGGGSFEEVQLVQSGAEVKKPGESLKISCKGSGYGFTSYWIGWVRQMPGKGLEWMGIIHPDDSDTKYSPSFQGQVTISADKSISTAYLQWSSLKASDTAMYYCASSYLRGLWGGYFDFWGQGTLVTVSSTREDLKNVFPPEVAVFEPSEAEISHTQKATLVCLATGFYPDHVELSWWVNGKEVHSGVCTDPQPLKEQPALNDSRYCLSSRLRVSATFWQNPRNHFRCQVQFYGLSENDEWTQDRAKPVTQIVSAEAWGRADCDVKLVEKSFETDTNLNFQNLSVIGFRILLLKVAGFNLLMTLRLWSS

SEQ ID NO: 44407 - protein, 699 aa, synthetic construct
MALPVTALLLPLALLLHAARPELQSVLTQPPSASGTPGQRVTISCSGSSSNIGSNYVNWYQQLPGTAPKLLIYGDYQRPSGVPDRFSGSKSGTSASLAISGLRSEDEADYYCATRDDSLSGSVVFGTGTKLTVLGLEDLKNVFPPEVAVFEPSEAEISHTQKATLVCLATGFYPDHVELSWWVNGKEVHSGVCTDPQPLKEQPALNDSRYCLSSRLRVSATFWQNPRNHFRCQVQFYGLSENDEWTQDRAKPVTQIVSAEAWGRADCDVKLVEKSFETDTNLNFQNLSVIGFRILLLKVAGFNLLMTLRLWSSRAKRSGSGATNFSLLKQAGDVEENPGPTSMDWIWRILFLVGAATGAHSGPMDPDLEIRAAFLRQRNTALRTEVAELEQEVQRLENEVSQYETRYGPLGGGKGSGGGGSGGGGSGGGGSFEEVQLVQSGAEVKKPGESLKISCKGSGYGFTSYWIGWVRQMPGKGLEWMGIIHPDDSDTKYSPSFQGQVTISADKSISTAYLQWSSLKASDTAMYYCASSYLRGLWGGYFDFWGQGTLVTVSSTRIQNPDPAVYQLRDSKSSDKSVCLFTDFDSQTNVSQSKDSDVYITDKCVLDMRSMDFKSNSAVAWSNKSDFACANAFNNSIIPEDTFFPSPESSCGFTSESYQQGVLSATILYEILLGKATLYAVLVSALVLMAMVKRKDSRG

SEQ ID NO: 44408 - protein, 703 aa, synthetic construct
MALPVTALLLPLALLLHAARPELQSVLTQPPSASGTPGQRVTISCSGSSSNIGSNYVNWYQQLPGTAPKLLIYGDYQRPSGVPDRFSGSKSGTSASLAISGLRSEDEADYYCATRDDSLSGSVVFGTGTKLTVLGLEIQNPDPAVYQLRDSKSSDKSVCLFTDFDSQTNVSQSKDSDVYITDKCVLDMRSMDFKSNSAVAWSNKSDFACANAFNNSIIPEDTFFPSPESSCGFTSESYQQGVLSATILYEILLGKATLYAVLVSALVLMAMVKRKDSRGRAKRSGSGVKQTLNFDLLKLAGDVESNPGPTSMDWIWRILFLVGAATGAHSGPMDPDLEIRAAFLRQRNTALRTEVAELEQEVQRLENEVSQYETRYGPLGGGKGSGGGGSGGGGSGGGGSFEEVQLVQSGAEVKKPGESLKISCKGSGYGFTSYWIGWVRQMPGKGLEWMGIIHPDDSDTKYSPSFQGQVTISADKSISTAYLQWSSLKASDTAMYYCASSYLRGLWGGYFDFWGQGTLVTVSSTREDLKNVFPPEVAVFEPSEAEISHTQKATLVCLATGFYPDHVELSWWVNGKEVHSGVCTDPQPLKEQPALNDSRYCLSSRLRVSATFWQNPRNHFRCQVQFYGLSENDEWTQDRAKPVTQIVSAEAWGRADCDVKLVEKSFETDTNLNFQNLSVIGFRILLLKVAGFNLLMTLRLWSS

SEQ ID NO: 44409 - protein, 676 aa, synthetic construct
MALPVTALLLPLALLLHAARPELQSVLTQPPSASGTPGQRVTISCSGSSSNIGSNYVNWYQQLPGTAPKLLIYGDYQRPSGVPDRFSGSKSGTSASLAISGLRSEDEADYYCATRDDSLSGSVVFGTGTKLTVLGLEDLKNVFPPEVAVFEPSEAEISHTQKATLVCLATGFYPDHVELSWWVNGKEVHSGVCTDPQPLKEQPALNDSRYCLSSRLRVSATFWQNPRNHFRCQVQFYGLSENDEWTQDRAKPVTQIVSAEAWGRADCDVKLVEKSFETDTNLNFQNLSVIGFRILLLKVAGFNLLMTLRLWSSRAKRSGSGATNFSLLKQAGDVEENPGPTSMDWIWRILFLVGAATGAHSGPEVAALEKEVAALEKEVAALEKEVAALEKGSGGGGSGGGGSGGGGSFEEVQLVQSGAEVKKPGESLKISCKGSGYGFTSYWIGWVRQMPGKGLEWMGIIHPDDSDTKYSPSFQGQVTISADKSISTAYLQWSSLKASDTAMYYCASSYLRGLWGGYFDFWGQGTLVTVSSTRIQNPDPAVYQLRDSKSSDKSVCLFTDFDSQTNVSQSKDSDVYITDKCVLDMRSMDFKSNSAVAWSNKSDFACANAFNNSIIPEDTFFPSPESSCGFTSESYQQGVLSATILYEILLGKATLYAVLVSALVLMAMVKRKDSRG

SEQ ID NO: 44410 - protein, 680 aa, synthetic construct
MALPVTALLLPLALLLHAARPELQSVLTQPPSASGTPGQRVTISCSGSSSNIGSNYVNWYQQLPGTAPKLLIYGDYQRPSGVPDRFSGSKSGTSASLAISGLRSEDEADYYCATRDDSLSGSVVFGTGTKLTVLGLEIQNPDPAVYQLRDSKSSDKSVCLFTDFDSQTNVSQSKDSDVYITDKCVLDMRSMDFKSNSAVAWSNKSDFACANAFNNSIIPEDTFFPSPESSCGFTSESYQQGVLSATILYEILLGKATLYAVLVSALVLMAMVKRKDSRGRAKRSGSGVKQTLNFDLLKLAGDVESNPGPTSMDWIWRILFLVGAATGAHSGPEVAALEKEVAALEKEVAALEKEVAALEKGSGGGGSGGGGSGGGGSFEEVQLVQSGAEVKKPGESLKISCKGSGYGFTSYWIGWVRQMPGKGLEWMGIIHPDDSDTKYSPSFQGQVTISADKSISTAYLQWSSLKASDTAMYYCASSYLRGLWGGYFDFWGQGTLVTVSSTREDLKNVFPPEVAVFEPSEAEISHTQKATLVCLATGFYPDHVELSWWVNGKEVHSGVCTDPQPLKEQPALNDSRYCLSSRLRVSATFWQNPRNHFRCQVQFYGLSENDEWTQDRAKPVTQIVSAEAWGRADCDVKLVEKSFETDTNLNFQNLSVIGFRILLLKVAGFNLLMTLRLWSS

SEQ ID NO: 44411 - protein, 766 aa, synthetic construct
MALPVTALLLPLALLLHAARPELQSVLTQPPSASGTPGQRVTISCSGSSSNIGSNYVNWYQQLPGTAPKLLIYGDYQRPSGVPDRFSGSKSGTSASLAISGLRSEDEADYYCATRDDSLSGSVVFGTGTKLTVLGLEDLKNVFPPEVAVFEPSEAEISHTQKATLVCLATGFYPDHVELSWWVNGKEVHSGVCTDPQPLKEQPALNDSRYCLSSRLRVSATFWQNPRNHFRCQVQFYGLSENDEWTQDRAKPVTQIVSAEAWGRADCDVKLVEKSFETDTNLNFQNLSVIGFRILLLKVAGFNLLMTLRLWSSRAKRSGSGATNFSLLKQAGDVEENPGPTSMDWIWRILFLVGAATGAHSGPQVQLQESGGGLAQAGGSLRLSCAASGRTFSMGWFRQAPGKEREFVAAITYSGGSPYYASSVRGRFTISRDNAKNTVYLQMNSLKPEDTAVYYCAANPTYGSDWNAENWGQGTQVTVSSGSGGGGSGGGGSGGGGSFEEVQLVQSGAEVKKPGESLKISCKGSGYGFTSYWIGWVRQMPGKGLEWMGIIHPDDSDTKYSPSFQGQVTISADKSISTAYLQWSSLKASDTAMYYCASSYLRGLWGGYFDFWGQGTLVTVSSTRIQNPDPAVYQLRDSKSSDKSVCLFTDFDSQTNVSQSKDSDVYITDKCVLDMRSMDFKSNSAVAWSNKSDFACANAFNNSIIPEDTFFPSPESSCGFTSESYQQGVLSATILYEILLGKATLYAVLVSALVLMAMVKRKDSRG

SEQ ID NO: 44412 - protein, 770 aa, synthetic construct
MALPVTALLLPLALLLHAARPELQSVLTQPPSASGTPGQRVTISCSGSSSNIGSNYVNWYQQLPGTAPKLLIYGDYQRPSGVPDRFSGSKSGTSASLAISGLRSEDEADYYCATRDDSLSGSVVFGTGTKLTVLGLEIQNPDPAVYQLRDSKSSDKSVCLFTDFDSQTNVSQSKDSDVYITDKCVLDMRSMDFKSNSAVAWSNKSDFACANAFNNSIIPEDTFFPSPESSCGFTSESYQQGVLSATILYEILLGKATLYAVLVSALVLMAMVKRKDSRGRAKRSGSGVKQTLNFDLLKLAGDVESNPGPTSMDWIWRILFLVGAATGAHSGPQVQLQESGGGLAQAGGSLRLSCAASGRTFSMGWFRQAPGKEREFVAAITYSGGSPYYASSVRGRFTISRDNAKNTVYLQMNSLKPEDTAVYYCAANPTYGSDWNAENWGQGTQVTVSSGSGGGGSGGGGSGGGGSFEEVQLVQSGAEVKKPGESLKISCKGSGYGFTSYWIGWVRQMPGKGLEWMGIIHPDDSDTKYSPSFQGQVTISADKSISTAYLQWSSLKASDTAMYYCASSYLRGLWGGYFDFWGQGTLVTVSSTREDLKNVFPPEVAVFEPSEAEISHTQKATLVCLATGFYPDHVELSWWVNGKEVHSGVCTDPQPLKEQPALNDSRYCLSSRLRVSATFWQNPRNHFRCQVQFYGLSENDEWTQDRAKPVTQIVSAEAWGRADCDVKLVEKSFETDTNLNFQNLSVIGFRILLLKVAGFNLLMTLRLWSS

SEQ ID NO: 44413 - protein, 772 aa, synthetic construct
MALPVTALLLPLALLLHAARPEVQLVESGGSLVQPGGSLRLSCAASGFTFDDYAMSWVRQVPGKGLEWVSSINWSGTHTDYADSVKGRFTISRNNANNTLYLQMNSLKSEDTAVYYCAKNWRDAGTTWFEKSGSAGQGTQVTVSSGTGGGGSGGGGSGGGGSEFELQSVLTQPPSASGTPGQRVTISCSGSSSNIGSNYVNWYQQLPGTAPKLLIYGDYQRPSGVPDRFSGSKSGTSASLAISGLRSEDEADYYCATRDDSLSGSVVFGTGTKLTVLGLEDLKNVFPPEVAVFEPSEAEISHTQKATLVCLATGFYPDHVELSWWVNGKEVHSGVCTDPQPLKEQPALNDSRYCLSSRLRVSATFWQNPRNHFRCQVQFYGLSENDEWTQDRAKPVTQIVSAEAWGRADCDVKLVEKSFETDTNLNFQNLSVIGFRILLLKVAGFNLLMTLRLWSSRAKRSGSGATNFSLLKQAGDVEENPGPTSMDWIWRILFLVGAATGAHSFEEVQLVQSGAEVKKPGESLKISCKGSGYGFTSYWIGWVRQMPGKGLEWMGIIHPDDSDTKYSPSFQGQVTISADKSISTAYLQWSSLKASDTAMYYCASSYLRGLWGGYFDFWGQGTLVTVSSTRIQNPDPAVYQLRDSKSSDKSVCLFTDFDSQTNVSQSKDSDVYITDKCVLDMRSMDFKSNSAVAWSNKSDFACANAFNNSIIPEDTFFPSPESSCGFTSESYQQGVLSATILYEILLGKATLYAVLVSALVLMAMVKRKDSRG

SEQ ID NO: 44414 - protein, 776 aa, synthetic construct
MALPVTALLLPLALLLHAARPEVQLVESGGSLVQPGGSLRLSCAASGFTFDDYAMSWVRQVPGKGLEWVSSINWSGTHTDYADSVKGRFTISRNNANNTLYLQMNSLKSEDTAVYYCAKNWRDAGTTWFEKSGSAGQGTQVTVSSGTGGGGSGGGGSGGGGSEFELQSVLTQPPSASGTPGQRVTISCSGSSSNIGSNYVNWYQQLPGTAPKLLIYGDYQRPSGVPDRFSGSKSGTSASLAISGLRSEDEADYYCATRDDSLSGSVVFGTGTKLTVLGLEIQNPDPAVYQLRDSKSSDKSVCLFTDFDSQTNVSQSKDSDVYITDKCVLDMRSMDFKSNSAVAWSNKSDFACANAFNNSIIPEDTFFPSPESSCGFTSESYQQGVLSATILYEILLGKATLYAVLVSALVLMAMVKRKDSRGRAKRSGSGVKQTLNFDLLKLAGDVESNPGPTSMDWIWRILFLVGAATGAHSFEEVQLVQSGAEVKKPGESLKISCKGSGYGFTSYWIGWVRQMPGKGLEWMGIIHPDDSDTKYSPSFQGQVTISADKSISTAYLQWSSLKASDTAMYYCASSYLRGLWGGYFDFWGQGTLVTVSSTREDLKNVFPPEVAVFEPSEAEISHTQKATLVCLATGFYPDHVELSWWVNGKEVHSGVCTDPQPLKEQPALNDSRYCLSSRLRVSATFWQNPRNHFRCQVQFYGLSENDEWTQDRAKPVTQIVSAEAWGRADCDVKLVEKSFETDTNLNFQNLSVIGFRILLLKVAGFNLLMTLRLWSS

SEQ ID NO: 44415 - protein, 770 aa, synthetic construct
MALPVTALLLPLALLLHAARPEVQLLESGGGLVQPGGSLRLSCAASGFIFSSYAMSWVRQAPGKGQEWVSGVSGTGVNTYYADSVKGRFTISRDNSKNTLYLQMNSLRAEDTAVYYCASGKGWDSGSWYEDYRGQGTLVTVSSGTGGGGSGGGGSGGGGSEFELQSVLTQPPSASGTPGQRVTISCSGSSSNIGSNYVNWYQQLPGTAPKLLIYGDYQRPSGVPDRFSGSKSGTSASLAISGLRSEDEADYYCATRDDSLSGSVVFGTGTKLTVLGLEDLKNVFPPEVAVFEPSEAEISHTQKATLVCLATGFYPDHVELSWWVNGKEVHSGVCTDPQPLKEQPALNDSRYCLSSRLRVSATFWQNPRNHFRCQVQFYGLSENDEWTQDRAKPVTQIVSAEAWGRADCDVKLVEKSFETDTNLNFQNLSVIGFRILLLKVAGFNLLMTLRLWSSRAKRSGSGATNFSLLKQAGDVEENPGPTSMDWIWRILFLVGAATGAHSFEEVQLVQSGAEVKKPGESLKISCKGSGYGFTSYWIGWVRQMPGKGLEWMGIIHPDDSDTKYSPSFQGQVTISADKSISTAYLQWSSLKASDTAMYYCASSYLRGLWGGYFDFWGQGTLVTVSSTRIQNPDPAVYQLRDSKSSDKSVCLFTDFDSQTNVSQSKDSDVYITDKCVLDMRSMDFKSNSAVAWSNKSDFACANAFNNSIIPEDTFFPSPESSCGFTSESYQQGVLSATILYEILLGKATLYAVLVSALVLMAMVKRKDSRG

SEQ ID NO: 44416 - protein, 774 aa, synthetic construct
MALPVTALLLPLALLLHAARPEVQLLESGGGLVQPGGSLRLSCAASGFIFSSYAMSWVRQAPGKGQEWVSGVSGTGVNTYYADSVKGRFTISRDNSKNTLYLQMNSLRAEDTAVYYCASGKGWDSGSWYEDYRGQGTLVTVSSGTGGGGSGGGGSGGGGSEFELQSVLTQPPSASGTPGQRVTISCSGSSSNIGSNYVNWYQQLPGTAPKLLIYGDYQRPSGVPDRFSGSKSGTSASLAISGLRSEDEADYYCATRDDSLSGSVVFGTGTKLTVLGLEIQNPDPAVYQLRDSKSSDKSVCLFTDFDSQTNVSQSKDSDVYITDKCVLDMRSMDFKSNSAVAWSNKSDFACANAFNNSIIPEDTFFPSPESSCGFTSESYQQGVLSATILYEILLGKATLYAVLVSALVLMAMVKRKDSRGRAKRSGSGVKQTLNFDLLKLAGDVESNPGPTSMDWIWRILFLVGAATGAHSFEEVQLVQSGAEVKKPGESLKISCKGSGYGFTSYWIGWVRQMPGKGLEWMGIIHPDDSDTKYSPSFQGQVTISADKSISTAYLQWSSLKASDTAMYYCASSYLRGLWGGYFDFWGQGTLVTVSSTREDLKNVFPPEVAVFEPSEAEISHTQKATLVCLATGFYPDHVELSWWVNGKEVHSGVCTDPQPLKEQPALNDSRYCLSSRLRVSATFWQNPRNHFRCQVQFYGLSENDEWTQDRAKPVTQIVSAEAWGRADCDVKLVEKSFETDTNLNFQNLSVIGFRILLLKVAGFNLLMTLRLWSS

SEQ ID NO: 44417 - protein, 738 aa, synthetic construct
MALPVTALLLPLALLLHAARPMLPAPKNLVVSRITEDSARLSWTAPDAAFDSFPIRYIETLIWGEAIWLDVPGSERSYDLTGLKPGTEYAVVITGVKGGRFSSPLVASFTTGTGGGGSGGGGSGGGGSEFELQSVLTQPPSASGTPGQRVTISCSGSSSNIGSNYVNWYQQLPGTAPKLLIYGDYQRPSGVPDRFSGSKSGTSASLAISGLRSEDEADYYCATRDDSLSGSVVFGTGTKLTVLGLEDLKNVFPPEVAVFEPSEAEISHTQKATLVCLATGFYPDHVELSWWVNGKEVHSGVCTDPQPLKEQPALNDSRYCLSSRLRVSATFWQNPRNHFRCQVQFYGLSENDEWTQDRAKPVTQIVSAEAWGRADCDVKLVEKSFETDTNLNFQNLSVIGFRILLLKVAGFNLLMTLRLWSSRAKRSGSGATNFSLLKQAGDVEENPGPTSMDWIWRILFLVGAATGAHSFEEVQLVQSGAEVKKPGESLKISCKGSGYGFTSYWIGWVRQMPGKGLEWMGIIHPDDSDTKYSPSFQGQVTISADKSISTAYLQWSSLKASDTAMYYCASSYLRGLWGGYFDFWGQGTLVTVSSTRIQNPDPAVYQLRDSKSSDKSVCLFTDFDSQTNVSQSKDSDVYITDKCVLDMRSMDFKSNSAVAWSNKSDFACANAFNNSIIPEDTFFPSPESSCGFTSESYQQGVLSATILYEILLGKATLYAVLVSALVLMAMVKRKDSRG

SEQ ID NO: 44418 - protein, 742 aa, synthetic construct
MALPVTALLLPLALLLHAARPMLPAPKNLVVSRITEDSARLSWTAPDAAFDSFPIRYIETLIWGEAIWLDVPGSERSYDLTGLKPGTEYAVVITGVKGGRFSSPLVASFTTGTGGGGSGGGGSGGGGSEFELQSVLTQPPSASGTPGQRVTISCSGSSSNIGSNYVNWYQQLPGTAPKLLIYGDYQRPSGVPDRFSGSKSGTSASLAISGLRSEDEADYYCATRDDSLSGSVVFGTGTKLTVLGLEIQNPDPAVYQLRDSKSSDKSVCLFTDFDSQTNVSQSKDSDVYITDKCVLDMRSMDFKSNSAVAWSNKSDFACANAFNNSIIPEDTFFPSPESSCGFTSESYQQGVLSATILYEILLGKATLYAVLVSALVLMAMVKRKDSRGRAKRSGSGVKQTLNFDLLKLAGDVESNPGPTSMDWIWRILFLVGAATGAHSFEEVQLVQSGAEVKKPGESLKISCKGSGYGFTSYWIGWVRQMPGKGLEWMGIIHPDDSDTKYSPSFQGQVTISADKSISTAYLQWSSLKASDTAMYYCASSYLRGLWGGYFDFWGQGTLVTVSSTREDLKNVFPPEVAVFEPSEAEISHTQKATLVCLATGFYPDHVELSWWVNGKEVHSGVCTDPQPLKEQPALNDSRYCLSSRLRVSATFWQNPRNHFRCQVQFYGLSENDEWTQDRAKPVTQIVSAEAWGRADCDVKLVEKSFETDTNLNFQNLSVIGFRILLLKVAGFNLLMTLRLWSS

SEQ ID NO: 44419 - protein, 767 aa, synthetic construct
MALPVTALLLPLALLLHAARPEVQLVESGGGLVQPGGSLRLSCAASGFNIKDTCIGWVRRAPGKEEELVAKICKYSGHTRYADSVKGRFTISADTSKNTAYLQMNSLRAEDTAVYYCAAVSVRDGHYNYWGQGTTVTVSSGTGGGGSGGGGSGGGGSEFELQSVLTQPPSASGTPGQRVTISCSGSSSNIGSNYVNWYQQLPGTAPKLLIYGDYQRPSGVPDRFSGSKSGTSASLAISGLRSEDEADYYCATRDDSLSGSVVFGTGTKLTVLGLEDLKNVFPPEVAVFEPSEAEISHTQKATLVCLATGFYPDHVELSWWVNGKEVHSGVCTDPQPLKEQPALNDSRYCLSSRLRVSATFWQNPRNHFRCQVQFYGLSENDEWTQDRAKPVTQIVSAEAWGRADCDVKLVEKSFETDTNLNFQNLSVIGFRILLLKVAGFNLLMTLRLWSSRAKRSGSGATNFSLLKQAGDVEENPGPTSMDWIWRILFLVGAATGAHSFEEVQLVQSGAEVKKPGESLKISCKGSGYGFTSYWIGWVRQMPGKGLEWMGIIHPDDSDTKYSPSFQGQVTISADKSISTAYLQWSSLKASDTAMYYCASSYLRGLWGGYFDFWGQGTLVTVSSTRIQNPDPAVYQLRDSKSSDKSVCLFTDFDSQTNVSQSKDSDVYITDKCVLDMRSMDFKSNSAVAWSNKSDFACANAFNNSIIPEDTFFPSPESSCGFTSESYQQGVLSATILYEILLGKATLYAVLVSALVLMAMVKRKDSRG

SEQ ID NO: 44420 - protein, 771 aa, synthetic construct
MALPVTALLLPLALLLHAARPEVQLVESGGGLVQPGGSLRLSCAASGFNIKDTCIGWVRRAPGKEEELVAKICKYSGHTRYADSVKGRFTISADTSKNTAYLQMNSLRAEDTAVYYCAAVSVRDGHYNYWGQGTTVTVSSGTGGGGSGGGGSGGGGSEFELQSVLTQPPSASGTPGQRVTISCSGSSSNIGSNYVNWYQQLPGTAPKLLIYGDYQRPSGVPDRFSGSKSGTSASLAISGLRSEDEADYYCATRDDSLSGSVVFGTGTKLTVLGLEIQNPDPAVYQLRDSKSSDKSVCLFTDFDSQTNVSQSKDSDVYITDKCVLDMRSMDFKSNSAVAWSNKSDFACANAFNNSIIPEDTFFPSPESSCGFTSESYQQGVLSATILYEILLGKATLYAVLVSALVLMAMVKRKDSRGRAKRSGSGVKQTLNFDLLKLAGDVESNPGPTSMDWIWRILFLVGAATGAHSFEEVQLVQSGAEVKKPGESLKISCKGSGYGFTSYWIGWVRQMPGKGLEWMGIIHPDDSDTKYSPSFQGQVTISADKSISTAYLQWSSLKASDTAMYYCASSYLRGLWGGYFDFWGQGTLVTVSSTREDLKNVFPPEVAVFEPSEAEISHTQKATLVCLATGFYPDHVELSWWVNGKEVHSGVCTDPQPLKEQPALNDSRYCLSSRLRVSATFWQNPRNHFRCQVQFYGLSENDEWTQDRAKPVTQIVSAEAWGRADCDVKLVEKSFETDTNLNFQNLSVIGFRILLLKVAGFNLLMTLRLWSS

SEQ ID NO: 44421 - protein, 1138 aa, synthetic construct
MALPVTALLLPLALLLHAARPEVQLVESGGGLVQAGGSLRLSCAASGRTFSMGWFRQAPGKEREFVAAITYSGGSPYYADSVKGRFTISRDNAKNTVYLQMNSLKPEDTAVYYCAANPTYGSDWNAENWGQGTQVTVSSGTGGGGSGGGGSGGGGSEFELQSVLTQPPSASGTPGQRVTISCSGSSSNIGSNYVNWYQQLPGTAPKLLIYGDYQRPSGVPDRFSGSKSGTSASLAISGLRSEDEADYYCATRDDSLSGSVVFGTGTKLTVLGLEDLKNVFPPEVAVFEPSEAEISHTQKATLVCLATGFYPDHVELSWWVNGKEVHSGVCTDPQPLKEQPALNDSRYCLSSRLRVSATFWQNPRNHFRCQVQFYGLSENDEWTQDRAKPVTQIVSAEAWGRADCDVKLVEKSFETDTNLNFQNLSVIGFRILLLKVAGFNLLMTLRLWSSRAKRSGSGATNFSLLKQAGDVEENPGPTSATMDWIWRILFLVGAATGAHSGPEVQLVESGGGLVQAGGSLRLSCAASGRTFTMGWFRQAPGKEREFVAAISLSPTLAYYADSVKGRFTISRDNAKNTVVLQMNSLKPEDTALYYCAADRKSVMSIRPDYWGQGTQVTVSSGSGGGGSGGGGSGGGGSFEEVQLVQSGAEVKKPGESLKISCKGSGYGFTSYWIGWVRQMPGKGLEWMGIIHPDDSDTKYSPSFQGQVTISADKSISTAYLQWSSLKASDTAMYYCASSYLRGLWGGYFDFWGQGTLVTVSSTRIQNPDPAVYQLRDSKSSDKSVCLFTDFDSQTNVSQSKDSDVYITDKCVLDMRSMDFKSNSAVAWSNKSDFACANAFNNSIIPEDTFFPSPESSCGFTSESYQQGVLSATILYEILLGKATLYAVLVSALVLMAMVKRKDSRGRAKRSGSGVKQTLNFDLLKLAGDVESNPGPSRGHMTEYKPTVRLATRDDVPRAVRTLAAAFADYPATRHTVDPDRHIERVTELQELFLTRVGLDIGKVWVADDGAAVAVWTTPESVEAGAVFAEIGPRMAELSGSRLAAQQQMEGLLAPHRPKEPAWFLATVGVSPDHQGKGLGSAVVLPGVEAAERAGVPAFLETSAPRNLPFYERLGFTVTADVEVPEGPRTWCMTRKPGA

SEQ ID NO: 44422 - protein, 776 aa, synthetic construct
MALPVTALLLPLALLLHAARPEVQLVESGGGLVQPGGSLRLSCAASGFASDYYIIGWFRQAPGKEREGVSCISSRYANTNYADSVKGRFTISRDNAKNTVYLQMNSLKPEDTAVYYCAADTRRYTCPDIATMHRNFDSWGQGTLVTVSSGTGGGGSGGGGSGGGGSEFELQSVLTQPPSASGTPGQRVTISCSGSSSNIGSNYVNWYQQLPGTAPKLLIYGDYQRPSGVPDRFSGSKSGTSASLAISGLRSEDEADYYCATRDDSLSGSVVFGTGTKLTVLGLEDLKNVFPPEVAVFEPSEAEISHTQKATLVCLATGFYPDHVELSWWVNGKEVHSGVCTDPQPLKEQPALNDSRYCLSSRLRVSATFWQNPRNHFRCQVQFYGLSENDEWTQDRAKPVTQIVSAEAWGRADCDVKLVEKSFETDTNLNFQNLSVIGFRILLLKVAGFNLLMTLRLWSSRAKRSGSGATNFSLLKQAGDVEENPGPTSMDWIWRILFLVGAATGAHSFEEVQLVQSGAEVKKPGESLKISCKGSGYGFTSYWIGWVRQMPGKGLEWMGIIHPDDSDTKYSPSFQGQVTISADKSISTAYLQWSSLKASDTAMYYCASSYLRGLWGGYFDFWGQGTLVTVSSTRIQNPDPAVYQLRDSKSSDKSVCLFTDFDSQTNVSQSKDSDVYITDKCVLDMRSMDFKSNSAVAWSNKSDFACANAFNNSIIPEDTFFPSPESSCGFTSESYQQGVLSATILYEILLGKATLYAVLVSALVLMAMVKRKDSRG

SEQ ID NO: 44423 - protein, 776 aa, synthetic construct
MALPVTALLLPLALLLHAARPEVQLVESGGGLVQPGGSLRLSCEASGFASDDYIIGWFRQAPGKEREGVSCISSKYANTVYTDSVKGRFRLSRGTAKNTVYLQMSALKPEDTAVYYCAMDSRRVTCPEISTMHRNFDSWGQGTLVTVSSGTGGGGSGGGGSGGGGSEFELQSVLTQPPSASGTPGQRVTISCSGSSSNIGSNYVNWYQQLPGTAPKLLIYGDYQRPSGVPDRFSGSKSGTSASLAISGLRSEDEADYYCATRDDSLSGSVVFGTGTKLTVLGLEDLKNVFPPEVAVFEPSEAEISHTQKATLVCLATGFYPDHVELSWWVNGKEVHSGVCTDPQPLKEQPALNDSRYCLSSRLRVSATFWQNPRNHFRCQVQFYGLSENDEWTQDRAKPVTQIVSAEAWGRADCDVKLVEKSFETDTNLNFQNLSVIGFRILLLKVAGFNLLMTLRLWSSRAKRSGSGATNFSLLKQAGDVEENPGPTSMDWIWRILFLVGAATGAHSFEEVQLVQSGAEVKKPGESLKISCKGSGYGFTSYWIGWVRQMPGKGLEWMGIIHPDDSDTKYSPSFQGQVTISADKSISTAYLQWSSLKASDTAMYYCASSYLRGLWGGYFDFWGQGTLVTVSSTRIQNPDPAVYQLRDSKSSDKSVCLFTDFDSQTNVSQSKDSDVYITDKCVLDMRSMDFKSNSAVAWSNKSDFACANAFNNSIIPEDTFFPSPESSCGFTSESYQQGVLSATILYEILLGKATLYAVLVSALVLMAMVKRKDSRG

SEQ ID NO: 44424 - protein, 776 aa, synthetic construct
MALPVTALLLPLALLLHAARPEVQLVESGGGLVQPGGSLRLSCAASGFASDYYIIGWFRQAPGKEREGVSCISSRYANTNYADSVKGRFTISRDNAKNTVYLQMNSLKPEDTAVYYCAADTRRYTCPDIATMHRNFDSWGQGTLVTVSSGTGGGGSGGGGSGGGGSEFELQSVLTQPPSASGTPGQRVTISCSGSSSNIGSNYVNWYQQLPGTAPKLLIYGDYQRPSGVPDRFSGSKSGTSASLAISGLRSEDEADYYCATRDDSLSGSVVFGTGTKLTVLGLEIQNPDPAVYQLRDSKSSDKSVCLFTDFDSQTNVSQSKDSDVYITDKCVLDMRSMDFKSNSAVAWSNKSDFACANAFNNSIIPEDTFFPSPESSCGFTSESYQQGVLSATILYEILLGKATLYAVLVSALVLMAMVKRKDSRGRAKRSGSGATNFSLLKQAGDVEENPGPTSMDWIWRILFLVGAATGAHSFEEVQLVQSGAEVKKPGESLKISCKGSGYGFTSYWIGWVRQMPGKGLEWMGIIHPDDSDTKYSPSFQGQVTISADKSISTAYLQWSSLKASDTAMYYCASSYLRGLWGGYFDFWGQGTLVTVSSTRDLKNVFPPEVAVFEPSEAEISHTQKATLVCLATGFYPDHVELSWWVNGKEVHSGVCTDPQPLKEQPALNDSRYCLSSRLRVSATFWQNPRNHFRCQVQFYGLSENDEWTQDRAKPVTQIVSAEAWGRADCDVKLVEKSFETDTNLNFQNLSVIGFRILLLKVAGFNLLMTLRLWSS

SEQ ID NO: 44425 - protein, 776 aa, synthetic construct
MALPVTALLLPLALLLHAARPEVQLVESGGGLVQPGGSLRLSCEASGFASDDYIIGWFRQAPGKEREGVSCISSKYANTVYTDSVKGRFRLSRGTAKNTVYLQMSALKPEDTAVYYCAMDSRRVTCPEISTMHRNFDSWGQGTLVTVSSGTGGGGSGGGGSGGGGSEFELQSVLTQPPSASGTPGQRVTISCSGSSSNIGSNYVNWYQQLPGTAPKLLIYGDYQRPSGVPDRFSGSKSGTSASLAISGLRSEDEADYYCATRDDSLSGSVVFGTGTKLTVLGLEIQNPDPAVYQLRDSKSSDKSVCLFTDFDSQTNVSQSKDSDVYITDKCVLDMRSMDFKSNSAVAWSNKSDFACANAFNNSIIPEDTFFPSPESSCGFTSESYQQGVLSATILYEILLGKATLYAVLVSALVLMAMVKRKDSRGRAKRSGSGATNFSLLKQAGDVEENPGPTSMDWIWRILFLVGAATGAHSFEEVQLVQSGAEVKKPGESLKISCKGSGYGFTSYWIGWVRQMPGKGLEWMGIIHPDDSDTKYSPSFQGQVTISADKSISTAYLQWSSLKASDTAMYYCASSYLRGLWGGYFDFWGQGTLVTVSSTRDLKNVFPPEVAVFEPSEAEISHTQKATLVCLATGFYPDHVELSWWVNGKEVHSGVCTDPQPLKEQPALNDSRYCLSSRLRVSATFWQNPRNHFRCQVQFYGLSENDEWTQDRAKPVTQIVSAEAWGRADCDVKLVEKSFETDTNLNFQNLSVIGFRILLLKVAGFNLLMTLRLWSS

SEQ ID NO: 44426 - protein, 767 aa, synthetic construct
MALPVTALLLPLALLLHAARPQVKLEESGGGLVQPGESLRLSCSASGSIFKVFRVFAMSWYRQGPGKQRELVASISSGETTTYAESVKGRFTISRDNAKNTAYLQMDSLKPEDTAVYYCNADHTFTGDFWGQGTQVTVSSGTGGGGSGGGGSGGGGSEFELQSVLTQPPSASGTPGQRVTISCSGSSSNIGSNYVNWYQQLPGTAPKLLIYGDYQRPSGVPDRFSGSKSGTSASLAISGLRSEDEADYYCATRDDSLSGSVVFGTGTKLTVLGLEIQNPDPAVYQLRDSKSSDKSVCLFTDFDSQTNVSQSKDSDVYITDKCVLDMRSMDFKSNSAVAWSNKSDFACANAFNNSIIPEDTFFPSPESSCGFTSESYQQGVLSATILYEILLGKATLYAVLVSALVLMAMVKRKDSRGRAKRSGSGATNFSLLKQAGDVEENPGPTSMDWIWRILFLVGAATGAHSFEEVQLVQSGAEVKKPGESLKISCKGSGYGFTSYWIGWVRQMPGKGLEWMGIIHPDDSDTKYSPSFQGQVTISADKSISTAYLQWSSLKASDTAMYYCASSYLRGLWGGYFDFWGQGTLVTVSSTRDLKNVFPPEVAVFEPSEAEISHTQKATLVCLATGFYPDHVELSWWVNGKEVHSGVCTDPQPLKEQPALNDSRYCLSSRLRVSATFWQNPRNHFRCQVQFYGLSENDEWTQDRAKPVTQIVSAEAWGRADCDVKLVEKSFETDTNLNFQNLSVIGFRILLLKVAGFNLLMTLRLWSS

SEQ ID NO: 44427 - protein, 768 aa, synthetic construct
MALPVTALLLPLALLLHAARPELQSVLTQPPSASGTPGQRVTISCSGSSSNIGSNYVNWYQQLPGTAPKLLIYGDYQRPSGVPDRFSGSKSGTSASLAISGLRSEDEADYYCATRDDSLSGSVVFGTGTKLTVLGLEDLKNVFPPEVAVFEPSEAEISHTQKATLVCLATGFYPDHVELSWWVNGKEVHSGVCTDPQPLKEQPALNDSRYCLSSRLRVSATFWQNPRNHFRCQVQFYGLSENDEWTQDRAKPVTQIVSAEAWGRADCDVKLVEKSFETDTNLNFQNLSVIGFRILLLKVAGFNLLMTLRLWSSRAKRSGSGATNFSLLKQAGDVEENPGPTSATMDWIWRILFLVGAATGAHSGPEVQLVESGGGLVQAGGSLRLSCAASGRTFSMGWFRQAPGKEREFVAAITYSGGSPYYADSVKGRFTISRDNAKNTVYLQMNSLKPEDTAVYYCAANPTYGSDWNAENWGQGTQVTVSSGSGGGGSGGGGSGGGGSFEEVQLVQSGAEVKKPGESLKISCKGSGYGFTSYWIGWVRQMPGKGLEWMGIIHPDDSDTKYSPSFQGQVTISADKSISTAYLQWSSLKASDTAMYYCASSYLRGLWGGYFDFWGQGTLVTVSSTRIQNPDPAVYQLRDSKSSDKSVCLFTDFDSQTNVSQSKDSDVYITDKCVLDMRSMDFKSNSAVAWSNKSDFACANAFNNSIIPEDTFFPSPESSCGFTSESYQQGVLSATILYEILLGKATLYAVLVSALVLMAMVKRKDSRG

SEQ ID NO: 44428 - protein, 769 aa, synthetic construct
MALPVTALLLPLALLLHAARPELQSVLTQPPSASGTPGQRVTISCSGSSSNIGSNYVNWYQQLPGTAPKLLIYGDYQRPSGVPDRFSGSKSGTSASLAISGLRSEDEADYYCATRDDSLSGSVVFGTGTKLTVLGLEDLKNVFPPEVAVFEPSEAEISHTQKATLVCLATGFYPDHVELSWWVNGKEVHSGVCTDPQPLKEQPALNDSRYCLSSRLRVSATFWQNPRNHFRCQVQFYGLSENDEWTQDRAKPVTQIVSAEAWGRADCDVKLVEKSFETDTNLNFQNLSVIGFRILLLKVAGFNLLMTLRLWSSRAKRSGSGATNFSLLKQAGDVEENPGPTSATMDWIWRILFLVGAATGAHSGPEVQLVESGGGLVQPGGSLRLSCAASGSIFGFNDMAWYRQAPGKQRELVALISRVGVTSSADSVKGRFTISRVNAKDTVYLQMNSLKPEDTAVYYCYMDQRLDGSTLAYWGQGTQVTVSSGSGGGGSGGGGSGGGGSFEEVQLVQSGAEVKKPGESLKISCKGSGYGFTSYWIGWVRQMPGKGLEWMGIIHPDDSDTKYSPSFQGQVTISADKSISTAYLQWSSLKASDTAMYYCASSYLRGLWGGYFDFWGQGTLVTVSSTRIQNPDPAVYQLRDSKSSDKSVCLFTDFDSQTNVSQSKDSDVYITDKCVLDMRSMDFKSNSAVAWSNKSDFACANAFNNSIIPEDTFFPSPESSCGFTSESYQQGVLSATILYEILLGKATLYAVLVSALVLMAMVKRKDSRG

SEQ ID NO: 44429 - protein, 765 aa, synthetic construct
MALPVTALLLPLALLLHAARPELQSVLTQPPSASGTPGQRVTISCSGSSSNIGSNYVNWYQQLPGTAPKLLIYGDYQRPSGVPDRFSGSKSGTSASLAISGLRSEDEADYYCATRDDSLSGSVVFGTGTKLTVLGLEDLKNVFPPEVAVFEPSEAEISHTQKATLVCLATGFYPDHVELSWWVNGKEVHSGVCTDPQPLKEQPALNDSRYCLSSRLRVSATFWQNPRNHFRCQVQFYGLSENDEWTQDRAKPVTQIVSAEAWGRADCDVKLVEKSFETDTNLNFQNLSVIGFRILLLKVAGFNLLMTLRLWSSRAKRSGSGATNFSLLKQAGDVEENPGPTSATMDWIWRILFLVGAATGAHSGPEVQLVESGGGLVQAGGSLRLSCAASGSVFSGNVMGWYRQAPGKEREWVAAIASGGSIYYRDSVKGRFTISRDNAKNTVYLQMNSLKPEDTAVYYCNSHPPTLPYWGLGTQVTVSSGSGGGGSGGGGSGGGGSFEEVQLVQSGAEVKKPGESLKISCKGSGYGFTSYWIGWVRQMPGKGLEWMGIIHPDDSDTKYSPSFQGQVTISADKSISTAYLQWSSLKASDTAMYYCASSYLRGLWGGYFDFWGQGTLVTVSSTRIQNPDPAVYQLRDSKSSDKSVCLFTDFDSQTNVSQSKDSDVYITDKCVLDMRSMDFKSNSAVAWSNKSDFACANAFNNSIIPEDTFFPSPESSCGFTSESYQQGVLSATILYEILLGKATLYAVLVSALVLMAMVKRKDSRG

SEQ ID NO: 44430 - protein, 763 aa, synthetic construct
MALPVTALLLPLALLLHAARPELQSVLTQPPSASGTPGQRVTISCSGSSSNIGSNYVNWYQQLPGTAPKLLIYGDYQRPSGVPDRFSGSKSGTSASLAISGLRSEDEADYYCATRDDSLSGSVVFGTGTKLTVLGLEDLKNVFPPEVAVFEPSEAEISHTQKATLVCLATGFYPDHVELSWWVNGKEVHSGVCTDPQPLKEQPALNDSRYCLSSRLRVSATFWQNPRNHFRCQVQFYGLSENDEWTQDRAKPVTQIVSAEAWGRADCDVKLVEKSFETDTNLNFQNLSVIGFRILLLKVAGFNLLMTLRLWSSRAKRSGSGATNFSLLKQAGDVEENPGPTSATMDWIWRILFLVGAATGAHSGPEVQLLESGGGLVQPGGSLRLSCAASGFSFSSYALSWVRQAPGKGLEWVSSIGENDGTTDYADAVKGRFTISRDNSKNTLYLQMNSLRVEDTAVYYCVKDGIHWGQGTLVTVSSGSGGGGSGGGGSGGGGSFEEVQLVQSGAEVKKPGESLKISCKGSGYGFTSYWIGWVRQMPGKGLEWMGIIHPDDSDTKYSPSFQGQVTISADKSISTAYLQWSSLKASDTAMYYCASSYLRGLWGGYFDFWGQGTLVTVSSTRIQNPDPAVYQLRDSKSSDKSVCLFTDFDSQTNVSQSKDSDVYITDKCVLDMRSMDFKSNSAVAWSNKSDFACANAFNNSIIPEDTFFPSPESSCGFTSESYQQGVLSATILYEILLGKATLYAVLVSALVLMAMVKRKDSRG

SEQ ID NO: 44431 - protein, 1132 aa, synthetic construct
MGPRLLFWALLCLLGTGPVEAGVTQSPTHLIKTRGQQATLRCSPISGHTSVYWYQQALGLGLQFLLWYDEGEERNRGNFPPRFSGRQFPNYSSELNVNALELEDSALYLCASSLGGPRGLAGLRGDEQFFGPGTRLTVLEGTGGGGSGGGEFELQSVLTQPPSASGTPGQRVTISCSGSSSNIGSNYVNWYQQLPGTAPKLLIYGDYQRPSGVPDRFSGSKSGTSASLAISGLRSEDEADYYCATRDDSLSGSVVFGTGTKLTVLGLEDLKNVFPPEVAVFEPSEAEISHTQKATLVCLATGFYPDHVELSWWVNGKEVHSGVCTDPQPLKEQPALNDSRYCLSSRLRVSATFWQNPRNHFRCQVQFYGLSENDEWTQDRAKPVTQIVSAEAWGRADCDVKLVEKSFETDTNLNFQNLSVIGFRILLLKVAGFNLLMTLRLWSSRAKRSGSGATNFSLLKQAGDVEENPGPTSATMDWIWRILFLVGAATGAHSGPEVQLVESGGGLVQAGGSLRLSCAASGRTFSMGWFRQAPGKEREFVAAITYSGGSPYYADSVKGRFTISRDNAKNTVYLQMNSLKPEDTAVYYCAANPTYGSDWNAENWGQGTQVTVSSGSGGGGSGGGGSGGGGSFEEVQLVQSGAEVKKPGESLKISCKGSGYGFTSYWIGWVRQMPGKGLEWMGIIHPDDSDTKYSPSFQGQVTISADKSISTAYLQWSSLKASDTAMYYCASSYLRGLWGGYFDFWGQGTLVTVSSTRIQNPDPAVYQLRDSKSSDKSVCLFTDFDSQTNVSQSKDSDVYITDKCVLDMRSMDFKSNSAVAWSNKSDFACANAFNNSIIPEDTFFPSPESSCGFTSESYQQGVLSATILYEILLGKATLYAVLVSALVLMAMVKRKDSRGRAKRSGSGVKQTLNFDLLKLAGDVESNPGPSRGHMTEYKPTVRLATRDDVPRAVRTLAAAFADYPATRHTVDPDRHIERVTELQELFLTRVGLDIGKVWVADDGAAVAVWTTPESVEAGAVFAEIGPRMAELSGSRLAAQQQMEGLLAPHRPKEPAWFLATVGVSPDHQGKGLGSAVVLPGVEAAERAGVPAFLETSAPRNLPFYERLGFTVTADVEVPEGPRTWCMTRKPGA

SEQ ID NO: 44432 - protein, 1131 aa, synthetic construct
MGPRLLFWALLCLLGTGPVEAGVTQSPTHLIKTRGQQATLRCSPISGHTSVYWYQQALGLGLQFLLWYDEGEERNRGNFPPRFSGRQFPNYSSELNVNALELEDSALYLCASSLGGDELGADGNEQFFGPGTRLTVLEGTGGGGSGGGSEFELQSVLTQPPSASGTPGQRVTISCSGSSSNIGSNYVNWYQQLPGTAPKLLIYGDYQRPSGVPDRFSGSKSGTSASLAISGLRSEDEADYYCATRDDSLSGSVVFGTGTKLTVLGLEDLKNVFPPEVAVFEPSEAEISHTQKATLVCLATGFYPDHVELSWWVNGKEVHSGVCTDPQPLKEQPALNDSRYCLSSRLRVSATFWQNPRNHFRCQVQFYGLSENDEWTQDRAKPVTQIVSAEAWGRADCDVKLVEKSFETDTNLNFQNLSVIGFRILLLKVAGFNLLMTLRLWSSRAKRSGSGATNFSLLKQAGDVEENPGPTSATMDWIWRILFLVGAATGAHSGPEVQLVESGGGLVQAGGSLRLSCAASGRTFSMGWFRQAPGKEREFVAAITYSGGSPYYADSVKGRFTISRDNAKNTVYLQMNSLKPEDTAVYYCAANPTYGSDWNAENWGQGTQVTVSSGSGGGGSGGGGSGGGGSFEEVQLVQSGAEVKKPGESLKISCKGSGYGFTSYWIGWVRQMPGKGLEWMGIIHPDDSDTKYSPSFQGQVTISADKSISTAYLQWSSLKASDTAMYYCASSYLRGLWGGYFDFWGQGTLVTVSSTRIQNPDPAVYQLRDSKSSDKSVCLFTDFDSQTNVSQSKDSDVYITDKCVLDMRSMDFKSNSAVAWSNKSDFACANAFNNSIIPEDTFFPSPESSCGFTSESYQQGVLSATILYEILLGKATLYAVLVSALVLMAMVKRKDSRGRAKRSGSGVKQTLNFDLLKLAGDVESNPGPSRGHMTEYKPTVRLATRDDVPRAVRTLAAAFADYPATRHTVDPDRHIERVTELQELFLTRVGLDIGKVWVADDGAAVAVWTTPESVEAGAVFAEIGPRMAELSGSRLAAQQQMEGLLAPHRPKEPAWFLATVGVSPDHQGKGLGSAVVLPGVEAAERAGVPAFLETSAPRNLPFYERLGFTVTADVEVPEGPRTWCMTRKPGA

SEQ ID NO: 44433 - protein, 956 aa, synthetic construct
MALPVTALLLPLALLLHAARPELQSVLTQPPSASGTPGQRVTISCSGSSSNIGSNYVNWYQQLPGTAPKLLIYGDYQRPSGVPDRFSGSKSGTSASLAISGLRSEDEADYYCATRDDSLSGSVVFGTGTKLTVLGLEDLKNVFPPEVAVFEPSEAEISHTQKATLVCLATGFYPDHVELSWWVNGKEVHSGVCTDPQPLKEQPALNDSRYCLSSRLRVSATFWQNPRNHFRCQVQFYGLSENDEWTQDRAKPVTQIVSAEAWGRADCDVKLVEKSFETDTNLNFQNLSVIGFRILLLKVAGFNLLMTLRLWSSRAKRSGSGATNFSLLKQAGDVEENPGPTSATMDWIWRILFLVGAATGAHSGPMGSWLEFYHRLNAIDSRLWALGGSEAELAAFEKEIAAFESELQAYKGKGNPEVESLRDHAAHIREWLQAYRHNGSGGGGSGGGGSGGGGSFEEVQLVQSGAEVKKPGESLKISCKGSGYGFTSYWIGWVRQMPGKGLEWMGIIHPDDSDTKYSPSFQGQVTISADKSISTAYLQWSSLKASDTAMYYCASSYLRGLWGGYFDFWGQGTLVTVSSTRIQNPDPAVYQLRDSKSSDKSVCLFTDFDSQTNVSQSKDSDVYITDKCVLDMRSMDFKSNSAVAWSNKSDFACANAFNNSIIPEDTFFPSPESSCGFTSESYQQGVLSATILYEILLGKATLYAVLVSALVLMAMVKRKDSRGRAKRSGSGVKQTLNFDLLKLAGDVESNPGPSRGHMTEYKPTVRLATRDDVPRAVRTLAAAFADYPATRHTVDPDRHIERVTELQELFLTRVGLDIGKVWVADDGAAVAVWTTPESVEAGAVFAEIGPRMAELSGSRLAAQQQMEGLLAPHRPKEPAWFLATVGVSPDHQGKGLGSAVVLPGVEAAERAGVPAFLETSAPRNLPFYERLGFTVTADVEVPEGPRTWCMTRKPGA

SEQ ID NO: 44434 - protein, 956 aa, synthetic construct
MALPVTALLLPLALLLHAARPACMGSWFEFYDRLNAIDARLWALGGSEAELAAFEKEIAAFESELQAYKGKGNPEVENLRVHAAAIREWLQAYRHNGTGGGGSGGGGSGGGGSEFELQSVLTQPPSASGTPGQRVTISCSGSSSNIGSNYVNWYQQLPGTAPKLLIYGDYQRPSGVPDRFSGSKSGTSASLAISGLRSEDEADYYCATRDDSLSGSVVFGTGTKLTVLGLEDLKNVFPPEVAVFEPSEAEISHTQKATLVCLATGFYPDHVELSWWVNGKEVHSGVCTDPQPLKEQPALNDSRYCLSSRLRVSATFWQNPRNHFRCQVQFYGLSENDEWTQDRAKPVTQIVSAEAWGRADCDVKLVEKSFETDTNLNFQNLSVIGFRILLLKVAGFNLLMTLRLWSSRAKRSGSGATNFSLLKQAGDVEENPGPTSMDWIWRILFLVGAATGAHSFEEVQLVQSGAEVKKPGESLKISCKGSGYGFTSYWIGWVRQMPGKGLEWMGIIHPDDSDTKYSPSFQGQVTISADKSISTAYLQWSSLKASDTAMYYCASSYLRGLWGGYFDFWGQGTLVTVSSTRIQNPDPAVYQLRDSKSSDKSVCLFTDFDSQTNVSQSKDSDVYITDKCVLDMRSMDFKSNSAVAWSNKSDFACANAFNNSIIPEDTFFPSPESSCGFTSESYQQGVLSATILYEILLGKATLYAVLVSALVLMAMVKRKDSRGRAKRSGSGVKQTLNFDLLKLAGDVESNPGPSRGHMTEYKPTVRLATRDDVPRAVRTLAAAFADYPATRHTVDPDRHIERVTELQELFLTRVGLDIGKVWVADDGAAVAVWTTPESVEAGAVFAEIGPRMAELSGSRLAAQQQMEGLLAPHRPKEPAWFLATVGVSPDHQGKGLGSAVVLPGVEAAERAGVPAFLETSAPRNLPFYERLGFTVTADVEVPEGPRTWCMTRKPGA

SEQ ID NO: 44435 - protein, 1073 aa, synthetic construct
MALPVTALLLPLALLLHAARPACMDPDLEIRAAFLRQRNTALRTEVAELEQEVQRLENEVSQYETRYGPLGGGKGTGGGGSGGGGSGGGGSEFELQSVLTQPPSASGTPGQRVTISCSGSSSNIGSNYVNWYQQLPGTAPKLLIYGDYQRPSGVPDRFSGSKSGTSASLAISGLRSEDEADYYCATRDDSLSGSVVFGTGTKLTVLGLEDLKNVFPPEVAVFEPSEAEISHTQKATLVCLATGFYPDHVELSWWVNGKEVHSGVCTDPQPLKEQPALNDSRYCLSSRLRVSATFWQNPRNHFRCQVQFYGLSENDEWTQDRAKPVTQIVSAEAWGRADCDVKLVEKSFETDTNLNFQNLSVIGFRILLLKVAGFNLLMTLRLWSSRAKRSGSGATNFSLLKQAGDVEENPGPTSATMDWIWRILFLVGAATGAHSGPEVQLVESGGGLVQAGGSLRLSCAASGRTFSMGWFRQAPGKEREFVAAITYSGGSPYYADSVKGRFTISRDNAKNTVYLQMNSLKPEDTAVYYCAANPTYGSDWNAENWGQGTQVTVSSGSGGGGSGGGGSGGGGSFEEVQLVQSGAEVKKPGESLKISCKGSGYGFTSYWIGWVRQMPGKGLEWMGIIHPDDSDTKYSPSFQGQVTISADKSISTAYLQWSSLKASDTAMYYCASSYLRGLWGGYFDFWGQGTLVTVSSTRIQNPDPAVYQLRDSKSSDKSVCLFTDFDSQTNVSQSKDSDVYITDKCVLDMRSMDFKSNSAVAWSNKSDFACANAFNNSIIPEDTFFPSPESSCGFTSESYQQGVLSATILYEILLGKATLYAVLVSALVLMAMVKRKDSRGRAKRSGSGVKQTLNFDLLKLAGDVESNPGPSRGHMTEYKPTVRLATRDDVPRAVRTLAAAFADYPATRHTVDPDRHIERVTELQELFLTRVGLDIGKVWVADDGAAVAVWTTPESVEAGAVFAEIGPRMAELSGSRLAAQQQMEGLLAPHRPKEPAWFLATVGVSPDHQGKGLGSAVVLPGVEAAERAGVPAFLETSAPRNLPFYERLGFTVTADVEVPEGPRTWCMTRKPGA

SEQ ID NO: 44436 - protein, 956 aa, synthetic construct
MALPVTALLLPLALLLHAARPELQSVLTQPPSASGTPGQRVTISCSGSSSNIGSNYVNWYQQLPGTAPKLLIYGDYQRPSGVPDRFSGSKSGTSASLAISGLRSEDEADYYCATRDDSLSGSVVFGTGTKLTVLGLEDLKNVFPPEVAVFEPSEAEISHTQKATLVCLATGFYPDHVELSWWVNGKEVHSGVCTDPQPLKEQPALNDSRYCLSSRLRVSATFWQNPRNHFRCQVQFYGLSENDEWTQDRAKPVTQIVSAEAWGRADCDVKLVEKSFETDTNLNFQNLSVIGFRILLLKVAGFNLLMTLRLWSSRAKRSGSGATNFSLLKQAGDVEENPGPTSATMDWIWRILFLVGAATGAHSGPMGSWSEFYDRLHAIHHRLYALGGSEAELAAFEKEIAAFESELQAYKGKGNPEVEALRDTAAFIRTRLQAYRHNGSGGGGSGGGGSGGGGSFEEVQLVQSGAEVKKPGESLKISCKGSGYGFTSYWIGWVRQMPGKGLEWMGIIHPDDSDTKYSPSFQGQVTISADKSISTAYLQWSSLKASDTAMYYCASSYLRGLWGGYFDFWGQGTLVTVSSTRIQNPDPAVYQLRDSKSSDKSVCLFTDFDSQTNVSQSKDSDVYITDKCVLDMRSMDFKSNSAVAWSNKSDFACANAFNNSIIPEDTFFPSPESSCGFTSESYQQGVLSATILYEILLGKATLYAVLVSALVLMAMVKRKDSRGRAKRSGSGVKQTLNFDLLKLAGDVESNPGPSRGHMTEYKPTVRLATRDDVPRAVRTLAAAFADYPATRHTVDPDRHIERVTELQELFLTRVGLDIGKVWVADDGAAVAVWTTPESVEAGAVFAEIGPRMAELSGSRLAAQQQMEGLLAPHRPKEPAWFLATVGVSPDHQGKGLGSAVVLPGVEAAERAGVPAFLETSAPRNLPFYERLGFTVTADVEVPEGPRTWCMTRKPGA

SEQ ID NO: 44437 - protein, 1166 aa, synthetic construct
MALPVTALLLPLALLLHAARPELQSVLTQPPSASGTPGQRVTISCSGSSSNIGSNYVNWYQQLPGTAPKLLIYGDYQRPSGVPDRFSGSKSGTSASLAISGLRSEDEADYYCATRDDSLSGSVVFGTGTKLTVLGLEDLKNVFPPEVAVFEPSEAEISHTQKATLVCLATGFYPDHVELSWWVNGKEVHSGVCTDPQPLKEQPALNDSRYCLSSRLRVSATFWQNPRNHFRCQVQFYGLSENDEWTQDRAKPVTQIVSAEAWGRADCDVKLVEKSFETDTNLNFQNLSVIGFRILLLKVAGFNLLMTLRLWSSRAKRSGSGATNFSLLKQAGDVEENPGPTSTMDWIWRILFLVGAATGAHSLFNQEVQIPLTESYCGPCPKNWICYKNNCYQFFDESKNWYESQASCMSQNASLLKVYSKEDQDLLKLVKSAHWMGLVHIPTNGSWQWEDGSILSPNLLTIIEMQKGDCALYASSFKGYIENCSTPNTYICMQRTVSGGGGSGGGGSGGGGDLFNQEVQIPLTESYCGPCPKNWICYKNNCYQFFDESKNWYESQASCMSQNASLLKVYSKEDQDLLKLVKSAHWMGLVHIPTNGSWQWEDGSILSPNLLTIIEMQKGDCALYASSFKGYIENCSTPNTYICMQRTVGSGGGGSGGGGSGGGGSFEEVQLVQSGAEVKKPGESLKISCKGSGYGFTSYWIGWVRQMPGKGLEWMGIIHPDDSDTKYSPSFQGQVTISADKSISTAYLQWSSLKASDTAMYYCASSYLRGLWGGYFDFWGQGTLVTVSSTRIQNPDPAVYQLRDSKSSDKSVCLFTDFDSQTNVSQSKDSDVYITDKCVLDMRSMDFKSNSAVAWSNKSDFACANAFNNSIIPEDTFFPSPESSCGFTSESYQQGVLSATILYEILLGKATLYAVLVSALVLMAMVKRKDSRGRAKRSGSGVKQTLNFDLLKLAGDVESNPGPSRGHMTEYKPTVRLATRDDVPRAVRTLAAAFADYPATRHTVDPDRHIERVTELQELFLTRVGLDIGKVWVADDGAAVAVWTTPESVEAGAVFAEIGPRMAELSGSRLAAQQQMEGLLAPHRPKEPAWFLATVGVSPDHQGKGLGSAVVLPGVEAAERAGVPAFLETSAPRNLPFYERLGFTVTADVEVPEGPRTWCMTRKPGA

SEQ ID NO: 44438 - protein, 629 aa, synthetic construct; identical to SEQ ID NO: 44395

SEQ ID NO: 44439 - protein, 633 aa, synthetic construct
MALPVTALLLPLALLLHAARPELQSVLTQPPSASGTPGQRVTISCSGSSSNIGSNYVNWYQQLPGTAPKLLIYGDYQRPSGVPDRFSGSKSGTSASLAISGLRSEDEADYYCATRDDSLSGSVVFGTGTKLTVLGLEIQNPDPAVYQLRDSKSSDKSVCLFTDFDSQTNVSQSKDSDVYITDKCVLDMRSMDFKSNSAVAWSNKSDFACANAFNNSIIPEDTFFPSPESSCDVKLVEKSFETDTNLNFQILYEILLGKATLYAVLVSALVLMAMVKRKDSRGRAKRSGSGVKQTLNFDLLKLAGDVESNPGPTSMDWIWRILFLVGAATGAHSFEEVQLVQSGAEVKKPGESLKISCKGSGYGFTSYWIGWVRQMPGKGLEWMGIIHPDDSDTKYSPSFQGQVTISADKSISTAYLQWSSLKASDTAMYYCASSYLRGLWGGYFDFWGQGTLVTVSSTREDLKNVFPPEVAVFEPSEAEISHTQKATLVCLATGFYPDHVELSWWVNGKEVHSGVCTDPQPLKEQPALNDSRYCLSSRLRVSATFWQNPRNHFRCQVQFYGLSENDEWTQDRAKPVTQIVSAEAWGRADCGFTSESYQQGVLSATNLSVIGFRILLLKVAGFNLLMTLRLWSS

SEQ ID NO: 44440 - protein, 764 aa, synthetic construct
MALPVTALLLPLALLLHAARPEVQLVESGGGLVQPGGSLRLSCAASGFSFSDFWMSWVRQAPGKGLEWVATISQAGSEKDYVDSVKGRFTISRDNAKKSLYLQMNSLRAEDTAVYYCASGVYSFDYRGQGTLVTVSSGTGGGGSGGGGSGGGGSEFELQSVLTQPPSASGTPGQRVTISCSGSSSNIGSNYVNWYQQLPGTAPKLLIYGDYQRPSGVPDRFSGSKSGTSASLAISGLRSEDEADYYCATRDDSLSGSVVFGTGTKLTVLGLEDLKNVFPPEVAVFEPSEAEISHTQKATLVCLATGFYPDHVELSWWVNGKEVHSGVCTDPQPLKEQPALNDSRYCLSSRLRVSATFWQNPRNHFRCQVQFYGLSENDEWTQDRAKPVTQIVSAEAWGRADCGFTSESYQQGVLSATNLSVIGFRILLLKVAGFNLLMTLRLWSSRAKRSGSGATNFSLLKQAGDVEENPGPTSMDWIWRILFLVGAATGAHSFEEVQLVQSGAEVKKPGESLKISCKGSGYGFTSYWIGWVRQMPGKGLEWMGIIHPDDSDTKYSPSFQGQVTISADKSISTAYLQWSSLKASDTAMYYCASSYLRGLWGGYFDFWGQGTLVTVSSTRIQNPDPAVYQLRDSKSSDKSVCLFTDFDSQTNVSQSKDSDVYITDKCVLDMRSMDFKSNSAVAWSNKSDFACANAFNNSIIPEDTFFPSPESSCDVKLVEKSFETDTNLNFQILYEILLGKATLYAVLVSALVLMAMVKRKDSRG

SEQ ID NO: 44441 - protein, 768 aa, synthetic construct
MALPVTALLLPLALLLHAARPEVQLVESGGGLVQPGGSLRLSCAASGFSFSDFWMSWVRQAPGKGLEWVATISQAGSEKDYVDSVKGRFTISRDNAKKSLYLQMNSLRAEDTAVYYCASGVYSFDYRGQGTLVTVSSGTGGGGSGGGGSGGGGSEFELQSVLTQPPSASGTPGQRVTISCSGSSSNIGSNYVNWYQQLPGTAPKLLIYGDYQRPSGVPDRFSGSKSGTSASLAISGLRSEDEADYYCATRDDSLSGSVVFGTGTKLTVLGLEIQNPDPAVYQLRDSKSSDKSVCLFTDFDSQTNVSQSKDSDVYITDKCVLDMRSMDFKSNSAVAWSNKSDFACANAFNNSIIPEDTFFPSPESSCDVKLVEKSFETDTNLNFQILYEILLGKATLYAVLVSALVLMAMVKRKDSRGRAKRSGSGVKQTLNFDLLKLAGDVESNPGPTSMDWIWRILFLVGAATGAHSFEEVQLVQSGAEVKKPGESLKISCKGSGYGFTSYWIGWVRQMPGKGLEWMGIIHPDDSDTKYSPSFQGQVTISADKSISTAYLQWSSLKASDTAMYYCASSYLRGLWGGYFDFWGQGTLVTVSSTREDLKNVFPPEVAVFEPSEAEISHTQKATLVCLATGFYPDHVELSWWVNGKEVHSGVCTDPQPLKEQPALNDSRYCLSSRLRVSATFWQNPRNHFRCQVQFYGLSENDEWTQDRAKPVTQIVSAEAWGRADCGFTSESYQQGVLSATNLSVIGFRILLLKVAGFNLLMTLRLWSS

SEQ ID NO: 44442 - protein, 901 aa, synthetic construct
MALPVTALLLPLALLLHAARPEVQLVESGGGLVQPGGSLRLSCAASGFSFSDFWMSWVRQAPGKGLEWVATISQAGSEKDYVDSVKGRFTISRDNAKKSLYLQMNSLRAEDTAVYYCASGVYSFDYRGQGTLVTVSSGTGGGGSGGGGSGGGGSEFELQSVLTQPPSASGTPGQRVTISCSGSSSNIGSNYVNWYQQLPGTAPKLLIYGDYQRPSGVPDRFSGSKSGTSASLAISGLRSEDEADYYCATRDDSLSGSVVFGTGTKLTVLGLEDLKNVFPPEVAVFEPSEAEISHTQKATLVCLATGFYPDHVELSWWVNGKEVHSGVCTDPQPLKEQPALNDSRYCLSSRLRVSATFWQNPRNHFRCQVQFYGLSENDEWTQDRAKPVTQIVSAEAWGRADCGFTSESYQQGVLSATNLSVIGFRILLLKVAGFNLLMTLRLWSSRAKRSGSGATNFSLLKQAGDVEENPGPTSMDWIWRILFLVGAATGAHSGPQLQLQESGPGLVKPSETLSLTCTVSGDSISSGDYYWGWIRQPPGKGLEWIGHIYYSGVTYYNPSLKSRVTISVDTSRNQFSLKLSSVTAADTAVYYCTREDSSNWRSRGQGTLVTVSSGSGGGGSGGGGSGGGGSFEEVQLVQSGAEVKKPGESLKISCKGSGYGFTSYWIGWVRQMPGKGLEWMGIIHPDDSDTKYSPSFQGQVTISADKSISTAYLQWSSLKASDTAMYYCASSYLRGLWGGYFDFWGQGTLVTVSSTRIQNPDPAVYQLRDSKSSDKSVCLFTDFDSQTNVSQSKDSDVYITDKCVLDMRSMDFKSNSAVAWSNKSDFACANAFNNSIIPEDTFFPSPESSCDVKLVEKSFETDTNLNFQILYEILLGKATLYAVLVSALVLMAMVKRKDSRG

SEQ ID NO: 44443 - protein, 905 aa, synthetic construct
MALPVTALLLPLALLLHAARPEVQLVESGGGLVQPGGSLRLSCAASGFSFSDFWMSWVRQAPGKGLEWVATISQAGSEKDYVDSVKGRFTISRDNAKKSLYLQMNSLRAEDTAVYYCASGVYSFDYRGQGTLVTVSSGTGGGGSGGGGSGGGGSEFELQSVLTQPPSASGTPGQRVTISCSGSSSNIGSNYVNWYQQLPGTAPKLLIYGDYQRPSGVPDRFSGSKSGTSASLAISGLRSEDEADYYCATRDDSLSGSVVFGTGTKLTVLGLEIQNPDPAVYQLRDSKSSDKSVCLFTDFDSQTNVSQSKDSDVYITDKCVLDMRSMDFKSNSAVAWSNKSDFACANAFNNSIIPEDTFFPSPESSCDVKLVEKSFETDTNLNFQILYEILLGKATLYAVLVSALVLMAMVKRKDSRGRAKRSGSGVKQTLNFDLLKLAGDVESNPGPTSMDWIWRILFLVGAATGAHSGPQLQLQESGPGLVKPSETLSLTCTVSGDSISSGDYYWGWIRQPPGKGLEWIGHIYYSGVTYYNPSLKSRVTISVDTSRNQFSLKLSSVTAADTAVYYCTREDSSNWRSRGQGTLVTVSSGSGGGGSGGGGSGGGGSFEEVQLVQSGAEVKKPGESLKISCKGSGYGFTSYWIGWVRQMPGKGLEWMGIIHPDDSDTKYSPSFQGQVTISADKSISTAYLQWSSLKASDTAMYYCASSYLRGLWGGYFDFWGQGTLVTVSSTREDLKNVFPPEVAVFEPSEAEISHTQKATLVCLATGFYPDHVELSWWVNGKEVHSGVCTDPQPLKEQPALNDSRYCLSSRLRVSATFWQNPRNHFRCQVQFYGLSENDEWTQDRAKPVTQIVSAEAWGRADCGFTSESYQQGVLSATNLSVIGFRILLLKVAGFNLLMTLRLWSS

SEQ ID NO: 44444 - protein, 733 aa, synthetic construct
MALPVTALLLPLALLLHAARPELQSVLTQPPSASGTPGQRVTISCSGSSSNIGSNYVNWYQQLPGTAPKLLIYGDYQRPSGVPDRFSGSKSGTSASLAISGLRSEDEADYYCATRDDSLSGSVVFGTGTKLTVLGLEDLKNVFPPEVAVFEPSEAEISHTQKATLVCLATGFYPDHVELSWWVNGKEVHSGVCTDPQPLKEQPALNDSRYCLSSRLRVSATFWQNPRNHFRCQVQFYGLSENDEWTQDRAKPVTQIVSAEAWGRADDVIKIHWQEKKSNTILGSQEGNTMKTNDTYMKFSWLTVPEKSLDKEHRCIVRHENNKNGVDQEIIFPPIKTDVITMDPKDNCSKDANDTLLLQLTNTSAYYMYLLLLLKSVVYFAIITCCLLMAMVKRKDSRGRAKRSGSGATNFSLLKQAGDVEENPGPTSMDWIWRILFLVGAATGAHSFEEVQLVQSGAEVKKPGESLKISCKGSGYGFTSYWIGWVRQMPGKGLEWMGIIHPDDSDTKYSPSFQGQVTISADKSISTAYLQWSSLKASDTAMYYCASSYLRGLWGGYFDFWGQGTLVTVSSTRIQNPDPAVYQLRDSKSSDKSVCLFTDFDSQTNVSQSKDSDVYITDKCVLDMRSMDFKSNSAVAWSNKSDFACANAFNNSIIPEDTFFPSPESSDSTDHVKPKETENTKQPSKSCHKPKAIVHTEKVNMMSLTVLGLRMLFAKTVAVNFLLTAKLFFLLTA

SEQ ID NO: 44445 - protein, 737 aa, synthetic construct
MALPVTALLLPLALLLHAARPELQSVLTQPPSASGTPGQRVTISCSGSSSNIGSNYVNWYQQLPGTAPKLLIYGDYQRPSGVPDRFSGSKSGTSASLAISGLRSEDEADYYCATRDDSLSGSVVFGTGTKLTVLGLEIQNPDPAVYQLRDSKSSDKSVCLFTDFDSQTNVSQSKDSDVYITDKCVLDMRSMDFKSNSAVAWSNKSDFACANAFNNSIIPEDTFFPSPESSDSTDHVKPKETENTKQPSKSCHKPKAIVHTEKVNMMSLTVLGLRMLFAKTVAVNFLLTAKLFFLLTARAKRSGSGVKQTLNFDLLKLAGDVESNPGPTSMDWIWRILFLVGAATGAHSFEEVQLVQSGAEVKKPGESLKISCKGSGYGFTSYWIGWVRQMPGKGLEWMGIIHPDDSDTKYSPSFQGQVTISADKSISTAYLQWSSLKASDTAMYYCASSYLRGLWGGYFDFWGQGTLVTVSSTREDLKNVFPPEVAVFEPSEAEISHTQKATLVCLATGFYPDHVELSWWVNGKEVHSGVCTDPQPLKEQPALNDSRYCLSSRLRVSATFWQNPRNHFRCQVQFYGLSENDEWTQDRAKPVTQIVSAEAWGRADDVIKIHWQEKKSNTILGSQEGNTMKTNDTYMKFSWLTVPEKSLDKEHRCIVRHENNKNGVDQEIIFPPIKTDVITMDPKDNCSKDANDTLLLQLTNTSAYYMYLLLLLKSVVYFAIITCCLLMAMVKRKDSRG

SEQ ID NO: 44446 - protein, 868 aa, synthetic construct
MALPVTALLLPLALLLHAARPEVQLVESGGGLVQPGGSLRLSCAASGFSFSDFWMSWVRQAPGKGLEWVATISQAGSEKDYVDSVKGRFTISRDNAKKSLYLQMNSLRAEDTAVYYCASGVYSFDYRGQGTLVTVSSGTGGGGSGGGGSGGGGSEFELQSVLTQPPSASGTPGQRVTISCSGSSSNIGSNYVNWYQQLPGTAPKLLIYGDYQRPSGVPDRFSGSKSGTSASLAISGLRSEDEADYYCATRDDSLSGSVVFGTGTKLTVLGLEDLKNVFPPEVAVFEPSEAEISHTQKATLVCLATGFYPDHVELSWWVNGKEVHSGVCTDPQPLKEQPALNDSRYCLSSRLRVSATFWQNPRNHFRCQVQFYGLSENDEWTQDRAKPVTQIVSAEAWGRADDVIKIHWQEKKSNTILGSQEGNTMKTNDTYMKFSWLTVPEKSLDKEHRCIVRHENNKNGVDQEIIFPPIKTDVITMDPKDNCSKDANDTLLLQLTNTSAYYMYLLLLLKSVVYFAIITCCLLMAMVKRKDSRGRAKRSGSGATNFSLLKQAGDVEENPGPTSMDWIWRILFLVGAATGAHSFEEVQLVQSGAEVKKPGESLKISCKGSGYGFTSYWIGWVRQMPGKGLEWMGIIHPDDSDTKYSPSFQGQVTISADKSISTAYLQWSSLKASDTAMYYCASSYLRGLWGGYFDFWGQGTLVTVSSTRIQNPDPAVYQLRDSKSSDKSVCLFTDFDSQTNVSQSKDSDVYITDKCVLDMRSMDFKSNSAVAWSNKSDFACANAFNNSIIPEDTFFPSPESSDSTDHVKPKETENTKQPSKSCHKPKAIVHTEKVNMMSLTVLGLRMLFAKTVAVNFLLTAKLFFLLTA

SEQ ID NO: 44447 - protein, 872 aa, synthetic construct
MALPVTALLLPLALLLHAARPEVQLVESGGGLVQPGGSLRLSCAASGFSFSDFWMSWVRQAPGKGLEWVATISQAGSEKDYVDSVKGRFTISRDNAKKSLYLQMNSLRAEDTAVYYCASGVYSFDYRGQGTLVTVSSGTGGGGSGGGGSGGGGSEFELQSVLTQPPSASGTPGQRVTISCSGSSSNIGSNYVNWYQQLPGTAPKLLIYGDYQRPSGVPDRFSGSKSGTSASLAISGLRSEDEADYYCATRDDSLSGSVVFGTGTKLTVLGLEIQNPDPAVYQLRDSKSSDKSVCLFTDFDSQTNVSQSKDSDVYITDKCVLDMRSMDFKSNSAVAWSNKSDFACANAFNNSIIPEDTFFPSPESSDSTDHVKPKETENTKQPSKSCHKPKAIVHTEKVNMMSLTVLGLRMLFAKTVAVNFLLTAKLFFLLTARAKRSGSGVKQTLNFDLLKLAGDVESNPGPTSMDWIWRILFLVGAATGAHSFEEVQLVQSGAEVKKPGESLKISCKGSGYGFTSYWIGWVRQMPGKGLEWMGIIHPDDSDTKYSPSFQGQVTISADKSISTAYLQWSSLKASDTAMYYCASSYLRGLWGGYFDFWGQGTLVTVSSTREDLKNVFPPEVAVFEPSEAEISHTQKATLVCLATGFYPDHVELSWWVNGKEVHSGVCTDPQPLKEQPALNDSRYCLSSRLRVSATFWQNPRNHFRCQVQFYGLSENDEWTQDRAKPVTQIVSAEAWGRADDVIKIHWQEKKSNTILGSQEGNTMKTNDTYMKFSWLTVPEKSLDKEHRCIVRHENNKNGVDQEIIFPPIKTDVITMDPKDNCSKDANDTLLLQLTNTSAYYMYLLLLLKSVVYFAIITCCLLMAMVKRKDSRG

SEQ ID NO: 44448 - protein, 1005 aa, synthetic construct
MALPVTALLLPLALLLHAARPEVQLVESGGGLVQPGGSLRLSCAASGFSFSDFWMSWVRQAPGKGLEWVATISQAGSEKDYVDSVKGRFTISRDNAKKSLYLQMNSLRAEDTAVYYCASGVYSFDYRGQGTLVTVSSGTGGGGSGGGGSGGGGSEFELQSVLTQPPSASGTPGQRVTISCSGSSSNIGSNYVNWYQQLPGTAPKLLIYGDYQRPSGVPDRFSGSKSGTSASLAISGLRSEDEADYYCATRDDSLSGSVVFGTGTKLTVLGLEDLKNVFPPEVAVFEPSEAEISHTQKATLVCLATGFYPDHVELSWWVNGKEVHSGVCTDPQPLKEQPALNDSRYCLSSRLRVSATFWQNPRNHFRCQVQFYGLSENDEWTQDRAKPVTQIVSAEAWGRADDVIKIHWQEKKSNTILGSQEGNTMKTNDTYMKFSWLTVPEKSLDKEHRCIVRHENNKNGVDQEIIFPPIKTDVITMDPKDNCSKDANDTLLLQLTNTSAYYMYLLLLLKSVVYFAIITCCLLMAMVKRKDSRGRAKRSGSGATNFSLLKQAGDVEENPGPTSMDWIWRILFLVGAATGAHSGPQLQLQESGPGLVKPSETLSLTCTVSGDSISSGDYYWGWIRQPPGKGLEWIGHIYYSGVTYYNPSLKSRVTISVDTSRNQFSLKLSSVTAADTAVYYCTREDSSNWRSRGQGTLVTVSSGSGGGGSGGGGSGGGGSFEEVQLVQSGAEVKKPGESLKISCKGSGYGFTSYWIGWVRQMPGKGLEWMGIIHPDDSDTKYSPSFQGQVTISADKSISTAYLQWSSLKASDTAMYYCASSYLRGLWGGYFDFWGQGTLVTVSSTRIQNPDPAVYQLRDSKSSDKSVCLFTDFDSQTNVSQSKDSDVYITDKCVLDMRSMDFKSNSAVAWSNKSDFACANAFNNSIIPEDTFFPSPESSDSTDHVKPKETENTKQPSKSCHKPKAIVHTEKVNMMSLTVLGLRMLFAKTVAVNFLLTAKLFFLLTA

SEQ ID NO: 44449 - protein, 1009 aa, synthetic construct
MALPVTALLLPLALLLHAARPEVQLVESGGGLVQPGGSLRLSCAASGFSFSDFWMSWVRQAPGKGLEWVATISQAGSEKDYVDSVKGRFTISRDNAKKSLYLQMNSLRAEDTAVYYCASGVYSFDYRGQGTLVTVSSGTGGGGSGGGGSGGGGSEFELQSVLTQPPSASGTPGQRVTISCSGSSSNIGSNYVNWYQQLPGTAPKLLIYGDYQRPSGVPDRFSGSKSGTSASLAISGLRSEDEADYYCATRDDSLSGSVVFGTGTKLTVLGLEIQNPDPAVYQLRDSKSSDKSVCLFTDFDSQTNVSQSKDSDVYITDKCVLDMRSMDFKSNSAVAWSNKSDFACANAFNNSIIPEDTFFPSPESSDSTDHVKPKETENTKQPSKSCHKPKAIVHTEKVNMMSLTVLGLRMLFAKTVAVNFLLTAKLFFLLTARAKRSGSGVKQTLNFDLLKLAGDVESNPGPTSMDWIWRILFLVGAATGAHSGPQLQLQESGPGLVKPSETLSLTCTVSGDSISSGDYYWGWIRQPPGKGLEWIGHIYYSGVTYYNPSLKSRVTISVDTSRNQFSLKLSSVTAADTAVYYCTREDSSNWRSRGQGTLVTVSSGSGGGGSGGGGSGGGGSFEEVQLVQSGAEVKKPGESLKISCKGSGYGFTSYWIGWVRQMPGKGLEWMGIIHPDDSDTKYSPSFQGQVTISADKSISTAYLQWSSLKASDTAMYYCASSYLRGLWGGYFDFWGQGTLVTVSSTREDLKNVFPPEVAVFEPSEAEISHTQKATLVCLATGFYPDHVELSWWVNGKEVHSGVCTDPQPLKEQPALNDSRYCLSSRLRVSATFWQNPRNHFRCQVQFYGLSENDEWTQDRAKPVTQIVSAEAWGRADDVIKIHWQEKKSNTILGSQEGNTMKTNDTYMKFSWLTVPEKSLDKEHRCIVRHENNKNGVDQEIIFPPIKTDVITMDPKDNCSKDANDTLLLQLTNTSAYYMYLLLLLKSVVYFAIITCCLLMAMVKRKDSRG

SEQ ID NO: 44450 - protein, 731 aa, synthetic construct
MALPVTALLLPLALLLHAARPELQSVLTQPPSASGTPGQRVTISCSGSSSNIGSNYVNWYQQLPGTAPKLLIYGDYQRPSGVPDRFSGSKSGTSASLAISGLRSEDEADYYCATRDDSLSGSVVFGTGTKLTVLGLEDLKNVFPPEVAVFEPSEAEISHTQKATLVCLATGFYPDHVELSWWVNGKEVHSGVCTDPQPLKEQPALNDSRYCLSSRLRVSATFWQNPRNHFRCQVQFYGLSENDEWTQDRAKPVTQIVSAEAWGRADDVIKIHWQEKKSNTILGSQEGNTMKTNDTYMKFSWLTVPEKSLDKEHRCIVRHENNKNGVDQEIIFPPIKTDVITMDPKDNCSKDANDTLLLQLTNTSAYYMYLLLLLKSVVYFAIITCCLLRRTAFCCNGEKSRAKRSGSGATNFSLLKQAGDVEENPGPTSMDWIWRILFLVGAATGAHSFEEVQLVQSGAEVKKPGESLKISCKGSGYGFTSYWIGWVRQMPGKGLEWMGIIHPDDSDTKYSPSFQGQVTISADKSISTAYLQWSSLKASDTAMYYCASSYLRGLWGGYFDFWGQGTLVTVSSTRIQNPDPAVYQLRDSKSSDKSVCLFTDFDSQTNVSQSKDSDVYITDKCVLDMRSMDFKSNSAVAWSNKSDFACANAFNNSIIPEDTFFPSPESSDSTDHVKPKETENTKQPSKSCHKPKAIVHTEKVNMMSLTVLGLRMLFAKTVAVNFLLTAKLFFL

SEQ ID NO: 44451 - protein, 735 aa, synthetic construct
MALPVTALLLPLALLLHAARPELQSVLTQPPSASGTPGQRVTISCSGSSSNIGSNYVNWYQQLPGTAPKLLIYGDYQRPSGVPDRFSGSKSGTSASLAISGLRSEDEADYYCATRDDSLSGSVVFGTGTKLTVLGLEIQNPDPAVYQLRDSKSSDKSVCLFTDFDSQTNVSQSKDSDVYITDKCVLDMRSMDFKSNSAVAWSNKSDFACANAFNNSIIPEDTFFPSPESSDSTDHVKPKETENTKQPSKSCHKPKAIVHTEKVNMMSLTVLGLRMLFAKTVAVNFLLTAKLFFLRAKRSGSGVKQTLNFDLLKLAGDVESNPGPTSMDWIWRILFLVGAATGAHSFEEVQLVQSGAEVKKPGESLKISCKGSGYGFTSYWIGWVRQMPGKGLEWMGIIHPDDSDTKYSPSFQGQVTISADKSISTAYLQWSSLKASDTAMYYCASSYLRGLWGGYFDFWGQGTLVTVSSTREDLKNVFPPEVAVFEPSEAEISHTQKATLVCLATGFYPDHVELSWWVNGKEVHSGVCTDPQPLKEQPALNDSRYCLSSRLRVSATFWQNPRNHFRCQVQFYGLSENDEWTQDRAKPVTQIVSAEAWGRADDVIKIHWQEKKSNTILGSQEGNTMKTNDTYMKFSWLTVPEKSLDKEHRCIVRHENNKNGVDQEIIFPPIKTDVITMDPKDNCSKDANDTLLLQLTNTSAYYMYLLLLLKSVVYFAIITCCLLRRTAFCCNGEKS

SEQ ID NO: 44452 - protein, 866 aa, synthetic construct
MALPVTALLLPLALLLHAARPEVQLVESGGGLVQPGGSLRLSCAASGFSFSDFWMSWVRQAPGKGLEWVATISQAGSEKDYVDSVKGRFTISRDNAKKSLYLQMNSLRAEDTAVYYCASGVYSFDYRGQGTLVTVSSGTGGGGSGGGGSGGGGSEFELQSVLTQPPSASGTPGQRVTISCSGSSSNIGSNYVNWYQQLPGTAPKLLIYGDYQRPSGVPDRFSGSKSGTSASLAISGLRSEDEADYYCATRDDSLSGSVVFGTGTKLTVLGLEDLKNVFPPEVAVFEPSEAEISHTQKATLVCLATGFYPDHVELSWWVNGKEVHSGVCTDPQPLKEQPALNDSRYCLSSRLRVSATFWQNPRNHFRCQVQFYGLSENDEWTQDRAKPVTQIVSAEAWGRADDVIKIHWQEKKSNTILGSQEGNTMKTNDTYMKFSWLTVPEKSLDKEHRCIVRHENNKNGVDQEIIFPPIKTDVITMDPKDNCSKDANDTLLLQLTNTSAYYMYLLLLLKSVVYFAIITCCLLRRTAFCCNGEKSRAKRSGSGATNFSLLKQAGDVEENPGPTSMDWIWRILFLVGAATGAHSFEEVQLVQSGAEVKKPGESLKISCKGSGYGFTSYWIGWVRQMPGKGLEWMGIIHPDDSDTKYSPSFQGQVTISADKSISTAYLQWSSLKASDTAMYYCASSYLRGLWGGYFDFWGQGTLVTVSSTRIQNPDPAVYQLRDSKSSDKSVCLFTDFDSQTNVSQSKDSDVYITDKCVLDMRSMDFKSNSAVAWSNKSDFACANAFNNSIIPEDTFFPSPESSDSTDHVKPKETENTKQPSKSCHKPKAIVHTEKVNMMSLTVLGLRMLFAKTVAVNFLLTAKLFFL

SEQ ID NO: 44453 - protein, 1003 aa, synthetic construct
MALPVTALLLPLALLLHAARPEVQLVESGGGLVQPGGSLRLSCAASGFSFSDFWMSWVRQAPGKGLEWVATISQAGSEKDYVDSVKGRFTISRDNAKKSLYLQMNSLRAEDTAVYYCASGVYSFDYRGQGTLVTVSSGTGGGGSGGGGSGGGGSEFELQSVLTQPPSASGTPGQRVTISCSGSSSNIGSNYVNWYQQLPGTAPKLLIYGDYQRPSGVPDRFSGSKSGTSASLAISGLRSEDEADYYCATRDDSLSGSVVFGTGTKLTVLGLEDLKNVFPPEVAVFEPSEAEISHTQKATLVCLATGFYPDHVELSWWVNGKEVHSGVCTDPQPLKEQPALNDSRYCLSSRLRVSATFWQNPRNHFRCQVQFYGLSENDEWTQDRAKPVTQIVSAEAWGRADDVIKIHWQEKKSNTILGSQEGNTMKTNDTYMKFSWLTVPEKSLDKEHRCIVRHENNKNGVDQEIIFPPIKTDVITMDPKDNCSKDANDTLLLQLTNTSAYYMYLLLLLKSVVYFAIITCCLLRRTAFCCNGEKSRAKRSGSGATNFSLLKQAGDVEENPGPTSMDWIWRILFLVGAATGAHSGPQLQLQESGPGLVKPSETLSLTCTVSGDSISSGDYYWGWIRQPPGKGLEWIGHIYYSGVTYYNPSLKSRVTISVDTSRNQFSLKLSSVTAADTAVYYCTREDSSNWRSRGQGTLVTVSSGSGGGGSGGGGSGGGGSFEEVQLVQSGAEVKKPGESLKISCKGSGYGFTSYWIGWVRQMPGKGLEWMGIIHPDDSDTKYSPSFQGQVTISADKSISTAYLQWSSLKASDTAMYYCASSYLRGLWGGYFDFWGQGTLVTVSSTRIQNPDPAVYQLRDSKSSDKSVCLFTDFDSQTNVSQSKDSDVYITDKCVLDMRSMDFKSNSAVAWSNKSDFACANAFNNSIIPEDTFFPSPESSDSTDHVKPKETENTKQPSKSCHKPKAIVHTEKVNMMSLTVLGLRMLFAKTVAVNFLLTAKLFFL

SEQ ID NO: 44454 - protein, 629 aa, synthetic construct
MALPVTALLLPLALLLHAARPELQSVLTQPPSASGTPGQRVTISCSGSSSNIGSNYVNWYQQLPGTAPKLLIYGDYQRPSGVPDRFSGSKSGTSASLAISGLRSEDEADYYCATRDDSLSGSVVFGTGTKLTVLGLEDLKNVFPPEVAVFEPSEAEISHTQKATLVCLATGFYPDHVELSWWVNGKEVHSGVSTDPQPLKEQPALNDSRYCLSSRLRVSATFWQNPRNHFRCQVQFYGLSENDEWTQDRAKPVTQIVSAEAWGRADCDVKLVEKSFETDTNLNFQNLSVIGFRILLLKVAGFNLLMTLRLWSSRAKRSGSGATNFSLLKQAGDVEENPGPTSMDWIWRILFLVGAATGAHSFEEVQLVQSGAEVKKPGESLKISCKGSGYGFTSYWIGWVRQMPGKGLEWMGIIHPDDSDTKYSPSFQGQVTISADKSISTAYLQWSSLKASDTAMYYCASSYLRGLWGGYFDFWGQGTLVTVSSTRIQNPDPAVYQLRDSKSSDKSVCLFTDFDSQTNVSQSKDSDVYITDKTVLDMRSMDFKSNSAVAWSNKSDFACANAFNNSIIPEDTFFPSPESSCGFTSESYQQGVLSATILYEILLGKATLYAVLVSALVLMAMVKRKDSRG

SEQ ID NO: 44455 - protein, 629 aa, synthetic construct
MALPVTALLLPLALLLHAARPELQSVLTQPPSASGTPGQRVTISCSGSSSNIGSNYVNWYQQLPGTAPKLLIYGDYQRPSGVPDRFSGSKSGTSASLAISGLRSEDEADYYCATRDDSLSGSVVFGTGTKLTVLGLEDLKNVFPPEVAVFEPSEAEISHTQKATLVCLATGFYPDHVELSWWVNGKEVHSGVSTDPQPLKEQPALNDSRYCLSSRLRVSATFWQNPRNHFRCQVQFYGLSENDEWTQDRAKPVTQIVSAEAWGRADCGFTSESYQQGVLSATNLSVIGFRILLLKVAGFNLLMTLRLWSSRAKRSGSGATNFSLLKQAGDVEENPGPTSMDWIWRILFLVGAATGAHSFEEVQLVQSGAEVKKPGESLKISCKGSGYGFTSYWIGWVRQMPGKGLEWMGIIHPDDSDTKYSPSFQGQVTISADKSISTAYLQWSSLKASDTAMYYCASSYLRGLWGGYFDFWGQGTLVTVSSTRIQNPDPAVYQLRDSKSSDKSVCLFTDFDSQTNVSQSKDSDVYITDKTVLDMRSMDFKSNSAVAWSNKSDFACANAFNNSIIPEDTFFPSPESSCDVKLVEKSFETDTNLNFQILYEILLGKATLYAVLVSALVLMAMVKRKDSRG

SEQ ID NO: 44456 - protein, 733 aa, synthetic construct
MALPVTALLLPLALLLHAARPELQSVLTQPPSASGTPGQRVTISCSGSSSNIGSNYVNWYQQLPGTAPKLLIYGDYQRPSGVPDRFSGSKSGTSASLAISGLRSEDEADYYCATRDDSLSGSVVFGTGTKLTVLGLEDLKNVFPPEVAVFEPSEAEISHTQKATLVCLATGFYPDHVELSWWVNGKEVHSGVSTDPQPLKEQPALNDSRYCLSSRLRVSATFWQNPRNHFRCQVQFYGLSENDEWTQDRAKPVTQIVSAEAWGRADDVIKIHWQEKKSNTILGSQEGNTMKTNDTYMKFSWLTVPEKSLDKEHRCIVRHENNKNGVDQEIIFPPIKTDVITMDPKDNCSKDANDTLLLQLTNTSAYYMYLLLLLKSVVYFAIITCCLLMAMVKRKDSRGRAKRSGSGATNFSLLKQAGDVEENPGPTSMDWIWRILFLVGAATGAHSFEEVQLVQSGAEVKKPGESLKISCKGSGYGFTSYWIGWVRQMPGKGLEWMGIIHPDDSDTKYSPSFQGQVTISADKSISTAYLQWSSLKASDTAMYYCASSYLRGLWGGYFDFWGQGTLVTVSSTRIQNPDPAVYQLRDSKSSDKSVCLFTDFDSQTNVSQSKDSDVYITDKTVLDMRSMDFKSNSAVAWSNKSDFACANAFNNSIIPEDTFFPSPESSDSTDHVKPKETENTKQPSKSCHKPKAIVHTEKVNMMSLTVLGLRMLFAKTVAVNFLLTAKLFFLLTA

SEQ ID NO: 44457 - protein, 731 aa, synthetic construct
MALPVTALLLPLALLLHAARPELQSVLTQPPSASGTPGQRVTISCSGSSSNIGSNYVNWYQQLPGTAPKLLIYGDYQRPSGVPDRFSGSKSGTSASLAISGLRSEDEADYYCATRDDSLSGSVVFGTGTKLTVLGLEDLKNVFPPEVAVFEPSEAEISHTQKATLVCLATGFYPDHVELSWWVNGKEVHSGVSTDPQPLKEQPALNDSRYCLSSRLRVSATFWQNPRNHFRCQVQFYGLSENDEWTQDRAKPVTQIVSAEAWGRADDVIKIHWQEKKSNTILGSQEGNTMKTNDTYMKFSWLTVPEKSLDKEHRCIVRHENNKNGVDQEIIFPPIKTDVITMDPKDNCSKDANDTLLLQLTNTSAYYMYLLLLLKSVVYFAIITCCLLRRTAFCCNGEKSRAKRSGSGATNFSLLKQAGDVEENPGPTSMDWIWRILFLVGAATGAHSFEEVQLVQSGAEVKKPGESLKISCKGSGYGFTSYWIGWVRQMPGKGLEWMGIIHPDDSDTKYSPSFQGQVTISADKSISTAYLQWSSLKASDTAMYYCASSYLRGLWGGYFDFWGQGTLVTVSSTRIQNPDPAVYQLRDSKSSDKSVCLFTDFDSQTNVSQSKDSDVYITDKTVLDMRSMDFKSNSAVAWSNKSDFACANAFNNSIIPEDTFFPSPESSDSTDHVKPKETENTKQPSKSCHKPKAIVHTEKVNMMSLTVLGLRMLFAKTVAVNFLLTAKLFFL

SEQ ID NO: 44458 - protein, 874 aa, synthetic construct
MALPVTALLLPLALLLHAARPLEEDLKNVFPPEVAVFEPSEAEISHTQKATLVCLATGFYPDHVELSWWVNGKEVHSGVCTDPQPLKEQPALNDSRYCLSSRLRVSATFWQNPRNHFRCQVQFYGLSENDEWTQDRAKPVTQIVSAEAWGRADCGFTSESYQQGVLSATNLSVIGFRILLLKVAGFNLLMTLRLWSSRAKRSGSGATNFSLLKQAGDVEENPGPTSMALPVTALLLPLALLLHAARPELQSVLTQPPSASGTPGQRVTISCSGSSSNIGSNYVNWYQQLPGTAPKLLIYGDYQRPSGVPDRFSGSKSGTSASLAISGLRSEDEADYYCATRDDSLSGSVVFGTGTKLTVLGGGGGSGGGGSGGGGSEVQLVQSGAEVKKPGESLKISCKGSGYGFTSYWIGWVRQMPGKGLEWMGIIHPDDSDTKYSPSFQGQVTISADKSISTAYLQWSSLKASDTAMYYCASSYLRGLWGGYFDFWGQGTLVTVSSTRIQNPDPAVYQLRDSKSSDKSVCLFTDFDSQTNVSQSKDSDVYITDKCVLDMRSMDFKSNSAVAWSNKSDFACANAFNNSIIPEDTFFPSPESSCDVKLVEKSFETDTNLNFQILYEVIGFRILLLKVAGFNLLMTLRLWSSRAKRSGSGVKQTLNFDLLKLAGDVESNPGPSRGHMTEYKPTVRLATRDDVPRAVRTLAAAFADYPATRHTVDPDRHIERVTELQELFLTRVGLDIGKVWVADDGAAVAVWTTPESVEAGAVFAEIGPRMAELSGSRLAAQQQMEGLLAPHRPKEPAWFLATVGVSPDHQGKGLGSAVVLPGVEAAERAGVPAFLETSAPRNLPFYERLGFTVTADVEVPEGPRTWCMTRKPGA

SEQ ID NO: 44459 - protein, 874 aa, synthetic construct
MALPVTALLLPLALLLHAARPLEIQNPDPAVYQLRDSKSSDKSVCLFTDFDSQTNVSQSKDSDVYITDKCVLDMRSMDFKSNSAVAWSNKSDFACANAFNNSIIPEDTFFPSPESSCDVKLVEKSFETDTNLNFQILYEVIGFRILLLKVAGFNLLMTLRLWSSRAKRSGSGATNFSLLKQAGDVEENPGPTSMALPVTALLLPLALLLHAARPELQSVLTQPPSASGTPGQRVTISCSGSSSNIGSNYVNWYQQLPGTAPKLLIYGDYQRPSGVPDRFSGSKSGTSASLAISGLRSEDEADYYCATRDDSLSGSVVFGTGTKLTVLGGGGGSGGGGSGGGGSEVQLVQSGAEVKKPGESLKISCKGSGYGFTSYWIGWVRQMPGKGLEWMGIIHPDDSDTKYSPSFQGQVTISADKSISTAYLQWSSLKASDTAMYYCASSYLRGLWGGYFDFWGQGTLVTVSSTREDLKNVFPPEVAVFEPSEAEISHTQKATLVCLATGFYPDHVELSWWVNGKEVHSGVCTDPQPLKEQPALNDSRYCLSSRLRVSATFWQNPRNHFRCQVQFYGLSENDEWTQDRAKPVTQIVSAEAWGRADCGFTSESYQQGVLSATNLSVIGFRILLLKVAGFNLLMTLRLWSSRAKRSGSGVKQTLNFDLLKLAGDVESNPGPSRGHMTEYKPTVRLATRDDVPRAVRTLAAAFADYPATRHTVDPDRHIERVTELQELFLTRVGLDIGKVWVADDGAAVAVWTTPESVEAGAVFAEIGPRMAELSGSRLAAQQQMEGLLAPHRPKEPAWFLATVGVSPDHQGKGLGSAVVLPGVEAAERAGVPAFLETSAPRNLPFYERLGFTVTADVEVPEGPRTWCMTRKPGA

SEQ ID NO: 44460 - protein, 874 aa, synthetic construct; identical to SEQ ID NO: 44458

SEQ ID NO: 44461 - protein, 982 aa, synthetic construct
MALPVTALLLPLALLLHAARPLEEDLKNVFPPEVAVFEPSEAEISHTQKATLVCLATGFYPDHVELSWWVNGKEVHSGVSTDPQPLKEQPALNDSRYCLSSRLRVSATFWQNPRNHFRCQVQFYGLSENDEWTQDRAKPVTQIVSAEAWGRADDVIKIHWQEKKSNTILGSQEGNTMKTNDTYMKFSWLTVPEKSLDKEHRCIVRHENNKNGVDQEIIFPPIKTDVITMDPKDNCSKDANDTLLLQLTNTSAYYMYLLLLLKSVVYFAIITCCLLMAMVKRKDSRGRAKRSGSGATNFSLLKQAGDVEENPGPTSMALPVTALLLPLALLLHAARPELQSVLTQPPSASGTPGQRVTISCSGSSSNIGSNYVNWYQQLPGTAPKLLIYGDYQRPSGVPDRFSGSKSGTSASLAISGLRSEDEADYYCATRDDSLSGSVVFGTGTKLTVLGGGGGSGGGGSGGGGSEVQLVQSGAEVKKPGESLKISCKGSGYGFTSYWIGWVRQMPGKGLEWMGIIHPDDSDTKYSPSFQGQVTISADKSISTAYLQWSSLKASDTAMYYCASSYLRGLWGGYFDFWGQGTLVTVSSTRIQNPDPAVYQLRDSKSSDKSVCLFTDFDSQTNVSQSKDSDVYITDKTVLDMRSMDFKSNSAVAWSNKSDFACANAFNNSIIPEDTFFPSPESSDSTDHVKPKETENTKQPSKSCHKPKAIVHTEKVNMMSLTVLGLRMLFAKTVAVNFLLTAKLFFLLTARAKRSGSGVKQTLNFDLLKLAGDVESNPGPSRGHMTEYKPTVRLATRDDVPRAVRTLAAAFADYPATRHTVDPDRHIERVTELQELFLTRVGLDIGKVWVADDGAAVAVWTTPESVEAGAVFAEIGPRMAELSGSRLAAQQQMEGLLAPHRPKEPAWFLATVGVSPDHQGKGLGSAVVLPGVEAAERAGVPAFLETSAPRNLPFYERLGFTVTADVEVPEGPRTWCMTRKPGA

SEQ ID NO: 44462 - protein, 982 aa, synthetic construct
MALPVTALLLPLALLLHAARPLEIQNPDPAVYQLRDSKSSDKSVCLFTDFDSQTNVSQSKDSDVYITDKTVLDMRSMDFKSNSAVAWSNKSDFACANAFNNSIIPEDTFFPSPESSDSTDHVKPKETENTKQPSKSCHKPKAIVHTEKVNMMSLTVLGLRMLFAKTVAVNFLLTAKLFFLLTARAKRSGSGATNFSLLKQAGDVEENPGPTSMALPVTALLLPLALLLHAARPELQSVLTQPPSASGTPGQRVTISCSGSSSNIGSNYVNWYQQLPGTAPKLLIYGDYQRPSGVPDRFSGSKSGTSASLAISGLRSEDEADYYCATRDDSLSGSVVFGTGTKLTVLGGGGGSGGGGSGGGGSEVQLVQSGAEVKKPGESLKISCKGSGYGFTSYWIGWVRQMPGKGLEWMGIIHPDDSDTKYSPSFQGQVTISADKSISTAYLQWSSLKASDTAMYYCASSYLRGLWGGYFDFWGQGTLVTVSSTREDLKNVFPPEVAVFEPSEAEISHTQKATLVCLATGFYPDHVELSWWVNGKEVHSGVSTDPQPLKEQPALNDSRYCLSSRLRVSATFWQNPRNHFRCQVQFYGLSENDEWTQDRAKPVTQIVSAEAWGRADDVIKIHWQEKKSNTILGSQEGNTMKTNDTYMKFSWLTVPEKSLDKEHRCIVRHENNKNGVDQEIIFPPIKTDVITMDPKDNCSKDANDTLLLQLTNTSAYYMYLLLLLKSVVYFAIITCCLLMAMVKRKDSRGRAKRSGSGVKQTLNFDLLKLAGDVESNPGPSRGHMTEYKPTVRLATRDDVPRAVRTLAAAFADYPATRHTVDPDRHIERVTELQELFLTRVGLDIGKVWVADDGAAVAVWTTPESVEAGAVFAEIGPRMAELSGSRLAAQQQMEGLLAPHRPKEPAWFLATVGVSPDHQGKGLGSAVVLPGVEAAERAGVPAFLETSAPRNLPFYERLGFTVTADVEVPEGPRTWCMTRKPGA

SEQ ID NO: 44463 - protein, 980 aa, synthetic construct
MALPVTALLLPLALLLHAARPLEEDLKNVFPPEVAVFEPSEAEISHTQKATLVCLATGFYPDHVELSWWVNGKEVHSGVCTDPQPLKEQPALNDSRYCLSSRLRVSATFWQNPRNHFRCQVQFYGLSENDEWTQDRAKPVTQIVSAEAWGRADDVIKIHWQEKKSNTILGSQEGNTMKTNDTYMKFSWLTVPEKSLDKEHRCIVRHENNKNGVDQEIIFPPIKTDVITMDPKDNCSKDANDTLLLQLTNTSAYYMYLLLLLKSVVYFAIITCCLLRRTAFCCNGEKSRAKRSGSGATNFSLLKQAGDVEENPGPTSMALPVTALLLPLALLLHAARPELQSVLTQPPSASGTPGQRVTISCSGSSSNIGSNYVNWYQQLPGTAPKLLIYGDYQRPSGVPDRFSGSKSGTSASLAISGLRSEDEADYYCATRDDSLSGSVVFGTGTKLTVLGGGGGSGGGGSGGGGSEVQLVQSGAEVKKPGESLKISCKGSGYGFTSYWIGWVRQMPGKGLEWMGIIHPDDSDTKYSPSFQGQVTISADKSISTAYLQWSSLKASDTAMYYCASSYLRGLWGGYFDFWGQGTLVTVSSTRIQNPDPAVYQLRDSKSSDKSVCLFTDFDSQTNVSQSKDSDVYITDKCVLDMRSMDFKSNSAVAWSNKSDFACANAFNNSIIPEDTFFPSPESSDSTDHVKPKETENTKQPSKSCHKPKAIVHTEKVNMMSLTVLGLRMLFAKTVAVNFLLTAKLFFLRAKRSGSGVKQTLNFDLLKLAGDVESNPGPSRGHMTEYKPTVRLATRDDVPRAVRTLAAAFADYPATRHTVDPDRHIERVTELQELFLTRVGLDIGKVWVADDGAAVAVWTTPESVEAGAVFAEIGPRMAELSGSRLAAQQQMEGLLAPHRPKEPAWFLATVGVSPDHQGKGLGSAVVLPGVEAAERAGVPAFLETSAPRNLPFYERLGFTVTADVEVPEGPRTWCMTRKPGA

SEQ ID NO: 44464 - protein, 980 aa, synthetic construct
MALPVTALLLPLALLLHAARPLEIQNPDPAVYQLRDSKSSDKSVCLFTDFDSQTNVSQSKDSDVYITDKCVLDMRSMDFKSNSAVAWSNKSDFACANAFNNSIIPEDTFFPSPESSDSTDHVKPKETENTKQPSKSCHKPKAIVHTEKVNMMSLTVLGLRMLFAKTVAVNFLLTAKLFFLRAKRSGSGATNFSLLKQAGDVEENPGPTSMALPVTALLLPLALLLHAARPELQSVLTQPPSASGTPGQRVTISCSGSSSNIGSNYVNWYQQLPGTAPKLLIYGDYQRPSGVPDRFSGSKSGTSASLAISGLRSEDEADYYCATRDDSLSGSVVFGTGTKLTVLGGGGGSGGGGSGGGGSEVQLVQSGAEVKKPGESLKISCKGSGYGFTSYWIGWVRQMPGKGLEWMGIIHPDDSDTKYSPSFQGQVTISADKSISTAYLQWSSLKASDTAMYYCASSYLRGLWGGYFDFWGQGTLVTVSSTREDLKNVFPPEVAVFEPSEAEISHTQKATLVCLATGFYPDHVELSWWVNGKEVHSGVCTDPQPLKEQPALNDSRYCLSSRLRVSATFWQNPRNHFRCQVQFYGLSENDEWTQDRAKPVTQIVSAEAWGRADDVIKIHWQEKKSNTILGSQEGNTMKTNDTYMKFSWLTVPEKSLDKEHRCIVRHENNKNGVDQEIIFPPIKTDVITMDPKDNCSKDANDTLLLQLTNTSAYYMYLLLLLKSVVYFAIITCCLLRRTAFCCNGEKSRAKRSGSGVKQTLNFDLLKLAGDVESNPGPSRGHMTEYKPTVRLATRDDVPRAVRTLAAAFADYPATRHTVDPDRHIERVTELQELFLTRVGLDIGKVWVADDGAAVAVWTTPESVEAGAVFAEIGPRMAELSGSRLAAQQQMEGLLAPHRPKEPAWFLATVGVSPDHQGKGLGSAVVLPGVEAAERAGVPAFLETSAPRNLPFYERLGFTVTADVEVPEGPRTWCMTRKPGA

SEQ ID NO: 44465 - protein, 980 aa, synthetic construct
MALPVTALLLPLALLLHAARPLEEDLKNVFPPEVAVFEPSEAEISHTQKATLVCLATGFYPDHVELSWWVNGKEVHSGVSTDPQPLKEQPALNDSRYCLSSRLRVSATFWQNPRNHFRCQVQFYGLSENDEWTQDRAKPVTQIVSAEAWGRADDVIKIHWQEKKSNTILGSQEGNTMKTNDTYMKFSWLTVPEKSLDKEHRCIVRHENNKNGVDQEIIFPPIKTDVITMDPKDNCSKDANDTLLLQLTNTSAYYMYLLLLLKSVVYFAIITCCLLRRTAFCCNGEKSRAKRSGSGATNFSLLKQAGDVEENPGPTSMALPVTALLLPLALLLHAARPELQSVLTQPPSASGTPGQRVTISCSGSSSNIGSNYVNWYQQLPGTAPKLLIYGDYQRPSGVPDRFSGSKSGTSASLAISGLRSEDEADYYCATRDDSLSGSVVFGTGTKLTVLGGGGGSGGGGSGGGGSEVQLVQSGAEVKKPGESLKISCKGSGYGFTSYWIGWVRQMPGKGLEWMGIIHPDDSDTKYSPSFQGQVTISADKSISTAYLQWSSLKASDTAMYYCASSYLRGLWGGYFDFWGQGTLVTVSSTRIQNPDPAVYQLRDSKSSDKSVCLFTDFDSQTNVSQSKDSDVYITDKTVLDMRSMDFKSNSAVAWSNKSDFACANAFNNSIIPEDTFFPSPESSDSTDHVKPKETENTKQPSKSCHKPKAIVHTEKVNMMSLTVLGLRMLFAKTVAVNFLLTAKLFFLRAKRSGSGVKQTLNFDLLKLAGDVESNPGPSRGHMTEYKPTVRLATRDDVPRAVRTLAAAFADYPATRHTVDPDRHIERVTELQELFLTRVGLDIGKVWVADDGAAVAVWTTPESVEAGAVFAEIGPRMAELSGSRLAAQQQMEGLLAPHRPKEPAWFLATVGVSPDHQGKGLGSAVVLPGVEAAERAGVPAFLETSAPRNLPFYERLGFTVTADVEVPEGPRTWCMTRKPGA

SEQ ID NO: 44466 - protein, 980 aa, synthetic construct
MALPVTALLLPLALLLHAARPLEIQNPDPAVYQLRDSKSSDKSVCLFTDFDSQTNVSQSKDSDVYITDKTVLDMRSMDFKSNSAVAWSNKSDFACANAFNNSIIPEDTFFPSPESSDSTDHVKPKETENTKQPSKSCHKPKAIVHTEKVNMMSLTVLGLRMLFAKTVAVNFLLTAKLFFLRAKRSGSGATNFSLLKQAGDVEENPGPTSMALPVTALLLPLALLLHAARPELQSVLTQPPSASGTPGQRVTISCSGSSSNIGSNYVNWYQQLPGTAPKLLIYGDYQRPSGVPDRFSGSKSGTSASLAISGLRSEDEADYYCATRDDSLSGSVVFGTGTKLTVLGGGGGSGGGGSGGGGSEVQLVQSGAEVKKPGESLKISCKGSGYGFTSYWIGWVRQMPGKGLEWMGIIHPDDSDTKYSPSFQGQVTISADKSISTAYLQWSSLKASDTAMYYCASSYLRGLWGGYFDFWGQGTLVTVSSTREDLKNVFPPEVAVFEPSEAEISHTQKATLVCLATGFYPDHVELSWWVNGKEVHSGVSTDPQPLKEQPALNDSRYCLSSRLRVSATFWQNPRNHFRCQVQFYGLSENDEWTQDRAKPVTQIVSAEAWGRADDVIKIHWQEKKSNTILGSQEGNTMKTNDTYMKFSWLTVPEKSLDKEHRCIVRHENNKNGVDQEIIFPPIKTDVITMDPKDNCSKDANDTLLLQLTNTSAYYMYLLLLLKSVVYFAIITCCLLRRTAFCCNGEKSRAKRSGSGVKQTLNFDLLKLAGDVESNPGPSRGHMTEYKPTVRLATRDDVPRAVRTLAAAFADYPATRHTVDPDRHIERVTELQELFLTRVGLDIGKVWVADDGAAVAVWTTPESVEAGAVFAEIGPRMAELSGSRLAAQQQMEGLLAPHRPKEPAWFLATVGVSPDHQGKGLGSAVVLPGVEAAERAGVPAFLETSAPRNLPFYERLGFTVTADVEVPEGPRTWCMTRKPGA

SEQ ID NO: 44467 - protein, 878 aa, synthetic construct
MALPVTALLLPLALLLHAARPLEEDLKNVFPPEVAVFEPSKAEIAHTQKATLVCLATGFYPDHVELSWWVNGKEVHSGVCTDPQPLKEQPALNDSRYCLSSRLRVSATFWQNPRNHFRCQVQFYGLSENDEWTQDRAKPVTQIVSAEAWGRADCGITSASYHQGVLSATILYEILLGKATLYAVLVSALVLMAMVKRKDSRGRAKRSGSGATNFSLLKQAGDVEENPGPTSMALPVTALLLPLALLLHAARPELQSVLTQPPSASGTPGQRVTISCSGSSSNIGSNYVNWYQQLPGTAPKLLIYGDYQRPSGVPDRFSGSKSGTSASLAISGLRSEDEADYYCATRDDSLSGSVVFGTGTKLTVLGGGGGSGGGGSGGGGSEVQLVQSGAEVKKPGESLKISCKGSGYGFTSYWIGWVRQMPGKGLEWMGIIHPDDSDTKYSPSFQGQVTISADKSISTAYLQWSSLKASDTAMYYCASSYLRGLWGGYFDFWGQGTLVTVSSTRIQNPDPAVYQLRDSKSSDKSVCLFTDFDSQTNVSQSKDSDVYITDKCVLDMRSMDFKSNSAVAWSNKSDFACANAFNNSIIPEDTFFPSSDVPCDVKLVEKSFETDTNLNFQNLSVIGFRILLLKVAGFNLLMTLRLWSSRAKRSGSGVKQTLNFDLLKLAGDVESNPGPSRGHMTEYKPTVRLATRDDVPRAVRTLAAAFADYPATRHTVDPDRHIERVTELQELFLTRVGLDIGKVWVADDGAAVAVWTTPESVEAGAVFAEIGPRMAELSGSRLAAQQQMEGLLAPHRPKEPAWFLATVGVSPDHQGKGLGSAVVLPGVEAAERAGVPAFLETSAPRNLPFYERLGFTVTADVEVPEGPRTWCMTRKPGA

SEQ ID NO: 44468 - protein, 878 aa, synthetic construct
MALPVTALLLPLALLLHAARPLEIQNPDPAVYQLRDSKSSDKSVCLFTDFDSQTNVSQSKDSDVYITDKCVLDMRSMDFKSNSAVAWSNKSDFACANAFNNSIIPEDTFFPSSDVPCDVKLVEKSFETDTNLNFQNLSVIGFRILLLKVAGFNLLMTLRLWSSRAKRSGSGATNFSLLKQAGDVEENPGPTSMALPVTALLLPLALLLHAARPELQSVLTQPPSASGTPGQRVTISCSGSSSNIGSNYVNWYQQLPGTAPKLLIYGDYQRPSGVPDRFSGSKSGTSASLAISGLRSEDEADYYCATRDDSLSGSVVFGTGTKLTVLGGGGGSGGGGSGGGGSEVQLVQSGAEVKKPGESLKISCKGSGYGFTSYWIGWVRQMPGKGLEWMGIIHPDDSDTKYSPSFQGQVTISADKSISTAYLQWSSLKASDTAMYYCASSYLRGLWGGYFDFWGQGTLVTVSSTREDLKNVFPPEVAVFEPSKAEIAHTQKATLVCLATGFYPDHVELSWWVNGKEVHSGVCTDPQPLKEQPALNDSRYCLSSRLRVSATFWQNPRNHFRCQVQFYGLSENDEWTQDRAKPVTQIVSAEAWGRADCGITSASYHQGVLSATILYEILLGKATLYAVLVSALVLMAMVKRKDSRGRAKRSGSGVKQTLNFDLLKLAGDVESNPGPSRGHMTEYKPTVRLATRDDVPRAVRTLAAAFADYPATRHTVDPDRHIERVTELQELFLTRVGLDIGKVWVADDGAAVAVWTTPESVEAGAVFAEIGPRMAELSGSRLAAQQQMEGLLAPHRPKEPAWFLATVGVSPDHQGKGLGSAVVLPGVEAAERAGVPAFLETSAPRNLPFYERLGFTVTADVEVPEGPRTWCMTRKPGA

SEQ ID NO: 44469 - protein, 771 aa, synthetic construct
MALPVTALLLPLALLLHAARPLEQSFGLLDPKLCYLLDGILFIYGVILTALFLRVKFSRSADAPAYQQGQNQLYNELNLGRREEYDVLDKRRGRDPEMGGKPQRRKNPQEGLYNELQKDKMAEAYSEIGMKGERRRGKGHDGLYQGLSTATKDTYDALHMQALPPRRAKRSGSGATNFSLLKQAGDVEENPGPTSMALPVTALLLPLALLLHAARPELQSVLTQPPSASGTPGQRVTISCSGSSSNIGSNYVNWYQQLPGTAPKLLIYGDYQRPSGVPDRFSGSKSGTSASLAISGLRSEDEADYYCATRDDSLSGSVVFGTGTKLTVLGGGGGSGGGGSGGGGSEVQLVQSGAEVKKPGESLKISCKGSGYGFTSYWIGWVRQMPGKGLEWMGIIHPDDSDTKYSPSFQGQVTISADKSISTAYLQWSSLKASDTAMYYCASSYLRGLWGGYFDFWGQGTLVTVSSTRELGEPQLCYILDAILFLYGIVLTLLYCRLKIQVRKAAITSYEKSDGVYTGLSTRNQETYETLKHEKPPQRAKRSGSGVKQTLNFDLLKLAGDVESNPGPSRGHMTEYKPTVRLATRDDVPRAVRTLAAAFADYPATRHTVDPDRHIERVTELQELFLTRVGLDIGKVWVADDGAAVAVWTTPESVEAGAVFAEIGPRMAELSGSRLAAQQQMEGLLAPHRPKEPAWFLATVGVSPDHQGKGLGSAVVLPGVEAAERAGVPAFLETSAPRNLPFYERLGFTVTADVEVPEGPRTWCMTRKPGA

SEQ ID NO: 44470 - protein, 982 aa, synthetic construct; identical to SEQ ID NO: 44461

SEQ ID NO: 44471 - protein, 982 aa, synthetic construct; identical to SEQ ID NO: 44462

SEQ ID NO: 44472 - protein, 981 aa, synthetic construct
MALPVTALLLPLALLLHAARPLEEEDLKNVFPPEVAVFEPSEAEISHTQKATLVCLATGFYPDHVELSWWVNGKEVHSGVCTDPQPLKEQPALNDSRYCLSSRLRVSATFWQNPRNHFRCQVQFYGLSENDEWTQDRAKPVTQIVSAEAWGRADDVIKIHWQEKKSNTILGSQEGNTMKTNDTYMKFSWLTVPEKSLDKEHRCIVRHENNKNGVDQEIIFPPIKTDVITMDPKDNCSKDANDTLLLQLTNTSAYYMYLLLLLKSVVYFAIITCCLLRRTAFCCNGEKSRAKRSGSGATNFSLLKQAGDVEENPGPTSMALPVTALLLPLALLLHAARPELQSVLTQPPSASGTPGQRVTISCSGSSSNIGSNYVNWYQQLPGTAPKLLIYGDYQRPSGVPDRFSGSKSGTSASLAISGLRSEDEADYYCATRDDSLSGSVVFGTGTKLTVLGGGGGSGGGGSGGGGSEVQLVQSGAEVKKPGESLKISCKGSGYGFTSYWIGWVRQMPGKGLEWMGIIHPDDSDTKYSPSFQGQVTISADKSISTAYLQWSSLKASDTAMYYCASSYLRGLWGGYFDFWGQGTLVTVSSTRIQNPDPAVYQLRDSKSSDKSVCLFTDFDSQTNVSQSKDSDVYITDKCVLDMRSMDFKSNSAVAWSNKSDFACANAFNNSIIPEDTFFPSPESSDSTDHVKPKETENTKQPSKSCHKPKAIVHTEKVNMMSLTVLGLRMLFAKTVAVNFLLTAKLFFLRAKRSGSGVKQTLNFDLLKLAGDVESNPGPSRGHMTEYKPTVRLATRDDVPRAVRTLAAAFADYPATRHTVDPDRHIERVTELQELFLTRVGLDIGKVWVADDGAAVAVWTTPESVEAGAVFAEIGPRMAELSGSRLAAQQQMEGLLAPHRPKEPAWFLATVGVSPDHQGKGLGSAVVLPGVEAAERAGVPAFLETSAPRNLPFYERLGFTVTADVEVPEGPRTWCMTRKPGA

SEQ ID NO: 44473 - protein, 981 aa, synthetic construct
MALPVTALLLPLALLLHAARPLEIQNPDPAVYQLRDSKSSDKSVCLFTDFDSQTNVSQSKDSDVYITDKCVLDMRSMDFKSNSAVAWSNKSDFACANAFNNSIIPEDTFFPSPESSDSTDHVKPKETENTKQPSKSCHKPKAIVHTEKVNMMSLTVLGLRMLFAKTVAVNFLLTAKLFFLRAKRSGSGATNFSLLKQAGDVEENPGPTSMALPVTALLLPLALLLHAARPELQSVLTQPPSASGTPGQRVTISCSGSSSNIGSNYVNWYQQLPGTAPKLLIYGDYQRPSGVPDRFSGSKSGTSASLAISGLRSEDEADYYCATRDDSLSGSVVFGTGTKLTVLGGGGGSGGGGSGGGGSEVQLVQSGAEVKKPGESLKISCKGSGYGFTSYWIGWVRQMPGKGLEWMGIIHPDDSDTKYSPSFQGQVTISADKSISTAYLQWSSLKASDTAMYYCASSYLRGLWGGYFDFWGQGTLVTVSSTREEDLKNVFPPEVAVFEPSEAEISHTQKATLVCLATGFYPDHVELSWWVNGKEVHSGVCTDPQPLKEQPALNDSRYCLSSRLRVSATFWQNPRNHFRCQVQFYGLSENDEWTQDRAKPVTQIVSAEAWGRADDVIKIHWQEKKSNTILGSQEGNTMKTNDTYMKFSWLTVPEKSLDKEHRCIVRHENNKNGVDQEIIFPPIKTDVITMDPKDNCSKDANDTLLLQLTNTSAYYMYLLLLLKSVVYFAIITCCLLRRTAFCCNGEKSRAKRSGSGVKQTLNFDLLKLAGDVESNPGPSRGHMTEYKPTVRLATRDDVPRAVRTLAAAFADYPATRHTVDPDRHIERVTELQELFLTRVGLDIGKVWVADDGAAVAVWTTPESVEAGAVFAEIGPRMAELSGSRLAAQQQMEGLLAPHRPKEPAWFLATVGVSPDHQGKGLGSAVVLPGVEAAERAGVPAFLETSAPRNLPFYERLGFTVTADVEVPEGPRTWCMTRKPGA

SEQ ID NO: 44474 - protein, 878 aa, synthetic construct
MALPVTALLLPLALLLHAARPLEEDLKNVFPPEVAVFEPSEAEISHTQKATLVCLATGFYPDHVELSWWVNGKEVHSGVSTDPQPLKEQPALNDSRYCLSSRLRVSATFWQNPRNHFRCQVQFYGLSENDEWTQDRAKPVTQIVSAEAWGRADCGFTSESYQQGVLSATNLSVIGFRILLLKVAGFNLLMTLRLWSSRAKRSGSGATNFSLLKQAGDVEENPGPTSMALPVTALLLPLALLLHAARPELQSVLTQPPSASGTPGQRVTISCSGSSSNIGSNYVNWYQQLPGTAPKLLIYGDYQRPSGVPDRFSGSKSGTSASLAISGLRSEDEADYYCATRDDSLSGSVVFGTGTKLTVLGGGGGSGGGGSGGGGSEVQLVQSGAEVKKPGESLKISCKGSGYGFTSYWIGWVRQMPGKGLEWMGIIHPDDSDTKYSPSFQGQVTISADKSISTAYLQWSSLKASDTAMYYCASSYLRGLWGGYFDFWGQGTLVTVSSTRIQNPDPAVYQLRDSKSSDKSVCLFTDFDSQTNVSQSKDSDVYITDKTVLDMRSMDFKSNSAVAWSNKSDFACANAFNNSIIPEDTFFPSPESSCDVKLVEKSFETDTNLNFQILYEILLGKATLYAVLVSALVLMAMVKRKDSRGRAKRSGSGVKQTLNFDLLKLAGDVESNPGPSRGHMTEYKPTVRLATRDDVPRAVRTLAAAFADYPATRHTVDPDRHIERVTELQELFLTRVGLDIGKVWVADDGAAVAVWTTPESVEAGAVFAEIGPRMAELSGSRLAAQQQMEGLLAPHRPKEPAWFLATVGVSPDHQGKGLGSAVVLPGVEAAERAGVPAFLETSAPRNLPFYERLGFTVTADVEVPEGPRTWCMTRKPGA

SEQ ID NO: 44475 - protein, 878 aa, synthetic construct
MALPVTALLLPLALLLHAARPLEIQNPDPAVYQLRDSKSSDKSVCLFTDFDSQTNVSQSKDSDVYITDKTVLDMRSMDFKSNSAVAWSNKSDFACANAFNNSIIPEDTFFPSPESSCDVKLVEKSFETDTNLNFQILYEILLGKATLYAVLVSALVLMAMVKRKDSRGRAKRSGSGATNFSLLKQAGDVEENPGPTSMALPVTALLLPLALLLHAARPELQSVLTQPPSASGTPGQRVTISCSGSSSNIGSNYVNWYQQLPGTAPKLLIYGDYQRPSGVPDRFSGSKSGTSASLAISGLRSEDEADYYCATRDDSLSGSVVFGTGTKLTVLGGGGGSGGGGSGGGGSEVQLVQSGAEVKKPGESLKISCKGSGYGFTSYWIGWVRQMPGKGLEWMGIIHPDDSDTKYSPSFQGQVTISADKSISTAYLQWSSLKASDTAMYYCASSYLRGLWGGYFDFWGQGTLVTVSSTREDLKNVFPPEVAVFEPSEAEISHTQKATLVCLATGFYPDHVELSWWVNGKEVHSGVSTDPQPLKEQPALNDSRYCLSSRLRVSATFWQNPRNHFRCQVQFYGLSENDEWTQDRAKPVTQIVSAEAWGRADCGFTSESYQQGVLSATNLSVIGFRILLLKVAGFNLLMTLRLWSSRAKRSGSGVKQTLNFDLLKLAGDVESNPGPSRGHMTEYKPTVRLATRDDVPRAVRTLAAAFADYPATRHTVDPDRHIERVTELQELFLTRVGLDIGKVWVADDGAAVAVWTTPESVEAGAVFAEIGPRMAELSGSRLAAQQQMEGLLAPHRPKEPAWFLATVGVSPDHQGKGLGSAVVLPGVEAAERAGVPAFLETSAPRNLPFYERLGFTVTADVEVPEGPRTWCMTRKPGA

SEQ ID NO: 44476 - protein, 878 aa, synthetic construct
MALPVTALLLPLALLLHAARPLEEDLKNVFPPEVAVFEPSEAEISHTQKATLVCLATGFYPDHVELSWWVNGKEVHSGVCTDPQPLKEQPALNDSRYCLSSRLRVSATFWQNPRNHFRCQVQFYGLSENDEWTQDRAKPVTQIVSAEAWGRADCDVKLVEKSFETDTNLNFQNLSVIGFRILLLKVAGFNLLMTLRLWSSRAKRSGSGATNFSLLKQAGDVEENPGPTSMALPVTALLLPLALLLHAARPELQSVLTQPPSASGTPGQRVTISCSGSSSNIGSNYVNWYQQLPGTAPKLLIYGDYQRPSGVPDRFSGSKSGTSASLAISGLRSEDEADYYCATRDDSLSGSVVFGTGTKLTVLGGGGGSGGGGSGGGGSEVQLVQSGAEVKKPGESLKISCKGSGYGFTSYWIGWVRQMPGKGLEWMGIIHPDDSDTKYSPSFQGQVTISADKSISTAYLQWSSLKASDTAMYYCASSYLRGLWGGYFDFWGQGTLVTVSSTRIQNPDPAVYQLRDSKSSDKSVCLFTDFDSQTNVSQSKDSDVYITDKCVLDMRSMDFKSNSAVAWSNKSDFACANAFNNSIIPEDTFFPSPESSCGFTSESYQQGVLSATILYEILLGKATLYAVLVSALVLMAMVKRKDSRGRAKRSGSGVKQTLNFDLLKLAGDVESNPGPSRGHMTEYKPTVRLATRDDVPRAVRTLAAAFADYPATRHTVDPDRHIERVTELQELFLTRVGLDIGKVWVADDGAAVAVWTTPESVEAGAVFAEIGPRMAELSGSRLAAQQQMEGLLAPHRPKEPAWFLATVGVSPDHQGKGLGSAVVLPGVEAAERAGVPAFLETSAPRNLPFYERLGFTVTADVEVPEGPRTWCMTRKPGA

SEQ ID NO: 44477 - protein, 878 aa, synthetic construct
MALPVTALLLPLALLLHAARPLEEDLKNVFPPEVAVFEPSEAEISHTQKATLVCLATGFYPDHVELSWWVNGKEVHSGVSTDPQPLKEQPALNDSRYCLSSRLRVSATFWQNPRNHFRCQVQFYGLSENDEWTQDRAKPVTQIVSAEAWGRADCDVKLVEKSFETDTNLNFQNLSVIGFRILLLKVAGFNLLMTLRLWSSRAKRSGSGATNFSLLKQAGDVEENPGPTSMALPVTALLLPLALLLHAARPELQSVLTQPPSASGTPGQRVTISCSGSSSNIGSNYVNWYQQLPGTAPKLLIYGDYQRPSGVPDRFSGSKSGTSASLAISGLRSEDEADYYCATRDDSLSGSVVFGTGTKLTVLGGGGGSGGGGSGGGGSEVQLVQSGAEVKKPGESLKISCKGSGYGFTSYWIGWVRQMPGKGLEWMGIIHPDDSDTKYSPSFQGQVTISADKSISTAYLQWSSLKASDTAMYYCASSYLRGLWGGYFDFWGQGTLVTVSSTRIQNPDPAVYQLRDSKSSDKSVCLFTDFDSQTNVSQSKDSDVYITDKTVLDMRSMDFKSNSAVAWSNKSDFACANAFNNSIIPEDTFFPSPESSCGFTSESYQQGVLSATILYEILLGKATLYAVLVSALVLMAMVKRKDSRGRAKRSGSGVKQTLNFDLLKLAGDVESNPGPSRGHMTEYKPTVRLATRDDVPRAVRTLAAAFADYPATRHTVDPDRHIERVTELQELFLTRVGLDIGKVWVADDGAAVAVWTTPESVEAGAVFAEIGPRMAELSGSRLAAQQQMEGLLAPHRPKEPAWFLATVGVSPDHQGKGLGSAVVLPGVEAAERAGVPAFLETSAPRNLPFYERLGFTVTADVEVPEGPRTWCMTRKPGA

SEQ ID NO: 44478 - protein, 981 aa, synthetic construct
MALPVTALLLPLALLLHAARPLEEEDLKNVFPPEVAVFEPSEAEISHTQKATLVCLATGFYPDHVELSWWVNGKEVHSGVSTDPQPLKEQPALNDSRYCLSSRLRVSATFWQNPRNHFRCQVQFYGLSENDEWTQDRAKPVTQIVSAEAWGRADDVIKIHWQEKKSNTILGSQEGNTMKTNDTYMKFSWLTVPEKSLDKEHRCIVRHENNKNGVDQEIIFPPIKTDVITMDPKDNCSKDANDTLLLQLTNTSAYYMYLLLLLKSVVYFAIITCCLLRRTAFCCNGEKSRAKRSGSGATNFSLLKQAGDVEENPGPTSMALPVTALLLPLALLLHAARPELQSVLTQPPSASGTPGQRVTISCSGSSSNIGSNYVNWYQQLPGTAPKLLIYGDYQRPSGVPDRFSGSKSGTSASLAISGLRSEDEADYYCATRDDSLSGSVVFGTGTKLTVLGGGGGSGGGGSGGGGSEVQLVQSGAEVKKPGESLKISCKGSGYGFTSYWIGWVRQMPGKGLEWMGIIHPDDSDTKYSPSFQGQVTISADKSISTAYLQWSSLKASDTAMYYCASSYLRGLWGGYFDFWGQGTLVTVSSTRIQNPDPAVYQLRDSKSSDKSVCLFTDFDSQTNVSQSKDSDVYITDKTVLDMRSMDFKSNSAVAWSNKSDFACANAFNNSIIPEDTFFPSPESSDSTDHVKPKETENTKQPSKSCHKPKAIVHTEKVNMMSLTVLGLRMLFAKTVAVNFLLTAKLFFLRAKRSGSGVKQTLNFDLLKLAGDVESNPGPSRGHMTEYKPTVRLATRDDVPRAVRTLAAAFADYPATRHTVDPDRHIERVTELQELFLTRVGLDIGKVWVADDGAAVAVWTTPESVEAGAVFAEIGPRMAELSGSRLAAQQQMEGLLAPHRPKEPAWFLATVGVSPDHQGKGLGSAVVLPGVEAAERAGVPAFLETSAPRNLPFYERLGFTVTADVEVPEGPRTWCMTRKPGA

SEQ ID NO: 44479 - protein, 878 aa, synthetic construct
MALPVTALLLPLALLLHAARPLEEDLKNVFPPEVAVFEPSEAEISHTQKATLVCLATGFYPDHVELSWWVNGKEVHSGVCTDPQPLKEQPALNDSRYCLSSRLRVSATFWQNPRNHFRCQVQFYGLSENDEWTQDRAKPVTQIVSAEAWGRADCGFTSESYQQGVLSATNLSVIGFRILLLKVAGFNLLMTLRLWSSRAKRSGSGATNFSLLKQAGDVEENPGPTSMALPVTALLLPLALLLHAARPELQSVLTQPPSASGTPGQRVTISCSGSSSNIGSNYVNWYQQLPGTAPKLLIYGDYQRPSGVPDRFSGSKSGTSASLAISGLRSEDEADYYCATRDDSLSGSVVFGTGTKLTVLGGGGGSGGGGSGGGGSEVQLVQSGAEVKKPGESLKISCKGSGYGFTSYWIGWVRQMPGKGLEWMGIIHPDDSDTKYSPSFQGQVTISADKSISTAYLQWSSLKASDTAMYYCASSYLRGLWGGYFDFWGQGTLVTVSSTRIQNPDPAVYQLRDSKSSDKSVCLFTDFDSQTNVSQSKDSDVYITDKCVLDMRSMDFKSNSAVAWSNKSDFACANAFNNSIIPEDTFFPSPESSCDVKLVEKSFETDTNLNFQILYEILLGKATLYAVLVSALVLMAMVKRKDSRGRAKRSGSGVKQTLNFDLLKLAGDVESNPGPSRGHMTEYKPTVRLATRDDVPRAVRTLAAAFADYPATRHTVDPDRHIERVTELQELFLTRVGLDIGKVWVADDGAAVAVWTTPESVEAGAVFAEIGPRMAELSGSRLAAQQQMEGLLAPHRPKEPAWFLATVGVSPDHQGKGLGSAVVLPGVEAAERAGVPAFLETSAPRNLPFYERLGFTVTADVEVPEGPRTWCMTRKPGA

SEQ ID NO: 44480 - protein, 907 aa, synthetic construct
MALPVTALLLPLALLLHAARPLEEEDLKNVFPPEVAVFEPSEAEISHTQKATLVCLATGFYPDHVELSWWVNGKEVHSGVCTDPQPLKEQPALNDSRYCLSSRLRVSATFWQNPRNHFRCQVQFYGLSENDEWTQDRAKPVTQIVSAEAWGRADCGFTSESYQQGVLSATNLSVIGFRILLLKVAGFNLLMTLRLWSSRAKRSGSGATNFSLLKQAGDVEENPGPTSMALPVTALLLPLALLLHAARPELQSVLTQPPSASGTPGQRVTISCSGSSSNIGSNYVNWYQQLPGTAPKLLIYGDYQRPSGVPDRFSGSKSGTSASLAISGLRSEDEADYYCATRDDSLSGSVVFGTGTKLTVLGGGGGSGGGGSGGGGSEVQLVQSGAEVKKPGESLKISCKGSGYGFTSYWIGWVRQMPGKGLEWMGIIHPDDSDTKYSPSFQGQVTISADKSISTAYLQWSSLKASDTAMYYCASSYLRGLWGGYFDFWGQGTLVTVSSTRGQPKANPTVTLFPPSSEELQANKATLVCLISDFYPGAVTVAWKADGSPVKAGVETTKPSKQSNNKYAASSYLSLTPEQWKSHRSYSCQVTHEGSTVEKTVAPTECSPIKTDVITMDPKDNCSKDANDTLLLQLTNTSAYYMYLLLLLKSVVYFAIITCCLLRRTAFCCNGEKSRAKRSGSGVKQTLNFDLLKLAGDVESNPGPSRGHMTEYKPTVRLATRDDVPRAVRTLAAAFADYPATRHTVDPDRHIERVTELQELFLTRVGLDIGKVWVADDGAAVAVWTTPESVEAGAVFAEIGPRMAELSGSRLAAQQQMEGLLAPHRPKEPAWFLATVGVSPDHQGKGLGSAVVLPGVEAAERAGVPAFLETSAPRNLPFYERLGFTVTADVEVPEGPRTWCMTRKPGA

SEQ ID NO: 44481 - protein, 907 aa, synthetic construct
MALPVTALLLPLALLLHAARPLEGQPKANPTVTLFPPSSEELQANKATLVCLISDFYPGAVTVAWKADGSPVKAGVETTKPSKQSNNKYAASSYLSLTPEQWKSHRSYSCQVTHEGSTVEKTVAPTECSPIKTDVITMDPKDNCSKDANDTLLLQLTNTSAYYMYLLLLLKSVVYFAIITCCLLRRTAFCCNGEKSRAKRSGSGATNFSLLKQAGDVEENPGPTSMALPVTALLLPLALLLHAARPELQSVLTQPPSASGTPGQRVTISCSGSSSNIGSNYVNWYQQLPGTAPKLLIYGDYQRPSGVPDRFSGSKSGTSASLAISGLRSEDEADYYCATRDDSLSGSVVFGTGTKLTVLGGGGGSGGGGSGGGGSEVQLVQSGAEVKKPGESLKISCKGSGYGFTSYWIGWVRQMPGKGLEWMGIIHPDDSDTKYSPSFQGQVTISADKSISTAYLQWSSLKASDTAMYYCASSYLRGLWGGYFDFWGQGTLVTVSSTREEDLKNVFPPEVAVFEPSEAEISHTQKATLVCLATGFYPDHVELSWWVNGKEVHSGVCTDPQPLKEQPALNDSRYCLSSRLRVSATFWQNPRNHFRCQVQFYGLSENDEWTQDRAKPVTQIVSAEAWGRADCGFTSESYQQGVLSATNLSVIGFRILLLKVAGFNLLMTLRLWSSRAKRSGSGVKQTLNFDLLKLAGDVESNPGPSRGHMTEYKPTVRLATRDDVPRAVRTLAAAFADYPATRHTVDPDRHIERVTELQELFLTRVGLDIGKVWVADDGAAVAVWTTPESVEAGAVFAEIGPRMAELSGSRLAAQQQMEGLLAPHRPKEPAWFLATVGVSPDHQGKGLGSAVVLPGVEAAERAGVPAFLETSAPRNLPFYERLGFTVTADVEVPEGPRTWCMTRKPGA

SEQ ID NO: 44482 - protein, 904 aa, synthetic construct
MALPVTALLLPLALLLHAARPLEEASTKGPSVFPLAPSSKSTSGGTAALGCLVKDYFPEPVTVSWNSGALTSGVHTFPAVLQSSGLYSLSSVVTVPSSSLGTQTYICNVNHKPSNTKVDKRVEPKSCPIKTDVITMDPKDNCSKDANDTLLLQLTNTSAYYMYLLLLLKSVVYFAIITCCLLRRTAFCCNGEKSRAKRSGSGATNFSLLKQAGDVEENPGPTSMALPVTALLLPLALLLHAARPELQSVLTQPPSASGTPGQRVTISCSGSSSNIGSNYVNWYQQLPGTAPKLLIYGDYQRPSGVPDRFSGSKSGTSASLAISGLRSEDEADYYCATRDDSLSGSVVFGTGTKLTVLGGGGGSGGGGSGGGGSEVQLVQSGAEVKKPGESLKISCKGSGYGFTSYWIGWVRQMPGKGLEWMGIIHPDDSDTKYSPSFQGQVTISADKSISTAYLQWSSLKASDTAMYYCASSYLRGLWGGYFDFWGQGTLVTVSSTRGQPKANPTVTLFPPSSEELQANKATLVCLISDFYPGAVTVAWKADGSPVKAGVETTKPSKQSNNKYAASSYLSLTPEQWKSHRSYSCQVTHEGSTVEKTVAPTECSEVKTDSTDHVKPKETENTKQPSKSCHKPKAIVHTEKVNMMSLTVLGLRMLFAKTVAVNFLLTAKLFFLRAKRSGSGVKQTLNFDLLKLAGDVESNPGPSRGHMTEYKPTVRLATRDDVPRAVRTLAAAFADYPATRHTVDPDRHIERVTELQELFLTRVGLDIGKVWVADDGAAVAVWTTPESVEAGAVFAEIGPRMAELSGSRLAAQQQMEGLLAPHRPKEPAWFLATVGVSPDHQGKGLGSAVVLPGVEAAERAGVPAFLETSAPRNLPFYERLGFTVTADVEVPEGPRTWCMTRKPGA

SEQ ID NO: 44483 - protein, 882 aa, synthetic construct
MALPVTALLLPLALLLHAARPLEEASTKGPSVFPLAPSSKSTSGGTAALGCLVKDYFPEPVTVSWNSGALTSGVHTFPAVLQSSGLYSLSSVVTVPSSSLGTQTYICNVNHKPSNTKVDKRVEPKSCGRADCGFTSESYQQGVLSATILYEILLGKATLYAVLVSALVLMAMVKRKDSRGRAKRSGSGATNFSLLKQAGDVEENPGPTSMALPVTALLLPLALLLHAARPELQSVLTQPPSASGTPGQRVTISCSGSSSNIGSNYVNWYQQLPGTAPKLLIYGDYQRPSGVPDRFSGSKSGTSASLAISGLRSEDEADYYCATRDDSLSGSVVFGTGTKLTVLGGGGGSGGGGSGGGGSEVQLVQSGAEVKKPGESLKISCKGSGYGFTSYWIGWVRQMPGKGLEWMGIIHPDDSDTKYSPSFQGQVTISADKSISTAYLQWSSLKASDTAMYYCASSYLRGLWGGYFDFWGQGTLVTVSSTRGQPKANPTVTLFPPSSEELQANKATLVCLISDFYPGAVTVAWKADGSPVKAGVETTKPSKQSNNKYAASSYLSLTPEQWKSHRSYSCQVTHEGSTVEKTVAPTECSIPEDTFFPSPESSCDVKLVEKSFETDTNLNFQNLSVIGFRILLLKVAGFNLLMTLRLWSSRAKRSGSGVKQTLNFDLLKLAGDVESNPGPSRGHMTEYKPTVRLATRDDVPRAVRTLAAAFADYPATRHTVDPDRHIERVTELQELFLTRVGLDIGKVWVADDGAAVAVWTTPESVEAGAVFAEIGPRMAELSGSRLAAQQQMEGLLAPHRPKEPAWFLATVGVSPDHQGKGLGSAVVLPGVEAAERAGVPAFLETSAPRNLPFYERLGFTVTADVEVPEGPRTWCMTRKPGA

SEQ ID NO: 44484 - protein, 882 aa, synthetic construct
MALPVTALLLPLALLLHAARPLEEASTKGPSVFPLAPSSKSTSGGTAALGCLVKDYFPEPVTVSWNSGALTSGVHTFPAVLQSSGLYSLSSVVTVPSSSLGTQTYICNVNHKPSNTKVDKRVEPKSCIPEDTFFPSPESSCDVKLVEKSFETDTNLNFQNLSVIGFRILLLKVAGFNLLMTLRLWSSRAKRSGSGATNFSLLKQAGDVEENPGPTSMALPVTALLLPLALLLHAARPELQSVLTQPPSASGTPGQRVTISCSGSSSNIGSNYVNWYQQLPGTAPKLLIYGDYQRPSGVPDRFSGSKSGTSASLAISGLRSEDEADYYCATRDDSLSGSVVFGTGTKLTVLGGGGGSGGGGSGGGGSEVQLVQSGAEVKKPGESLKISCKGSGYGFTSYWIGWVRQMPGKGLEWMGIIHPDDSDTKYSPSFQGQVTISADKSISTAYLQWSSLKASDTAMYYCASSYLRGLWGGYFDFWGQGTLVTVSSTRGQPKANPTVTLFPPSSEELQANKATLVCLISDFYPGAVTVAWKADGSPVKAGVETTKPSKQSNNKYAASSYLSLTPEQWKSHRSYSCQVTHEGSTVEKTVAPTECSGRADCGFTSESYQQGVLSATILYEILLGKATLYAVLVSALVLMAMVKRKDSRGRAKRSGSGVKQTLNFDLLKLAGDVESNPGPSRGHMTEYKPTVRLATRDDVPRAVRTLAAAFADYPATRHTVDPDRHIERVTELQELFLTRVGLDIGKVWVADDGAAVAVWTTPESVEAGAVFAEIGPRMAELSGSRLAAQQQMEGLLAPHRPKEPAWFLATVGVSPDHQGKGLGSAVVLPGVEAAERAGVPAFLETSAPRNLPFYERLGFTVTADVEVPEGPRTWCMTRKPGA

SEQ ID NO: 44485 - protein, 629 aa, synthetic construct
MALPVTALLLPLALLLHAARPELQSVLTQPPSASGTPGQRVTISCSGSSSNIGSNYVNWYQQLPGTAPKLLIYGDYQRPSGVPDRFSGSKSGTSASLAISGLRSEDEADYYCATRDDSLSGSVVFGTGTKLTVLGLEDLKNVFPPEVAVFEPSEAEISHTQKATLVCLATGFYPDHVELSWWVNGKEVHSGVCTDPQPLKEQPALNDSRYCLSSRLRVSATFWQNPRNHFRCQVQFYGLSENDEWTQDRAKPVTQIVSAEAWGRADSGFTSESYQQGVLSATILYEILLGKATLYAVLVSALVLMAMVKRKDSRGRAKRSGSGATNFSLLKQAGDVEENPGPTSMDWIWRILFLVGAATGAHSFEEVQLVQSGAEVKKPGESLKISCKGSGYGFTSYWIGWVRQMPGKGLEWMGIIHPDDSDTKYSPSFQGQVTISADKSISTAYLQWSSLKASDTAMYYCASSYLRGLWGGYFDFWGQGTLVTVSSTRIQNPDPAVYQLRDSKSSDKSVCLFTDFDSQTNVSQSKDSDVYITDKCVLDMRSMDFKSNSAVAWSNKSDFACANAFNNSIIPEDTFFPSPESSSDVKLVEKSFETDTNLNFQNLSVIGFRILLLKVAGFNLLMTLRLWSS

SEQ ID NO: 44486 - protein, 908 aa, synthetic construct
MALPVTALLLPLALLLHAARPEVQLLESGGGLVQPGGSLRLSCAASGRTFSMGWYRQAPGKGLEFVSAITYSGGSPYYADSVKGRFTISRDNSKNTVYLQMNSLRAEDTAVYYCAANPTYGSDWNAENWGQGTLVTVSSGTGGGGSGGGGSGGGGSEFELQSVLTQPPSASGTPGQRVTISCSGSSSNIGSNYVNWYQQLPGTAPKLLIYGDYQRPSGVPDRFSGSKSGTSASLAISGLRSEDEADYYCATRDDSLSGSVVFGTGTKLTVLGLEIQNPDPAVYQLRDSKSSDKSVCLFTDFDSQTNVSQSKDSDVYITDKCVLDMRSMDFKSNSAVAWSNKSDFACANAFNNSIIPEDTFFPSSDVPCDVKLVEKSFETDTNLNFQNLSVIGFRILLLKVAGFNLLMTLRLWSSRAKRSGSGVKQTLNFDLLKLAGDVESNPGPTSTMDWIWRILFLVGAATGTHSGPEVQLVESGGGLVQPGGSLRLSCAASGRTFTMGWYRQAPGKEREFVAAISLSPTLAYYADSVKGRFTISRDNSKNTVVLQMNSLRAEDTALYYCAADRKSVMSIRPDYWGQGTLVTVSSGSGGGGSGGGGSGGGGSFEEVQLVQSGAEVKKPGESLKISCKGSGYGFTSYWIGWVRQMPGKGLEWMGIIHPDDSDTKYSPSFQGQVTISADKSISTAYLQWSSLKASDTAMYYCASSYLRGLWGGYFDFWGQGTLVTVSSTREDLKNVFPPEVAVFEPSKAEIAHTQKATLVCLATGFYPDHVELSWWVNGKEVHSGVCTDPQPLKEQPALNDSRYCLSSRLRVSATFWQNPRNHFRCQVQFYGLSENDEWTQDRAKPVTQIVSAEAWGRADCGITSASYHQGVLSATILYEILLGKATLYAVLVSALVLMAMVKRKDSRG

SEQ ID NO: 44487 - protein, 908 aa, synthetic construct
MALPVTALLLPLALLLHAARPEVQLVESGGGLVQAGGSLRLSCAASGRTFSMGWFRQAPGKEREFVAAITYSGGSPYYADSVKGRFTISRDNAKNTVYLQMNSLKPEDTAVYYCAANPTYGSDWNAENWGQGTQVTVSSGTGGGGSGGGGSGGGGSEFELQSVLTQPPSASGTPGQRVTISCSGSSSNIGSNYVNWYQQLPGTAPKLLIYGDYQRPSGVPDRFSGSKSGTSASLAISGLRSEDEADYYCATRDDSLSGSVVFGTGTKLTVLGLEIQNPDPAVYQLRDSKSSDKSVCLFTDFDSQTNVSQSKDSDVYITDKCVLDMRSMDFKSNSAVAWSNKSDFACANAFNNSIIPEDTFFPSSDVPCDVKLVEKSFETDTNLNFQNLSVIGFRILLLKVAGFNLLMTLRLWSSRAKRSGSGVKQTLNFDLLKLAGDVESNPGPTSTMDWIWRILFLVGAATGAHSGPEVQLVESGGGLVQPGGSLRLSCAASGRTFTMGWYRQAPGKEREFVAAISLSPTLAYYADSVKGRFTISRDNSKNTVVLQMNSLRAEDTALYYCAADRKSVMSIRPDYWGQGTLVTVSSGSGGGGSGGGGSGGGGSFEEVQLVQSGAEVKKPGESLKISCKGSGYGFTSYWIGWVRQMPGKGLEWMGIIHPDDSDTKYSPSFQGQVTISADKSISTAYLQWSSLKASDTAMYYCASSYLRGLWGGYFDFWGQGTLVTVSSTREDLKNVFPPEVAVFEPSKAEIAHTQKATLVCLATGFYPDHVELSWWVNGKEVHSGVCTDPQPLKEQPALNDSRYCLSSRLRVSATFWQNPRNHFRCQVQFYGLSENDEWTQDRAKPVTQIVSAEAWGRADCGITSASYHQGVLSATILYEILLGKATLYAVLVSALVLMAMVKRKDSRG

SEQ ID NO: 44488 - protein, 905 aa, synthetic construct
MALPVTALLLPLALLLHAARPEVQLVESGGGLVQAGGSLRLSCAASGRTFSMGWFRQAPGKEREFVAAITYSGGSPYYADSVKGRFTISRDNAKNTVYLQMNSLKPEDTAVYYCAANPTYGSDWNAENWGQGTQVTVSSGTGGGGSGGGGSGGGGSEFELQSVLTQPPSASGTPGQRVTISCSGSSSNIGSNYVNWYQQLPGTAPKLLIYGDYQRPSGVPDRFSGSKSGTSASLAISGLRSEDEADYYCATRDDSLSGSVVFGTGTKLTVLGLEDLKNVFPPEVAVFEPSEAEISHTQKATLVCLATGFYPDHVELSWWVNGKEVHSGVCTDPQPLKEQPALNDSRYCLSSRLRVSATFWQNPRNHFRCQVQFYGLSENDEWTQDRAKPVTQIVSAEAWGRADCGFTSESYQQGVLSATILYEILLGKATLYAVLVSALVLMAMVKRKDSRGRAKRSGSGATNFSLLKQAGDVEENPGPTSATMDWIWRILFLVGAATGAHSGPEVQLVESGGGLVQAGGSLRLSCAASGRTFTMGWFRQAPGKEREFVAAISLSPTLAYYADSVKGRFTISRDNAKNTVVLQMNSLKPEDTALYYCAADRKSVMSIRPDYWGQGTQVTVSSGSGGGGSGGGGSGGGGSFEEVQLVQSGAEVKKPGESLKISCKGSGYGFTSYWIGWVRQMPGKGLEWMGIIHPDDSDTKYSPSFQGQVTISADKSISTAYLQWSSLKASDTAMYYCASSYLRGLWGGYFDFWGQGTLVTVSSTRIQNPDPAVYQLRDSKSSDKSVCLFTDFDSQTNVSQSKDSDVYITDKCVLDMRSMDFKSNSAVAWSNKSDFACANAFNNSIIPEDTFFPSPESSCDVKLVEKSFETDTNLNFQNLSVIGFRILLLKVAGFNLLMTLRLWSS

SEQ ID NO: 44489 - protein, 776 aa, synthetic construct
MALPVTALLLPLALLLHAARPEVQLVESGGGLVQPGGSLRLSCEASGFASDDYIIGWFRQAPGKEREGVSCISSKYANTVYTDSVKGRFRLSRGTAKNTVYLQMSALKPEDTAVYYCAMDSRRVTCPEISTMHRNFDSWGQGTLVTVSSGTGGGGSGGGGSGGGGSEFELQSVLTQPPSASGTPGQRVTISCSGSSSNIGSNYVNWYQQLPGTAPKLLIYGDYQRPSGVPDRFSGSKSGTSASLAISGLRSEDEADYYCATRDDSLSGSVVFGTGTKLTVLGLEDLKNVFPPEVAVFEPSKAEIAHTQKATLVCLATGFYPDHVELSWWVNGKEVHSGVCTDPQPLKEQPALNDSRYCLSSRLRVSATFWQNPRNHFRCQVQFYGLSENDEWTQDRAKPVTQIVSAEAWGRADCGITSASYHQGVLSATILYEILLGKATLYAVLVSALVLMAMVKRKDSRGRAKRSGSGATNFSLLKQAGDVEENPGPTSMDWIWRILFLVGAATGAHSFEEVQLVQSGAEVKKPGESLKISCKGSGYGFTSYWIGWVRQMPGKGLEWMGIIHPDDSDTKYSPSFQGQVTISADKSISTAYLQWSSLKASDTAMYYCASSYLRGLWGGYFDFWGQGTLVTVSSTRIQNPDPAVYQLRDSKSSDKSVCLFTDFDSQTNVSQSKDSDVYITDKCVLDMRSMDFKSNSAVAWSNKSDFACANAFNNSIIPEDTFFPSSDVPCDVKLVEKSFETDTNLNFQNLSVIGFRILLLKVAGFNLLMTLRLWSS

SEQ ID NO: 44490 - protein, 767 aa, synthetic construct
MALPVTALLLPLALLLHAARPELQSVLTQPPSASGTPGQRVTISCSGSSSNIGSNYVNWYQQLPGTAPKLLIYGDYQRPSGVPDRFSGSKSGTSASLAISGLRSEDEADYYCATRDDSLSGSVVFGTGTKLTVLGLEDLKNVFPPEVAVFEPSEAEISHTQKATLVCLATGFYPDHVELSWWVNGKEVHSGVCTDPQPLKEQPALNDSRYCLSSRLRVSATFWQNPRNHFRCQVQFYGLSENDEWTQDRAKPVTQIVSAEAWGRADCGFTSESYQQGVLSATILYEILLGKATLYAVLVSALVLMAMVKRKDSRGRAKRSGSGATNFSLLKQAGDVEENPGPTSTMDWIWRILFLVGAATGAHSGPEVQLVESGGGLVQPGGSLRLSCAASGRTFTMGWYRQAPGKEREFVAAISLSPTLAYYADSVKGRFTISRDNSKNTVVLQMNSLRAEDTALYYCAADRKSVMSIRPDYWGQGTLVTVSSGSGGGGSGGGGSGGGGSFEEVQLVQSGAEVKKPGESLKISCKGSGYGFTSYWIGWVRQMPGKGLEWMGIIHPDDSDTKYSPSFQGQVTISADKSISTAYLQWSSLKASDTAMYYCASSYLRGLWGGYFDFWGQGTLVTVSSTRIQNPDPAVYQLRDSKSSDKSVCLFTDFDSQTNVSQSKDSDVYITDKCVLDMRSMDFKSNSAVAWSNKSDFACANAFNNSIIPEDTFFPSPESSCDVKLVEKSFETDTNLNFQNLSVIGFRILLLKVAGFNLLMTLRLWSS

SEQ ID NO: 44491 - protein, 774 aa, synthetic construct
MALPVTALLLPLALLLHAARPELQSVLTQPPSASGTPGQRVTISCSGSSSNIGSNYVNWYQQLPGTAPKLLIYGDYQRPSGVPDRFSGSKSGTSASLAISGLRSEDEADYYCATRDDSLSGSVVFGTGTKLTVLGLEDLKNVFPPEVAVFEPSEAEISHTQKATLVCLATGFYPDHVELSWWVNGKEVHSGVCTDPQPLKEQPALNDSRYCLSSRLRVSATFWQNPRNHFRCQVQFYGLSENDEWTQDRAKPVTQIVSAEAWGRADCGFTSESYQQGVLSATILYEILLGKATLYAVLVSALVLMAMVKRKDSRGRAKRSGSGATNFSLLKQAGDVEENPGPTSTMDWIWRILFLVGAATGAHSGPQVQLVESGGGLVQPGGSLRLSCAASGNINSRNCMGWFRQAPGKGREGVAAIGQVTGRTYYVDSVKGRFTISLDNSKNTLYLQMNSLRAEDTAVYYCAAAPGCLLSALRSADYRNWGQGTLVTVSSGSGGGGSGGGGSGGGGSFEEVQLVQSGAEVKKPGESLKISCKGSGYGFTSYWIGWVRQMPGKGLEWMGIIHPDDSDTKYSPSFQGQVTISADKSISTAYLQWSSLKASDTAMYYCASSYLRGLWGGYFDFWGQGTLVTVSSTRIQNPDPAVYQLRDSKSSDKSVCLFTDFDSQTNVSQSKDSDVYITDKCVLDMRSMDFKSNSAVAWSNKSDFACANAFNNSIIPEDTFFPSPESSCDVKLVEKSFETDTNLNFQNLSVIGFRILLLKVAGFNLLMTLRLWSS

SEQ ID NO: 44492 - protein, 774 aa, synthetic construct
MALPVTALLLPLALLLHAARPELQSVLTQPPSASGTPGQRVTISCSGSSSNIGSNYVNWYQQLPGTAPKLLIYGDYQRPSGVPDRFSGSKSGTSASLAISGLRSEDEADYYCATRDDSLSGSVVFGTGTKLTVLGLEDLKNVFPPEVAVFEPSEAEISHTQKATLVCLATGFYPDHVELSWWVNGKEVHSGVCTDPQPLKEQPALNDSRYCLSSRLRVSATFWQNPRNHFRCQVQFYGLSENDEWTQDRAKPVTQIVSAEAWGRADCGFTSESYQQGVLSATILYEILLGKATLYAVLVSALVLMAMVKRKDSRGRAKRSGSGATNFSLLKQAGDVEENPGPTSTMDWIWRILFLVGAATGAHSGPQVQLVESGGGSVQAGGSLRLSCGASGNISSRNCMGWFRQAPGKEREGVAAIGQVTGRSYYVDSVKGRFTISLDNAKNTLYLQMNTLKPEDTAMYYCAAAPGCLLSALRSADYRNWGQGTQVTVSSGSGGGGSGGGGSGGGGSFEEVQLVQSGAEVKKPGESLKISCKGSGYGFTSYWIGWVRQMPGKGLEWMGIIHPDDSDTKYSPSFQGQVTISADKSISTAYLQWSSLKASDTAMYYCASSYLRGLWGGYFDFWGQGTLVTVSSTRIQNPDPAVYQLRDSKSSDKSVCLFTDFDSQTNVSQSKDSDVYITDKCVLDMRSMDFKSNSAVAWSNKSDFACANAFNNSIIPEDTFFPSPESSCDVKLVEKSFETDTNLNFQNLSVIGFRILLLKVAGFNLLMTLRLWSS

SEQ ID NO: 44493 - protein, 915 aa, synthetic construct
MALPVTALLLPLALLLHAARPEVQLVESGGGLVQAGGSLRLSCAASGRTFSMGWFRQAPGKEREFVAAITYSGGSPYYADSVKGRFTISRDNAKNTVYLQMNSLKPEDTAVYYCAANPTYGSDWNAENWGQGTQVTVSSGTGGGGSGGGGSGGGGSEFELQSVLTQPPSASGTPGQRVTISCSGSSSNIGSNYVNWYQQLPGTAPKLLIYGDYQRPSGVPDRFSGSKSGTSASLAISGLRSEDEADYYCATRDDSLSGSVVFGTGTKLTVLGLEIQNPDPAVYQLRDSKSSDKSVCLFTDFDSQTNVSQSKDSDVYITDKCVLDMRSMDFKSNSAVAWSNKSDFACANAFNNSIIPEDTFFPSSDVPCDVKLVEKSFETDTNLNFQNLSVIGFRILLLKVAGFNLLMTLRLWSSRAKRSGSGVKQTLNFDLLKLAGDVESNPGPTSTMDWIWRILFLVGAATGAHSGPQVQLVESGGGSVQAGGSLRLSCGASGNISSRNCMGWFRQAPGKEREGVAAIGQVTGRSYYVDSVKGRFTISLDNAKNTLYLQMNTLKPEDTAMYYCAAAPGCLLSALRSADYRNWGQGTQVTVSSGSGGGGSGGGGSGGGGSFEEVQLVQSGAEVKKPGESLKISCKGSGYGFTSYWIGWVRQMPGKGLEWMGIIHPDDSDTKYSPSFQGQVTISADKSISTAYLQWSSLKASDTAMYYCASSYLRGLWGGYFDFWGQGTLVTVSSTREDLKNVFPPEVAVFEPSKAEIAHTQKATLVCLATGFYPDHVELSWWVNGKEVHSGVCTDPQPLKEQPALNDSRYCLSSRLRVSATFWQNPRNHFRCQVQFYGLSENDEWTQDRAKPVTQIVSAEAWGRADCGITSASYHQGVLSATILYEILLGKATLYAVLVSALVLMAMVKRKDSRG

SEQ ID NO: 44494 - protein, 912 aa, synthetic construct
MALPVTALLLPLALLLHAARPQVQLVESGGGSVQAGGSLRLSCGASGNISSRNCMGWFRQAPGKEREGVAAIGQVTGRSYYVDSVKGRFTISLDNAKNTLYLQMNTLKPEDTAMYYCAAAPGCLLSALRSADYRNWGQGTQVTVSSGTGGGGSGGGGSGGGGSEFELQSVLTQPPSASGTPGQRVTISCSGSSSNIGSNYVNWYQQLPGTAPKLLIYGDYQRPSGVPDRFSGSKSGTSASLAISGLRSEDEADYYCATRDDSLSGSVVFGTGTKLTVLGLEDLKNVFPPEVAVFEPSEAEISHTQKATLVCLATGFYPDHVELSWWVNGKEVHSGVCTDPQPLKEQPALNDSRYCLSSRLRVSATFWQNPRNHFRCQVQFYGLSENDEWTQDRAKPVTQIVSAEAWGRADCGFTSESYQQGVLSATILYEILLGKATLYAVLVSALVLMAMVKRKDSRGRAKRSGSGATNFSLLKQAGDVEENPGPTSATMDWIWRILFLVGAATGAHSGPEVQLVESGGGLVQAGGSLRLSCAASGRTFTMGWFRQAPGKEREFVAAISLSPTLAYYADSVKGRFTISRDNAKNTVVLQMNSLKPEDTALYYCAADRKSVMSIRPDYWGQGTQVTVSSGSGGGGSGGGGSGGGGSFEEVQLVQSGAEVKKPGESLKISCKGSGYGFTSYWIGWVRQMPGKGLEWMGIIHPDDSDTKYSPSFQGQVTISADKSISTAYLQWSSLKASDTAMYYCASSYLRGLWGGYFDFWGQGTLVTVSSTRIQNPDPAVYQLRDSKSSDKSVCLFTDFDSQTNVSQSKDSDVYITDKCVLDMRSMDFKSNSAVAWSNKSDFACANAFNNSIIPEDTFFPSPESSCDVKLVEKSFETDTNLNFQNLSVIGFRILLLKVAGFNLLMTLRLWSS

SEQ ID NO: 44495 - protein, 775 aa, synthetic construct
MALPVTALLLPLALLLHAARPQVQLVESGGGSVQAGGSLRLSCGASGNISSRNCMGWFRQAPGKEREGVAAIGQVTGRSYYVDSVKGRFTISLDNAKNTLYLQMNTLKPEDTAMYYCAAAPGCLLSALRSADYRNWGQGTQVTVSSGTGGGGSGGGGSGGGGSEFELQSVLTQPPSASGTPGQRVTISCSGSSSNIGSNYVNWYQQLPGTAPKLLIYGDYQRPSGVPDRFSGSKSGTSASLAISGLRSEDEADYYCATRDDSLSGSVVFGTGTKLTVLGLEDLKNVFPPEVAVFEPSEAEISHTQKATLVCLATGFYPDHVELSWWVNGKEVHSGVCTDPQPLKEQPALNDSRYCLSSRLRVSATFWQNPRNHFRCQVQFYGLSENDEWTQDRAKPVTQIVSAEAWGRADCGFTSESYQQGVLSATILYEILLGKATLYAVLVSALVLMAMVKRKDSRGRAKRSGSGATNFSLLKQAGDVEENPGPTSATMDWIWRILFLVGAATGAHSFEEVQLVQSGAEVKKPGESLKISCKGSGYGFTSYWIGWVRQMPGKGLEWMGIIHPDDSDTKYSPSFQGQVTISADKSISTAYLQWSSLKASDTAMYYCASSYLRGLWGGYFDFWGQGTLVTVSSTRIQNPDPAVYQLRDSKSSDKSVCLFTDFDSQTNVSQSKDSDVYITDKCVLDMRSMDFKSNSAVAWSNKSDFACANAFNNSIIPEDTFFPSPESSCDVKLVEKSFETDTNLNFQNLSVIGFRILLLKVAGFNLLMTLRLWSS

SEQ ID NO: 44496 - protein, 775 aa, synthetic construct
MALPVTALLLPLALLLHAARPQVQLVESGGGVVQPGGSLRLSCAASGLSFSTYTVAWFRQAPGKGLEGVAAIPYTSQHMVYTDSVRGRFTISRDNSKNTLYLQMNSLRAEDTAVYYCATDRRPGTSMLAINGYNRWGQGTTVTVSSGTGGGGSGGGGSGGGGSEFELQSVLTQPPSASGTPGQRVTISCSGSSSNIGSNYVNWYQQLPGTAPKLLIYGDYQRPSGVPDRFSGSKSGTSASLAISGLRSEDEADYYCATRDDSLSGSVVFGTGTKLTVLGLEDLKNVFPPEVAVFEPSEAEISHTQKATLVCLATGFYPDHVELSWWVNGKEVHSGVCTDPQPLKEQPALNDSRYCLSSRLRVSATFWQNPRNHFRCQVQFYGLSENDEWTQDRAKPVTQIVSAEAWGRADCGFTSESYQQGVLSATILYEILLGKATLYAVLVSALVLMAMVKRKDSRGRAKRSGSGATNFSLLKQAGDVEENPGPTSATMDWIWRILFLVGAATGAHSFEEVQLVQSGAEVKKPGESLKISCKGSGYGFTSYWIGWVRQMPGKGLEWMGIIHPDDSDTKYSPSFQGQVTISADKSISTAYLQWSSLKASDTAMYYCASSYLRGLWGGYFDFWGQGTLVTVSSTRIQNPDPAVYQLRDSKSSDKSVCLFTDFDSQTNVSQSKDSDVYITDKCVLDMRSMDFKSNSAVAWSNKSDFACANAFNNSIIPEDTFFPSPESSCDVKLVEKSFETDTNLNFQNLSVIGFRILLLKVAGFNLLMTLRLWSS

SEQ ID NO: 44497 - protein, 774 aa, synthetic construct
MALPVTALLLPLALLLHAARPELQSVLTQPPSASGTPGQRVTISCSGSSSNIGSNYVNWYQQLPGTAPKLLIYGDYQRPSGVPDRFSGSKSGTSASLAISGLRSEDEADYYCATRDDSLSGSVVFGTGTKLTVLGLEDLKNVFPPEVAVFEPSEAEISHTQKATLVCLATGFYPDHVELSWWVNGKEVHSGVCTDPQPLKEQPALNDSRYCLSSRLRVSATFWQNPRNHFRCQVQFYGLSENDEWTQDRAKPVTQIVSAEAWGRADCGFTSESYQQGVLSATILYEILLGKATLYAVLVSALVLMAMVKRKDSRGRAKRSGSGATNFSLLKQAGDVEENPGPTSTMDWIWRILFLVGAATGAHSGPQVQLVESGGGVVQPGGSLRLSCAASGLSFSTYTVAWFRQAPGKGLEGVAAIPYTSQHMVYTDSVRGRFTISRDNSKNTLYLQMNSLRAEDTAVYYCATDRRPGTSMLAINGYNRWGQGTTVTVSSGSGGGGSGGGGSGGGGSFEEVQLVQSGAEVKKPGESLKISCKGSGYGFTSYWIGWVRQMPGKGLEWMGIIHPDDSDTKYSPSFQGQVTISADKSISTAYLQWSSLKASDTAMYYCASSYLRGLWGGYFDFWGQGTLVTVSSTRIQNPDPAVYQLRDSKSSDKSVCLFTDFDSQTNVSQSKDSDVYITDKCVLDMRSMDFKSNSAVAWSNKSDFACANAFNNSIIPEDTFFPSPESSCDVKLVEKSFETDTNLNFQNLSVIGFRILLLKVAGFNLLMTLRLWSS

SEQ ID NO: 44498 - protein, 776 aa, synthetic construct
MALPVTALLLPLALLLHAARPELQSVLTQPPSASGTPGQRVTISCSGSSSNIGSNYVNWYQQLPGTAPKLLIYGDYQRPSGVPDRFSGSKSGTSASLAISGLRSEDEADYYCATRDDSLSGSVVFGTGTKLTVLGLEDLKNVFPPEVAVFEPSEAEISHTQKATLVCLATGFYPDHVELSWWVNGKEVHSGVCTDPQPLKEQPALNDSRYCLSSRLRVSATFWQNPRNHFRCQVQFYGLSENDEWTQDRAKPVTQIVSAEAWGRADCGFTSESYQQGVLSATILYEILLGKATLYAVLVSALVLMAMVKRKDSRGRAKRSGSGATNFSLLKQAGDVEENPGPTSTMDWIWRILFLVGAATGAHSGPEVQLVESGGGSVQAGGSLRLSCAASGYTYSINCMGWFRQAPGKEREGVAAISTGGGRTDYRDSVKGRFTISQDNAKNTVYLQMNSLKPEDTAMYYCAGKTTYPGYGCGLGRSAYNYWGQGTQVTVSSGSGGGGSGGGGSGGGGSFEEVQLVQSGAEVKKPGESLKISCKGSGYGFTSYWIGWVRQMPGKGLEWMGIIHPDDSDTKYSPSFQGQVTISADKSISTAYLQWSSLKASDTAMYYCASSYLRGLWGGYFDFWGQGTLVTVSSTRIQNPDPAVYQLRDSKSSDKSVCLFTDFDSQTNVSQSKDSDVYITDKCVLDMRSMDFKSNSAVAWSNKSDFACANAFNNSIIPEDTFFPSPESSCDVKLVEKSFETDTNLNFQNLSVIGFRILLLKVAGFNLLMTLRLWSS

SEQ ID NO: 44499 - protein, 629 aa, synthetic construct
MALPVTALLLPLALLLHAARPELQSVLTQPPSASGTPGQRVTISCSGSSSNIGSNYVNWYQQLPGTAPKLLIYGDYQRPSGVPDRFSGSKSGTSASLAISGLRSEDEADYYCATRDDSLSGSVVFGTGTKLTVLGLEDLKHVFPPEVAVFEPSDAEIWHTQKATLVCLATGFYPDHVELSWWVNGKEVHSGVSTDPQPLKEQPALNDSRYCLSSRLRVSATFWQNPRNHFRCQVQFYGLSENDEWTQDRAKPVTQIVSAEAWGRADCGFTSESYQQGVLSATILYEILLGKATLYAVLVSALVLMAMVKRKDSRGRAKRSGSGATNFSLLKQAGDVEENPGPTSMDWIWRILFLVGAATGAHSFEEVQLVQSGAEVKKPGESLKISCKGSGYGFTSYWIGWVRQMPGKGLEWMGIIHPDDSDTKYSPSFQGQVTISADKSISTAYLQWSSLKASDTAMYYCASSYLRGLWGGYFDFWGQGTLVTVSSTRIQNPDPAVYQLRDSKSSDKSVCLFTDFDSQTNVSQSKDSDVYITDKTVLDMRSMDFKSNSAVAWSSKSDFACANAFNNSIIPEDTFFPSPEMACDVKLVEKSFETDTNLNFQNLLVIWLRILLLKVAGFNLLMTLRLWSS

SEQ ID NO: 44500 - protein, 629 aa, synthetic construct
MALPVTALLLPLALLLHAARPELQSVLTQPPSASGTPGQRVTISCSGSSSNIGSNYVNWYQQLPGTAPKLLIYGDYQRPSGVPDRFSGSKSGTSASLAISGLRSEDEADYYCATRDDSLSGSVVFGTGTKLTVLGLEDLKHVFPPEVAVFEPSDAEIWHTQKATLVCLATGFYPDHVELSWWVNGKEVHSGVSTDPQPLKEQPALNDSRYCLSSRLRVSATFWQNPRNHFRCQVQFYGLSENDEWTQDRAKPVTQIVSAEAWGRADCGFTSESYQQGVLSATILYEILLGKATLYAVLVSALVLMAMVKRKDSRGRAKRSGSGATNFSLLKQAGDVEENPGPTSMDWIWRILFLVGAATGAHSFEEVQLVQSGAEVKKPGESLKISCKGSGYGFTSYWIGWVRQMPGKGLEWMGIIHPDDSDTKYSPSFQGQVTISADKSISTAYLQWSSLKASDTAMYYCASSYLRGLWGGYFDFWGQGTLVTVSSTRIQNPDPAVYQLRDSKSSDKSVCLFTDFDSQTNVSQSKDSDVYITDKTVLDMRSMDFKSNSAVAWSTKSDFACANAFNNSIIPEDTFFPSPEVVCDVKLVEKSFETDTNLNFQNLVVIGARILLLKVAGFNLLMTLRLWSS

SEQ ID NO: 44501 - protein, 629 aa, synthetic construct
MALPVTALLLPLALLLHAARPELQSVLTQPPSASGTPGQRVTISCSGSSSNIGSNYVNWYQQLPGTAPKLLIYGDYQRPSGVPDRFSGSKSGTSASLAISGLRSEDEADYYCATRDDSLSGSVVFGTGTKLTVLGLEDLKNVFPPEVAVFEPSKAEISRTQKATLVCLATGFYPPHVELSWWVNGKEVHDGVCTDPQPLKEQPALNDSRYCLSSRLRVSATFWQNPRNHFRCQVQFYGLSENDEWTQDRAKPVTQIVSAEAWGRADCGFTSESYQQGVLSATILYEILLGKATLYAVLVSALVLMAMVKRKDSRGRAKRSGSGATNFSLLKQAGDVEENPGPTSMDWIWRILFLVGAATGAHSFEEVQLVQSGAEVKKPGESLKISCKGSGYGFTSYWIGWVRQMPGKGLEWMGIIHPDDSDTKYSPSFQGQVTISADKSISTAYLQWSSLKASDTAMYYCASSYLRGLWGGYFDFWGQGTLVTVSSTRIQNPDPAVYQLRDSKSSDKFVCLFTDFDSQINVSQSKDSDVYITDKCVLDMRSMDFKSNSAVAWSNKSDFTCANAFNNSIIPEDTFFPSPESSCDVKLVEKSFETDTNLNFQNLSVIGFRILLLKVAGFNLLMTLRLWSS

SEQ ID NO: 44502 - protein, 771 aa, synthetic construct
MALPVTALLLPLALLLHAARPELQSVLTQPPSASGTPGQRVTISCSGSSSNIGSNYVNWYQQLPGTAPKLLIYGDYQRPSGVPDRFSGSKSGTSASLAISGLRSEDEADYYCATRDDSLSGSVVFGTGTKLTVLGLEDLKNVFPPEVAVFEPSEAEISHTQKATLVCLATGFYPDHVELSWWVNGKEVHSGVCTDPQPLKEQPALNDSRYCLSSRLRVSATFWQNPRNHFRCQVQFYGLSENDEWTQDRAKPVTQIVSAEAWGRADCGFTSESYQQGVLSATILYEILLGKATLYAVLVSALVLMAMVKRKDSRGRAKRSGSGATNFSLLKQAGDVEENPGPTSTMDWIWRILFLVGAATGAHSGPQVQLQESGPGLVKPSQTLSLTCTVSGASITTGEYYWNWFRQPPGKGLEWMGAIAASGSTTYSPSFESRTSISRDTSKNQFSLKLSSVTAADTAVYYCGRSFGVAAVTTGQNRGQGTLVTVSSGSGGGGSGGGGSGGGGSFEEVQLVQSGAEVKKPGESLKISCKGSGYGFTSYWIGWVRQMPGKGLEWMGIIHPDDSDTKYSPSFQGQVTISADKSISTAYLQWSSLKASDTAMYYCASSYLRGLWGGYFDFWGQGTLVTVSSTRIQNPDPAVYQLRDSKSSDKSVCLFTDFDSQTNVSQSKDSDVYITDKCVLDMRSMDFKSNSAVAWSNKSDFACANAFNNSIIPEDTFFPSPESSCDVKLVEKSFETDTNLNFQNLSVIGFRILLLKVAGFNLLMTLRLWSS

SEQ ID NO: 44503 - protein, 912 aa, synthetic construct
MALPVTALLLPLALLLHAARPQVQLQESGPGLVKPSQTLSLTCTVSGGSITTGEFYWNWFRQPPGKGLEWMGAIAASGSTTYSPSFESRTSISRDTSKNQFSLKLSSVTAADTAVYYCGRSFGVAAVTTGQNRGQGTLVTVSSGTGGGGSGGGGSGGGGSEFELQSVLTQPPSASGTPGQRVTISCSGSSSNIGSNYVNWYQQLPGTAPKLLIYGDYQRPSGVPDRFSGSKSGTSASLAISGLRSEDEADYYCATRDDSLSGSVVFGTGTKLTVLGLEIQNPDPAVYQLRDSKSSDKSVCLFTDFDSQTNVSQSKDSDVYITDKCVLDMRSMDFKSNSAVAWSNKSDFACANAFNNSIIPEDTFFPSSDVPCDVKLVEKSFETDTNLNFQNLSVIGFRILLLKVAGFNLLMTLRLWSSRAKRSGSGVKQTLNFDLLKLAGDVESNPGPTSTMDWIWRILFLVGAATGAHSGPEVQLVESGGGLVQPGGSLRLSCAASGRTFTMGWYRQAPGKEREFVAAISLSPTLAYYADSVKGRFTISRDNSKNTVVLQMNSLRAEDTALYYCAADRKSVMSIRPDYWGQGTLVTVSSGSGGGGSGGGGSGGGGSFEEVQLVQSGAEVKKPGESLKISCKGSGYGFTSYWIGWVRQMPGKGLEWMGIIHPDDSDTKYSPSFQGQVTISADKSISTAYLQWSSLKASDTAMYYCASSYLRGLWGGYFDFWGQGTLVTVSSTREDLKNVFPPEVAVFEPSKAEIAHTQKATLVCLATGFYPDHVELSWWVNGKEVHSGVCTDPQPLKEQPALNDSRYCLSSRLRVSATFWQNPRNHFRCQVQFYGLSENDEWTQDRAKPVTQIVSAEAWGRADCGITSASYHQGVLSATILYEILLGKATLYAVLVSALVLMAMVKRKDSRG

SEQ ID NO: 44504 - protein, 775 aa, synthetic construct
MALPVTALLLPLALLLHAARPQVQLQESGPGLVKPSQTLSLTCTVSGGSITTGEFYWNWFRQPPGKGLEWMGAIAASGSTTYSPSFESRTSISRDTSKNQFSLKLSSVTAADTAVYYCGRSFGVAAVTTGQNRGQGTLVTVSSGTGGGGSGGGGSGGGGSEFELQSVLTQPPSASGTPGQRVTISCSGSSSNIGSNYVNWYQQLPGTAPKLLIYGDYQRPSGVPDRFSGSKSGTSASLAISGLRSEDEADYYCATRDDSLSGSVVFGTGTKLTVLGLEIQNPDPAVYQLRDSKSSDKSVCLFTDFDSQTNVSQSKDSDVYITDKCVLDMRSMDFKSNSAVAWSNKSDFACANAFNNSIIPEDTFFPSSDVPCDVKLVEKSFETDTNLNFQNLSVIGFRILLLKVAGFNLLMTLRLWSSRAKRSGSGVKQTLNFDLLKLAGDVESNPGPTSTMDWIWRILFLVGAATGAHSFEEVQLVQSGAEVKKPGESLKISCKGSGYGFTSYWIGWVRQMPGKGLEWMGIIHPDDSDTKYSPSFQGQVTISADKSISTAYLQWSSLKASDTAMYYCASSYLRGLWGGYFDFWGQGTLVTVSSTREDLKNVFPPEVAVFEPSKAEIAHTQKATLVCLATGFYPDHVELSWWVNGKEVHSGVCTDPQPLKEQPALNDSRYCLSSRLRVSATFWQNPRNHFRCQVQFYGLSENDEWTQDRAKPVTQIVSAEAWGRADCGITSASYHQGVLSATILYEILLGKATLYAVLVSALVLMAMVKRKDSRG

SEQ ID NO: 44505 - protein, 908 aa, synthetic construct
MALPVTALLLPLALLLHAARPEVQLVESGGGLVQAGGSLRLSCAASGRTFSMGWFRQAPGKEREFVAAITYSGGSPYYADSVKGRFTISRDNAKNTVYLQMNSLKPEDTAVYYCAANPTYGSDWNAENWGQGTQVTVSSGTGGGGSGGGGSGGGGSEFELQSVLTQPPSASGTPGQRVTISCSGSSSNIGSNYVNWYQQLPGTAPKLLIYGDYQRPSGVPDRFSGSKSGTSASLAISGLRSEDEADYYCATRDDSLSGSVVFGTGTKLTVLGLEDLKNVFPPEVAVFEPSEAEISHTQKATLVCLATGFYPDHVELSWWVNGKEVHSGVCTDPQPLKEQPALNDSRYCLSSRLRVSATFWQNPRNHFRCQVQFYGLSENDEWTQDRAKPVTQIVSAEAWGRADCGFTSESYQQGVLSATILYEILLGKATLYAVLVSALVLMAMVKRKDSRGRAKRSGSGATNFSLLKQAGDVEENPGPTSTMDWIWRILFLVGAATGAHSGPQVQLQESGPGLVKPSQTLSLTCTVSGASITTGEYYWNWFRQPPGKGLEWMGAIAASGSTTYSPSFESRTSISRDTSKNQFSLKLSSVTAADTAVYYCGRSFGVAAVTTGQNRGQGTLVTVSSGSGGGGSGGGGSGGGGSFEEVQLVQSGAEVKKPGESLKISCKGSGYGFTSYWIGWVRQMPGKGLEWMGIIHPDDSDTKYSPSFQGQVTISADKSISTAYLQWSSLKASDTAMYYCASSYLRGLWGGYFDFWGQGTLVTVSSTRIQNPDPAVYQLRDSKSSDKSVCLFTDFDSQTNVSQSKDSDVYITDKCVLDMRSMDFKSNSAVAWSNKSDFACANAFNNSIIPEDTFFPSPESSCDVKLVEKSFETDTNLNFQNLSVIGFRILLLKVAGFNLLMTLRLWSS

SEQ ID NO: 44506 - protein, 915 aa, synthetic construct
MALPVTALLLPLALLLHAARPEVQLVESGGGLVQAGGSLRLSCAASGRTFSMGWFRQAPGKEREFVAAITYSGGSPYYADSVKGRFTISRDNAKNTVYLQMNSLKPEDTAVYYCAANPTYGSDWNAENWGQGTQVTVSSGTGGGGSGGGGSGGGGSEFELQSVLTQPPSASGTPGQRVTISCSGSSSNIGSNYVNWYQQLPGTAPKLLIYGDYQRPSGVPDRFSGSKSGTSASLAISGLRSEDEADYYCATRDDSLSGSVVFGTGTKLTVLGLEIQNPDPAVYQLRDSKSSDKSVCLFTDFDSQTNVSQSKDSDVYITDKCVLDMRSMDFKSNSAVAWSNKSDFACANAFNNSIIPEDTFFPSSDVPCDVKLVEKSFETDTNLNFQNLSVIGFRILLLKVAGFNLLMTLRLWSSRAKRSGSGVKQTLNFDLLKLAGDVESNPGPTSTMDWIWRILFLVGAATGAHSGPQVQLVESGGGLVQPGGSLRLSCAASGNINSRNCMGWFRQAPGKGREGVAAIGQVTGRTYYVDSVKGRFTISLDNSKNTLYLQMNSLRAEDTAVYYCAAAPGCLLSALRSADYRNWGQGTLVTVSSGSGGGGSGGGGSGGGGSFEEVQLVQSGAEVKKPGESLKISCKGSGYGFTSYWIGWVRQMPGKGLEWMGIIHPDDSDTKYSPSFQGQVTISADKSISTAYLQWSSLKASDTAMYYCASSYLRGLWGGYFDFWGQGTLVTVSSTREDLKNVFPPEVAVFEPSKAEIAHTQKATLVCLATGFYPDHVELSWWVNGKEVHSGVCTDPQPLKEQPALNDSRYCLSSRLRVSATFWQNPRNHFRCQVQFYGLSENDEWTQDRAKPVTQIVSAEAWGRADCGITSASYHQGVLSATILYEILLGKATLYAVLVSALVLMAMVKRKDSRG

SEQ ID NO: 44507 - protein, 911 aa, synthetic construct
MALPVTALLLPLALLLHAARPEVQLVESGGGLVQAGGSLRLSCAASGRTFSMGWFRQAPGKEREFVAAITYSGGSPYYADSVKGRFTISRDNAKNTVYLQMNSLKPEDTAVYYCAANPTYGSDWNAENWGQGTQVTVSSGTGGGGSGGGGSGGGGSEFELQSVLTQPPSASGTPGQRVTISCSGSSSNIGSNYVNWYQQLPGTAPKLLIYGDYQRPSGVPDRFSGSKSGTSASLAISGLRSEDEADYYCATRDDSLSGSVVFGTGTKLTVLGLEDLKNVFPPEVAVFEPSEAEISHTQKATLVCLATGFYPDHVELSWWVNGKEVHSGVCTDPQPLKEQPALNDSRYCLSSRLRVSATFWQNPRNHFRCQVQFYGLSENDEWTQDRAKPVTQIVSAEAWGRADCGFTSESYQQGVLSATILYEILLGKATLYAVLVSALVLMAMVKRKDSRGRAKRSGSGATNFSLLKQAGDVEENPGPTSTMDWIWRILFLVGAATGAHSGPQVQLVESGGGLVQPGGSLRLSCAASGNINSRNCMGWFRQAPGKGREGVAAIGQVTGRTYYVDSVKGRFTISLDNSKNTLYLQMNSLRAEDTAVYYCAAAPGCLLSALRSADYRNWGQGTLVTVSSGSGGGGSGGGGSGGGGSFEEVQLVQSGAEVKKPGESLKISCKGSGYGFTSYWIGWVRQMPGKGLEWMGIIHPDDSDTKYSPSFQGQVTISADKSISTAYLQWSSLKASDTAMYYCASSYLRGLWGGYFDFWGQGTLVTVSSTRIQNPDPAVYQLRDSKSSDKSVCLFTDFDSQTNVSQSKDSDVYITDKCVLDMRSMDFKSNSAVAWSNKSDFACANAFNNSIIPEDTFFPSPESSCDVKLVEKSFETDTNLNFQNLSVIGFRILLLKVAGFNLLMTLRLWSS

SEQ ID NO: 44508 - protein, 911 aa, synthetic construct
MALPVTALLLPLALLLHAARPEVQLVESGGGLVQAGGSLRLSCAASGRTFTMGWFRQAPGKEREFVAAISLSPTLAYYADSVKGRFTISRDNAKNTVVLQMNSLKPEDTALYYCAADRKSVMSIRPDYWGQGTQVTVSSGTGGGGSGGGGSGGGGSEFELQSVLTQPPSASGTPGQRVTISCSGSSSNIGSNYVNWYQQLPGTAPKLLIYGDYQRPSGVPDRFSGSKSGTSASLAISGLRSEDEADYYCATRDDSLSGSVVFGTGTKLTVLGLEDLKNVFPPEVAVFEPSEAEISHTQKATLVCLATGFYPDHVELSWWVNGKEVHSGVCTDPQPLKEQPALNDSRYCLSSRLRVSATFWQNPRNHFRCQVQFYGLSENDEWTQDRAKPVTQIVSAEAWGRADCGFTSESYQQGVLSATILYEILLGKATLYAVLVSALVLMAMVKRKDSRGRAKRSGSGATNFSLLKQAGDVEENPGPTSTMDWIWRILFLVGAATGAHSGPQVQLVESGGGLVQPGGSLRLSCAASGNINSRNCMGWFRQAPGKGREGVAAIGQVTGRTYYVDSVKGRFTISLDNSKNTLYLQMNSLRAEDTAVYYCAAAPGCLLSALRSADYRNWGQGTLVTVSSGSGGGGSGGGGSGGGGSFEEVQLVQSGAEVKKPGESLKISCKGSGYGFTSYWIGWVRQMPGKGLEWMGIIHPDDSDTKYSPSFQGQVTISADKSISTAYLQWSSLKASDTAMYYCASSYLRGLWGGYFDFWGQGTLVTVSSTRIQNPDPAVYQLRDSKSSDKSVCLFTDFDSQTNVSQSKDSDVYITDKCVLDMRSMDFKSNSAVAWSNKSDFACANAFNNSIIPEDTFFPSPESSCDVKLVEKSFETDTNLNFQNLSVIGFRILLLKVAGFNLLMTLRLWSS

SEQ ID NO: 44509 - protein, 915 aa, synthetic construct
MALPVTALLLPLALLLHAARPQVQLQESGPGLVKPSQTLSLTCTVSGGSITTGEFYWNWFRQPPGKGLEWMGAIAASGSTTYSPSFESRTSISRDTSKNQFSLKLSSVTAADTAVYYCGRSFGVAAVTTGQNRGQGTLVTVSSGTGGGGSGGGGSGGGGSEFELQSVLTQPPSASGTPGQRVTISCSGSSSNIGSNYVNWYQQLPGTAPKLLIYGDYQRPSGVPDRFSGSKSGTSASLAISGLRSEDEADYYCATRDDSLSGSVVFGTGTKLTVLGLEDLKNVFPPEVAVFEPSEAEISHTQKATLVCLATGFYPDHVELSWWVNGKEVHSGVCTDPQPLKEQPALNDSRYCLSSRLRVSATFWQNPRNHFRCQVQFYGLSENDEWTQDRAKPVTQIVSAEAWGRADCGFTSESYQQGVLSATILYEILLGKATLYAVLVSALVLMAMVKRKDSRGRAKRSGSGATNFSLLKQAGDVEENPGPTSTMDWIWRILFLVGAATGAHSGPQVQLVESGGGLVQPGGSLRLSCAASGNINSRNCMGWFRQAPGKGREGVAAIGQVTGRTYYVDSVKGRFTISLDNSKNTLYLQMNSLRAEDTAVYYCAAAPGCLLSALRSADYRNWGQGTLVTVSSGSGGGGSGGGGSGGGGSFEEVQLVQSGAEVKKPGESLKISCKGSGYGFTSYWIGWVRQMPGKGLEWMGIIHPDDSDTKYSPSFQGQVTISADKSISTAYLQWSSLKASDTAMYYCASSYLRGLWGGYFDFWGQGTLVTVSSTRIQNPDPAVYQLRDSKSSDKSVCLFTDFDSQTNVSQSKDSDVYITDKCVLDMRSMDFKSNSAVAWSNKSDFACANAFNNSIIPEDTFFPSPESSCDVKLVEKSFETDTNLNFQNLSVIGFRILLLKVAGFNLLMTLRLWSS

SEQ ID NO: 44510 - protein, 491 aa, synthetic construct
MALPVTALLLPLALLLHAARPDFVMTQSPDSLAVSLGERVTMSCKSSQSLLNSGNQKNYLTWYQQKPGQPPKLLIYWASTRESGVPDRFSGSGSGTDFTLTISSLQAEDVAVYYCQNDYSYPYTFGQGTKLEIKGGGGSGGGGSGGGGSEVQLVQSGAELKKPGASVKVSCKASGYTFTDYYMKWVRQAPGQGLEWIGDIIPSNGATFYNQKFKGRVTITVDKSTSTAYMELSSLRSEDTAVYYCARSHLLRASWFAYWGQGTLVTVSSTRKIEVMYPPPYLDNEKSNGTIIHVKGKHLCPSPLFPGPSKPFWVLVVVGGVLACYSLLVTVAFIIFWVRSKRSRLLHSDYMNMTPRRPGPTRKHYQPYAPPRDFAAYRSRVKFSRSADAPAYQQGQNQLYNELNLGRREEYDVLDKRRGRDPEMGGKPRRKNPQEGLYNELQKDKMAEAYSEIGMKGERRRGKGHDGLYQGLSTATKDTYDALHMQALPPR

SEQ ID NO: 44511 - protein, 497 aa, synthetic construct
MALPVTALLLPLALLLHAARPDFVMTQSPDSLAVSLGERVTMSCKSSQSLLNSGNQKNYLTWYQQKPGQPPKLLIYWASTRESGVPDRFSGSGSGTDFTLTISSLQAEDVAVYYCQNDYSYPYTFGQGTKLEIKGGGGSGGGGSGGGGSEVQLVQSGAELKKPGASVKVSCKASGYTFTDYYMKWVRQAPGQGLEWIGDIIPSNGATFYNQKFKGRVTITVDKSTSTAYMELSSLRSEDTAVYYCARSHLLRASWFAYWGQGTLVTVSSTRAKPTTTPAPRPPTPAPTIASQPLSLRPEACRPAAGGAVHTRGLDFACDIYIWAPLAGTCGVLLLSLVITLYCKRGRKKLLYIFKQPFMRPVQTTQEEDGCSCRFPEEEEGGCELRVKFSRSADAPAYQQGQNQLYNELNLGRREEYDVLDKRRGRDPEMGGKPRRKNPQEGLYNELQKDKMAEAYSEIGMKGERRRGKGHDGLYQGLSTATKDTYDALHMQALPPR

SEQ ID NO: 44512 - protein, 497 aa, synthetic construct
MALPVTALLLPLALLLHAARPEVQLVQSGAELKKPGASVKVSCKASGYTFTDYYMKWVRQAPGQGLEWIGDIIPSNGATFYNQKFKGRVTITVDKSTSTAYMELSSLRSEDTAVYYCARSHLLRASWFAYWGQGTLVTVSSGGGGSGGGGSGGGGSDFVMTQSPDSLAVSLGERVTMSCKSSQSLLNSGNQKNYLTWYQQKPGQPPKLLIYWASTRESGVPDRFSGSGSGTDFTLTISSLQAEDVAVYYCQNDYSYPYTFGQGTKLEIKTRAKPTTTPAPRPPTPAPTIASQPLSLRPEACRPAAGGAVHTRGLDFACDIYIWAPLAGTCGVLLLSLVITLYCKRGRKKLLYIFKQPFMRPVQTTQEEDGCSCRFPEEEEGGCELRVKFSRSADAPAYQQGQNQLYNELNLGRREEYDVLDKRRGRDPEMGGKPRRKNPQEGLYNELQKDKMAEAYSEIGMKGERRRGKGHDGLYQGLSTATKDTYDALHMQALPPR

SEQ ID NO: 44513 - protein, 630 aa, synthetic construct
MALPVTALLLPLALLLHAARPDFVMTQSPDSLAVSLGERVTMSCKSSQSLLNSGNQKNYLTWYQQKPGQPPKLLIYWASTRESGVPDRFSGSGSGTDFTLTISSLQAEDVAVYYCQNDYSYPYTFGQGTKLEIKLEIQNPDPAVYQLRDSKSSDKSVCLFTDFDSQTNVSQSKDSDVYITDKCVLDMRSMDFKSNSAVAWSNKSDFACANAFNNSIIPEDTFFPSSDVPCDVKLVEKSFETDTNLNFQNLSVIGFRILLLKVAGFNLLMTLRLWSSRAKRSGSGVKQTLNFDLLKLAGDVESNPGPTSMDWIWRILFLVGAATGAHSFEEVQLVQSGAELKKPGASVKVSCKASGYTFTDYYMKWVRQAPGQGLEWIGDIIPSNGATFYNQKFKGRVTITVDKSTSTAYMELSSLRSEDTAVYYCARSHLLRASWFAYWGQGTLVTVSSTREDLKNVFPPEVAVFEPSKAEIAHTQKATLVCLATGFYPDHVELSWWVNGKEVHSGVCTDPQPLKEQPALNDSRYCLSSRLRVSATFWQNPRNHFRCQVQFYGLSENDEWTQDRAKPVTQIVSAEAWGRADCGITSASYHQGVLSATILYEILLGKATLYAVLVSALVLMAMVKRKDSRG

SEQ ID NO: 44514 - protein, 626 aa, synthetic construct
MALPVTALLLPLALLLHAARPDFVMTQSPDSLAVSLGERVTMSCKSSQSLLNSGNQKNYLTWYQQKPGQPPKLLIYWASTRESGVPDRFSGSGSGTDFTLTISSLQAEDVAVYYCQNDYSYPYTFGQGTKLEIKLEDLKNVFPPEVAVFEPSKAEIAHTQKATLVCLATGFYPDHVELSWWVNGKEVHSGVCTDPQPLKEQPALNDSRYCLSSRLRVSATFWQNPRNHFRCQVQFYGLSENDEWTQDRAKPVTQIVSAEAWGRADCGITSASYHQGVLSATILYEILLGKATLYAVLVSALVLMAMVKRKDSRGRAKRSGSGATNFSLLKQAGDVEENPGPTSMDWIWRILFLVGAATGAHSFEEVQLVQSGAELKKPGASVKVSCKASGYTFTDYYMKWVRQAPGQGLEWIGDIIPSNGATFYNQKFKGRVTITVDKSTSTAYMELSSLRSEDTAVYYCARSHLLRASWFAYWGQGTLVTVSSTRIQNPDPAVYQLRDSKSSDKSVCLFTDFDSQTNVSQSKDSDVYITDKCVLDMRSMDFKSNSAVAWSNKSDFACANAFNNSIIPEDTFFPSSDVPCDVKLVEKSFETDTNLNFQNLSVIGFRILLLKVAGFNLLMTLRLWSS

SEQ ID NO: 44515 - protein, 626 aa, synthetic construct
MALPVTALLLPLALLLHAARPDFVMTQSPDSLAVSLGERVTMSCKSSQSLLNSGNQKNYLTWYQQKPGQPPKLLIYWASTRESGVPDRFSGSGSGTDFTLTISSLQAEDVAVYYCQNDYSYPYTFGQGTKLEIKLEDLKNVFPPEVAVFEPSEAEISHTQKATLVCLATGFYPDHVELSWWVNGKEVHSGVCTDPQPLKEQPALNDSRYCLSSRLRVSATFWQNPRNHFRCQVQFYGLSENDEWTQDRAKPVTQIVSAEAWGRADCGFTSESYQQGVLSATILYEILLGKATLYAVLVSALVLMAMVKRKDSRGRAKRSGSGATNFSLLKQAGDVEENPGPTSMDWIWRILFLVGAATGAHSFEEVQLVQSGAELKKPGASVKVSCKASGYTFTDYYMKWVRQAPGQGLEWIGDIIPSNGATFYNQKFKGRVTITVDKSTSTAYMELSSLRSEDTAVYYCARSHLLRASWFAYWGQGTLVTVSSTRIQNPDPAVYQLRDSKSSDKSVCLFTDFDSQTNVSQSKDSDVYITDKCVLDMRSMDFKSNSAVAWSNKSDFACANAFNNSIIPEDTFFPSPESSCDVKLVEKSFETDTNLNFQNLSVIGFRILLLKVAGFNLLMTLRLWSS

SEQ ID NO: 44516 - protein, 630 aa, synthetic construct
MALPVTALLLPLALLLHAARPDFVMTQSPDSLAVSLGERVTMSCKSSQSLLNSGNQKNYLTWYQQKPGQPPKLLIYWASTRESGVPDRFSGSGSGTDFTLTISSLQAEDVAVYYCQNDYSYPYTFGQGTKLEIKLEIQNPDPAVYQLRDSKSSDKSVCLFTDFDSQTNVSQSKDSDVYITDKCVLDMRSMDFKSNSAVAWSNKSDFACANAFNNSIIPEDTFFPSPESSCDVKLVEKSFETDTNLNFQNLSVIGFRILLLKVAGFNLLMTLRLWSSRAKRSGSGVKQTLNFDLLKLAGDVESNPGPTSMDWIWRILFLVGAATGAHSFEEVQLVQSGAELKKPGASVKVSCKASGYTFTDYYMKWVRQAPGQGLEWIGDIIPSNGATFYNQKFKGRVTITVDKSTSTAYMELSSLRSEDTAVYYCARSHLLRASWFAYWGQGTLVTVSSTREDLKNVFPPEVAVFEPSEAEISHTQKATLVCLATGFYPDHVELSWWVNGKEVHSGVCTDPQPLKEQPALNDSRYCLSSRLRVSATFWQNPRNHFRCQVQFYGLSENDEWTQDRAKPVTQIVSAEAWGRADCGFTSESYQQGVLSATILYEILLGKATLYAVLVSALVLMAMVKRKDSRG

SEQ ID NO: 44517 - protein, 642 aa, synthetic construct
MALPVTALLLPLALLLHAARPLEEDLKNVFPPEVAVFEPSKAEIAHTQKATLVCLATGFYPDHVELSWWVNGKEVHSGVCTDPQPLKEQPALNDSRYCLSSRLRVSATFWQNPRNHFRCQVQFYGLSENDEWTQDRAKPVTQIVSAEAWGRADCGITSASYHQGVLSATILYEILLGKATLYAVLVSALVLMAMVKRKDSRGRAKRSGSGATNFSLLKQAGDVEENPGPTSMALPVTALLLPLALLLHAARPDFVMTQSPDSLAVSLGERVTMSCKSSQSLLNSGNQKNYLTWYQQKPGQPPKLLIYWASTRESGVPDRFSGSGSGTDFTLTISSLQAEDVAVYYCQNDYSYPYTFGQGTKLEIKGGGGSGGGGSGGGGSEVQLVQSGAELKKPGASVKVSCKASGYTFTDYYMKWVRQAPGQGLEWIGDIIPSNGATFYNQKFKGRVTITVDKSTSTAYMELSSLRSEDTAVYYCARSHLLRASWFAYWGQGTLVTVSSTRIQNPDPAVYQLRDSKSSDKSVCLFTDFDSQTNVSQSKDSDVYITDKCVLDMRSMDFKSNSAVAWSNKSDFACANAFNNSIIPEDTFFPSSDVPCDVKLVEKSFETDTNLNFQNLSVIGFRILLLKVAGFNLLMTLRLWSS

SEQ ID NO: 44518 - protein, 649 aa, synthetic construct
MALPVTALLLPLALLLHAARPLEGSGDRPDPAVYQLRDSKSSDKSVCLFTDFDSQTNVSQSKDSDVYITDKCVLDMRSMDFKSNSAVAWSNKSDFACANAFNNSIIPEDTFFPSPESSCDVKLVEKSFETDTNLNFQNLSVIGFRILLLKVAGFNLLMTLRLWSSSSRAKRSGSGVKQTLNFDLLKLAGDVESNPGPTSMALPVTALLLPLALLLHAARPDFVMTQSPDSLAVSLGERVTMSCKSSQSLLNSGNQKNYLTWYQQKPGQPPKLLIYWASTRESGVPDRFSGSGSGTDFTLTISSLQAEDVAVYYCQNDYSYPYTFGQGTKLEIKGGGGSGGGGSGGGGSEVQLVQSGAELKKPGASVKVSCKASGYTFTDYYMKWVRQAPGQGLEWIGDIIPSNGATFYNQKFKGRVTITVDKSTSTAYMELSSLRSEDTAVYYCARSHLLRASWFAYWGQGTLVTVSSTREDLKNVFPPEVAVFEPSEAEISHTQKATLVCLATGFYPDHVELSWWVNGKEVHSGVCTDPQPLKEQPALNDSRYCLSSRLRVSATFWQNPRNHFRCQVQFYGLSENDEWTQDRAKPVTQIVSAEAWGRADCGFTSESYQQGVLSATILYEILLGKATLYAVLVSALVLMAMVKRKDSRG

SEQ ID NO: 44519 - protein, 626 aa, synthetic construct
MALPVTALLLPLALLLHAARPDFVMTQSPDSLAVSLGERVTMSCKSSQSLLNSGNQKNYLTWYQQKPGQPPKLLIYWASTRESGVPDRFSGSGSGTDFTLTISSLQAEDVAVYYCQNDYSYPYTFGQGTKLEIKLEDLKNVFPPEVAVFEPSEAEISHTQKATLVCLATGFYPDHVELSWWVNGKEVHSGVSTDPQPLKEQPALNDSRYCLSSRLRVSATFWQNPRNHFRCQVQFYGLSENDEWTQDRAKPVTQIVSAEAWGRADCGFTSESYQQGVLSATILYEILLGKATLYAVLVSALVLMAMVKRKDSRGRAKRSGSGATNFSLLKQAGDVEENPGPTSMDWIWRILFLVGAATGAHSFEEVQLVQSGAELKKPGASVKVSCKASGYTFTDYYMKWVRQAPGQGLEWIGDIIPSNGATFYNQKFKGRVTITVDKSTSTAYMELSSLRSEDTAVYYCARSHLLRASWFAYWGQGTLVTVSSTRIQNPDPAVYQLRDSKSSDKSVCLFTDFDSQTNVSQSKDSDVYITDKTVLDMRSMDFKSNSAVAWSNKSDFACANAFNNSIIPEDTFFPSPESSCDVKLVEKSFETDTNLNFQNLSVIGFRILLLKVAGFNLLMTLRLWSS

SEQ ID NO: 44520 - protein, 634 aa, synthetic construct
MALPVTALLLPLALLLHAARPDFVMTQSPDSLAVSLGERVTMSCKSSQSLLNSGNQKNYLTWYQQKPGQPPKLLIYWASTRESGVPDRFSGSGSGTDFTLTISSLQAEDVAVYYCQNDYSYPYTFGQGTKLEIKLEDKQLDADVSPKPTIFLPSIAETKLQKAGTYLCLLEKFFPDVIKIHWQEKKSNTILGSQEGNTMKTNDTYMKFSWLTVPEKSLDKEHRCIVRHENNKNGVDQEIIFPPIKTDVITMDPKDNCSKDANDTLLLQLTNTSAYYMYLLLLLKSVVYFAIITCCLLRRTAFCCNGEKSRAKRSGSGATNFSLLKQAGDVEENPGPTSMDWIWRILFLVGAATGAHSFEEVQLVQSGAELKKPGASVKVSCKASGYTFTDYYMKWVRQAPGQGLEWIGDIIPSNGATFYNQKFKGRVTITVDKSTSTAYMELSSLRSEDTAVYYCARSHLLRASWFAYWGQGTLVTVSSTRSQPHTKPSVFVMKNGTNVACLVKEFYPKDIRINLVSSKKITEFDPAIVISPSGKYNAVKLGKYEDSNSVTCSVQHDNKTVHSTDFEVKTDSTDHVKPKETENTKQPSKSCHKPKAIVHTEKVNMMSLTVLGLRMLFAKTVAVNFLLTAKLFFL

SEQ ID NO: 44521 - protein, 634 aa, synthetic construct
MALPVTALLLPLALLLHAARPDFVMTQSPDSLAVSLGERVTMSCKSSQSLLNSGNQKNYLTWYQQKPGQPPKLLIYWASTRESGVPDRFSGSGSGTDFTLTISSLQAEDVAVYYCQNDYSYPYTFGQGTKLEIKLESQPHTKPSVFVMKNGTNVACLVKEFYPKDIRINLVSSKKITEFDPAIVISPSGKYNAVKLGKYEDSNSVTCSVQHDNKTVHSTDFEVKTDSTDHVKPKETENTKQPSKSCHKPKAIVHTEKVNMMSLTVLGLRMLFAKTVAVNFLLTAKLFFLRAKRSGSGATNFSLLKQAGDVEENPGPTSMDWIWRILFLVGAATGAHSFEEVQLVQSGAELKKPGASVKVSCKASGYTFTDYYMKWVRQAPGQGLEWIGDIIPSNGATFYNQKFKGRVTITVDKSTSTAYMELSSLRSEDTAVYYCARSHLLRASWFAYWGQGTLVTVSSTRDKQLDADVSPKPTIFLPSIAETKLQKAGTYLCLLEKFFPDVIKIHWQEKKSNTILGSQEGNTMKTNDTYMKFSWLTVPEKSLDKEHRCIVRHENNKNGVDQEIIFPPIKTDVITMDPKDNCSKDANDTLLLQLTNTSAYYMYLLLLLKSVVYFAIITCCLLRRTAFCCNGEKS

SEQ ID NO: 44522 - protein, 649 aa, synthetic construct
MALPVTALLLPLALLLHAARPLEDKQLDADVSPKPTIFLPSIAETKLQKAGTYLCLLEKFFPDVIKIHWQEKKSNTILGSQEGNTMKTNDTYMKFSWLTVPEKSLDKEHRCIVRHENNKNGVDQEIIFPPIKTDVITMDPKDNCSKDANDTLLLQLTNTSAYYMYLLLLLKSVVYFAIITCCLLRRTAFCCNGEKSRAKRSGSGATNFSLLKQAGDVEENPGPTSMALPVTALLLPLALLLHAARPDFVMTQSPDSLAVSLGERVTMSCKSSQSLLNSGNQKNYLTWYQQKPGQPPKLLIYWASTRESGVPDRFSGSGSGTDFTLTISSLQAEDVAVYYCQNDYSYPYTFGQGTKLEIKGGGGSGGGGSGGGGSEVQLVQSGAELKKPGASVKVSCKASGYTFTDYYMKWVRQAPGQGLEWIGDIIPSNGATFYNQKFKGRVTITVDKSTSTAYMELSSLRSEDTAVYYCARSHLLRASWFAYWGQGTLVTVSSTRSQPHTKPSVFVMKNGTNVACLVKEFYPKDIRINLVSSKKITEFDPAIVISPSGKYNAVKLGKYEDSNSVTCSVQHDNKTVHSTDFEVKTDSTDHVKPKETENTKQPSKSCHKPKAIVHTEKVNMMSLTVLGLRMLFAKTVAVNFLLTAKLFFL

SEQ ID NO: 44523 - protein, 803 aa, synthetic construct
MALPVTALLLPLALLLHAARPDFVMTQSPDSLAVSLGERVTMSCKSSQSLLNSGNQKNYLTWYQQKPGQPPKLLIYWASTRESGVPDRFSGSGSGTDFTLTISSLQAEDVAVYYCQNDYSYPYTFGQGTKLEIKGQPKANPTVTLFPPSSEELQANKATLVCLISDFYPGAVTVAWKADGSPVKAGVETTKPSKQSNNKYAASSYLSLTPEQWKSHRSYSCQVTHEGSTVEKTVAPTECSGSQSFGLLDPKLCYLLDGILFIYGVILTALFLRVKFSRSADAPAYQQGQNQLYNELNLGRREEYDVLDKRRGRDPEMGGKPQRRKNPQEGLYNELQKDKMAEAYSEIGMKGERRRGKGHDGLYQGLSTATKDTYDALHMQALPPRRAKRSGSGATNFSLLKQAGDVEENPGPTSMDWIWRILFLVGAATGAHSFEEVQLVQSGAELKKPGASVKVSCKASGYTFTDYYMKWVRQAPGQGLEWIGDIIPSNGATFYNQKFKGRVTITVDKSTSTAYMELSSLRSEDTAVYYCARSHLLRASWFAYWGQGTLVTVSSASTKGPSVFPLAPSSKSTSGGTAALGCLVKDYFPEPVTVSWNSGALTSGVHTFPAVLQSSGLYSLSSVVTVPSSSLGTQTYICNVNHKPSNTKVDKRVEPKSCGTQSFGLLDPKLCYLLDGILFIYGVILTALFLRVKFSRSADAPAYQQGQNQLYNELNLGRREEYDVLDKRRGRDPEMGGKPQRRKNPQEGLYNELQKDKMAEAYSEIGMKGERRRGKGHDGLYQGLSTATKDTYDALHMQALPPR

SEQ ID NO: 44524 - protein, 822 aa, synthetic construct
MALPVTALLLPLALLLHAARPDFVMTQSPDSLAVSLGERVTMSCKSSQSLLNSGNQKNYLTWYQQKPGQPPKLLIYWASTRESGVPDRFSGSGSGTDFTLTISSLQAEDVAVYYCQNDYSYPYTFGQGTKLEIKLEDLKNVFPPEVAVFEPSEAEISHTQKATLVCLATGFYPDHVELSWWVNGKEVHSGVSTDPQPLKEQPALNDSRYCLSSRLRVSATFWQNPRNHFRCQVQFYGLSENDEWTQDRAKPVTQIVSAEAWGRADCGSQSFGLLDPKLCYLLDGILFIYGVILTALFLRVKFSRSADAPAYQQGQNQLYNELNLGRREEYDVLDKRRGRDPEMGGKPQRRKNPQEGLYNELQKDKMAEAYSEIGMKGERRRGKGHDGLYQGLSTATKDTYDALHMQALPPRRAKRSGSGATNFSLLKQAGDVEENPGPTSMDWIWRILFLVGAATGAHSFEEVQLVQSGAELKKPGASVKVSCKASGYTFTDYYMKWVRQAPGQGLEWIGDIIPSNGATFYNQKFKGRVTITVDKSTSTAYMELSSLRSEDTAVYYCARSHLLRASWFAYWGQGTLVTVSSTRIQNPDPAVYQLRDSKSSDKSVCLFTDFDSQTNVSQSKDSDVYITDKTVLDMRSMDFKSNSAVAWSNKSDFACANAFNNSIIPEDTFFPSPESSCGTQSFGLLDPKLCYLLDGILFIYGVILTALFLRVKFSRSADAPAYQQGQNQLYNELNLGRREEYDVLDKRRGRDPEMGGKPQRRKNPQEGLYNELQKDKMAEAYSEIGMKGERRRGKGHDGLYQGLSTATKDTYDALHMQALPPR

SEQ ID NO: 44525 - protein, 864 aa, synthetic construct
MALPVTALLLPLALLLHAARPDFVMTQSPDSLAVSLGERVTMSCKSSQSLLNSGNQKNYLTWYQQKPGQPPKLLIYWASTRESGVPDRFSGSGSGTDFTLTISSLQAEDVAVYYCQNDYSYPYTFGQGTKLEIKLEEDLKNVFPPEVAVFEPSEAEISHTQKATLVCLATGFYPDHVELSWWVNGKEVHSGVSTDPQPLKEQPALNDSRYCLSSRLRVSATFWQNPRNHFRCQVQFYGLSENDEWTQDRAKPVTQIVSAEAWGRADCGSQSFGLLDPKLCYLLDGILFIYGVILTALFLRVKFSRSADAPAYQQGQNQLYNELNLGRREEYDVLDKRRGRDPEMGGKPQRRKNPQEGLYNELQKDKMAEAYSEIGMKGERRRGKGHDGLYQGLSTATKDTYDALHMQALPPRRAKRSGSGATNFSLLKQAGDVEENPGPTSMDWIWRILFLVGAATGAHSFEEVQLVQSGAELKKPGASVKVSCKASGYTFTDYYMKWVRQAPGQGLEWIGDIIPSNGATFYNQKFKGRVTITVDKSTSTAYMELSSLRSEDTAVYYCARSHLLRASWFAYWGQGTLVTVSSTRIQNPDPAVYQLRDSKSSDKSVCLFTDFDSQTNVSQSKDSDVYITDKTVLDMRSMDFKSNSAVAWSNKSDFACANAFNNSIIPEDTFFPSPESSCGTQSFGLLDPKLCYLLDGILFIYGVILTALFLRSKRSRLLHSDYMNMTPRRPGPTRKHYQPYAPPRDFAAYRSRVKFSRSADAPAYQQGQNQLYNELNLGRREEYDVLDKRRGRDPEMGGKPQRRKNPQEGLYNELQKDKMAEAYSEIGMKGERRRGKGHDGLYQGLSTATKDTYDALHMQALPPR

SEQ ID NO: 44526 - protein, 907 aa, synthetic construct
MALPVTALLLPLALLLHAARPDFVMTQSPDSLAVSLGERVTMSCKSSQSLLNSGNQKNYLTWYQQKPGQPPKLLIYWASTRESGVPDRFSGSGSGTDFTLTISSLQAEDVAVYYCQNDYSYPYTFGQGTKLEIKLEEDLKNVFPPEVAVFEPSEAEISHTQKATLVCLATGFYPDHVELSWWVNGKEVHSGVSTDPQPLKEQPALNDSRYCLSSRLRVSATFWQNPRNHFRCQVQFYGLSENDEWTQDRAKPVTQIVSAEAWGRADCGSQSFGLLDPKLCYLLDGILFIYGVILTALFLKRGRKKLLYIFKQPFMRPVQTTQEEDGCSCRFPEEEEGGCELRVKFSRSADAPAYQQGQNQLYNELNLGRREEYDVLDKRRGRDPEMGGKPQRRKNPQEGLYNELQKDKMAEAYSEIGMKGERRRGKGHDGLYQGLSTATKDTYDALHMQALPPRRAKRSGSGATNFSLLKQAGDVEENPGPTSMDWIWRILFLVGAATGAHSFEEVQLVQSGAELKKPGASVKVSCKASGYTFTDYYMKWVRQAPGQGLEWIGDIIPSNGATFYNQKFKGRVTITVDKSTSTAYMELSSLRSEDTAVYYCARSHLLRASWFAYWGQGTLVTVSSTRIQNPDPAVYQLRDSKSSDKSVCLFTDFDSQTNVSQSKDSDVYITDKTVLDMRSMDFKSNSAVAWSNKSDFACANAFNNSIIPEDTFFPSPESSCGTQSFGLLDPKLCYLLDGILFIYGVILTALFLKRGRKKLLYIFKQPFMRPVQTTQEEDGCSCRFPEEEEGGCELRVKFSRSADAPAYQQGQNQLYNELNLGRREEYDVLDKRRGRDPEMGGKPQRRKNPQEGLYNELQKDKMAEAYSEIGMKGERRRGKGHDGLYQGLSTATKDTYDALHMQALPPR

SEQ ID NO: 44527 - protein, 594 aa, synthetic construct
MALPVTALLLPLALLLHAARPDFVMTQSPDSLAVSLGERVTMSCKSSQSLLNSGNQKNYLTWYQQKPGQPPKLLIYWASTRESGVPDRFSGSGSGTDFTLTISSLQAEDVAVYYCQNDYSYPYTFGQGTKLEIKLEQSFGLLDPKLCYLLDGILFIYGVILTALFLRVKFSRSADAPAYQQGQNQLYNELNLGRREEYDVLDKRRGRDPEMGGKPQRRKNPQEGLYNELQKDKMAEAYSEIGMKGERRRGKGHDGLYQGLSTATKDTYDALHMQALPPRRAKRSGSGATNFSLLKQAGDVEENPGPTSMDWIWRILFLVGAATGAHSFEEVQLVQSGAELKKPGASVKVSCKASGYTFTDYYMKWVRQAPGQGLEWIGDIIPSNGATFYNQKFKGRVTITVDKSTSTAYMELSSLRSEDTAVYYCARSHLLRASWFAYWGQGTLVTVSSTRQSFGLLDPKLCYLLDGILFIYGVILTALFLRVKFSRSADAPAYQQGQNQLYNELNLGRREEYDVLDKRRGRDPEMGGKPQRRKNPQEGLYNELQKDKMAEAYSEIGMKGERRRGKGHDGLYQGLSTATKDTYDALHMQALPPR

SEQ ID NO: 44528 - protein, 652 aa, synthetic construct
MALPVTALLLPLALLLHAARPDFVMTQSPDSLAVSLGERVTMSCKSSQSLLNSGNQKNYLTWYQQKPGQPPKLLIYWASTRESGVPDRFSGSGSGTDFTLTISSLQAEDVAVYYCQNDYSYPYTFGQGTKLEIKLEGQPKANPTVTLFPPSSEELQANKATLVCLISDFYPGAVTVAWKADGSPVKAGVETTKPSKQSNNKYAASSYLSLTPEQWKSHRSYSCQVTHEGSTVEKTVAPTECSPIKTDVITMDPKDNCSKDANDTLLLQLTNTSAYYMYLLLLLKSVVYFAIITCCLLRRTAFCCNGEKSRAKRSGSGATNFSLLKQAGDVEENPGPTSMDWIWRILFLVGAATGAHSFEEVQLVQSGAELKKPGASVKVSCKASGYTFTDYYMKWVRQAPGQGLEWIGDIIPSNGATFYNQKFKGRVTITVDKSTSTAYMELSSLRSEDTAVYYCARSHLLRASWFAYWGQGTLVTVSSTRASTKGPSVFPLAPSSKSTSGGTAALGCLVKDYFPEPVTVSWNSGALTSGVHTFPAVLQSSGLYSLSSVVTVPSSSLGTQTYICNVNHKPSNTKVDKRVEPKSCEVKTDSTDHVKPKETENTKQPSKSCHKPKAIVHTEKVNMMSLTVLGLRMLFAKTVAVNFLLTAKLFFL

SEQ ID NO: 44529 - protein, 630 aa, synthetic construct
MALPVTALLLPLALLLHAARPDFVMTQSPDSLAVSLGERVTMSCKSSQSLLNSGNQKNYLTWYQQKPGQPPKLLIYWASTRESGVPDRFSGSGSGTDFTLTISSLQAEDVAVYYCQNDYSYPYTFGQGTKLEIKLEGQPKANPTVTLFPPSSEELQANKATLVCLISDFYPGAVTVAWKADGSPVKAGVETTKPSKQSNNKYAASSYLSLTPEQWKSHRSYSCQVTHEGSTVEKTVAPTECSGRADCGITSASYHQGVLSATILYEILLGKATLYAVLVSALVLMAMVKRKDSRGRAKRSGSGATNFSLLKQAGDVEENPGPTSMDWIWRILFLVGAATGAHSFEEVQLVQSGAELKKPGASVKVSCKASGYTFTDYYMKWVRQAPGQGLEWIGDIIPSNGATFYNQKFKGRVTITVDKSTSTAYMELSSLRSEDTAVYYCARSHLLRASWFAYWGQGTLVTVSSTRASTKGPSVFPLAPSSKSTSGGTAALGCLVKDYFPEPVTVSWNSGALTSGVHTFPAVLQSSGLYSLSSVVTVPSSSLGTQTYICNVNHKPSNTKVDKRVEPKSCIPEDTFFPSSDVPCDVKLVEKSFETDTNLNFQNLSVIGFRILLLKVAGFNLLMTLRLWSS

SEQ ID NO: 44530 - protein, 630 aa, synthetic construct
MALPVTALLLPLALLLHAARPDFVMTQSPDSLAVSLGERVTMSCKSSQSLLNSGNQKNYLTWYQQKPGQPPKLLIYWASTRESGVPDRFSGSGSGTDFTLTISSLQAEDVAVYYCQNDYSYPYTFGQGTKLEIKLEGQPKANPTVTLFPPSSEELQANKATLVCLISDFYPGAVTVAWKADGSPVKAGVETTKPSKQSNNKYAASSYLSLTPEQWKSHRSYSCQVTHEGSTVEKTVAPTECSGRADCGFTSESYQQGVLSATILYEILLGKATLYAVLVSALVLMAMVKRKDSRGRAKRSGSGATNFSLLKQAGDVEENPGPTSMDWIWRILFLVGAATGAHSFEEVQLVQSGAELKKPGASVKVSCKASGYTFTDYYMKWVRQAPGQGLEWIGDIIPSNGATFYNQKFKGRVTITVDKSTSTAYMELSSLRSEDTAVYYCARSHLLRASWFAYWGQGTLVTVSSTRASTKGPSVFPLAPSSKSTSGGTAALGCLVKDYFPEPVTVSWNSGALTSGVHTFPAVLQSSGLYSLSSVVTVPSSSLGTQTYICNVNHKPSNTKVDKRVEPKSCIPEDTFFPSPESSCDVKLVEKSFETDTNLNFQNLSVIGFRILLLKVAGFNLLMTLRLWSS

SEQ ID NO: 44531 - protein, 456 aa, synthetic construct
MALPVTALLLPLALLLHAARPDFVMTQSPDSLAVSLGERVTMSCKSSQSLLNSGNQKNYLTWYQQKPGQPPKLLIYWASTRESGVPDRFSGSGSGTDFTLTISSLQAEDVAVYYCQNDYSYPYTFGQGTKLEIKGGGGSGGGGSGGGGSEVQLVQSGAELKKPGASVKVSCKASGYTFTDYYMKWVRQAPGQGLEWIGDIIPSNGATFYNQKFKGRVTITVDKSTSTAYMELSSLRSEDTAVYYCARSHLLRASWFAYWGQGTLVTVSSTRDGNEEMGGITQTPYKVSISGTTVILTCPQYPGSEILWQHNDKNIGGDEDDKNIGSDEDHLSLKEFSELEQSGYYVCYPRGSKPEDANFYLYLRARVCENCMEMDVMSVATIVIVDICITGGLLLLVYYWSKNRKAKAKPVTRGAGAGGRQRGQNKERPPPVPNPDYEPIRKGQRDLYSGLNQRRI

SEQ ID NO: 44532 - protein, 421 aa, synthetic construct
MALPVTALLLPLALLLHAARPDFVMTQSPDSLAVSLGERVTMSCKSSQSLLNSGNQKNYLTWYQQKPGQPPKLLIYWASTRESGVPDRFSGSGSGTDFTLTISSLQAEDVAVYYCQNDYSYPYTFGQGTKLEIKGGGGSGGGGSGGGGSEVQLVQSGAELKKPGASVKVSCKASGYTFTDYYMKWVRQAPGQGLEWIGDIIPSNGATFYNQKFKGRVTITVDKSTSTAYMELSSLRSEDTAVYYCARSHLLRASWFAYWGQGTLVTVSSTRFKIPIEELEDRVFVNCNTSITWVEGTVGTLLSDITRLDLGKRILDPRGIYRCNGTDIYKDKESTVQVHYRMCQSCVELDPATVAGIIVTDVIATLLLALGVFCFAGHETGRLSGAADTQALLRNDQVYQPLRDRDDAQYSHLGGNWARNK

SEQ ID NO: 44533 - protein, 431 aa, synthetic construct
MALPVTALLLPLALLLHAARPDFVMTQSPDSLAVSLGERVTMSCKSSQSLLNSGNQKNYLTWYQQKPGQPPKLLIYWASTRESGVPDRFSGSGSGTDFTLTISSLQAEDVAVYYCQNDYSYPYTFGQGTKLEIKGGGGSGGGGSGGGGSEVQLVQSGAELKKPGASVKVSCKASGYTFTDYYMKWVRQAPGQGLEWIGDIIPSNGATFYNQKFKGRVTITVDKSTSTAYMELSSLRSEDTAVYYCARSHLLRASWFAYWGQGTLVTVSSTRQSIKGNHLVKVYDYQEDGSVLLTCDAEAKNITWFKDGKMIGFLTEDKKKWNLGSNAKDPRGMYQCKGSQNKSKPLQVYYRMCQNCIELNAATISGFLFAEIVSIFVLAVGVYFIAGQDGVRQSRASDKQTLLPNDQLYQPLKDREDDQYSHLQGNQLRRN

SEQ ID NO: 44534 - protein, 414 aa, synthetic construct
MALPVTALLLPLALLLHAARPDFVMTQSPDSLAVSLGERVTMSCKSSQSLLNSGNQKNYLTWYQQKPGQPPKLLIYWASTRESGVPDRFSGSGSGTDFTLTISSLQAEDVAVYYCQNDYSYPYTFGQGTKLEIKGGGGSGGGGSGGGGSEVQLVQSGAELKKPGASVKVSCKASGYTFTDYYMKWVRQAPGQGLEWIGDIIPSNGATFYNQKFKGRVTITVDKSTSTAYMELSSLRSEDTAVYYCARSHLLRASWFAYWGQGTLVTVSSTRQSFGLLDPKLCYLLDGILFIYGVILTALFLRVKFSRSADAPAYQQGQNQLYNELNLGRREEYDVLDKRRGRDPEMGGKPQRRKNPQEGLYNELQKDKMAEAYSEIGMKGERRRGKGHDGLYQGLSTATKDTYDALHMQALPPR

SEQ ID NO: 44535 - protein, 509 aa, synthetic construct
MALPVTALLLPLALLLHAARPDFVMTQSPDSLAVSLGERVTMSCKSSQSLLNSGNQKNYLTWYQQKPGQPPKLLIYWASTRESGVPDRFSGSGSGTDFTLTISSLQAEDVAVYYCQNDYSYPYTFGQGTKLEIKGGGGSGGGGSGGGGSEVQLVQSGAELKKPGASVKVSCKASGYTFTDYYMKWVRQAPGQGLEWIGDIIPSNGATFYNQKFKGRVTITVDKSTSTAYMELSSLRSEDTAVYYCARSHLLRASWFAYWGQGTLVTVSSTRGMRTEDLPKAVVFLEPQWYRVLEKDSVTLKCQGAYSPEDNSTQWFHNESLISSQASSYFIDAATVDDSGEYRCQTNLSTLSDPVQLEVHIGWLLLQAPRWVFKEEDPIHLRCHSWKNTALHKVTYLQNGKGRKYFHHNSDFYIPKATLKDSGSYFCRGLVGSKNVSSETVNITITQGLAVPTISSFFPPGYQVSFCLVMVLLFAVDTGLYFSVKTNIRSSTRDWKDHKFKWRKDPQDK

SEQ ID NO: 44536 - protein, 484 aa, synthetic construct; identical to SEQ ID NO: 9866

SEQ ID NO: 44537 - protein, 485 aa, synthetic construct; identical to SEQ ID NO: 9585

SEQ ID NO: 44538 - protein, 729 aa, synthetic construct
MALPVTALLLPLALLLHAARPDFVMTQSPDSLAVSLGERVTMSCKSSQSLLNSGNQKNYLTWYQQKPGQPPKLLIYWASTRESGVPDRFSGSGSGTDFTLTISSLQAEDVAVYYCQNDYSYPYTFGQGTKLEIKLEGQPKANPTVTLFPPSSEELQANKATLVCLISDFYPGAVTVAWKADGSPVKAGVETTKPSKQSNNKYAASSYLSLTPEQWKSHRSYSCQVTHEGSTVEKTVAPTECSGSQSFGLLDPKLCYLLDGILFIYGVILTALFLRVKFSRSADAPAYQQGQNQLYNELNLGRREEYDVLDKRRGRDPEMGGKPQRRKNPQEGLYNELQKDKMAEAYSEIGMKGERRRGKGHDGLYQGLSTATKDTYDALHMQALPPRRAKRSGSGATNFSLLKQAGDVEENPGPTSMDWIWRILFLVGAATGAHSFEEVQLVQSGAELKKPGASVKVSCKASGYTFTDYYMKWVRQAPGQGLEWIGDIIPSNGATFYNQKFKGRVTITVDKSTSTAYMELSSLRSEDTAVYYCARSHLLRASWFAYWGQGTLVTVSSTRASTKGPSVFPLAPSSKSTSGGTAALGCLVKDYFPEPVTVSWNSGALTSGVHTFPAVLQSSGLYSLSSVVTVPSSSLGTQTYICNVNHKPSNTKVDKRVEPKSCGTITQGLAVSTISSFFPPGYQVSFCLVMVLLFAVDTGLYFSVKTNIRSSTRDWKDHKFKWRKDPQDK

SEQ ID NO: 44539 - protein, 744 aa, synthetic construct
MALPVTALLLPLALLLHAARPDFVMTQSPDSLAVSLGERVTMSCKSSQSLLNSGNQKNYLTWYQQKPGQPPKLLIYWASTRESGVPDRFSGSGSGTDFTLTISSLQAEDVAVYYCQNDYSYPYTFGQGTKLEIKLEDLKNVFPPEVAVFEPSEAEISHTQKATLVCLATGFYPDHVELSWWVNGKEVHSGVSTDPQPLKEQPALNDSRYCLSSRLRVSATFWQNPRNHFRCQVQFYGLSENDEWTQDRAKPVTQIVSAEAWGRADCGSQSFGLLDPKLCYLLDGILFIYGVILTALFLRVKFSRSADAPAYQQGQNQLYNELNLGRREEYDVLDKRRGRDPEMGGKPQRRKNPQEGLYNELQKDKMAEAYSEIGMKGERRRGKGHDGLYQGLSTATKDTYDALHMQALPPRRAKRSGSGATNFSLLKQAGDVEENPGPTSMDWIWRILFLVGAATGAHSFEEVQLVQSGAELKKPGASVKVSCKASGYTFTDYYMKWVRQAPGQGLEWIGDIIPSNGATFYNQKFKGRVTITVDKSTSTAYMELSSLRSEDTAVYYCARSHLLRASWFAYWGQGTLVTVSSTRIQNPDPAVYQLRDSKSSDKSVCLFTDFDSQTNVSQSKDSDVYITDKTVLDMRSMDFKSNSAVAWSNKSDFACANAFNNSIIPEDTFFPSPESSCGTITQGLAVSTISSFFPPGYQVSFCLVMVLLFAVDTGLYFSVKTNIRSSTRDWKDHKFKWRKDPQDK

SEQ ID NO: 44540 - protein, 719 aa, synthetic construct
MALPVTALLLPLALLLHAARPDFVMTQSPDSLAVSLGERVTMSCKSSQSLLNSGNQKNYLTWYQQKPGQPPKLLIYWASTRESGVPDRFSGSGSGTDFTLTISSLQAEDVAVYYCQNDYSYPYTFGQGTKLEIKLEDLKNVFPPEVAVFEPSEAEISHTQKATLVCLATGFYPDHVELSWWVNGKEVHSGVSTDPQPLKEQPALNDSRYCLSSRLRVSATFWQNPRNHFRCQVQFYGLSENDEWTQDRAKPVTQIVSAEAWGRADCGSQSFGLLDPKLCYLLDGILFIYGVILTALFLRVKFSRSADAPAYQQGQNQLYNELNLGRREEYDVLDKRRGRDPEMGGKPQRRKNPQEGLYNELQKDKMAEAYSEIGMKGERRRGKGHDGLYQGLSTATKDTYDALHMQALPPRRAKRSGSGATNFSLLKQAGDVEENPGPTSMDWIWRILFLVGAATGAHSFEEVQLVQSGAELKKPGASVKVSCKASGYTFTDYYMKWVRQAPGQGLEWIGDIIPSNGATFYNQKFKGRVTITVDKSTSTAYMELSSLRSEDTAVYYCARSHLLRASWFAYWGQGTLVTVSSTRIQNPDPAVYQLRDSKSSDKSVCLFTDFDSQTNVSQSKDSDVYITDKTVLDMRSMDFKSNSAVAWSNKSDFACANAFNNSIIPEDTFFPSPESSCGTITQGLAVSTISSFFPPGYQVSFCLVMVLLFAVDTGLYFSV

SEQ ID NO: 44541 - protein, 720 aa, synthetic construct
MALPVTALLLPLALLLHAARPDFVMTQSPDSLAVSLGERVTMSCKSSQSLLNSGNQKNYLTWYQQKPGQPPKLLIYWASTRESGVPDRFSGSGSGTDFTLTISSLQAEDVAVYYCQNDYSYPYTFGQGTKLEIKLEDLKNVFPPEVAVFEPSEAEISHTQKATLVCLATGFYPDHVELSWWVNGKEVHSGVSTDPQPLKEQPALNDSRYCLSSRLRVSATFWQNPRNHFRCQVQFYGLSENDEWTQDRAKPVTQIVSAEAWGRADCGSQSFGLLDPKLCYLLDGILFIYGVILTALFLRVKFSRSADAPAYQQGQNQLYNELNLGRREEYDVLDKRRGRDPEMGGKPQRRKNPQEGLYNELQKDKMAEAYSEIGMKGERRRGKGHDGLYQGLSTATKDTYDALHMQALPPRRAKRSGSGATNFSLLKQAGDVEENPGPTSMDWIWRILFLVGAATGAHSFEEVQLVQSGAELKKPGASVKVSCKASGYTFTDYYMKWVRQAPGQGLEWIGDIIPSNGATFYNQKFKGRVTITVDKSTSTAYMELSSLRSEDTAVYYCARSHLLRASWFAYWGQGTLVTVSSTRIQNPDPAVYQLRDSKSSDKSVCLFTDFDSQTNVSQSKDSDVYITDKTVLDMRSMDFKSNSAVAWSNKSDFACANAFNNSIIPEDTFFPSPESSCGTITQGLAVSTISSFFPPGYQVSFCLVMVLLFAVDTGLYFSVK

SEQ ID NO: 44542 - protein, 721 aa, synthetic construct
MALPVTALLLPLALLLHAARPDFVMTQSPDSLAVSLGERVTMSCKSSQSLLNSGNQKNYLTWYQQKPGQPPKLLIYWASTRESGVPDRFSGSGSGTDFTLTISSLQAEDVAVYYCQNDYSYPYTFGQGTKLEIKLEDLKNVFPPEVAVFEPSEAEISHTQKATLVCLATGFYPDHVELSWWVNGKEVHSGVSTDPQPLKEQPALNDSRYCLSSRLRVSATFWQNPRNHFRCQVQFYGLSENDEWTQDRAKPVTQIVSAEAWGRADCGSQSFGLLDPKLCYLLDGILFIYGVILTALFLRVKFSRSADAPAYQQGQNQLYNELNLGRREEYDVLDKRRGRDPEMGGKPQRRKNPQEGLYNELQKDKMAEAYSEIGMKGERRRGKGHDGLYQGLSTATKDTYDALHMQALPPRRAKRSGSGATNFSLLKQAGDVEENPGPTSMDWIWRILFLVGAATGAHSFEEVQLVQSGAELKKPGASVKVSCKASGYTFTDYYMKWVRQAPGQGLEWIGDIIPSNGATFYNQKFKGRVTITVDKSTSTAYMELSSLRSEDTAVYYCARSHLLRASWFAYWGQGTLVTVSSTRIQNPDPAVYQLRDSKSSDKSVCLFTDFDSQTNVSQSKDSDVYITDKTVLDMRSMDFKSNSAVAWSNKSDFACANAFNNSIIPEDTFFPSPESSCGTITQGLAVSTISSFFPPGYQVSFCLVMVLLFAVDTGLYFSVKT

SEQ ID NO: 44543 - protein, 657 aa, synthetic construct
MALPVTALLLPLALLLHAARPDFVMTQSPDSLAVSLGERVTMSCKSSQSLLNSGNQKNYLTWYQQKPGQPPKLLIYWASTRESGVPDRFSGSGSGTDFTLTISSLQAEDVAVYYCQNDYSYPYTFGQGTKLEIKLEGQPKANPTVTLFPPSSEELQANKATLVCLISDFYPGAVTVAWKADGSPVKAGVETTKPSKQSNNKYAASSYLSLTPEQWKSHRSYSCQVTHEGSTVEKTVAPTECSGSLGEPQLCYILDAILFLYGIVLTLLYCRLKIQVRKAAITSYEKSDGVYTGLSTRNQETYETLKHEKPPQRAKRSGSGATNFSLLKQAGDVEENPGPTSMDWIWRILFLVGAATGAHSFEEVQLVQSGAELKKPGASVKVSCKASGYTFTDYYMKWVRQAPGQGLEWIGDIIPSNGATFYNQKFKGRVTITVDKSTSTAYMELSSLRSEDTAVYYCARSHLLRASWFAYWGQGTLVTVSSTRASTKGPSVFPLAPSSKSTSGGTAALGCLVKDYFPEPVTVSWNSGALTSGVHTFPAVLQSSGLYSLSSVVTVPSSSLGTQTYICNVNHKPSNTKVDKRVEPKSCGTLGEPQLCYILDAILFLYGIVLTLLYCRLKIQVRKAAITSYEKSDGVYTGLSTRNQETYETLKHEKPPQ

SEQ ID NO: 44544 - protein, 627 aa, synthetic construct
MALPVTALLLPLALLLHAARPDFVMTQSPDSLAVSLGERVTMSCKSSQSLLNSGNQKNYLTWYQQKPGQPPKLLIYWASTRESGVPDRFSGSGSGTDFTLTISSLQAEDVAVYYCQNDYSYPYTFGQGTKLEIKLEDLKNVFPPEVAVFEPSEAEISHTQKATLVCLATGFYPDHVELSWWVNGKEVHSGVCTDPQPLKEQPALNDSRYCLSSRLRVSATFWQNPRNHFRCQVQFYGLSENDEWTQDRAKPVTQIVSAEAWGRADCGFTSESYQQGVLSAYYMYLLLLLKSVVYFAIITCCLLRRTAFCCNGEKSRAKRSGSGATNFSLLKQAGDVEENPGPTSMDWIWRILFLVGAATGAHSFEEVQLVQSGAELKKPGASVKVSCKASGYTFTDYYMKWVRQAPGQGLEWIGDIIPSNGATFYNQKFKGRVTITVDKSTSTAYMELSSLRSEDTAVYYCARSHLLRASWFAYWGQGTLVTVSSTRIQNPDPAVYQLRDSKSSDKSVCLFTDFDSQTNVSQSKDSDVYITDKCVLDMRSMDFKSNSAVAWSNKSDFACANAFNNSIIPEDTFFPSPESSCDVKLVEKSFETDTNLNFQNLSVIGFRILLLKVAGFNLLMTLRLWSS

SEQ ID NO: 44545 - protein, 633 aa, synthetic construct
MALPVTALLLPLALLLHAARPDFVMTQSPDSLAVSLGERVTMSCKSSQSLLNSGNQKNYLTWYQQKPGQPPKLLIYWASTRESGVPDRFSGSGSGTDFTLTISSLQAEDVAVYYCQNDYSYPYTFGQGTKLEIKLEDKQLDADVSPKPTIFLPSIAETKLQKAGTYLCLLEKFFPDVIKIHWQEKKSNTILGSQEGNTMKTNDTYMKFSWLTVPEKSLDKEHRCIVRHENNKNGVDQEIIFPPIKTDVITMDPKDNCSKDANDTLLLQLTNTSAYYMYEILLGKATLYAVLVSALVLMAMVKRKDSRGRAKRSGSGATNFSLLKQAGDVEENPGPTSMDWIWRILFLVGAATGAHSFEEVQLVQSGAELKKPGASVKVSCKASGYTFTDYYMKWVRQAPGQGLEWIGDIIPSNGATFYNQKFKGRVTITVDKSTSTAYMELSSLRSEDTAVYYCARSHLLRASWFAYWGQGTLVTVSSTRSQPHTKPSVFVMKNGTNVACLVKEFYPKDIRINLVSSKKITEFDPAIVISPSGKYNAVKLGKYEDSNSVTCSVQHDNKTVHSTDFEVKTDSTDHVKPKETENTKQPSKSCHKPKAIVHTEKVNMMSLTVIGFRILLLKVAGFNLLMTLRLWSS

SEQ ID NO: 44546 - protein, 633 aa, synthetic construct
MALPVTALLLPLALLLHAARPDFVMTQSPDSLAVSLGERVTMSCKSSQSLLNSGNQKNYLTWYQQKPGQPPKLLIYWASTRESGVPDRFSGSGSGTDFTLTISSLQAEDVAVYYCQNDYSYPYTFGQGTKLEIKLEDKQLDADVSPKPTIFLPSIAETKLQKAGTYLCLLEKFFPDVIKIHWQEKKSNTILGSQEGNTMKTNDTYMKFSWLTVPEKSLDKEHRCIVRHENNKNGVDQEIIFPPIKTDVITMDPKDNCSKDANDTLLLQLTNTSATILYEILLGKATLYAVLVSALVLMAMVKRKDSRGRAKRSGSGATNFSLLKQAGDVEENPGPTSMDWIWRILFLVGAATGAHSFEEVQLVQSGAELKKPGASVKVSCKASGYTFTDYYMKWVRQAPGQGLEWIGDIIPSNGATFYNQKFKGRVTITVDKSTSTAYMELSSLRSEDTAVYYCARSHLLRASWFAYWGQGTLVTVSSTRSQPHTKPSVFVMKNGTNVACLVKEFYPKDIRINLVSSKKITEFDPAIVISPSGKYNAVKLGKYEDSNSVTCSVQHDNKTVHSTDFEVKTDSTDHVKPKETENTKQPSKSCHKPKAIVHTEKVNMMSLTVIGFRILLLKVAGFNLLMTLRLWSS

SEQ ID NO: 44547 - protein, 633 aa, synthetic construct
MALPVTALLLPLALLLHAARPDFVMTQSPDSLAVSLGERVTMSCKSSQSLLNSGNQKNYLTWYQQKPGQPPKLLIYWASTRESGVPDRFSGSGSGTDFTLTISSLQAEDVAVYYCQNDYSYPYTFGQGTKLEIKLEDKQLDADVSPKPTIFLPSIAETKLQKAGTYLCLLEKFFPDVIKIHWQEKKSNTILGSQEGNTMKTNDTYMKFSWLTVPEKSLDKEHRCIVRHENNKNGVDQEIIFPPIKTDVITMDPKDNCSKDANDTLLLQLTNTSAYYMYEILLGKATLYAVLVSALVLMAMVKRKDSRGRAKRSGSGATNFSLLKQAGDVEENPGPTSMDWIWRILFLVGAATGAHSFEEVQLVQSGAELKKPGASVKVSCKASGYTFTDYYMKWVRQAPGQGLEWIGDIIPSNGATFYNQKFKGRVTITVDKSTSTAYMELSSLRSEDTAVYYCARSHLLRASWFAYWGQGTLVTVSSTRSQPHTKPSVFVMKNGTNVACLVKEFYPKDIRINLVSSKKITEFDPAIVISPSGKYNAVKLGKYEDSNSVTCSVQHDNKTVHSTDFEVKTDSTDHVKPKETENTKQPSKSCHKPKAIVHTEKVNMMSLTVLGFRILLLKVAGFNLLMTLRLWSS

SEQ ID NO: 44548 - protein, 633 aa, synthetic construct
MALPVTALLLPLALLLHAARPDFVMTQSPDSLAVSLGERVTMSCKSSQSLLNSGNQKNYLTWYQQKPGQPPKLLIYWASTRESGVPDRFSGSGSGTDFTLTISSLQAEDVAVYYCQNDYSYPYTFGQGTKLEIKLEDKQLDADVSPKPTIFLPSIAETKLQKAGTYLCLLEKFFPDVIKIHWQEKKSNTILGSQEGNTMKTNDTYMKFSWLTVPEKSLDKEHRCIVRHENNKNGVDQEIIFPPIKTDVITMDPKDNCSKDANDTLLLQLTNTSATILYEILLGKATLYAVLVSALVLMAMVKRKDSRGRAKRSGSGATNFSLLKQAGDVEENPGPTSMDWIWRILFLVGAATGAHSFEEVQLVQSGAELKKPGASVKVSCKASGYTFTDYYMKWVRQAPGQGLEWIGDIIPSNGATFYNQKFKGRVTITVDKSTSTAYMELSSLRSEDTAVYYCARSHLLRASWFAYWGQGTLVTVSSTRSQPHTKPSVFVMKNGTNVACLVKEFYPKDIRINLVSSKKITEFDPAIVISPSGKYNAVKLGKYEDSNSVTCSVQHDNKTVHSTDFEVKTDSTDHVKPKETENTKQPSKSCHKPKAIVHTEKVNMMSLTVLGFRILLLKVAGFNLLMTLRLWSS

SEQ ID NO: 44549 - protein, 627 aa, synthetic construct
MALPVTALLLPLALLLHAARPDFVMTQSPDSLAVSLGERVTMSCKSSQSLLNSGNQKNYLTWYQQKPGQPPKLLIYWASTRESGVPDRFSGSGSGTDFTLTISSLQAEDVAVYYCQNDYSYPYTFGQGTKLEIKLEDLKNVFPPEVAVFEPSEAEISHTQKATLVCLATGFYPDHVELSWWVNGKEVHSGVCTDPQPLKEQPALNDSRYCLSSRLRVSATFWQNPRNHFRCQVQFYGLSENDEWTQDRAKPVTQIVSAEAWGRADCGFTSESYQQGVLSATILYLLLLLKSVVYFAIITCCLLRRTAFCCNGEKSRAKRSGSGATNFSLLKQAGDVEENPGPTSMDWIWRILFLVGAATGAHSFEEVQLVQSGAELKKPGASVKVSCKASGYTFTDYYMKWVRQAPGQGLEWIGDIIPSNGATFYNQKFKGRVTITVDKSTSTAYMELSSLRSEDTAVYYCARSHLLRASWFAYWGQGTLVTVSSTRIQNPDPAVYQLRDSKSSDKSVCLFTDFDSQTNVSQSKDSDVYITDKCVLDMRSMDFKSNSAVAWSNKSDFACANAFNNSIIPEDTFFPSPESSCDVKLVEKSFETDTNLNFQNLSVIGLRMLFAKTVAVNFLLTAKLFFL

SEQ ID NO: 44550 - protein, 656 aa, synthetic construct
MALPVTALLLPLALLLHAARPDFVMTQSPDSLAVSLGERVTMSCKSSQSLLNSGNQKNYLTWYQQKPGQPPKLLIYWASTRESGVPDRFSGSGSGTDFTLTISSLQAEDVAVYYCQNDYSYPYTFGQGTKLEIKLEDLKNVFPPEVAVFEPSEAEISHTQKATLVCLATGFYPDHVELSWWVNGKEVHSGVSTDPQPLKEQPALNDSRYCLSSRLRVSATFWQNPRNHFRCQVQFYGLSENDEWTQDRAKPVTQIVSAEAWGRADCGSSKDANDTLLLQLTNTSAYYMYLLLLLKSVVYFAIITCCLLRRTAFCCNGEKSRAKRSGSGATNFSLLKQAGDVEENPGPTSMDWIWRILFLVGAATGAHSFEEVQLVQSGAELKKPGASVKVSCKASGYTFTDYYMKWVRQAPGQGLEWIGDIIPSNGATFYNQKFKGRVTITVDKSTSTAYMELSSLRSEDTAVYYCARSHLLRASWFAYWGQGTLVTVSSTRIQNPDPAVYQLRDSKSSDKSVCLFTDFDSQTNVSQSKDSDVYITDKTVLDMRSMDFKSNSAVAWSNKSDFACANAFNNSIIPEDTFFPSPESSCGTEVKTDSTDHVKPKETENTKQPSKSCHKPKAIVHTEKVNMMSLTVLGLRMLFAKTVAVNFLLTAKLFFL

SEQ ID NO: 44551 - protein, 626 aa, synthetic construct; identical to SEQ ID NO: 12424

SEQ ID NO: 44552 - protein, 626 aa, synthetic construct; identical to SEQ ID NO: 13460

SEQ ID NO: 44553 - protein, 626 aa, synthetic construct; identical to SEQ ID NO: 12424

SEQ ID NO: 44554 - protein, 626 aa, synthetic construct; identical to SEQ ID NO: 13460

SEQ ID NO: 44555 - protein, 626 aa, synthetic construct; identical to SEQ ID NO: 12424

SEQ ID NO: 44556 - protein, 629 aa, synthetic construct
MALPVTALLLPLALLLHAARPDFVMTQSPDSLAVSLGERVTMSCKSSQSLLNSGNQKNYLTWYQQKPGQPPKLLIYWASTRESGVPDRFSGSGSGTDFTLTISSLQAEDVAVYYCQNDYSYPYTFGQGTKLEIKLEADVSPKPTIFLPSIAETKLQKAGTYLCLLEKFFPDVIKIHWQEKKSNTILGSQEGNTMKTNDTYMKFSWLTVPEKSLDKEHRCIVRHENNKNGVDQEIIFPPIKTDVITMDPKDNCSKDANDTLLLQLTNTSAYYMYLLLLLKSVVYFAIITCCLLRRTAFCCNGEKSRAKRSGSGATNFSLLKQAGDVEENPGPTSMDWIWRILFLVGAATGAHSFEEVQLVQSGAELKKPGASVKVSCKASGYTFTDYYMKWVRQAPGQGLEWIGDIIPSNGATFYNQKFKGRVTITVDKSTSTAYMELSSLRSEDTAVYYCARSHLLRASWFAYWGQGTLVTVSSTRSQPHTKPSVFVMKNGTNVACLVKEFYPKDIRINLVSSKKITEFDPAIVISPSGKYNAVKLGKYEDSNSVTCSVQHDNKTVHSTDFEVKTDSTDHVKPKETENTKQPSKSCHKPKAIVHTEKVNMMSLTVIGFRILLLKVAGFNLLMTLRLWSS

SEQ ID NO: 44557 - protein, 629 aa, synthetic construct
MALPVTALLLPLALLLHAARPDFVMTQSPDSLAVSLGERVTMSCKSSQSLLNSGNQKNYLTWYQQKPGQPPKLLIYWASTRESGVPDRFSGSGSGTDFTLTISSLQAEDVAVYYCQNDYSYPYTFGQGTKLEIKLEADVSPKPTIFLPSIAETKLQKAGTYLCLLEKFFPDVIKIHWQEKKSNTILGSQEGNTMKTNDTYMKFSWLTVPEKSLDKEHRCIVRHENNKNGVDQEIIFPPIKTDVITMDPKDNCSKDANDTLLLQLTNTSAYYMYLLLLLKSVVYFAIITCCLLRRTAFCCNGEKSRAKRSGSGATNFSLLKQAGDVEENPGPTSMDWIWRILFLVGAATGAHSFEEVQLVQSGAELKKPGASVKVSCKASGYTFTDYYMKWVRQAPGQGLEWIGDIIPSNGATFYNQKFKGRVTITVDKSTSTAYMELSSLRSEDTAVYYCARSHLLRASWFAYWGQGTLVTVSSTRSQPHTKPSVFVMKNGTNVACLVKEFYPKDIRINLVSSKKITEFDPAIVISPSGKYNAVKLGKYEDSNSVTCSVQHDNKTVHSTDFEVKTDSTDHVKPKETENTKQPSKSCHKPKAIVHTEKVNMMSLTVLGFRILLLKVAGFNLLMTLRLWSS

SEQ ID NO: 44558 - protein, 626 aa, synthetic construct; identical to SEQ ID NO: 12424

SEQ ID NO: 44559 - protein, 630 aa, synthetic construct; identical to SEQ ID NO: 12589

SEQ ID NO: 44560 - protein, 761 aa, synthetic construct; identical to SEQ ID NO: 12754

SEQ ID NO: 44561 - protein, 765 aa, synthetic construct; identical to SEQ ID NO: 12919

SEQ ID NO: 44562 - protein, 898 aa, synthetic construct; identical to SEQ ID NO: 13084

SEQ ID NO: 44563 - protein, 902 aa, synthetic construct; identical to SEQ ID NO: 13249

SEQ ID NO: 44564 - protein, 696 aa, synthetic construct
MALPVTALLLPLALLLHAARPDFVMTQSPDSLAVSLGERVTMSCKSSQSLLNSGNQKNYLTWYQQKPGQPPKLLIYWASTRESGVPDRFSGSGSGTDFTLTISSLQAEDVAVYYCQNDYSYPYTFGQGTKLEIKLEDLKNVFPPEVAVFEPSEAEISHTQKATLVCLATGFYPDHVELSWWVNGKEVHSGVCTDPQPLKEQPALNDSRYCLSSRLRVSATFWQNPRNHFRCQVQFYGLSENDEWTQDRAKPVTQIVSAEAWGRADCDVKLVEKSFETDTNLNFQNLSVIGFRILLLKVAGFNLLMTLRLWSSRAKRSGSGATNFSLLKQAGDVEENPGPTSMDWIWRILFLVGAATGAHSGPMDPDLEIRAAFLRQRNTALRTEVAELEQEVQRLENEVSQYETRYGPLGGGKGSGGGGSGGGGSGGGGSFEEVQLVQSGAELKKPGASVKVSCKASGYTFTDYYMKWVRQAPGQGLEWIGDIIPSNGATFYNQKFKGRVTITVDKSTSTAYMELSSLRSEDTAVYYCARSHLLRASWFAYWGQGTLVTVSSTRIQNPDPAVYQLRDSKSSDKSVCLFTDFDSQTNVSQSKDSDVYITDKCVLDMRSMDFKSNSAVAWSNKSDFACANAFNNSIIPEDTFFPSPESSCGFTSESYQQGVLSATILYEILLGKATLYAVLVSALVLMAMVKRKDSRG

SEQ ID NO: 44565 - protein, 700 aa, synthetic construct
MALPVTALLLPLALLLHAARPDFVMTQSPDSLAVSLGERVTMSCKSSQSLLNSGNQKNYLTWYQQKPGQPPKLLIYWASTRESGVPDRFSGSGSGTDFTLTISSLQAEDVAVYYCQNDYSYPYTFGQGTKLEIKLEIQNPDPAVYQLRDSKSSDKSVCLFTDFDSQTNVSQSKDSDVYITDKCVLDMRSMDFKSNSAVAWSNKSDFACANAFNNSIIPEDTFFPSPESSCGFTSESYQQGVLSATILYEILLGKATLYAVLVSALVLMAMVKRKDSRGRAKRSGSGVKQTLNFDLLKLAGDVESNPGPTSMDWIWRILFLVGAATGAHSGPMDPDLEIRAAFLRQRNTALRTEVAELEQEVQRLENEVSQYETRYGPLGGGKGSGGGGSGGGGSGGGGSFEEVQLVQSGAELKKPGASVKVSCKASGYTFTDYYMKWVRQAPGQGLEWIGDIIPSNGATFYNQKFKGRVTITVDKSTSTAYMELSSLRSEDTAVYYCARSHLLRASWFAYWGQGTLVTVSSTREDLKNVFPPEVAVFEPSEAEISHTQKATLVCLATGFYPDHVELSWWVNGKEVHSGVCTDPQPLKEQPALNDSRYCLSSRLRVSATFWQNPRNHFRCQVQFYGLSENDEWTQDRAKPVTQIVSAEAWGRADCDVKLVEKSFETDTNLNFQNLSVIGFRILLLKVAGFNLLMTLRLWSS

SEQ ID NO: 44566 - protein, 673 aa, synthetic construct
MALPVTALLLPLALLLHAARPDFVMTQSPDSLAVSLGERVTMSCKSSQSLLNSGNQKNYLTWYQQKPGQPPKLLIYWASTRESGVPDRFSGSGSGTDFTLTISSLQAEDVAVYYCQNDYSYPYTFGQGTKLEIKLEDLKNVFPPEVAVFEPSEAEISHTQKATLVCLATGFYPDHVELSWWVNGKEVHSGVCTDPQPLKEQPALNDSRYCLSSRLRVSATFWQNPRNHFRCQVQFYGLSENDEWTQDRAKPVTQIVSAEAWGRADCDVKLVEKSFETDTNLNFQNLSVIGFRILLLKVAGFNLLMTLRLWSSRAKRSGSGATNFSLLKQAGDVEENPGPTSMDWIWRILFLVGAATGAHSGPEVAALEKEVAALEKEVAALEKEVAALEKGSGGGGSGGGGSGGGGSFEEVQLVQSGAELKKPGASVKVSCKASGYTFTDYYMKWVRQAPGQGLEWIGDIIPSNGATFYNQKFKGRVTITVDKSTSTAYMELSSLRSEDTAVYYCARSHLLRASWFAYWGQGTLVTVSSTRIQNPDPAVYQLRDSKSSDKSVCLFTDFDSQTNVSQSKDSDVYITDKCVLDMRSMDFKSNSAVAWSNKSDFACANAFNNSIIPEDTFFPSPESSCGFTSESYQQGVLSATILYEILLGKATLYAVLVSALVLMAMVKRKDSRG

SEQ ID NO: 44567 - protein, 677 aa, synthetic construct
MALPVTALLLPLALLLHAARPDFVMTQSPDSLAVSLGERVTMSCKSSQSLLNSGNQKNYLTWYQQKPGQPPKLLIYWASTRESGVPDRFSGSGSGTDFTLTISSLQAEDVAVYYCQNDYSYPYTFGQGTKLEIKLEIQNPDPAVYQLRDSKSSDKSVCLFTDFDSQTNVSQSKDSDVYITDKCVLDMRSMDFKSNSAVAWSNKSDFACANAFNNSIIPEDTFFPSPESSCGFTSESYQQGVLSATILYEILLGKATLYAVLVSALVLMAMVKRKDSRGRAKRSGSGVKQTLNFDLLKLAGDVESNPGPTSMDWIWRILFLVGAATGAHSGPEVAALEKEVAALEKEVAALEKEVAALEKGSGGGGSGGGGSGGGGSFEEVQLVQSGAELKKPGASVKVSCKASGYTFTDYYMKWVRQAPGQGLEWIGDIIPSNGATFYNQKFKGRVTITVDKSTSTAYMELSSLRSEDTAVYYCARSHLLRASWFAYWGQGTLVTVSSTREDLKNVFPPEVAVFEPSEAEISHTQKATLVCLATGFYPDHVELSWWVNGKEVHSGVCTDPQPLKEQPALNDSRYCLSSRLRVSATFWQNPRNHFRCQVQFYGLSENDEWTQDRAKPVTQIVSAEAWGRADCDVKLVEKSFETDTNLNFQNLSVIGFRILLLKVAGFNLLMTLRLWSS

SEQ ID NO: 44568 - protein, 763 aa, synthetic construct
MALPVTALLLPLALLLHAARPDFVMTQSPDSLAVSLGERVTMSCKSSQSLLNSGNQKNYLTWYQQKPGQPPKLLIYWASTRESGVPDRFSGSGSGTDFTLTISSLQAEDVAVYYCQNDYSYPYTFGQGTKLEIKLEDLKNVFPPEVAVFEPSEAEISHTQKATLVCLATGFYPDHVELSWWVNGKEVHSGVCTDPQPLKEQPALNDSRYCLSSRLRVSATFWQNPRNHFRCQVQFYGLSENDEWTQDRAKPVTQIVSAEAWGRADCDVKLVEKSFETDTNLNFQNLSVIGFRILLLKVAGFNLLMTLRLWSSRAKRSGSGATNFSLLKQAGDVEENPGPTSMDWIWRILFLVGAATGAHSGPQVQLQESGGGLAQAGGSLRLSCAASGRTFSMGWFRQAPGKEREFVAAITYSGGSPYYASSVRGRFTISRDNAKNTVYLQMNSLKPEDTAVYYCAANPTYGSDWNAENWGQGTQVTVSSGSGGGGSGGGGSGGGGSFEEVQLVQSGAELKKPGASVKVSCKASGYTFTDYYMKWVRQAPGQGLEWIGDIIPSNGATFYNQKFKGRVTITVDKSTSTAYMELSSLRSEDTAVYYCARSHLLRASWFAYWGQGTLVTVSSTRIQNPDPAVYQLRDSKSSDKSVCLFTDFDSQTNVSQSKDSDVYITDKCVLDMRSMDFKSNSAVAWSNKSDFACANAFNNSIIPEDTFFPSPESSCGFTSESYQQGVLSATILYEILLGKATLYAVLVSALVLMAMVKRKDSRG

SEQ ID NO: 44569 - protein, 767 aa, synthetic construct
MALPVTALLLPLALLLHAARPDFVMTQSPDSLAVSLGERVTMSCKSSQSLLNSGNQKNYLTWYQQKPGQPPKLLIYWASTRESGVPDRFSGSGSGTDFTLTISSLQAEDVAVYYCQNDYSYPYTFGQGTKLEIKLEIQNPDPAVYQLRDSKSSDKSVCLFTDFDSQTNVSQSKDSDVYITDKCVLDMRSMDFKSNSAVAWSNKSDFACANAFNNSIIPEDTFFPSPESSCGFTSESYQQGVLSATILYEILLGKATLYAVLVSALVLMAMVKRKDSRGRAKRSGSGVKQTLNFDLLKLAGDVESNPGPTSMDWIWRILFLVGAATGAHSGPQVQLQESGGGLAQAGGSLRLSCAASGRTFSMGWFRQAPGKEREFVAAITYSGGSPYYASSVRGRFTISRDNAKNTVYLQMNSLKPEDTAVYYCAANPTYGSDWNAENWGQGTQVTVSSGSGGGGSGGGGSGGGGSFEEVQLVQSGAELKKPGASVKVSCKASGYTFTDYYMKWVRQAPGQGLEWIGDIIPSNGATFYNQKFKGRVTITVDKSTSTAYMELSSLRSEDTAVYYCARSHLLRASWFAYWGQGTLVTVSSTREDLKNVFPPEVAVFEPSEAEISHTQKATLVCLATGFYPDHVELSWWVNGKEVHSGVCTDPQPLKEQPALNDSRYCLSSRLRVSATFWQNPRNHFRCQVQFYGLSENDEWTQDRAKPVTQIVSAEAWGRADCDVKLVEKSFETDTNLNFQNLSVIGFRILLLKVAGFNLLMTLRLWSS

SEQ ID NO: 44570 - protein, 769 aa, synthetic construct
MALPVTALLLPLALLLHAARPEVQLVESGGSLVQPGGSLRLSCAASGFTFDDYAMSWVRQVPGKGLEWVSSINWSGTHTDYADSVKGRFTISRNNANNTLYLQMNSLKSEDTAVYYCAKNWRDAGTTWFEKSGSAGQGTQVTVSSGTGGGGSGGGGSGGGGSEFDFVMTQSPDSLAVSLGERVTMSCKSSQSLLNSGNQKNYLTWYQQKPGQPPKLLIYWASTRESGVPDRFSGSGSGTDFTLTISSLQAEDVAVYYCQNDYSYPYTFGQGTKLEIKLEDLKNVFPPEVAVFEPSEAEISHTQKATLVCLATGFYPDHVELSWWVNGKEVHSGVCTDPQPLKEQPALNDSRYCLSSRLRVSATFWQNPRNHFRCQVQFYGLSENDEWTQDRAKPVTQIVSAEAWGRADCDVKLVEKSFETDTNLNFQNLSVIGFRILLLKVAGFNLLMTLRLWSSRAKRSGSGATNFSLLKQAGDVEENPGPTSMDWIWRILFLVGAATGAHSFEEVQLVQSGAELKKPGASVKVSCKASGYTFTDYYMKWVRQAPGQGLEWIGDIIPSNGATFYNQKFKGRVTITVDKSTSTAYMELSSLRSEDTAVYYCARSHLLRASWFAYWGQGTLVTVSSTRIQNPDPAVYQLRDSKSSDKSVCLFTDFDSQTNVSQSKDSDVYITDKCVLDMRSMDFKSNSAVAWSNKSDFACANAFNNSIIPEDTFFPSPESSCGFTSESYQQGVLSATILYEILLGKATLYAVLVSALVLMAMVKRKDSRG

SEQ ID NO: 44571 - protein, 773 aa, synthetic construct
MALPVTALLLPLALLLHAARPEVQLVESGGSLVQPGGSLRLSCAASGFTFDDYAMSWVRQVPGKGLEWVSSINWSGTHTDYADSVKGRFTISRNNANNTLYLQMNSLKSEDTAVYYCAKNWRDAGTTWFEKSGSAGQGTQVTVSSGTGGGGSGGGGSGGGGSEFDFVMTQSPDSLAVSLGERVTMSCKSSQSLLNSGNQKNYLTWYQQKPGQPPKLLIYWASTRESGVPDRFSGSGSGTDFTLTISSLQAEDVAVYYCQNDYSYPYTFGQGTKLEIKLEIQNPDPAVYQLRDSKSSDKSVCLFTDFDSQTNVSQSKDSDVYITDKCVLDMRSMDFKSNSAVAWSNKSDFACANAFNNSIIPEDTFFPSPESSCGFTSESYQQGVLSATILYEILLGKATLYAVLVSALVLMAMVKRKDSRGRAKRSGSGVKQTLNFDLLKLAGDVESNPGPTSMDWIWRILFLVGAATGAHSFEEVQLVQSGAELKKPGASVKVSCKASGYTFTDYYMKWVRQAPGQGLEWIGDIIPSNGATFYNQKFKGRVTITVDKSTSTAYMELSSLRSEDTAVYYCARSHLLRASWFAYWGQGTLVTVSSTREDLKNVFPPEVAVFEPSEAEISHTQKATLVCLATGFYPDHVELSWWVNGKEVHSGVCTDPQPLKEQPALNDSRYCLSSRLRVSATFWQNPRNHFRCQVQFYGLSENDEWTQDRAKPVTQIVSAEAWGRADCDVKLVEKSFETDTNLNFQNLSVIGFRILLLKVAGFNLLMTLRLWSS

SEQ ID NO: 44572 - protein, 767 aa, synthetic construct
MALPVTALLLPLALLLHAARPEVQLLESGGGLVQPGGSLRLSCAASGFIFSSYAMSWVRQAPGKGQEWVSGVSGTGVNTYYADSVKGRFTISRDNSKNTLYLQMNSLRAEDTAVYYCASGKGWDSGSWYEDYRGQGTLVTVSSGTGGGGSGGGGSGGGGSEFDFVMTQSPDSLAVSLGERVTMSCKSSQSLLNSGNQKNYLTWYQQKPGQPPKLLIYWASTRESGVPDRFSGSGSGTDFTLTISSLQAEDVAVYYCQNDYSYPYTFGQGTKLEIKLEDLKNVFPPEVAVFEPSEAEISHTQKATLVCLATGFYPDHVELSWWVNGKEVHSGVCTDPQPLKEQPALNDSRYCLSSRLRVSATFWQNPRNHFRCQVQFYGLSENDEWTQDRAKPVTQIVSAEAWGRADCDVKLVEKSFETDTNLNFQNLSVIGFRILLLKVAGFNLLMTLRLWSSRAKRSGSGATNFSLLKQAGDVEENPGPTSMDWIWRILFLVGAATGAHSFEEVQLVQSGAELKKPGASVKVSCKASGYTFTDYYMKWVRQAPGQGLEWIGDIIPSNGATFYNQKFKGRVTITVDKSTSTAYMELSSLRSEDTAVYYCARSHLLRASWFAYWGQGTLVTVSSTRIQNPDPAVYQLRDSKSSDKSVCLFTDFDSQTNVSQSKDSDVYITDKCVLDMRSMDFKSNSAVAWSNKSDFACANAFNNSIIPEDTFFPSPESSCGFTSESYQQGVLSATILYEILLGKATLYAVLVSALVLMAMVKRKDSRG

SEQ ID NO: 44573 - protein, 771 aa, synthetic construct
MALPVTALLLPLALLLHAARPEVQLLESGGGLVQPGGSLRLSCAASGFIFSSYAMSWVRQAPGKGQEWVSGVSGTGVNTYYADSVKGRFTISRDNSKNTLYLQMNSLRAEDTAVYYCASGKGWDSGSWYEDYRGQGTLVTVSSGTGGGGSGGGGSGGGGSEFDFVMTQSPDSLAVSLGERVTMSCKSSQSLLNSGNQKNYLTWYQQKPGQPPKLLIYWASTRESGVPDRFSGSGSGTDFTLTISSLQAEDVAVYYCQNDYSYPYTFGQGTKLEIKLEIQNPDPAVYQLRDSKSSDKSVCLFTDFDSQTNVSQSKDSDVYITDKCVLDMRSMDFKSNSAVAWSNKSDFACANAFNNSIIPEDTFFPSPESSCGFTSESYQQGVLSATILYEILLGKATLYAVLVSALVLMAMVKRKDSRGRAKRSGSGVKQTLNFDLLKLAGDVESNPGPTSMDWIWRILFLVGAATGAHSFEEVQLVQSGAELKKPGASVKVSCKASGYTFTDYYMKWVRQAPGQGLEWIGDIIPSNGATFYNQKFKGRVTITVDKSTSTAYMELSSLRSEDTAVYYCARSHLLRASWFAYWGQGTLVTVSSTREDLKNVFPPEVAVFEPSEAEISHTQKATLVCLATGFYPDHVELSWWVNGKEVHSGVCTDPQPLKEQPALNDSRYCLSSRLRVSATFWQNPRNHFRCQVQFYGLSENDEWTQDRAKPVTQIVSAEAWGRADCDVKLVEKSFETDTNLNFQNLSVIGFRILLLKVAGFNLLMTLRLWSS

SEQ ID NO: 44574 - protein, 735 aa, synthetic construct
MALPVTALLLPLALLLHAARPMLPAPKNLVVSRITEDSARLSWTAPDAAFDSFPIRYIETLIWGEAIWLDVPGSERSYDLTGLKPGTEYAVVITGVKGGRFSSPLVASFTTGTGGGGSGGGGSGGGGSEFDFVMTQSPDSLAVSLGERVTMSCKSSQSLLNSGNQKNYLTWYQQKPGQPPKLLIYWASTRESGVPDRFSGSGSGTDFTLTISSLQAEDVAVYYCQNDYSYPYTFGQGTKLEIKLEDLKNVFPPEVAVFEPSEAEISHTQKATLVCLATGFYPDHVELSWWVNGKEVHSGVCTDPQPLKEQPALNDSRYCLSSRLRVSATFWQNPRNHFRCQVQFYGLSENDEWTQDRAKPVTQIVSAEAWGRADCDVKLVEKSFETDTNLNFQNLSVIGFRILLLKVAGFNLLMTLRLWSSRAKRSGSGATNFSLLKQAGDVEENPGPTSMDWIWRILFLVGAATGAHSFEEVQLVQSGAELKKPGASVKVSCKASGYTFTDYYMKWVRQAPGQGLEWIGDIIPSNGATFYNQKFKGRVTITVDKSTSTAYMELSSLRSEDTAVYYCARSHLLRASWFAYWGQGTLVTVSSTRIQNPDPAVYQLRDSKSSDKSVCLFTDFDSQTNVSQSKDSDVYITDKCVLDMRSMDFKSNSAVAWSNKSDFACANAFNNSIIPEDTFFPSPESSCGFTSESYQQGVLSATILYEILLGKATLYAVLVSALVLMAMVKRKDSRG

SEQ ID NO: 44575 - protein, 739 aa, synthetic construct
MALPVTALLLPLALLLHAARPMLPAPKNLVVSRITEDSARLSWTAPDAAFDSFPIRYIETLIWGEAIWLDVPGSERSYDLTGLKPGTEYAVVITGVKGGRFSSPLVASFTTGTGGGGSGGGGSGGGGSEFDFVMTQSPDSLAVSLGERVTMSCKSSQSLLNSGNQKNYLTWYQQKPGQPPKLLIYWASTRESGVPDRFSGSGSGTDFTLTISSLQAEDVAVYYCQNDYSYPYTFGQGTKLEIKLEIQNPDPAVYQLRDSKSSDKSVCLFTDFDSQTNVSQSKDSDVYITDKCVLDMRSMDFKSNSAVAWSNKSDFACANAFNNSIIPEDTFFPSPESSCGFTSESYQQGVLSATILYEILLGKATLYAVLVSALVLMAMVKRKDSRGRAKRSGSGVKQTLNFDLLKLAGDVESNPGPTSMDWIWRILFLVGAATGAHSFEEVQLVQSGAELKKPGASVKVSCKASGYTFTDYYMKWVRQAPGQGLEWIGDIIPSNGATFYNQKFKGRVTITVDKSTSTAYMELSSLRSEDTAVYYCARSHLLRASWFAYWGQGTLVTVSSTREDLKNVFPPEVAVFEPSEAEISHTQKATLVCLATGFYPDHVELSWWVNGKEVHSGVCTDPQPLKEQPALNDSRYCLSSRLRVSATFWQNPRNHFRCQVQFYGLSENDEWTQDRAKPVTQIVSAEAWGRADCDVKLVEKSFETDTNLNFQNLSVIGFRILLLKVAGFNLLMTLRLWSS

SEQ ID NO: 44576 - protein, 764 aa, synthetic construct
MALPVTALLLPLALLLHAARPEVQLVESGGGLVQPGGSLRLSCAASGFNIKDTCIGWVRRAPGKEEELVAKICKYSGHTRYADSVKGRFTISADTSKNTAYLQMNSLRAEDTAVYYCAAVSVRDGHYNYWGQGTTVTVSSGTGGGGSGGGGSGGGGSEFDFVMTQSPDSLAVSLGERVTMSCKSSQSLLNSGNQKNYLTWYQQKPGQPPKLLIYWASTRESGVPDRFSGSGSGTDFTLTISSLQAEDVAVYYCQNDYSYPYTFGQGTKLEIKLEDLKNVFPPEVAVFEPSEAEISHTQKATLVCLATGFYPDHVELSWWVNGKEVHSGVCTDPQPLKEQPALNDSRYCLSSRLRVSATFWQNPRNHFRCQVQFYGLSENDEWTQDRAKPVTQIVSAEAWGRADCDVKLVEKSFETDTNLNFQNLSVIGFRILLLKVAGFNLLMTLRLWSSRAKRSGSGATNFSLLKQAGDVEENPGPTSMDWIWRILFLVGAATGAHSFEEVQLVQSGAELKKPGASVKVSCKASGYTFTDYYMKWVRQAPGQGLEWIGDIIPSNGATFYNQKFKGRVTITVDKSTSTAYMELSSLRSEDTAVYYCARSHLLRASWFAYWGQGTLVTVSSTRIQNPDPAVYQLRDSKSSDKSVCLFTDFDSQTNVSQSKDSDVYITDKCVLDMRSMDFKSNSAVAWSNKSDFACANAFNNSIIPEDTFFPSPESSCGFTSESYQQGVLSATILYEILLGKATLYAVLVSALVLMAMVKRKDSRG

SEQ ID NO: 44577 - protein, 768 aa, synthetic construct
MALPVTALLLPLALLLHAARPEVQLVESGGGLVQPGGSLRLSCAASGFNIKDTCIGWVRRAPGKEEELVAKICKYSGHTRYADSVKGRFTISADTSKNTAYLQMNSLRAEDTAVYYCAAVSVRDGHYNYWGQGTTVTVSSGTGGGGSGGGGSGGGGSEFDFVMTQSPDSLAVSLGERVTMSCKSSQSLLNSGNQKNYLTWYQQKPGQPPKLLIYWASTRESGVPDRFSGSGSGTDFTLTISSLQAEDVAVYYCQNDYSYPYTFGQGTKLEIKLEIQNPDPAVYQLRDSKSSDKSVCLFTDFDSQTNVSQSKDSDVYITDKCVLDMRSMDFKSNSAVAWSNKSDFACANAFNNSIIPEDTFFPSPESSCGFTSESYQQGVLSATILYEILLGKATLYAVLVSALVLMAMVKRKDSRGRAKRSGSGVKQTLNFDLLKLAGDVESNPGPTSMDWIWRILFLVGAATGAHSFEEVQLVQSGAELKKPGASVKVSCKASGYTFTDYYMKWVRQAPGQGLEWIGDIIPSNGATFYNQKFKGRVTITVDKSTSTAYMELSSLRSEDTAVYYCARSHLLRASWFAYWGQGTLVTVSSTREDLKNVFPPEVAVFEPSEAEISHTQKATLVCLATGFYPDHVELSWWVNGKEVHSGVCTDPQPLKEQPALNDSRYCLSSRLRVSATFWQNPRNHFRCQVQFYGLSENDEWTQDRAKPVTQIVSAEAWGRADCDVKLVEKSFETDTNLNFQNLSVIGFRILLLKVAGFNLLMTLRLWSS

SEQ ID NO: 44578 - protein, 1135 aa, synthetic construct
MALPVTALLLPLALLLHAARPEVQLVESGGGLVQAGGSLRLSCAASGRTFSMGWFRQAPGKEREFVAAITYSGGSPYYADSVKGRFTISRDNAKNTVYLQMNSLKPEDTAVYYCAANPTYGSDWNAENWGQGTQVTVSSGTGGGGSGGGGSGGGGSEFDFVMTQSPDSLAVSLGERVTMSCKSSQSLLNSGNQKNYLTWYQQKPGQPPKLLIYWASTRESGVPDRFSGSGSGTDFTLTISSLQAEDVAVYYCQNDYSYPYTFGQGTKLEIKLEDLKNVFPPEVAVFEPSEAEISHTQKATLVCLATGFYPDHVELSWWVNGKEVHSGVCTDPQPLKEQPALNDSRYCLSSRLRVSATFWQNPRNHFRCQVQFYGLSENDEWTQDRAKPVTQIVSAEAWGRADCDVKLVEKSFETDTNLNFQNLSVIGFRILLLKVAGFNLLMTLRLWSSRAKRSGSGATNFSLLKQAGDVEENPGPTSATMDWIWRILFLVGAATGAHSGPEVQLVESGGGLVQAGGSLRLSCAASGRTFTMGWFRQAPGKEREFVAAISLSPTLAYYADSVKGRFTISRDNAKNTVVLQMNSLKPEDTALYYCAADRKSVMSIRPDYWGQGTQVTVSSGSGGGGSGGGGSGGGGSFEEVQLVQSGAELKKPGASVKVSCKASGYTFTDYYMKWVRQAPGQGLEWIGDIIPSNGATFYNQKFKGRVTITVDKSTSTAYMELSSLRSEDTAVYYCARSHLLRASWFAYWGQGTLVTVSSTRIQNPDPAVYQLRDSKSSDKSVCLFTDFDSQTNVSQSKDSDVYITDKCVLDMRSMDFKSNSAVAWSNKSDFACANAFNNSIIPEDTFFPSPESSCGFTSESYQQGVLSATILYEILLGKATLYAVLVSALVLMAMVKRKDSRGRAKRSGSGVKQTLNFDLLKLAGDVESNPGPSRGHMTEYKPTVRLATRDDVPRAVRTLAAAFADYPATRHTVDPDRHIERVTELQELFLTRVGLDIGKVWVADDGAAVAVWTTPESVEAGAVFAEIGPRMAELSGSRLAAQQQMEGLLAPHRPKEPAWFLATVGVSPDHQGKGLGSAVVLPGVEAAERAGVPAFLETSAPRNLPFYERLGFTVTADVEVPEGPRTWCMTRKPGA

SEQ ID NO: 44579 - protein, 773 aa, synthetic construct
MALPVTALLLPLALLLHAARPEVQLVESGGGLVQPGGSLRLSCAASGFASDYYIIGWFRQAPGKEREGVSCISSRYANTNYADSVKGRFTISRDNAKNTVYLQMNSLKPEDTAVYYCAADTRRYTCPDIATMHRNFDSWGQGTLVTVSSGTGGGGSGGGGSGGGGSEFDFVMTQSPDSLAVSLGERVTMSCKSSQSLLNSGNQKNYLTWYQQKPGQPPKLLIYWASTRESGVPDRFSGSGSGTDFTLTISSLQAEDVAVYYCQNDYSYPYTFGQGTKLEIKLEDLKNVFPPEVAVFEPSEAEISHTQKATLVCLATGFYPDHVELSWWVNGKEVHSGVCTDPQPLKEQPALNDSRYCLSSRLRVSATFWQNPRNHFRCQVQFYGLSENDEWTQDRAKPVTQIVSAEAWGRADCDVKLVEKSFETDTNLNFQNLSVIGFRILLLKVAGFNLLMTLRLWSSRAKRSGSGATNFSLLKQAGDVEENPGPTSMDWIWRILFLVGAATGAHSFEEVQLVQSGAELKKPGASVKVSCKASGYTFTDYYMKWVRQAPGQGLEWIGDIIPSNGATFYNQKFKGRVTITVDKSTSTAYMELSSLRSEDTAVYYCARSHLLRASWFAYWGQGTLVTVSSTRIQNPDPAVYQLRDSKSSDKSVCLFTDFDSQTNVSQSKDSDVYITDKCVLDMRSMDFKSNSAVAWSNKSDFACANAFNNSIIPEDTFFPSPESSCGFTSESYQQGVLSATILYEILLGKATLYAVLVSALVLMAMVKRKDSRG

SEQ ID NO: 44580 - protein, 773 aa, synthetic construct
MALPVTALLLPLALLLHAARPEVQLVESGGGLVQPGGSLRLSCEASGFASDDYIIGWFRQAPGKEREGVSCISSKYANTVYTDSVKGRFRLSRGTAKNTVYLQMSALKPEDTAVYYCAMDSRRVTCPEISTMHRNFDSWGQGTLVTVSSGTGGGGSGGGGSGGGGSEFDFVMTQSPDSLAVSLGERVTMSCKSSQSLLNSGNQKNYLTWYQQKPGQPPKLLIYWASTRESGVPDRFSGSGSGTDFTLTISSLQAEDVAVYYCQNDYSYPYTFGQGTKLEIKLEDLKNVFPPEVAVFEPSEAEISHTQKATLVCLATGFYPDHVELSWWVNGKEVHSGVCTDPQPLKEQPALNDSRYCLSSRLRVSATFWQNPRNHFRCQVQFYGLSENDEWTQDRAKPVTQIVSAEAWGRADCDVKLVEKSFETDTNLNFQNLSVIGFRILLLKVAGFNLLMTLRLWSSRAKRSGSGATNFSLLKQAGDVEENPGPTSMDWIWRILFLVGAATGAHSFEEVQLVQSGAELKKPGASVKVSCKASGYTFTDYYMKWVRQAPGQGLEWIGDIIPSNGATFYNQKFKGRVTITVDKSTSTAYMELSSLRSEDTAVYYCARSHLLRASWFAYWGQGTLVTVSSTRIQNPDPAVYQLRDSKSSDKSVCLFTDFDSQTNVSQSKDSDVYITDKCVLDMRSMDFKSNSAVAWSNKSDFACANAFNNSIIPEDTFFPSPESSCGFTSESYQQGVLSATILYEILLGKATLYAVLVSALVLMAMVKRKDSRG

SEQ ID NO: 44581 - protein, 773 aa, synthetic construct
MALPVTALLLPLALLLHAARPEVQLVESGGGLVQPGGSLRLSCAASGFASDYYIIGWFRQAPGKEREGVSCISSRYANTNYADSVKGRFTISRDNAKNTVYLQMNSLKPEDTAVYYCAADTRRYTCPDIATMHRNFDSWGQGTLVTVSSGTGGGGSGGGGSGGGGSEFDFVMTQSPDSLAVSLGERVTMSCKSSQSLLNSGNQKNYLTWYQQKPGQPPKLLIYWASTRESGVPDRFSGSGSGTDFTLTISSLQAEDVAVYYCQNDYSYPYTFGQGTKLEIKLEIQNPDPAVYQLRDSKSSDKSVCLFTDFDSQTNVSQSKDSDVYITDKCVLDMRSMDFKSNSAVAWSNKSDFACANAFNNSIIPEDTFFPSPESSCGFTSESYQQGVLSATILYEILLGKATLYAVLVSALVLMAMVKRKDSRGRAKRSGSGATNFSLLKQAGDVEENPGPTSMDWIWRILFLVGAATGAHSFEEVQLVQSGAELKKPGASVKVSCKASGYTFTDYYMKWVRQAPGQGLEWIGDIIPSNGATFYNQKFKGRVTITVDKSTSTAYMELSSLRSEDTAVYYCARSHLLRASWFAYWGQGTLVTVSSTRDLKNVFPPEVAVFEPSEAEISHTQKATLVCLATGFYPDHVELSWWVNGKEVHSGVCTDPQPLKEQPALNDSRYCLSSRLRVSATFWQNPRNHFRCQVQFYGLSENDEWTQDRAKPVTQIVSAEAWGRADCDVKLVEKSFETDTNLNFQNLSVIGFRILLLKVAGFNLLMTLRLWSS

SEQ ID NO: 44582 - protein, 773 aa, synthetic construct
MALPVTALLLPLALLLHAARPEVQLVESGGGLVQPGGSLRLSCEASGFASDDYIIGWFRQAPGKEREGVSCISSKYANTVYTDSVKGRFRLSRGTAKNTVYLQMSALKPEDTAVYYCAMDSRRVTCPEISTMHRNFDSWGQGTLVTVSSGTGGGGSGGGGSGGGGSEFDFVMTQSPDSLAVSLGERVTMSCKSSQSLLNSGNQKNYLTWYQQKPGQPPKLLIYWASTRESGVPDRFSGSGSGTDFTLTISSLQAEDVAVYYCQNDYSYPYTFGQGTKLEIKLEIQNPDPAVYQLRDSKSSDKSVCLFTDFDSQTNVSQSKDSDVYITDKCVLDMRSMDFKSNSAVAWSNKSDFACANAFNNSIIPEDTFFPSPESSCGFTSESYQQGVLSATILYEILLGKATLYAVLVSALVLMAMVKRKDSRGRAKRSGSGATNFSLLKQAGDVEENPGPTSMDWIWRILFLVGAATGAHSFEEVQLVQSGAELKKPGASVKVSCKASGYTFTDYYMKWVRQAPGQGLEWIGDIIPSNGATFYNQKFKGRVTITVDKSTSTAYMELSSLRSEDTAVYYCARSHLLRASWFAYWGQGTLVTVSSTRDLKNVFPPEVAVFEPSEAEISHTQKATLVCLATGFYPDHVELSWWVNGKEVHSGVCTDPQPLKEQPALNDSRYCLSSRLRVSATFWQNPRNHFRCQVQFYGLSENDEWTQDRAKPVTQIVSAEAWGRADCDVKLVEKSFETDTNLNFQNLSVIGFRILLLKVAGFNLLMTLRLWSS

SEQ ID NO: 44583 - protein, 764 aa, synthetic construct
MALPVTALLLPLALLLHAARPQVKLEESGGGLVQPGESLRLSCSASGSIFKVFRVFAMSWYRQGPGKQRELVASISSGETTTYAESVKGRFTISRDNAKNTAYLQMDSLKPEDTAVYYCNADHTFTGDFWGQGTQVTVSSGTGGGGSGGGGSGGGGSEFDFVMTQSPDSLAVSLGERVTMSCKSSQSLLNSGNQKNYLTWYQQKPGQPPKLLIYWASTRESGVPDRFSGSGSGTDFTLTISSLQAEDVAVYYCQNDYSYPYTFGQGTKLEIKLEIQNPDPAVYQLRDSKSSDKSVCLFTDFDSQTNVSQSKDSDVYITDKCVLDMRSMDFKSNSAVAWSNKSDFACANAFNNSIIPEDTFFPSPESSCGFTSESYQQGVLSATILYEILLGKATLYAVLVSALVLMAMVKRKDSRGRAKRSGSGATNFSLLKQAGDVEENPGPTSMDWIWRILFLVGAATGAHSFEEVQLVQSGAELKKPGASVKVSCKASGYTFTDYYMKWVRQAPGQGLEWIGDIIPSNGATFYNQKFKGRVTITVDKSTSTAYMELSSLRSEDTAVYYCARSHLLRASWFAYWGQGTLVTVSSTRDLKNVFPPEVAVFEPSEAEISHTQKATLVCLATGFYPDHVELSWWVNGKEVHSGVCTDPQPLKEQPALNDSRYCLSSRLRVSATFWQNPRNHFRCQVQFYGLSENDEWTQDRAKPVTQIVSAEAWGRADCDVKLVEKSFETDTNLNFQNLSVIGFRILLLKVAGFNLLMTLRLWSS

SEQ ID NO: 44584 - protein, 765 aa, synthetic construct
MALPVTALLLPLALLLHAARPDFVMTQSPDSLAVSLGERVTMSCKSSQSLLNSGNQKNYLTWYQQKPGQPPKLLIYWASTRESGVPDRFSGSGSGTDFTLTISSLQAEDVAVYYCQNDYSYPYTFGQGTKLEIKLEDLKNVFPPEVAVFEPSEAEISHTQKATLVCLATGFYPDHVELSWWVNGKEVHSGVCTDPQPLKEQPALNDSRYCLSSRLRVSATFWQNPRNHFRCQVQFYGLSENDEWTQDRAKPVTQIVSAEAWGRADCDVKLVEKSFETDTNLNFQNLSVIGFRILLLKVAGFNLLMTLRLWSSRAKRSGSGATNFSLLKQAGDVEENPGPTSATMDWIWRILFLVGAATGAHSGPEVQLVESGGGLVQAGGSLRLSCAASGRTFSMGWFRQAPGKEREFVAAITYSGGSPYYADSVKGRFTISRDNAKNTVYLQMNSLKPEDTAVYYCAANPTYGSDWNAENWGQGTQVTVSSGSGGGGSGGGGSGGGGSFEEVQLVQSGAELKKPGASVKVSCKASGYTFTDYYMKWVRQAPGQGLEWIGDIIPSNGATFYNQKFKGRVTITVDKSTSTAYMELSSLRSEDTAVYYCARSHLLRASWFAYWGQGTLVTVSSTRIQNPDPAVYQLRDSKSSDKSVCLFTDFDSQTNVSQSKDSDVYITDKCVLDMRSMDFKSNSAVAWSNKSDFACANAFNNSIIPEDTFFPSPESSCGFTSESYQQGVLSATILYEILLGKATLYAVLVSALVLMAMVKRKDSRG

SEQ ID NO: 44585 - protein, 766 aa, synthetic construct
MALPVTALLLPLALLLHAARPDFVMTQSPDSLAVSLGERVTMSCKSSQSLLNSGNQKNYLTWYQQKPGQPPKLLIYWASTRESGVPDRFSGSGSGTDFTLTISSLQAEDVAVYYCQNDYSYPYTFGQGTKLEIKLEDLKNVFPPEVAVFEPSEAEISHTQKATLVCLATGFYPDHVELSWWVNGKEVHSGVCTDPQPLKEQPALNDSRYCLSSRLRVSATFWQNPRNHFRCQVQFYGLSENDEWTQDRAKPVTQIVSAEAWGRADCDVKLVEKSFETDTNLNFQNLSVIGFRILLLKVAGFNLLMTLRLWSSRAKRSGSGATNFSLLKQAGDVEENPGPTSATMDWIWRILFLVGAATGAHSGPEVQLVESGGGLVQPGGSLRLSCAASGSIFGFNDMAWYRQAPGKQRELVALISRVGVTSSADSVKGRFTISRVNAKDTVYLQMNSLKPEDTAVYYCYMDQRLDGSTLAYWGQGTQVTVSSGSGGGGSGGGGSGGGGSFEEVQLVQSGAELKKPGASVKVSCKASGYTFTDYYMKWVRQAPGQGLEWIGDIIPSNGATFYNQKFKGRVTITVDKSTSTAYMELSSLRSEDTAVYYCARSHLLRASWFAYWGQGTLVTVSSTRIQNPDPAVYQLRDSKSSDKSVCLFTDFDSQTNVSQSKDSDVYITDKCVLDMRSMDFKSNSAVAWSNKSDFACANAFNNSIIPEDTFFPSPESSCGFTSESYQQGVLSATILYEILLGKATLYAVLVSALVLMAMVKRKDSRG

SEQ ID NO: 44586 - protein, 762 aa, synthetic construct
MALPVTALLLPLALLLHAARPDFVMTQSPDSLAVSLGERVTMSCKSSQSLLNSGNQKNYLTWYQQKPGQPPKLLIYWASTRESGVPDRFSGSGSGTDFTLTISSLQAEDVAVYYCQNDYSYPYTFGQGTKLEIKLEDLKNVFPPEVAVFEPSEAEISHTQKATLVCLATGFYPDHVELSWWVNGKEVHSGVCTDPQPLKEQPALNDSRYCLSSRLRVSATFWQNPRNHFRCQVQFYGLSENDEWTQDRAKPVTQIVSAEAWGRADCDVKLVEKSFETDTNLNFQNLSVIGFRILLLKVAGFNLLMTLRLWSSRAKRSGSGATNFSLLKQAGDVEENPGPTSATMDWIWRILFLVGAATGAHSGPEVQLVESGGGLVQAGGSLRLSCAASGSVFSGNVMGWYRQAPGKEREWVAAIASGGSIYYRDSVKGRFTISRDNAKNTVYLQMNSLKPEDTAVYYCNSHPPTLPYWGLGTQVTVSSGSGGGGSGGGGSGGGGSFEEVQLVQSGAELKKPGASVKVSCKASGYTFTDYYMKWVRQAPGQGLEWIGDIIPSNGATFYNQKFKGRVTITVDKSTSTAYMELSSLRSEDTAVYYCARSHLLRASWFAYWGQGTLVTVSSTRIQNPDPAVYQLRDSKSSDKSVCLFTDFDSQTNVSQSKDSDVYITDKCVLDMRSMDFKSNSAVAWSNKSDFACANAFNNSIIPEDTFFPSPESSCGFTSESYQQGVLSATILYEILLGKATLYAVLVSALVLMAMVKRKDSRG

SEQ ID NO: 44587 - protein, 760 aa, synthetic construct
MALPVTALLLPLALLLHAARPDFVMTQSPDSLAVSLGERVTMSCKSSQSLLNSGNQKNYLTWYQQKPGQPPKLLIYWASTRESGVPDRFSGSGSGTDFTLTISSLQAEDVAVYYCQNDYSYPYTFGQGTKLEIKLEDLKNVFPPEVAVFEPSEAEISHTQKATLVCLATGFYPDHVELSWWVNGKEVHSGVCTDPQPLKEQPALNDSRYCLSSRLRVSATFWQNPRNHFRCQVQFYGLSENDEWTQDRAKPVTQIVSAEAWGRADCDVKLVEKSFETDTNLNFQNLSVIGFRILLLKVAGFNLLMTLRLWSSRAKRSGSGATNFSLLKQAGDVEENPGPTSATMDWIWRILFLVGAATGAHSGPEVQLLESGGGLVQPGGSLRLSCAASGFSFSSYALSWVRQAPGKGLEWVSSIGENDGTTDYADAVKGRFTISRDNSKNTLYLQMNSLRVEDTAVYYCVKDGIHWGQGTLVTVSSGSGGGGSGGGGSGGGGSFEEVQLVQSGAELKKPGASVKVSCKASGYTFTDYYMKWVRQAPGQGLEWIGDIIPSNGATFYNQKFKGRVTITVDKSTSTAYMELSSLRSEDTAVYYCARSHLLRASWFAYWGQGTLVTVSSTRIQNPDPAVYQLRDSKSSDKSVCLFTDFDSQTNVSQSKDSDVYITDKCVLDMRSMDFKSNSAVAWSNKSDFACANAFNNSIIPEDTFFPSPESSCGFTSESYQQGVLSATILYEILLGKATLYAVLVSALVLMAMVKRKDSRG

SEQ ID NO: 44588 - protein, 1129 aa, synthetic construct
MGPRLLFWALLCLLGTGPVEAGVTQSPTHLIKTRGQQATLRCSPISGHTSVYWYQQALGLGLQFLLWYDEGEERNRGNFPPRFSGRQFPNYSSELNVNALELEDSALYLCASSLGGPRGLAGLRGDEQFFGPGTRLTVLEGTGGGGSGGGEFDFVMTQSPDSLAVSLGERVTMSCKSSQSLLNSGNQKNYLTWYQQKPGQPPKLLIYWASTRESGVPDRFSGSGSGTDFTLTISSLQAEDVAVYYCQNDYSYPYTFGQGTKLEIKLEDLKNVFPPEVAVFEPSEAEISHTQKATLVCLATGFYPDHVELSWWVNGKEVHSGVCTDPQPLKEQPALNDSRYCLSSRLRVSATFWQNPRNHFRCQVQFYGLSENDEWTQDRAKPVTQIVSAEAWGRADCDVKLVEKSFETDTNLNFQNLSVIGFRILLLKVAGFNLLMTLRLWSSRAKRSGSGATNFSLLKQAGDVEENPGPTSATMDWIWRILFLVGAATGAHSGPEVQLVESGGGLVQAGGSLRLSCAASGRTFSMGWFRQAPGKEREFVAAITYSGGSPYYADSVKGRFTISRDNAKNTVYLQMNSLKPEDTAVYYCAANPTYGSDWNAENWGQGTQVTVSSGSGGGGSGGGGSGGGGSFEEVQLVQSGAELKKPGASVKVSCKASGYTFTDYYMKWVRQAPGQGLEWIGDIIPSNGATFYNQKFKGRVTITVDKSTSTAYMELSSLRSEDTAVYYCARSHLLRASWFAYWGQGTLVTVSSTRIQNPDPAVYQLRDSKSSDKSVCLFTDFDSQTNVSQSKDSDVYITDKCVLDMRSMDFKSNSAVAWSNKSDFACANAFNNSIIPEDTFFPSPESSCGFTSESYQQGVLSATILYEILLGKATLYAVLVSALVLMAMVKRKDSRGRAKRSGSGVKQTLNFDLLKLAGDVESNPGPSRGHMTEYKPTVRLATRDDVPRAVRTLAAAFADYPATRHTVDPDRHIERVTELQELFLTRVGLDIGKVWVADDGAAVAVWTTPESVEAGAVFAEIGPRMAELSGSRLAAQQQMEGLLAPHRPKEPAWFLATVGVSPDHQGKGLGSAVVLPGVEAAERAGVPAFLETSAPRNLPFYERLGFTVTADVEVPEGPRTWCMTRKPGA

SEQ ID NO: 44589 - protein, 1128 aa, synthetic construct
MGPRLLFWALLCLLGTGPVEAGVTQSPTHLIKTRGQQATLRCSPISGHTSVYWYQQALGLGLQFLLWYDEGEERNRGNFPPRFSGRQFPNYSSELNVNALELEDSALYLCASSLGGDELGADGNEQFFGPGTRLTVLEGTGGGGSGGGSEFDFVMTQSPDSLAVSLGERVTMSCKSSQSLLNSGNQKNYLTWYQQKPGQPPKLLIYWASTRESGVPDRFSGSGSGTDFTLTISSLQAEDVAVYYCQNDYSYPYTFGQGTKLEIKLEDLKNVFPPEVAVFEPSEAEISHTQKATLVCLATGFYPDHVELSWWVNGKEVHSGVCTDPQPLKEQPALNDSRYCLSSRLRVSATFWQNPRNHFRCQVQFYGLSENDEWTQDRAKPVTQIVSAEAWGRADCDVKLVEKSFETDTNLNFQNLSVIGFRILLLKVAGFNLLMTLRLWSSRAKRSGSGATNFSLLKQAGDVEENPGPTSATMDWIWRILFLVGAATGAHSGPEVQLVESGGGLVQAGGSLRLSCAASGRTFSMGWFRQAPGKEREFVAAITYSGGSPYYADSVKGRFTISRDNAKNTVYLQMNSLKPEDTAVYYCAANPTYGSDWNAENWGQGTQVTVSSGSGGGGSGGGGSGGGGSFEEVQLVQSGAELKKPGASVKVSCKASGYTFTDYYMKWVRQAPGQGLEWIGDIIPSNGATFYNQKFKGRVTITVDKSTSTAYMELSSLRSEDTAVYYCARSHLLRASWFAYWGQGTLVTVSSTRIQNPDPAVYQLRDSKSSDKSVCLFTDFDSQTNVSQSKDSDVYITDKCVLDMRSMDFKSNSAVAWSNKSDFACANAFNNSIIPEDTFFPSPESSCGFTSESYQQGVLSATILYEILLGKATLYAVLVSALVLMAMVKRKDSRGRAKRSGSGVKQTLNFDLLKLAGDVESNPGPSRGHMTEYKPTVRLATRDDVPRAVRTLAAAFADYPATRHTVDPDRHIERVTELQELFLTRVGLDIGKVWVADDGAAVAVWTTPESVEAGAVFAEIGPRMAELSGSRLAAQQQMEGLLAPHRPKEPAWFLATVGVSPDHQGKGLGSAVVLPGVEAAERAGVPAFLETSAPRNLPFYERLGFTVTADVEVPEGPRTWCMTRKPGA

SEQ ID NO: 44590 - protein, 953 aa, synthetic construct
MALPVTALLLPLALLLHAARPDFVMTQSPDSLAVSLGERVTMSCKSSQSLLNSGNQKNYLTWYQQKPGQPPKLLIYWASTRESGVPDRFSGSGSGTDFTLTISSLQAEDVAVYYCQNDYSYPYTFGQGTKLEIKLEDLKNVFPPEVAVFEPSEAEISHTQKATLVCLATGFYPDHVELSWWVNGKEVHSGVCTDPQPLKEQPALNDSRYCLSSRLRVSATFWQNPRNHFRCQVQFYGLSENDEWTQDRAKPVTQIVSAEAWGRADCDVKLVEKSFETDTNLNFQNLSVIGFRILLLKVAGFNLLMTLRLWSSRAKRSGSGATNFSLLKQAGDVEENPGPTSATMDWIWRILFLVGAATGAHSGPMGSWLEFYHRLNAIDSRLWALGGSEAELAAFEKEIAAFESELQAYKGKGNPEVESLRDHAAHIREWLQAYRHNGSGGGGSGGGGSGGGGSFEEVQLVQSGAELKKPGASVKVSCKASGYTFTDYYMKWVRQAPGQGLEWIGDIIPSNGATFYNQKFKGRVTITVDKSTSTAYMELSSLRSEDTAVYYCARSHLLRASWFAYWGQGTLVTVSSTRIQNPDPAVYQLRDSKSSDKSVCLFTDFDSQTNVSQSKDSDVYITDKCVLDMRSMDFKSNSAVAWSNKSDFACANAFNNSIIPEDTFFPSPESSCGFTSESYQQGVLSATILYEILLGKATLYAVLVSALVLMAMVKRKDSRGRAKRSGSGVKQTLNFDLLKLAGDVESNPGPSRGHMTEYKPTVRLATRDDVPRAVRTLAAAFADYPATRHTVDPDRHIERVTELQELFLTRVGLDIGKVWVADDGAAVAVWTTPESVEAGAVFAEIGPRMAELSGSRLAAQQQMEGLLAPHRPKEPAWFLATVGVSPDHQGKGLGSAVVLPGVEAAERAGVPAFLETSAPRNLPFYERLGFTVTADVEVPEGPRTWCMTRKPGA

SEQ ID NO: 44591 - protein, 953 aa, synthetic construct
MALPVTALLLPLALLLHAARPACMGSWFEFYDRLNAIDARLWALGGSEAELAAFEKEIAAFESELQAYKGKGNPEVENLRVHAAAIREWLQAYRHNGTGGGGSGGGGSGGGGSEFDFVMTQSPDSLAVSLGERVTMSCKSSQSLLNSGNQKNYLTWYQQKPGQPPKLLIYWASTRESGVPDRFSGSGSGTDFTLTISSLQAEDVAVYYCQNDYSYPYTFGQGTKLEIKLEDLKNVFPPEVAVFEPSEAEISHTQKATLVCLATGFYPDHVELSWWVNGKEVHSGVCTDPQPLKEQPALNDSRYCLSSRLRVSATFWQNPRNHFRCQVQFYGLSENDEWTQDRAKPVTQIVSAEAWGRADCDVKLVEKSFETDTNLNFQNLSVIGFRILLLKVAGFNLLMTLRLWSSRAKRSGSGATNFSLLKQAGDVEENPGPTSMDWIWRILFLVGAATGAHSFEEVQLVQSGAELKKPGASVKVSCKASGYTFTDYYMKWVRQAPGQGLEWIGDIIPSNGATFYNQKFKGRVTITVDKSTSTAYMELSSLRSEDTAVYYCARSHLLRASWFAYWGQGTLVTVSSTRIQNPDPAVYQLRDSKSSDKSVCLFTDFDSQTNVSQSKDSDVYITDKCVLDMRSMDFKSNSAVAWSNKSDFACANAFNNSIIPEDTFFPSPESSCGFTSESYQQGVLSATILYEILLGKATLYAVLVSALVLMAMVKRKDSRGRAKRSGSGVKQTLNFDLLKLAGDVESNPGPSRGHMTEYKPTVRLATRDDVPRAVRTLAAAFADYPATRHTVDPDRHIERVTELQELFLTRVGLDIGKVWVADDGAAVAVWTTPESVEAGAVFAEIGPRMAELSGSRLAAQQQMEGLLAPHRPKEPAWFLATVGVSPDHQGKGLGSAVVLPGVEAAERAGVPAFLETSAPRNLPFYERLGFTVTADVEVPEGPRTWCMTRKPGA

SEQ ID NO: 44592 - protein, 1070 aa, synthetic construct
MALPVTALLLPLALLLHAARPACMDPDLEIRAAFLRQRNTALRTEVAELEQEVQRLENEVSQYETRYGPLGGGKGTGGGGSGGGGSGGGGSEFDFVMTQSPDSLAVSLGERVTMSCKSSQSLLNSGNQKNYLTWYQQKPGQPPKLLIYWASTRESGVPDRFSGSGSGTDFTLTISSLQAEDVAVYYCQNDYSYPYTFGQGTKLEIKLEDLKNVFPPEVAVFEPSEAEISHTQKATLVCLATGFYPDHVELSWWVNGKEVHSGVCTDPQPLKEQPALNDSRYCLSSRLRVSATFWQNPRNHFRCQVQFYGLSENDEWTQDRAKPVTQIVSAEAWGRADCDVKLVEKSFETDTNLNFQNLSVIGFRILLLKVAGFNLLMTLRLWSSRAKRSGSGATNFSLLKQAGDVEENPGPTSATMDWIWRILFLVGAATGAHSGPEVQLVESGGGLVQAGGSLRLSCAASGRTFSMGWFRQAPGKEREFVAAITYSGGSPYYADSVKGRFTISRDNAKNTVYLQMNSLKPEDTAVYYCAANPTYGSDWNAENWGQGTQVTVSSGSGGGGSGGGGSGGGGSFEEVQLVQSGAELKKPGASVKVSCKASGYTFTDYYMKWVRQAPGQGLEWIGDIIPSNGATFYNQKFKGRVTITVDKSTSTAYMELSSLRSEDTAVYYCARSHLLRASWFAYWGQGTLVTVSSTRIQNPDPAVYQLRDSKSSDKSVCLFTDFDSQTNVSQSKDSDVYITDKCVLDMRSMDFKSNSAVAWSNKSDFACANAFNNSIIPEDTFFPSPESSCGFTSESYQQGVLSATILYEILLGKATLYAVLVSALVLMAMVKRKDSRGRAKRSGSGVKQTLNFDLLKLAGDVESNPGPSRGHMTEYKPTVRLATRDDVPRAVRTLAAAFADYPATRHTVDPDRHIERVTELQELFLTRVGLDIGKVWVADDGAAVAVWTTPESVEAGAVFAEIGPRMAELSGSRLAAQQQMEGLLAPHRPKEPAWFLATVGVSPDHQGKGLGSAVVLPGVEAAERAGVPAFLETSAPRNLPFYERLGFTVTADVEVPEGPRTWCMTRKPGA

SEQ ID NO: 44593 - protein, 953 aa, synthetic construct
MALPVTALLLPLALLLHAARPDFVMTQSPDSLAVSLGERVTMSCKSSQSLLNSGNQKNYLTWYQQKPGQPPKLLIYWASTRESGVPDRFSGSGSGTDFTLTISSLQAEDVAVYYCQNDYSYPYTFGQGTKLEIKLEDLKNVFPPEVAVFEPSEAEISHTQKATLVCLATGFYPDHVELSWWVNGKEVHSGVCTDPQPLKEQPALNDSRYCLSSRLRVSATFWQNPRNHFRCQVQFYGLSENDEWTQDRAKPVTQIVSAEAWGRADCDVKLVEKSFETDTNLNFQNLSVIGFRILLLKVAGFNLLMTLRLWSSRAKRSGSGATNFSLLKQAGDVEENPGPTSATMDWIWRILFLVGAATGAHSGPMGSWSEFYDRLHAIHHRLYALGGSEAELAAFEKEIAAFESELQAYKGKGNPEVEALRDTAAFIRTRLQAYRHNGSGGGGSGGGGSGGGGSFEEVQLVQSGAELKKPGASVKVSCKASGYTFTDYYMKWVRQAPGQGLEWIGDIIPSNGATFYNQKFKGRVTITVDKSTSTAYMELSSLRSEDTAVYYCARSHLLRASWFAYWGQGTLVTVSSTRIQNPDPAVYQLRDSKSSDKSVCLFTDFDSQTNVSQSKDSDVYITDKCVLDMRSMDFKSNSAVAWSNKSDFACANAFNNSIIPEDTFFPSPESSCGFTSESYQQGVLSATILYEILLGKATLYAVLVSALVLMAMVKRKDSRGRAKRSGSGVKQTLNFDLLKLAGDVESNPGPSRGHMTEYKPTVRLATRDDVPRAVRTLAAAFADYPATRHTVDPDRHIERVTELQELFLTRVGLDIGKVWVADDGAAVAVWTTPESVEAGAVFAEIGPRMAELSGSRLAAQQQMEGLLAPHRPKEPAWFLATVGVSPDHQGKGLGSAVVLPGVEAAERAGVPAFLETSAPRNLPFYERLGFTVTADVEVPEGPRTWCMTRKPGA

SEQ ID NO: 44594 - protein, 1163 aa, synthetic construct
MALPVTALLLPLALLLHAARPDFVMTQSPDSLAVSLGERVTMSCKSSQSLLNSGNQKNYLTWYQQKPGQPPKLLIYWASTRESGVPDRFSGSGSGTDFTLTISSLQAEDVAVYYCQNDYSYPYTFGQGTKLEIKLEDLKNVFPPEVAVFEPSEAEISHTQKATLVCLATGFYPDHVELSWWVNGKEVHSGVCTDPQPLKEQPALNDSRYCLSSRLRVSATFWQNPRNHFRCQVQFYGLSENDEWTQDRAKPVTQIVSAEAWGRADCDVKLVEKSFETDTNLNFQNLSVIGFRILLLKVAGFNLLMTLRLWSSRAKRSGSGATNFSLLKQAGDVEENPGPTSTMDWIWRILFLVGAATGAHSLFNQEVQIPLTESYCGPCPKNWICYKNNCYQFFDESKNWYESQASCMSQNASLLKVYSKEDQDLLKLVKSAHWMGLVHIPTNGSWQWEDGSILSPNLLTIIEMQKGDCALYASSFKGYIENCSTPNTYICMQRTVSGGGGSGGGGSGGGGDLFNQEVQIPLTESYCGPCPKNWICYKNNCYQFFDESKNWYESQASCMSQNASLLKVYSKEDQDLLKLVKSAHWMGLVHIPTNGSWQWEDGSILSPNLLTIIEMQKGDCALYASSFKGYIENCSTPNTYICMQRTVGSGGGGSGGGGSGGGGSFEEVQLVQSGAELKKPGASVKVSCKASGYTFTDYYMKWVRQAPGQGLEWIGDIIPSNGATFYNQKFKGRVTITVDKSTSTAYMELSSLRSEDTAVYYCARSHLLRASWFAYWGQGTLVTVSSTRIQNPDPAVYQLRDSKSSDKSVCLFTDFDSQTNVSQSKDSDVYITDKCVLDMRSMDFKSNSAVAWSNKSDFACANAFNNSIIPEDTFFPSPESSCGFTSESYQQGVLSATILYEILLGKATLYAVLVSALVLMAMVKRKDSRGRAKRSGSGVKQTLNFDLLKLAGDVESNPGPSRGHMTEYKPTVRLATRDDVPRAVRTLAAAFADYPATRHTVDPDRHIERVTELQELFLTRVGLDIGKVWVADDGAAVAVWTTPESVEAGAVFAEIGPRMAELSGSRLAAQQQMEGLLAPHRPKEPAWFLATVGVSPDHQGKGLGSAVVLPGVEAAERAGVPAFLETSAPRNLPFYERLGFTVTADVEVPEGPRTWCMTRKPGA

SEQ ID NO: 44595 - protein, 626 aa, synthetic construct; identical to SEQ ID NO: 13460

SEQ ID NO: 44596 - protein, 630 aa, synthetic construct; identical to SEQ ID NO: 13625

SEQ ID NO: 44597 - protein, 761 aa, synthetic construct; identical to SEQ ID NO: 13790

SEQ ID NO: 44598 - protein, 765 aa, synthetic construct; identical to SEQ ID NO: 13955

SEQ ID NO: 44599 - protein, 898 aa, synthetic construct; identical to SEQ ID NO: 14120

SEQ ID NO: 44600 - protein, 902 aa, synthetic construct; identical to SEQ ID NO: 14285

SEQ ID NO: 44601 - protein, 730 aa, synthetic construct; identical to SEQ ID NO: 14496

SEQ ID NO: 44602 - protein, 734 aa, synthetic construct; identical to SEQ ID NO: 14661

SEQ ID NO: 44603 - protein, 865 aa, synthetic construct; identical to SEQ ID NO: 14826

SEQ ID NO: 44604 - protein, 869 aa, synthetic construct; identical to SEQ ID NO: 14991

SEQ ID NO: 44605 - protein, 1002 aa, synthetic construct; identical to SEQ ID NO: 15156

SEQ ID NO: 44606 - protein, 1006 aa, synthetic construct; identical to SEQ ID NO: 15322

SEQ ID NO: 44607 - protein, 728 aa, synthetic construct; identical to SEQ ID NO: 15533

SEQ ID NO: 44608 - protein, 732 aa, synthetic construct; identical to SEQ ID NO: 15698

SEQ ID NO: 44609 - protein, 863 aa, synthetic construct; identical to SEQ ID NO: 15863

SEQ ID NO: 44610 - protein, 1000 aa, synthetic construct; identical to SEQ ID NO: 16193

SEQ ID NO: 44611 - protein, 626 aa, synthetic construct
MALPVTALLLPLALLLHAARPDFVMTQSPDSLAVSLGERVTMSCKSSQSLLNSGNQKNYLTWYQQKPGQPPKLLIYWASTRESGVPDRFSGSGSGTDFTLTISSLQAEDVAVYYCQNDYSYPYTFGQGTKLEIKLEDLKNVFPPEVAVFEPSEAEISHTQKATLVCLATGFYPDHVELSWWVNGKEVHSGVSTDPQPLKEQPALNDSRYCLSSRLRVSATFWQNPRNHFRCQVQFYGLSENDEWTQDRAKPVTQIVSAEAWGRADCDVKLVEKSFETDTNLNFQNLSVIGFRILLLKVAGFNLLMTLRLWSSRAKRSGSGATNFSLLKQAGDVEENPGPTSMDWIWRILFLVGAATGAHSFEEVQLVQSGAELKKPGASVKVSCKASGYTFTDYYMKWVRQAPGQGLEWIGDIIPSNGATFYNQKFKGRVTITVDKSTSTAYMELSSLRSEDTAVYYCARSHLLRASWFAYWGQGTLVTVSSTRIQNPDPAVYQLRDSKSSDKSVCLFTDFDSQTNVSQSKDSDVYITDKTVLDMRSMDFKSNSAVAWSNKSDFACANAFNNSIIPEDTFFPSPESSCGFTSESYQQGVLSATILYEILLGKATLYAVLVSALVLMAMVKRKDSRG

SEQ ID NO: 44612 - protein, 626 aa, synthetic construct
MALPVTALLLPLALLLHAARPDFVMTQSPDSLAVSLGERVTMSCKSSQSLLNSGNQKNYLTWYQQKPGQPPKLLIYWASTRESGVPDRFSGSGSGTDFTLTISSLQAEDVAVYYCQNDYSYPYTFGQGTKLEIKLEDLKNVFPPEVAVFEPSEAEISHTQKATLVCLATGFYPDHVELSWWVNGKEVHSGVSTDPQPLKEQPALNDSRYCLSSRLRVSATFWQNPRNHFRCQVQFYGLSENDEWTQDRAKPVTQIVSAEAWGRADCGFTSESYQQGVLSATNLSVIGFRILLLKVAGFNLLMTLRLWSSRAKRSGSGATNFSLLKQAGDVEENPGPTSMDWIWRILFLVGAATGAHSFEEVQLVQSGAELKKPGASVKVSCKASGYTFTDYYMKWVRQAPGQGLEWIGDIIPSNGATFYNQKFKGRVTITVDKSTSTAYMELSSLRSEDTAVYYCARSHLLRASWFAYWGQGTLVTVSSTRIQNPDPAVYQLRDSKSSDKSVCLFTDFDSQTNVSQSKDSDVYITDKTVLDMRSMDFKSNSAVAWSNKSDFACANAFNNSIIPEDTFFPSPESSCDVKLVEKSFETDTNLNFQILYEILLGKATLYAVLVSALVLMAMVKRKDSRG

SEQ ID NO: 44613 - protein, 730 aa, synthetic construct
MALPVTALLLPLALLLHAARPDFVMTQSPDSLAVSLGERVTMSCKSSQSLLNSGNQKNYLTWYQQKPGQPPKLLIYWASTRESGVPDRFSGSGSGTDFTLTISSLQAEDVAVYYCQNDYSYPYTFGQGTKLEIKLEDLKNVFPPEVAVFEPSEAEISHTQKATLVCLATGFYPDHVELSWWVNGKEVHSGVSTDPQPLKEQPALNDSRYCLSSRLRVSATFWQNPRNHFRCQVQFYGLSENDEWTQDRAKPVTQIVSAEAWGRADDVIKIHWQEKKSNTILGSQEGNTMKTNDTYMKFSWLTVPEKSLDKEHRCIVRHENNKNGVDQEIIFPPIKTDVITMDPKDNCSKDANDTLLLQLTNTSAYYMYLLLLLKSVVYFAIITCCLLMAMVKRKDSRGRAKRSGSGATNFSLLKQAGDVEENPGPTSMDWIWRILFLVGAATGAHSFEEVQLVQSGAELKKPGASVKVSCKASGYTFTDYYMKWVRQAPGQGLEWIGDIIPSNGATFYNQKFKGRVTITVDKSTSTAYMELSSLRSEDTAVYYCARSHLLRASWFAYWGQGTLVTVSSTRIQNPDPAVYQLRDSKSSDKSVCLFTDFDSQTNVSQSKDSDVYITDKTVLDMRSMDFKSNSAVAWSNKSDFACANAFNNSIIPEDTFFPSPESSDSTDHVKPKETENTKQPSKSCHKPKAIVHTEKVNMMSLTVLGLRMLFAKTVAVNFLLTAKLFFLLTA

SEQ ID NO: 44614 - protein, 728 aa, synthetic construct
MALPVTALLLPLALLLHAARPDFVMTQSPDSLAVSLGERVTMSCKSSQSLLNSGNQKNYLTWYQQKPGQPPKLLIYWASTRESGVPDRFSGSGSGTDFTLTISSLQAEDVAVYYCQNDYSYPYTFGQGTKLEIKLEDLKNVFPPEVAVFEPSEAEISHTQKATLVCLATGFYPDHVELSWWVNGKEVHSGVSTDPQPLKEQPALNDSRYCLSSRLRVSATFWQNPRNHFRCQVQFYGLSENDEWTQDRAKPVTQIVSAEAWGRADDVIKIHWQEKKSNTILGSQEGNTMKTNDTYMKFSWLTVPEKSLDKEHRCIVRHENNKNGVDQEIIFPPIKTDVITMDPKDNCSKDANDTLLLQLTNTSAYYMYLLLLLKSVVYFAIITCCLLRRTAFCCNGEKSRAKRSGSGATNFSLLKQAGDVEENPGPTSMDWIWRILFLVGAATGAHSFEEVQLVQSGAELKKPGASVKVSCKASGYTFTDYYMKWVRQAPGQGLEWIGDIIPSNGATFYNQKFKGRVTITVDKSTSTAYMELSSLRSEDTAVYYCARSHLLRASWFAYWGQGTLVTVSSTRIQNPDPAVYQLRDSKSSDKSVCLFTDFDSQTNVSQSKDSDVYITDKTVLDMRSMDFKSNSAVAWSNKSDFACANAFNNSIIPEDTFFPSPESSDSTDHVKPKETENTKQPSKSCHKPKAIVHTEKVNMMSLTVLGLRMLFAKTVAVNFLLTAKLFFL

SEQ ID NO: 44615 - protein, 871 aa, synthetic construct
MALPVTALLLPLALLLHAARPLEEDLKNVFPPEVAVFEPSEAEISHTQKATLVCLATGFYPDHVELSWWVNGKEVHSGVCTDPQPLKEQPALNDSRYCLSSRLRVSATFWQNPRNHFRCQVQFYGLSENDEWTQDRAKPVTQIVSAEAWGRADCGFTSESYQQGVLSATNLSVIGFRILLLKVAGFNLLMTLRLWSSRAKRSGSGATNFSLLKQAGDVEENPGPTSMALPVTALLLPLALLLHAARPDFVMTQSPDSLAVSLGERVTMSCKSSQSLLNSGNQKNYLTWYQQKPGQPPKLLIYWASTRESGVPDRFSGSGSGTDFTLTISSLQAEDVAVYYCQNDYSYPYTFGQGTKLEIKGGGGSGGGGSGGGGSEVQLVQSGAELKKPGASVKVSCKASGYTFTDYYMKWVRQAPGQGLEWIGDIIPSNGATFYNQKFKGRVTITVDKSTSTAYMELSSLRSEDTAVYYCARSHLLRASWFAYWGQGTLVTVSSTRIQNPDPAVYQLRDSKSSDKSVCLFTDFDSQTNVSQSKDSDVYITDKCVLDMRSMDFKSNSAVAWSNKSDFACANAFNNSIIPEDTFFPSPESSCDVKLVEKSFETDTNLNFQILYEVIGFRILLLKVAGFNLLMTLRLWSSRAKRSGSGVKQTLNFDLLKLAGDVESNPGPSRGHMTEYKPTVRLATRDDVPRAVRTLAAAFADYPATRHTVDPDRHIERVTELQELFLTRVGLDIGKVWVADDGAAVAVWTTPESVEAGAVFAEIGPRMAELSGSRLAAQQQMEGLLAPHRPKEPAWFLATVGVSPDHQGKGLGSAVVLPGVEAAERAGVPAFLETSAPRNLPFYERLGFTVTADVEVPEGPRTWCMTRKPGA

SEQ ID NO: 44616 - protein, 871 aa, synthetic construct
MALPVTALLLPLALLLHAARPLEIQNPDPAVYQLRDSKSSDKSVCLFTDFDSQTNVSQSKDSDVYITDKCVLDMRSMDFKSNSAVAWSNKSDFACANAFNNSIIPEDTFFPSPESSCDVKLVEKSFETDTNLNFQILYEVIGFRILLLKVAGFNLLMTLRLWSSRAKRSGSGATNFSLLKQAGDVEENPGPTSMALPVTALLLPLALLLHAARPDFVMTQSPDSLAVSLGERVTMSCKSSQSLLNSGNQKNYLTWYQQKPGQPPKLLIYWASTRESGVPDRFSGSGSGTDFTLTISSLQAEDVAVYYCQNDYSYPYTFGQGTKLEIKGGGGSGGGGSGGGGSEVQLVQSGAELKKPGASVKVSCKASGYTFTDYYMKWVRQAPGQGLEWIGDIIPSNGATFYNQKFKGRVTITVDKSTSTAYMELSSLRSEDTAVYYCARSHLLRASWFAYWGQGTLVTVSSTREDLKNVFPPEVAVFEPSEAEISHTQKATLVCLATGFYPDHVELSWWVNGKEVHSGVCTDPQPLKEQPALNDSRYCLSSRLRVSATFWQNPRNHFRCQVQFYGLSENDEWTQDRAKPVTQIVSAEAWGRADCGFTSESYQQGVLSATNLSVIGFRILLLKVAGFNLLMTLRLWSSRAKRSGSGVKQTLNFDLLKLAGDVESNPGPSRGHMTEYKPTVRLATRDDVPRAVRTLAAAFADYPATRHTVDPDRHIERVTELQELFLTRVGLDIGKVWVADDGAAVAVWTTPESVEAGAVFAEIGPRMAELSGSRLAAQQQMEGLLAPHRPKEPAWFLATVGVSPDHQGKGLGSAVVLPGVEAAERAGVPAFLETSAPRNLPFYERLGFTVTADVEVPEGPRTWCMTRKPGA

SEQ ID NO: 44617 - protein, 871 aa, synthetic construct; identical to SEQ ID NO: 44615

SEQ ID NO: 44618 - protein, 979 aa, synthetic construct
MALPVTALLLPLALLLHAARPLEEDLKNVFPPEVAVFEPSEAEISHTQKATLVCLATGFYPDHVELSWWVNGKEVHSGVSTDPQPLKEQPALNDSRYCLSSRLRVSATFWQNPRNHFRCQVQFYGLSENDEWTQDRAKPVTQIVSAEAWGRADDVIKIHWQEKKSNTILGSQEGNTMKTNDTYMKFSWLTVPEKSLDKEHRCIVRHENNKNGVDQEIIFPPIKTDVITMDPKDNCSKDANDTLLLQLTNTSAYYMYLLLLLKSVVYFAIITCCLLMAMVKRKDSRGRAKRSGSGATNFSLLKQAGDVEENPGPTSMALPVTALLLPLALLLHAARPDFVMTQSPDSLAVSLGERVTMSCKSSQSLLNSGNQKNYLTWYQQKPGQPPKLLIYWASTRESGVPDRFSGSGSGTDFTLTISSLQAEDVAVYYCQNDYSYPYTFGQGTKLEIKGGGGSGGGGSGGGGSEVQLVQSGAELKKPGASVKVSCKASGYTFTDYYMKWVRQAPGQGLEWIGDIIPSNGATFYNQKFKGRVTITVDKSTSTAYMELSSLRSEDTAVYYCARSHLLRASWFAYWGQGTLVTVSSTRIQNPDPAVYQLRDSKSSDKSVCLFTDFDSQTNVSQSKDSDVYITDKTVLDMRSMDFKSNSAVAWSNKSDFACANAFNNSIIPEDTFFPSPESSDSTDHVKPKETENTKQPSKSCHKPKAIVHTEKVNMMSLTVLGLRMLFAKTVAVNFLLTAKLFFLLTARAKRSGSGVKQTLNFDLLKLAGDVESNPGPSRGHMTEYKPTVRLATRDDVPRAVRTLAAAFADYPATRHTVDPDRHIERVTELQELFLTRVGLDIGKVWVADDGAAVAVWTTPESVEAGAVFAEIGPRMAELSGSRLAAQQQMEGLLAPHRPKEPAWFLATVGVSPDHQGKGLGSAVVLPGVEAAERAGVPAFLETSAPRNLPFYERLGFTVTADVEVPEGPRTWCMTRKPGA

SEQ ID NO: 44619 - protein, 979 aa, synthetic construct
MALPVTALLLPLALLLHAARPLEIQNPDPAVYQLRDSKSSDKSVCLFTDFDSQTNVSQSKDSDVYITDKTVLDMRSMDFKSNSAVAWSNKSDFACANAFNNSIIPEDTFFPSPESSDSTDHVKPKETENTKQPSKSCHKPKAIVHTEKVNMMSLTVLGLRMLFAKTVAVNFLLTAKLFFLLTARAKRSGSGATNFSLLKQAGDVEENPGPTSMALPVTALLLPLALLLHAARPDFVMTQSPDSLAVSLGERVTMSCKSSQSLLNSGNQKNYLTWYQQKPGQPPKLLIYWASTRESGVPDRFSGSGSGTDFTLTISSLQAEDVAVYYCQNDYSYPYTFGQGTKLEIKGGGGSGGGGSGGGGSEVQLVQSGAELKKPGASVKVSCKASGYTFTDYYMKWVRQAPGQGLEWIGDIIPSNGATFYNQKFKGRVTITVDKSTSTAYMELSSLRSEDTAVYYCARSHLLRASWFAYWGQGTLVTVSSTREDLKNVFPPEVAVFEPSEAEISHTQKATLVCLATGFYPDHVELSWWVNGKEVHSGVSTDPQPLKEQPALNDSRYCLSSRLRVSATFWQNPRNHFRCQVQFYGLSENDEWTQDRAKPVTQIVSAEAWGRADDVIKIHWQEKKSNTILGSQEGNTMKTNDTYMKFSWLTVPEKSLDKEHRCIVRHENNKNGVDQEIIFPPIKTDVITMDPKDNCSKDANDTLLLQLTNTSAYYMYLLLLLKSVVYFAIITCCLLMAMVKRKDSRGRAKRSGSGVKQTLNFDLLKLAGDVESNPGPSRGHMTEYKPTVRLATRDDVPRAVRTLAAAFADYPATRHTVDPDRHIERVTELQELFLTRVGLDIGKVWVADDGAAVAVWTTPESVEAGAVFAEIGPRMAELSGSRLAAQQQMEGLLAPHRPKEPAWFLATVGVSPDHQGKGLGSAVVLPGVEAAERAGVPAFLETSAPRNLPFYERLGFTVTADVEVPEGPRTWCMTRKPGA

SEQ ID NO: 44620 - protein, 977 aa, synthetic construct
MALPVTALLLPLALLLHAARPLEEDLKNVFPPEVAVFEPSEAEISHTQKATLVCLATGFYPDHVELSWWVNGKEVHSGVCTDPQPLKEQPALNDSRYCLSSRLRVSATFWQNPRNHFRCQVQFYGLSENDEWTQDRAKPVTQIVSAEAWGRADDVIKIHWQEKKSNTILGSQEGNTMKTNDTYMKFSWLTVPEKSLDKEHRCIVRHENNKNGVDQEIIFPPIKTDVITMDPKDNCSKDANDTLLLQLTNTSAYYMYLLLLLKSVVYFAIITCCLLRRTAFCCNGEKSRAKRSGSGATNFSLLKQAGDVEENPGPTSMALPVTALLLPLALLLHAARPDFVMTQSPDSLAVSLGERVTMSCKSSQSLLNSGNQKNYLTWYQQKPGQPPKLLIYWASTRESGVPDRFSGSGSGTDFTLTISSLQAEDVAVYYCQNDYSYPYTFGQGTKLEIKGGGGSGGGGSGGGGSEVQLVQSGAELKKPGASVKVSCKASGYTFTDYYMKWVRQAPGQGLEWIGDIIPSNGATFYNQKFKGRVTITVDKSTSTAYMELSSLRSEDTAVYYCARSHLLRASWFAYWGQGTLVTVSSTRIQNPDPAVYQLRDSKSSDKSVCLFTDFDSQTNVSQSKDSDVYITDKCVLDMRSMDFKSNSAVAWSNKSDFACANAFNNSIIPEDTFFPSPESSDSTDHVKPKETENTKQPSKSCHKPKAIVHTEKVNMMSLTVLGLRMLFAKTVAVNFLLTAKLFFLRAKRSGSGVKQTLNFDLLKLAGDVESNPGPSRGHMTEYKPTVRLATRDDVPRAVRTLAAAFADYPATRHTVDPDRHIERVTELQELFLTRVGLDIGKVWVADDGAAVAVWTTPESVEAGAVFAEIGPRMAELSGSRLAAQQQMEGLLAPHRPKEPAWFLATVGVSPDHQGKGLGSAVVLPGVEAAERAGVPAFLETSAPRNLPFYERLGFTVTADVEVPEGPRTWCMTRKPGA

SEQ ID NO: 44621 - protein, 977 aa, synthetic construct
MALPVTALLLPLALLLHAARPLEIQNPDPAVYQLRDSKSSDKSVCLFTDFDSQTNVSQSKDSDVYITDKCVLDMRSMDFKSNSAVAWSNKSDFACANAFNNSIIPEDTFFPSPESSDSTDHVKPKETENTKQPSKSCHKPKAIVHTEKVNMMSLTVLGLRMLFAKTVAVNFLLTAKLFFLRAKRSGSGATNFSLLKQAGDVEENPGPTSMALPVTALLLPLALLLHAARPDFVMTQSPDSLAVSLGERVTMSCKSSQSLLNSGNQKNYLTWYQQKPGQPPKLLIYWASTRESGVPDRFSGSGSGTDFTLTISSLQAEDVAVYYCQNDYSYPYTFGQGTKLEIKGGGGSGGGGSGGGGSEVQLVQSGAELKKPGASVKVSCKASGYTFTDYYMKWVRQAPGQGLEWIGDIIPSNGATFYNQKFKGRVTITVDKSTSTAYMELSSLRSEDTAVYYCARSHLLRASWFAYWGQGTLVTVSSTREDLKNVFPPEVAVFEPSEAEISHTQKATLVCLATGFYPDHVELSWWVNGKEVHSGVCTDPQPLKEQPALNDSRYCLSSRLRVSATFWQNPRNHFRCQVQFYGLSENDEWTQDRAKPVTQIVSAEAWGRADDVIKIHWQEKKSNTILGSQEGNTMKTNDTYMKFSWLTVPEKSLDKEHRCIVRHENNKNGVDQEIIFPPIKTDVITMDPKDNCSKDANDTLLLQLTNTSAYYMYLLLLLKSVVYFAIITCCLLRRTAFCCNGEKSRAKRSGSGVKQTLNFDLLKLAGDVESNPGPSRGHMTEYKPTVRLATRDDVPRAVRTLAAAFADYPATRHTVDPDRHIERVTELQELFLTRVGLDIGKVWVADDGAAVAVWTTPESVEAGAVFAEIGPRMAELSGSRLAAQQQMEGLLAPHRPKEPAWFLATVGVSPDHQGKGLGSAVVLPGVEAAERAGVPAFLETSAPRNLPFYERLGFTVTADVEVPEGPRTWCMTRKPGA

SEQ ID NO: 44622 - protein, 977 aa, synthetic construct
MALPVTALLLPLALLLHAARPLEEDLKNVFPPEVAVFEPSEAEISHTQKATLVCLATGFYPDHVELSWWVNGKEVHSGVSTDPQPLKEQPALNDSRYCLSSRLRVSATFWQNPRNHFRCQVQFYGLSENDEWTQDRAKPVTQIVSAEAWGRADDVIKIHWQEKKSNTILGSQEGNTMKTNDTYMKFSWLTVPEKSLDKEHRCIVRHENNKNGVDQEIIFPPIKTDVITMDPKDNCSKDANDTLLLQLTNTSAYYMYLLLLLKSVVYFAIITCCLLRRTAFCCNGEKSRAKRSGSGATNFSLLKQAGDVEENPGPTSMALPVTALLLPLALLLHAARPDFVMTQSPDSLAVSLGERVTMSCKSSQSLLNSGNQKNYLTWYQQKPGQPPKLLIYWASTRESGVPDRFSGSGSGTDFTLTISSLQAEDVAVYYCQNDYSYPYTFGQGTKLEIKGGGGSGGGGSGGGGSEVQLVQSGAELKKPGASVKVSCKASGYTFTDYYMKWVRQAPGQGLEWIGDIIPSNGATFYNQKFKGRVTITVDKSTSTAYMELSSLRSEDTAVYYCARSHLLRASWFAYWGQGTLVTVSSTRIQNPDPAVYQLRDSKSSDKSVCLFTDFDSQTNVSQSKDSDVYITDKTVLDMRSMDFKSNSAVAWSNKSDFACANAFNNSIIPEDTFFPSPESSDSTDHVKPKETENTKQPSKSCHKPKAIVHTEKVNMMSLTVLGLRMLFAKTVAVNFLLTAKLFFLRAKRSGSGVKQTLNFDLLKLAGDVESNPGPSRGHMTEYKPTVRLATRDDVPRAVRTLAAAFADYPATRHTVDPDRHIERVTELQELFLTRVGLDIGKVWVADDGAAVAVWTTPESVEAGAVFAEIGPRMAELSGSRLAAQQQMEGLLAPHRPKEPAWFLATVGVSPDHQGKGLGSAVVLPGVEAAERAGVPAFLETSAPRNLPFYERLGFTVTADVEVPEGPRTWCMTRKPGA

SEQ ID NO: 44623 - protein, 977 aa, synthetic construct
MALPVTALLLPLALLLHAARPLEIQNPDPAVYQLRDSKSSDKSVCLFTDFDSQTNVSQSKDSDVYITDKTVLDMRSMDFKSNSAVAWSNKSDFACANAFNNSIIPEDTFFPSPESSDSTDHVKPKETENTKQPSKSCHKPKAIVHTEKVNMMSLTVLGLRMLFAKTVAVNFLLTAKLFFLRAKRSGSGATNFSLLKQAGDVEENPGPTSMALPVTALLLPLALLLHAARPDFVMTQSPDSLAVSLGERVTMSCKSSQSLLNSGNQKNYLTWYQQKPGQPPKLLIYWASTRESGVPDRFSGSGSGTDFTLTISSLQAEDVAVYYCQNDYSYPYTFGQGTKLEIKGGGGSGGGGSGGGGSEVQLVQSGAELKKPGASVKVSCKASGYTFTDYYMKWVRQAPGQGLEWIGDIIPSNGATFYNQKFKGRVTITVDKSTSTAYMELSSLRSEDTAVYYCARSHLLRASWFAYWGQGTLVTVSSTREDLKNVFPPEVAVFEPSEAEISHTQKATLVCLATGFYPDHVELSWWVNGKEVHSGVSTDPQPLKEQPALNDSRYCLSSRLRVSATFWQNPRNHFRCQVQFYGLSENDEWTQDRAKPVTQIVSAEAWGRADDVIKIHWQEKKSNTILGSQEGNTMKTNDTYMKFSWLTVPEKSLDKEHRCIVRHENNKNGVDQEIIFPPIKTDVITMDPKDNCSKDANDTLLLQLTNTSAYYMYLLLLLKSVVYFAIITCCLLRRTAFCCNGEKSRAKRSGSGVKQTLNFDLLKLAGDVESNPGPSRGHMTEYKPTVRLATRDDVPRAVRTLAAAFADYPATRHTVDPDRHIERVTELQELFLTRVGLDIGKVWVADDGAAVAVWTTPESVEAGAVFAEIGPRMAELSGSRLAAQQQMEGLLAPHRPKEPAWFLATVGVSPDHQGKGLGSAVVLPGVEAAERAGVPAFLETSAPRNLPFYERLGFTVTADVEVPEGPRTWCMTRKPGA

SEQ ID NO: 44624 - protein, 875 aa, synthetic construct
MALPVTALLLPLALLLHAARPLEEDLKNVFPPEVAVFEPSKAEIAHTQKATLVCLATGFYPDHVELSWWVNGKEVHSGVCTDPQPLKEQPALNDSRYCLSSRLRVSATFWQNPRNHFRCQVQFYGLSENDEWTQDRAKPVTQIVSAEAWGRADCGITSASYHQGVLSATILYEILLGKATLYAVLVSALVLMAMVKRKDSRGRAKRSGSGATNFSLLKQAGDVEENPGPTSMALPVTALLLPLALLLHAARPDFVMTQSPDSLAVSLGERVTMSCKSSQSLLNSGNQKNYLTWYQQKPGQPPKLLIYWASTRESGVPDRFSGSGSGTDFTLTISSLQAEDVAVYYCQNDYSYPYTFGQGTKLEIKGGGGSGGGGSGGGGSEVQLVQSGAELKKPGASVKVSCKASGYTFTDYYMKWVRQAPGQGLEWIGDIIPSNGATFYNQKFKGRVTITVDKSTSTAYMELSSLRSEDTAVYYCARSHLLRASWFAYWGQGTLVTVSSTRIQNPDPAVYQLRDSKSSDKSVCLFTDFDSQTNVSQSKDSDVYITDKCVLDMRSMDFKSNSAVAWSNKSDFACANAFNNSIIPEDTFFPSSDVPCDVKLVEKSFETDTNLNFQNLSVIGFRILLLKVAGFNLLMTLRLWSSRAKRSGSGVKQTLNFDLLKLAGDVESNPGPSRGHMTEYKPTVRLATRDDVPRAVRTLAAAFADYPATRHTVDPDRHIERVTELQELFLTRVGLDIGKVWVADDGAAVAVWTTPESVEAGAVFAEIGPRMAELSGSRLAAQQQMEGLLAPHRPKEPAWFLATVGVSPDHQGKGLGSAVVLPGVEAAERAGVPAFLETSAPRNLPFYERLGFTVTADVEVPEGPRTWCMTRKPGA

SEQ ID NO: 44625 - protein, 875 aa, synthetic construct
MALPVTALLLPLALLLHAARPLEIQNPDPAVYQLRDSKSSDKSVCLFTDFDSQTNVSQSKDSDVYITDKCVLDMRSMDFKSNSAVAWSNKSDFACANAFNNSIIPEDTFFPSSDVPCDVKLVEKSFETDTNLNFQNLSVIGFRILLLKVAGFNLLMTLRLWSSRAKRSGSGATNFSLLKQAGDVEENPGPTSMALPVTALLLPLALLLHAARPDFVMTQSPDSLAVSLGERVTMSCKSSQSLLNSGNQKNYLTWYQQKPGQPPKLLIYWASTRESGVPDRFSGSGSGTDFTLTISSLQAEDVAVYYCQNDYSYPYTFGQGTKLEIKGGGGSGGGGSGGGGSEVQLVQSGAELKKPGASVKVSCKASGYTFTDYYMKWVRQAPGQGLEWIGDIIPSNGATFYNQKFKGRVTITVDKSTSTAYMELSSLRSEDTAVYYCARSHLLRASWFAYWGQGTLVTVSSTREDLKNVFPPEVAVFEPSKAEIAHTQKATLVCLATGFYPDHVELSWWVNGKEVHSGVCTDPQPLKEQPALNDSRYCLSSRLRVSATFWQNPRNHFRCQVQFYGLSENDEWTQDRAKPVTQIVSAEAWGRADCGITSASYHQGVLSATILYEILLGKATLYAVLVSALVLMAMVKRKDSRGRAKRSGSGVKQTLNFDLLKLAGDVESNPGPSRGHMTEYKPTVRLATRDDVPRAVRTLAAAFADYPATRHTVDPDRHIERVTELQELFLTRVGLDIGKVWVADDGAAVAVWTTPESVEAGAVFAEIGPRMAELSGSRLAAQQQMEGLLAPHRPKEPAWFLATVGVSPDHQGKGLGSAVVLPGVEAAERAGVPAFLETSAPRNLPFYERLGFTVTADVEVPEGPRTWCMTRKPGA

SEQ ID NO: 44626 - protein, 768 aa, synthetic construct
MALPVTALLLPLALLLHAARPLEQSFGLLDPKLCYLLDGILFIYGVILTALFLRVKFSRSADAPAYQQGQNQLYNELNLGRREEYDVLDKRRGRDPEMGGKPQRRKNPQEGLYNELQKDKMAEAYSEIGMKGERRRGKGHDGLYQGLSTATKDTYDALHMQALPPRRAKRSGSGATNFSLLKQAGDVEENPGPTSMALPVTALLLPLALLLHAARPDFVMTQSPDSLAVSLGERVTMSCKSSQSLLNSGNQKNYLTWYQQKPGQPPKLLIYWASTRESGVPDRFSGSGSGTDFTLTISSLQAEDVAVYYCQNDYSYPYTFGQGTKLEIKGGGGSGGGGSGGGGSEVQLVQSGAELKKPGASVKVSCKASGYTFTDYYMKWVRQAPGQGLEWIGDIIPSNGATFYNQKFKGRVTITVDKSTSTAYMELSSLRSEDTAVYYCARSHLLRASWFAYWGQGTLVTVSSTRELGEPQLCYILDAILFLYGIVLTLLYCRLKIQVRKAAITSYEKSDGVYTGLSTRNQETYETLKHEKPPQRAKRSGSGVKQTLNFDLLKLAGDVESNPGPSRGHMTEYKPTVRLATRDDVPRAVRTLAAAFADYPATRHTVDPDRHIERVTELQELFLTRVGLDIGKVWVADDGAAVAVWTTPESVEAGAVFAEIGPRMAELSGSRLAAQQQMEGLLAPHRPKEPAWFLATVGVSPDHQGKGLGSAVVLPGVEAAERAGVPAFLETSAPRNLPFYERLGFTVTADVEVPEGPRTWCMTRKPGA

SEQ ID NO: 44627 - protein, 979 aa, synthetic construct; identical to SEQ ID NO: 44618

SEQ ID NO: 44628 - protein, 979 aa, synthetic construct; identical to SEQ ID NO: 44619

SEQ ID NO: 44629 - protein, 978 aa, synthetic construct
MALPVTALLLPLALLLHAARPLEEEDLKNVFPPEVAVFEPSEAEISHTQKATLVCLATGFYPDHVELSWWVNGKEVHSGVCTDPQPLKEQPALNDSRYCLSSRLRVSATFWQNPRNHFRCQVQFYGLSENDEWTQDRAKPVTQIVSAEAWGRADDVIKIHWQEKKSNTILGSQEGNTMKTNDTYMKFSWLTVPEKSLDKEHRCIVRHENNKNGVDQEIIFPPIKTDVITMDPKDNCSKDANDTLLLQLTNTSAYYMYLLLLLKSVVYFAIITCCLLRRTAFCCNGEKSRAKRSGSGATNFSLLKQAGDVEENPGPTSMALPVTALLLPLALLLHAARPDFVMTQSPDSLAVSLGERVTMSCKSSQSLLNSGNQKNYLTWYQQKPGQPPKLLIYWASTRESGVPDRFSGSGSGTDFTLTISSLQAEDVAVYYCQNDYSYPYTFGQGTKLEIKGGGGSGGGGSGGGGSEVQLVQSGAELKKPGASVKVSCKASGYTFTDYYMKWVRQAPGQGLEWIGDIIPSNGATFYNQKFKGRVTITVDKSTSTAYMELSSLRSEDTAVYYCARSHLLRASWFAYWGQGTLVTVSSTRIQNPDPAVYQLRDSKSSDKSVCLFTDFDSQTNVSQSKDSDVYITDKCVLDMRSMDFKSNSAVAWSNKSDFACANAFNNSIIPEDTFFPSPESSDSTDHVKPKETENTKQPSKSCHKPKAIVHTEKVNMMSLTVLGLRMLFAKTVAVNFLLTAKLFFLRAKRSGSGVKQTLNFDLLKLAGDVESNPGPSRGHMTEYKPTVRLATRDDVPRAVRTLAAAFADYPATRHTVDPDRHIERVTELQELFLTRVGLDIGKVWVADDGAAVAVWTTPESVEAGAVFAEIGPRMAELSGSRLAAQQQMEGLLAPHRPKEPAWFLATVGVSPDHQGKGLGSAVVLPGVEAAERAGVPAFLETSAPRNLPFYERLGFTVTADVEVPEGPRTWCMTRKPGA

SEQ ID NO: 44630 - protein, 978 aa, synthetic construct
MALPVTALLLPLALLLHAARPLEIQNPDPAVYQLRDSKSSDKSVCLFTDFDSQTNVSQSKDSDVYITDKCVLDMRSMDFKSNSAVAWSNKSDFACANAFNNSIIPEDTFFPSPESSDSTDHVKPKETENTKQPSKSCHKPKAIVHTEKVNMMSLTVLGLRMLFAKTVAVNFLLTAKLFFLRAKRSGSGATNFSLLKQAGDVEENPGPTSMALPVTALLLPLALLLHAARPDFVMTQSPDSLAVSLGERVTMSCKSSQSLLNSGNQKNYLTWYQQKPGQPPKLLIYWASTRESGVPDRFSGSGSGTDFTLTISSLQAEDVAVYYCQNDYSYPYTFGQGTKLEIKGGGGSGGGGSGGGGSEVQLVQSGAELKKPGASVKVSCKASGYTFTDYYMKWVRQAPGQGLEWIGDIIPSNGATFYNQKFKGRVTITVDKSTSTAYMELSSLRSEDTAVYYCARSHLLRASWFAYWGQGTLVTVSSTREEDLKNVFPPEVAVFEPSEAEISHTQKATLVCLATGFYPDHVELSWWVNGKEVHSGVCTDPQPLKEQPALNDSRYCLSSRLRVSATFWQNPRNHFRCQVQFYGLSENDEWTQDRAKPVTQIVSAEAWGRADDVIKIHWQEKKSNTILGSQEGNTMKTNDTYMKFSWLTVPEKSLDKEHRCIVRHENNKNGVDQEIIFPPIKTDVITMDPKDNCSKDANDTLLLQLTNTSAYYMYLLLLLKSVVYFAIITCCLLRRTAFCCNGEKSRAKRSGSGVKQTLNFDLLKLAGDVESNPGPSRGHMTEYKPTVRLATRDDVPRAVRTLAAAFADYPATRHTVDPDRHIERVTELQELFLTRVGLDIGKVWVADDGAAVAVWTTPESVEAGAVFAEIGPRMAELSGSRLAAQQQMEGLLAPHRPKEPAWFLATVGVSPDHQGKGLGSAVVLPGVEAAERAGVPAFLETSAPRNLPFYERLGFTVTADVEVPEGPRTWCMTRKPGA

SEQ ID NO: 44631 - protein, 875 aa, synthetic construct
MALPVTALLLPLALLLHAARPLEEDLKNVFPPEVAVFEPSEAEISHTQKATLVCLATGFYPDHVELSWWVNGKEVHSGVSTDPQPLKEQPALNDSRYCLSSRLRVSATFWQNPRNHFRCQVQFYGLSENDEWTQDRAKPVTQIVSAEAWGRADCGFTSESYQQGVLSATNLSVIGFRILLLKVAGFNLLMTLRLWSSRAKRSGSGATNFSLLKQAGDVEENPGPTSMALPVTALLLPLALLLHAARPDFVMTQSPDSLAVSLGERVTMSCKSSQSLLNSGNQKNYLTWYQQKPGQPPKLLIYWASTRESGVPDRFSGSGSGTDFTLTISSLQAEDVAVYYCQNDYSYPYTFGQGTKLEIKGGGGSGGGGSGGGGSEVQLVQSGAELKKPGASVKVSCKASGYTFTDYYMKWVRQAPGQGLEWIGDIIPSNGATFYNQKFKGRVTITVDKSTSTAYMELSSLRSEDTAVYYCARSHLLRASWFAYWGQGTLVTVSSTRIQNPDPAVYQLRDSKSSDKSVCLFTDFDSQTNVSQSKDSDVYITDKTVLDMRSMDFKSNSAVAWSNKSDFACANAFNNSIIPEDTFFPSPESSCDVKLVEKSFETDTNLNFQILYEILLGKATLYAVLVSALVLMAMVKRKDSRGRAKRSGSGVKQTLNFDLLKLAGDVESNPGPSRGHMTEYKPTVRLATRDDVPRAVRTLAAAFADYPATRHTVDPDRHIERVTELQELFLTRVGLDIGKVWVADDGAAVAVWTTPESVEAGAVFAEIGPRMAELSGSRLAAQQQMEGLLAPHRPKEPAWFLATVGVSPDHQGKGLGSAVVLPGVEAAERAGVPAFLETSAPRNLPFYERLGFTVTADVEVPEGPRTWCMTRKPGA

SEQ ID NO: 44632 - protein, 875 aa, synthetic construct
MALPVTALLLPLALLLHAARPLEIQNPDPAVYQLRDSKSSDKSVCLFTDFDSQTNVSQSKDSDVYITDKTVLDMRSMDFKSNSAVAWSNKSDFACANAFNNSIIPEDTFFPSPESSCDVKLVEKSFETDTNLNFQILYEILLGKATLYAVLVSALVLMAMVKRKDSRGRAKRSGSGATNFSLLKQAGDVEENPGPTSMALPVTALLLPLALLLHAARPDFVMTQSPDSLAVSLGERVTMSCKSSQSLLNSGNQKNYLTWYQQKPGQPPKLLIYWASTRESGVPDRFSGSGSGTDFTLTISSLQAEDVAVYYCQNDYSYPYTFGQGTKLEIKGGGGSGGGGSGGGGSEVQLVQSGAELKKPGASVKVSCKASGYTFTDYYMKWVRQAPGQGLEWIGDIIPSNGATFYNQKFKGRVTITVDKSTSTAYMELSSLRSEDTAVYYCARSHLLRASWFAYWGQGTLVTVSSTREDLKNVFPPEVAVFEPSEAEISHTQKATLVCLATGFYPDHVELSWWVNGKEVHSGVSTDPQPLKEQPALNDSRYCLSSRLRVSATFWQNPRNHFRCQVQFYGLSENDEWTQDRAKPVTQIVSAEAWGRADCGFTSESYQQGVLSATNLSVIGFRILLLKVAGFNLLMTLRLWSSRAKRSGSGVKQTLNFDLLKLAGDVESNPGPSRGHMTEYKPTVRLATRDDVPRAVRTLAAAFADYPATRHTVDPDRHIERVTELQELFLTRVGLDIGKVWVADDGAAVAVWTTPESVEAGAVFAEIGPRMAELSGSRLAAQQQMEGLLAPHRPKEPAWFLATVGVSPDHQGKGLGSAVVLPGVEAAERAGVPAFLETSAPRNLPFYERLGFTVTADVEVPEGPRTWCMTRKPGA

SEQ ID NO: 44633 - protein, 875 aa, synthetic construct
MALPVTALLLPLALLLHAARPLEEDLKNVFPPEVAVFEPSEAEISHTQKATLVCLATGFYPDHVELSWWVNGKEVHSGVCTDPQPLKEQPALNDSRYCLSSRLRVSATFWQNPRNHFRCQVQFYGLSENDEWTQDRAKPVTQIVSAEAWGRADCDVKLVEKSFETDTNLNFQNLSVIGFRILLLKVAGFNLLMTLRLWSSRAKRSGSGATNFSLLKQAGDVEENPGPTSMALPVTALLLPLALLLHAARPDFVMTQSPDSLAVSLGERVTMSCKSSQSLLNSGNQKNYLTWYQQKPGQPPKLLIYWASTRESGVPDRFSGSGSGTDFTLTISSLQAEDVAVYYCQNDYSYPYTFGQGTKLEIKGGGGSGGGGSGGGGSEVQLVQSGAELKKPGASVKVSCKASGYTFTDYYMKWVRQAPGQGLEWIGDIIPSNGATFYNQKFKGRVTITVDKSTSTAYMELSSLRSEDTAVYYCARSHLLRASWFAYWGQGTLVTVSSTRIQNPDPAVYQLRDSKSSDKSVCLFTDFDSQTNVSQSKDSDVYITDKCVLDMRSMDFKSNSAVAWSNKSDFACANAFNNSIIPEDTFFPSPESSCGFTSESYQQGVLSATILYEILLGKATLYAVLVSALVLMAMVKRKDSRGRAKRSGSGVKQTLNFDLLKLAGDVESNPGPSRGHMTEYKPTVRLATRDDVPRAVRTLAAAFADYPATRHTVDPDRHIERVTELQELFLTRVGLDIGKVWVADDGAAVAVWTTPESVEAGAVFAEIGPRMAELSGSRLAAQQQMEGLLAPHRPKEPAWFLATVGVSPDHQGKGLGSAVVLPGVEAAERAGVPAFLETSAPRNLPFYERLGFTVTADVEVPEGPRTWCMTRKPGA

SEQ ID NO: 44634 - protein, 875 aa, synthetic construct
MALPVTALLLPLALLLHAARPLEEDLKNVFPPEVAVFEPSEAEISHTQKATLVCLATGFYPDHVELSWWVNGKEVHSGVSTDPQPLKEQPALNDSRYCLSSRLRVSATFWQNPRNHFRCQVQFYGLSENDEWTQDRAKPVTQIVSAEAWGRADCDVKLVEKSFETDTNLNFQNLSVIGFRILLLKVAGFNLLMTLRLWSSRAKRSGSGATNFSLLKQAGDVEENPGPTSMALPVTALLLPLALLLHAARPDFVMTQSPDSLAVSLGERVTMSCKSSQSLLNSGNQKNYLTWYQQKPGQPPKLLIYWASTRESGVPDRFSGSGSGTDFTLTISSLQAEDVAVYYCQNDYSYPYTFGQGTKLEIKGGGGSGGGGSGGGGSEVQLVQSGAELKKPGASVKVSCKASGYTFTDYYMKWVRQAPGQGLEWIGDIIPSNGATFYNQKFKGRVTITVDKSTSTAYMELSSLRSEDTAVYYCARSHLLRASWFAYWGQGTLVTVSSTRIQNPDPAVYQLRDSKSSDKSVCLFTDFDSQTNVSQSKDSDVYITDKTVLDMRSMDFKSNSAVAWSNKSDFACANAFNNSIIPEDTFFPSPESSCGFTSESYQQGVLSATILYEILLGKATLYAVLVSALVLMAMVKRKDSRGRAKRSGSGVKQTLNFDLLKLAGDVESNPGPSRGHMTEYKPTVRLATRDDVPRAVRTLAAAFADYPATRHTVDPDRHIERVTELQELFLTRVGLDIGKVWVADDGAAVAVWTTPESVEAGAVFAEIGPRMAELSGSRLAAQQQMEGLLAPHRPKEPAWFLATVGVSPDHQGKGLGSAVVLPGVEAAERAGVPAFLETSAPRNLPFYERLGFTVTADVEVPEGPRTWCMTRKPGA

SEQ ID NO: 44635 - protein, 978 aa, synthetic construct
MALPVTALLLPLALLLHAARPLEEEDLKNVFPPEVAVFEPSEAEISHTQKATLVCLATGFYPDHVELSWWVNGKEVHSGVSTDPQPLKEQPALNDSRYCLSSRLRVSATFWQNPRNHFRCQVQFYGLSENDEWTQDRAKPVTQIVSAEAWGRADDVIKIHWQEKKSNTILGSQEGNTMKTNDTYMKFSWLTVPEKSLDKEHRCIVRHENNKNGVDQEIIFPPIKTDVITMDPKDNCSKDANDTLLLQLTNTSAYYMYLLLLLKSVVYFAIITCCLLRRTAFCCNGEKSRAKRSGSGATNFSLLKQAGDVEENPGPTSMALPVTALLLPLALLLHAARPDFVMTQSPDSLAVSLGERVTMSCKSSQSLLNSGNQKNYLTWYQQKPGQPPKLLIYWASTRESGVPDRFSGSGSGTDFTLTISSLQAEDVAVYYCQNDYSYPYTFGQGTKLEIKGGGGSGGGGSGGGGSEVQLVQSGAELKKPGASVKVSCKASGYTFTDYYMKWVRQAPGQGLEWIGDIIPSNGATFYNQKFKGRVTITVDKSTSTAYMELSSLRSEDTAVYYCARSHLLRASWFAYWGQGTLVTVSSTRIQNPDPAVYQLRDSKSSDKSVCLFTDFDSQTNVSQSKDSDVYITDKTVLDMRSMDFKSNSAVAWSNKSDFACANAFNNSIIPEDTFFPSPESSDSTDHVKPKETENTKQPSKSCHKPKAIVHTEKVNMMSLTVLGLRMLFAKTVAVNFLLTAKLFFLRAKRSGSGVKQTLNFDLLKLAGDVESNPGPSRGHMTEYKPTVRLATRDDVPRAVRTLAAAFADYPATRHTVDPDRHIERVTELQELFLTRVGLDIGKVWVADDGAAVAVWTTPESVEAGAVFAEIGPRMAELSGSRLAAQQQMEGLLAPHRPKEPAWFLATVGVSPDHQGKGLGSAVVLPGVEAAERAGVPAFLETSAPRNLPFYERLGFTVTADVEVPEGPRTWCMTRKPGA

SEQ ID NO: 44636 - protein, 875 aa, synthetic construct
MALPVTALLLPLALLLHAARPLEEDLKNVFPPEVAVFEPSEAEISHTQKATLVCLATGFYPDHVELSWWVNGKEVHSGVCTDPQPLKEQPALNDSRYCLSSRLRVSATFWQNPRNHFRCQVQFYGLSENDEWTQDRAKPVTQIVSAEAWGRADCGFTSESYQQGVLSATNLSVIGFRILLLKVAGFNLLMTLRLWSSRAKRSGSGATNFSLLKQAGDVEENPGPTSMALPVTALLLPLALLLHAARPDFVMTQSPDSLAVSLGERVTMSCKSSQSLLNSGNQKNYLTWYQQKPGQPPKLLIYWASTRESGVPDRFSGSGSGTDFTLTISSLQAEDVAVYYCQNDYSYPYTFGQGTKLEIKGGGGSGGGGSGGGGSEVQLVQSGAELKKPGASVKVSCKASGYTFTDYYMKWVRQAPGQGLEWIGDIIPSNGATFYNQKFKGRVTITVDKSTSTAYMELSSLRSEDTAVYYCARSHLLRASWFAYWGQGTLVTVSSTRIQNPDPAVYQLRDSKSSDKSVCLFTDFDSQTNVSQSKDSDVYITDKCVLDMRSMDFKSNSAVAWSNKSDFACANAFNNSIIPEDTFFPSPESSCDVKLVEKSFETDTNLNFQILYEILLGKATLYAVLVSALVLMAMVKRKDSRGRAKRSGSGVKQTLNFDLLKLAGDVESNPGPSRGHMTEYKPTVRLATRDDVPRAVRTLAAAFADYPATRHTVDPDRHIERVTELQELFLTRVGLDIGKVWVADDGAAVAVWTTPESVEAGAVFAEIGPRMAELSGSRLAAQQQMEGLLAPHRPKEPAWFLATVGVSPDHQGKGLGSAVVLPGVEAAERAGVPAFLETSAPRNLPFYERLGFTVTADVEVPEGPRTWCMTRKPGA

SEQ ID NO: 44637 - protein, 904 aa, synthetic construct
MALPVTALLLPLALLLHAARPLEEEDLKNVFPPEVAVFEPSEAEISHTQKATLVCLATGFYPDHVELSWWVNGKEVHSGVCTDPQPLKEQPALNDSRYCLSSRLRVSATFWQNPRNHFRCQVQFYGLSENDEWTQDRAKPVTQIVSAEAWGRADCGFTSESYQQGVLSATNLSVIGFRILLLKVAGFNLLMTLRLWSSRAKRSGSGATNFSLLKQAGDVEENPGPTSMALPVTALLLPLALLLHAARPDFVMTQSPDSLAVSLGERVTMSCKSSQSLLNSGNQKNYLTWYQQKPGQPPKLLIYWASTRESGVPDRFSGSGSGTDFTLTISSLQAEDVAVYYCQNDYSYPYTFGQGTKLEIKGGGGSGGGGSGGGGSEVQLVQSGAELKKPGASVKVSCKASGYTFTDYYMKWVRQAPGQGLEWIGDIIPSNGATFYNQKFKGRVTITVDKSTSTAYMELSSLRSEDTAVYYCARSHLLRASWFAYWGQGTLVTVSSTRGQPKANPTVTLFPPSSEELQANKATLVCLISDFYPGAVTVAWKADGSPVKAGVETTKPSKQSNNKYAASSYLSLTPEQWKSHRSYSCQVTHEGSTVEKTVAPTECSPIKTDVITMDPKDNCSKDANDTLLLQLTNTSAYYMYLLLLLKSVVYFAIITCCLLRRTAFCCNGEKSRAKRSGSGVKQTLNFDLLKLAGDVESNPGPSRGHMTEYKPTVRLATRDDVPRAVRTLAAAFADYPATRHTVDPDRHIERVTELQELFLTRVGLDIGKVWVADDGAAVAVWTTPESVEAGAVFAEIGPRMAELSGSRLAAQQQMEGLLAPHRPKEPAWFLATVGVSPDHQGKGLGSAVVLPGVEAAERAGVPAFLETSAPRNLPFYERLGFTVTADVEVPEGPRTWCMTRKPGA

SEQ ID NO: 44638 - protein, 904 aa, synthetic construct
MALPVTALLLPLALLLHAARPLEGQPKANPTVTLFPPSSEELQANKATLVCLISDFYPGAVTVAWKADGSPVKAGVETTKPSKQSNNKYAASSYLSLTPEQWKSHRSYSCQVTHEGSTVEKTVAPTECSPIKTDVITMDPKDNCSKDANDTLLLQLTNTSAYYMYLLLLLKSVVYFAIITCCLLRRTAFCCNGEKSRAKRSGSGATNFSLLKQAGDVEENPGPTSMALPVTALLLPLALLLHAARPDFVMTQSPDSLAVSLGERVTMSCKSSQSLLNSGNQKNYLTWYQQKPGQPPKLLIYWASTRESGVPDRFSGSGSGTDFTLTISSLQAEDVAVYYCQNDYSYPYTFGQGTKLEIKGGGGSGGGGSGGGGSEVQLVQSGAELKKPGASVKVSCKASGYTFTDYYMKWVRQAPGQGLEWIGDIIPSNGATFYNQKFKGRVTITVDKSTSTAYMELSSLRSEDTAVYYCARSHLLRASWFAYWGQGTLVTVSSTREEDLKNVFPPEVAVFEPSEAEISHTQKATLVCLATGFYPDHVELSWWVNGKEVHSGVCTDPQPLKEQPALNDSRYCLSSRLRVSATFWQNPRNHFRCQVQFYGLSENDEWTQDRAKPVTQIVSAEAWGRADCGFTSESYQQGVLSATNLSVIGFRILLLKVAGFNLLMTLRLWSSRAKRSGSGVKQTLNFDLLKLAGDVESNPGPSRGHMTEYKPTVRLATRDDVPRAVRTLAAAFADYPATRHTVDPDRHIERVTELQELFLTRVGLDIGKVWVADDGAAVAVWTTPESVEAGAVFAEIGPRMAELSGSRLAAQQQMEGLLAPHRPKEPAWFLATVGVSPDHQGKGLGSAVVLPGVEAAERAGVPAFLETSAPRNLPFYERLGFTVTADVEVPEGPRTWCMTRKPGA

SEQ ID NO: 44639 - protein, 901 aa, synthetic construct
MALPVTALLLPLALLLHAARPLEEASTKGPSVFPLAPSSKSTSGGTAALGCLVKDYFPEPVTVSWNSGALTSGVHTFPAVLQSSGLYSLSSVVTVPSSSLGTQTYICNVNHKPSNTKVDKRVEPKSCPIKTDVITMDPKDNCSKDANDTLLLQLTNTSAYYMYLLLLLKSVVYFAIITCCLLRRTAFCCNGEKSRAKRSGSGATNFSLLKQAGDVEENPGPTSMALPVTALLLPLALLLHAARPDFVMTQSPDSLAVSLGERVTMSCKSSQSLLNSGNQKNYLTWYQQKPGQPPKLLIYWASTRESGVPDRFSGSGSGTDFTLTISSLQAEDVAVYYCQNDYSYPYTFGQGTKLEIKGGGGSGGGGSGGGGSEVQLVQSGAELKKPGASVKVSCKASGYTFTDYYMKWVRQAPGQGLEWIGDIIPSNGATFYNQKFKGRVTITVDKSTSTAYMELSSLRSEDTAVYYCARSHLLRASWFAYWGQGTLVTVSSTRGQPKANPTVTLFPPSSEELQANKATLVCLISDFYPGAVTVAWKADGSPVKAGVETTKPSKQSNNKYAASSYLSLTPEQWKSHRSYSCQVTHEGSTVEKTVAPTECSEVKTDSTDHVKPKETENTKQPSKSCHKPKAIVHTEKVNMMSLTVLGLRMLFAKTVAVNFLLTAKLFFLRAKRSGSGVKQTLNFDLLKLAGDVESNPGPSRGHMTEYKPTVRLATRDDVPRAVRTLAAAFADYPATRHTVDPDRHIERVTELQELFLTRVGLDIGKVWVADDGAAVAVWTTPESVEAGAVFAEIGPRMAELSGSRLAAQQQMEGLLAPHRPKEPAWFLATVGVSPDHQGKGLGSAVVLPGVEAAERAGVPAFLETSAPRNLPFYERLGFTVTADVEVPEGPRTWCMTRKPGA

SEQ ID NO: 44640 - protein, 879 aa, synthetic construct
MALPVTALLLPLALLLHAARPLEEASTKGPSVFPLAPSSKSTSGGTAALGCLVKDYFPEPVTVSWNSGALTSGVHTFPAVLQSSGLYSLSSVVTVPSSSLGTQTYICNVNHKPSNTKVDKRVEPKSCGRADCGFTSESYQQGVLSATILYEILLGKATLYAVLVSALVLMAMVKRKDSRGRAKRSGSGATNFSLLKQAGDVEENPGPTSMALPVTALLLPLALLLHAARPDFVMTQSPDSLAVSLGERVTMSCKSSQSLLNSGNQKNYLTWYQQKPGQPPKLLIYWASTRESGVPDRFSGSGSGTDFTLTISSLQAEDVAVYYCQNDYSYPYTFGQGTKLEIKGGGGSGGGGSGGGGSEVQLVQSGAELKKPGASVKVSCKASGYTFTDYYMKWVRQAPGQGLEWIGDIIPSNGATFYNQKFKGRVTITVDKSTSTAYMELSSLRSEDTAVYYCARSHLLRASWFAYWGQGTLVTVSSTRGQPKANPTVTLFPPSSEELQANKATLVCLISDFYPGAVTVAWKADGSPVKAGVETTKPSKQSNNKYAASSYLSLTPEQWKSHRSYSCQVTHEGSTVEKTVAPTECSIPEDTFFPSPESSCDVKLVEKSFETDTNLNFQNLSVIGFRILLLKVAGFNLLMTLRLWSSRAKRSGSGVKQTLNFDLLKLAGDVESNPGPSRGHMTEYKPTVRLATRDDVPRAVRTLAAAFADYPATRHTVDPDRHIERVTELQELFLTRVGLDIGKVWVADDGAAVAVWTTPESVEAGAVFAEIGPRMAELSGSRLAAQQQMEGLLAPHRPKEPAWFLATVGVSPDHQGKGLGSAVVLPGVEAAERAGVPAFLETSAPRNLPFYERLGFTVTADVEVPEGPRTWCMTRKPGA

SEQ ID NO: 44641 - protein, 879 aa, synthetic construct
MALPVTALLLPLALLLHAARPLEEASTKGPSVFPLAPSSKSTSGGTAALGCLVKDYFPEPVTVSWNSGALTSGVHTFPAVLQSSGLYSLSSVVTVPSSSLGTQTYICNVNHKPSNTKVDKRVEPKSCIPEDTFFPSPESSCDVKLVEKSFETDTNLNFQNLSVIGFRILLLKVAGFNLLMTLRLWSSRAKRSGSGATNFSLLKQAGDVEENPGPTSMALPVTALLLPLALLLHAARPDFVMTQSPDSLAVSLGERVTMSCKSSQSLLNSGNQKNYLTWYQQKPGQPPKLLIYWASTRESGVPDRFSGSGSGTDFTLTISSLQAEDVAVYYCQNDYSYPYTFGQGTKLEIKGGGGSGGGGSGGGGSEVQLVQSGAELKKPGASVKVSCKASGYTFTDYYMKWVRQAPGQGLEWIGDIIPSNGATFYNQKFKGRVTITVDKSTSTAYMELSSLRSEDTAVYYCARSHLLRASWFAYWGQGTLVTVSSTRGQPKANPTVTLFPPSSEELQANKATLVCLISDFYPGAVTVAWKADGSPVKAGVETTKPSKQSNNKYAASSYLSLTPEQWKSHRSYSCQVTHEGSTVEKTVAPTECSGRADCGFTSESYQQGVLSATILYEILLGKATLYAVLVSALVLMAMVKRKDSRGRAKRSGSGVKQTLNFDLLKLAGDVESNPGPSRGHMTEYKPTVRLATRDDVPRAVRTLAAAFADYPATRHTVDPDRHIERVTELQELFLTRVGLDIGKVWVADDGAAVAVWTTPESVEAGAVFAEIGPRMAELSGSRLAAQQQMEGLLAPHRPKEPAWFLATVGVSPDHQGKGLGSAVVLPGVEAAERAGVPAFLETSAPRNLPFYERLGFTVTADVEVPEGPRTWCMTRKPGA

SEQ ID NO: 44642 - protein, 626 aa, synthetic construct
MALPVTALLLPLALLLHAARPDFVMTQSPDSLAVSLGERVTMSCKSSQSLLNSGNQKNYLTWYQQKPGQPPKLLIYWASTRESGVPDRFSGSGSGTDFTLTISSLQAEDVAVYYCQNDYSYPYTFGQGTKLEIKLEDLKNVFPPEVAVFEPSEAEISHTQKATLVCLATGFYPDHVELSWWVNGKEVHSGVCTDPQPLKEQPALNDSRYCLSSRLRVSATFWQNPRNHFRCQVQFYGLSENDEWTQDRAKPVTQIVSAEAWGRADSGFTSESYQQGVLSATILYEILLGKATLYAVLVSALVLMAMVKRKDSRGRAKRSGSGATNFSLLKQAGDVEENPGPTSMDWIWRILFLVGAATGAHSFEEVQLVQSGAELKKPGASVKVSCKASGYTFTDYYMKWVRQAPGQGLEWIGDIIPSNGATFYNQKFKGRVTITVDKSTSTAYMELSSLRSEDTAVYYCARSHLLRASWFAYWGQGTLVTVSSTRIQNPDPAVYQLRDSKSSDKSVCLFTDFDSQTNVSQSKDSDVYITDKCVLDMRSMDFKSNSAVAWSNKSDFACANAFNNSIIPEDTFFPSPESSSDVKLVEKSFETDTNLNFQNLSVIGFRILLLKVAGFNLLMTLRLWSS

SEQ ID NO: 44643 - protein, 905 aa, synthetic construct
MALPVTALLLPLALLLHAARPEVQLLESGGGLVQPGGSLRLSCAASGRTFSMGWYRQAPGKGLEFVSAITYSGGSPYYADSVKGRFTISRDNSKNTVYLQMNSLRAEDTAVYYCAANPTYGSDWNAENWGQGTLVTVSSGTGGGGSGGGGSGGGGSEFDFVMTQSPDSLAVSLGERVTMSCKSSQSLLNSGNQKNYLTWYQQKPGQPPKLLIYWASTRESGVPDRFSGSGSGTDFTLTISSLQAEDVAVYYCQNDYSYPYTFGQGTKLEIKLEIQNPDPAVYQLRDSKSSDKSVCLFTDFDSQTNVSQSKDSDVYITDKCVLDMRSMDFKSNSAVAWSNKSDFACANAFNNSIIPEDTFFPSSDVPCDVKLVEKSFETDTNLNFQNLSVIGFRILLLKVAGFNLLMTLRLWSSRAKRSGSGVKQTLNFDLLKLAGDVESNPGPTSTMDWIWRILFLVGAATGTHSGPEVQLVESGGGLVQPGGSLRLSCAASGRTFTMGWYRQAPGKEREFVAAISLSPTLAYYADSVKGRFTISRDNSKNTVVLQMNSLRAEDTALYYCAADRKSVMSIRPDYWGQGTLVTVSSGSGGGGSGGGGSGGGGSFEEVQLVQSGAELKKPGASVKVSCKASGYTFTDYYMKWVRQAPGQGLEWIGDIIPSNGATFYNQKFKGRVTITVDKSTSTAYMELSSLRSEDTAVYYCARSHLLRASWFAYWGQGTLVTVSSTREDLKNVFPPEVAVFEPSKAEIAHTQKATLVCLATGFYPDHVELSWWVNGKEVHSGVCTDPQPLKEQPALNDSRYCLSSRLRVSATFWQNPRNHFRCQVQFYGLSENDEWTQDRAKPVTQIVSAEAWGRADCGITSASYHQGVLSATILYEILLGKATLYAVLVSALVLMAMVKRKDSRG

SEQ ID NO: 44644 - protein, 905 aa, synthetic construct
MALPVTALLLPLALLLHAARPEVQLVESGGGLVQAGGSLRLSCAASGRTFSMGWFRQAPGKEREFVAAITYSGGSPYYADSVKGRFTISRDNAKNTVYLQMNSLKPEDTAVYYCAANPTYGSDWNAENWGQGTQVTVSSGTGGGGSGGGGSGGGGSEFDFVMTQSPDSLAVSLGERVTMSCKSSQSLLNSGNQKNYLTWYQQKPGQPPKLLIYWASTRESGVPDRFSGSGSGTDFTLTISSLQAEDVAVYYCQNDYSYPYTFGQGTKLEIKLEIQNPDPAVYQLRDSKSSDKSVCLFTDFDSQTNVSQSKDSDVYITDKCVLDMRSMDFKSNSAVAWSNKSDFACANAFNNSIIPEDTFFPSSDVPCDVKLVEKSFETDTNLNFQNLSVIGFRILLLKVAGFNLLMTLRLWSSRAKRSGSGVKQTLNFDLLKLAGDVESNPGPTSTMDWIWRILFLVGAATGAHSGPEVQLVESGGGLVQPGGSLRLSCAASGRTFTMGWYRQAPGKEREFVAAISLSPTLAYYADSVKGRFTISRDNSKNTVVLQMNSLRAEDTALYYCAADRKSVMSIRPDYWGQGTLVTVSSGSGGGGSGGGGSGGGGSFEEVQLVQSGAELKKPGASVKVSCKASGYTFTDYYMKWVRQAPGQGLEWIGDIIPSNGATFYNQKFKGRVTITVDKSTSTAYMELSSLRSEDTAVYYCARSHLLRASWFAYWGQGTLVTVSSTREDLKNVFPPEVAVFEPSKAEIAHTQKATLVCLATGFYPDHVELSWWVNGKEVHSGVCTDPQPLKEQPALNDSRYCLSSRLRVSATFWQNPRNHFRCQVQFYGLSENDEWTQDRAKPVTQIVSAEAWGRADCGITSASYHQGVLSATILYEILLGKATLYAVLVSALVLMAMVKRKDSRG

SEQ ID NO: 44645 - protein, 902 aa, synthetic construct
MALPVTALLLPLALLLHAARPEVQLVESGGGLVQAGGSLRLSCAASGRTFSMGWFRQAPGKEREFVAAITYSGGSPYYADSVKGRFTISRDNAKNTVYLQMNSLKPEDTAVYYCAANPTYGSDWNAENWGQGTQVTVSSGTGGGGSGGGGSGGGGSEFDFVMTQSPDSLAVSLGERVTMSCKSSQSLLNSGNQKNYLTWYQQKPGQPPKLLIYWASTRESGVPDRFSGSGSGTDFTLTISSLQAEDVAVYYCQNDYSYPYTFGQGTKLEIKLEDLKNVFPPEVAVFEPSEAEISHTQKATLVCLATGFYPDHVELSWWVNGKEVHSGVCTDPQPLKEQPALNDSRYCLSSRLRVSATFWQNPRNHFRCQVQFYGLSENDEWTQDRAKPVTQIVSAEAWGRADCGFTSESYQQGVLSATILYEILLGKATLYAVLVSALVLMAMVKRKDSRGRAKRSGSGATNFSLLKQAGDVEENPGPTSATMDWIWRILFLVGAATGAHSGPEVQLVESGGGLVQAGGSLRLSCAASGRTFTMGWFRQAPGKEREFVAAISLSPTLAYYADSVKGRFTISRDNAKNTVVLQMNSLKPEDTALYYCAADRKSVMSIRPDYWGQGTQVTVSSGSGGGGSGGGGSGGGGSFEEVQLVQSGAELKKPGASVKVSCKASGYTFTDYYMKWVRQAPGQGLEWIGDIIPSNGATFYNQKFKGRVTITVDKSTSTAYMELSSLRSEDTAVYYCARSHLLRASWFAYWGQGTLVTVSSTRIQNPDPAVYQLRDSKSSDKSVCLFTDFDSQTNVSQSKDSDVYITDKCVLDMRSMDFKSNSAVAWSNKSDFACANAFNNSIIPEDTFFPSPESSCDVKLVEKSFETDTNLNFQNLSVIGFRILLLKVAGFNLLMTLRLWSS

SEQ ID NO: 44646 - protein, 773 aa, synthetic construct
MALPVTALLLPLALLLHAARPEVQLVESGGGLVQPGGSLRLSCEASGFASDDYIIGWFRQAPGKEREGVSCISSKYANTVYTDSVKGRFRLSRGTAKNTVYLQMSALKPEDTAVYYCAMDSRRVTCPEISTMHRNFDSWGQGTLVTVSSGTGGGGSGGGGSGGGGSEFDFVMTQSPDSLAVSLGERVTMSCKSSQSLLNSGNQKNYLTWYQQKPGQPPKLLIYWASTRESGVPDRFSGSGSGTDFTLTISSLQAEDVAVYYCQNDYSYPYTFGQGTKLEIKLEDLKNVFPPEVAVFEPSKAEIAHTQKATLVCLATGFYPDHVELSWWVNGKEVHSGVCTDPQPLKEQPALNDSRYCLSSRLRVSATFWQNPRNHFRCQVQFYGLSENDEWTQDRAKPVTQIVSAEAWGRADCGITSASYHQGVLSATILYEILLGKATLYAVLVSALVLMAMVKRKDSRGRAKRSGSGATNFSLLKQAGDVEENPGPTSMDWIWRILFLVGAATGAHSFEEVQLVQSGAELKKPGASVKVSCKASGYTFTDYYMKWVRQAPGQGLEWIGDIIPSNGATFYNQKFKGRVTITVDKSTSTAYMELSSLRSEDTAVYYCARSHLLRASWFAYWGQGTLVTVSSTRIQNPDPAVYQLRDSKSSDKSVCLFTDFDSQTNVSQSKDSDVYITDKCVLDMRSMDFKSNSAVAWSNKSDFACANAFNNSIIPEDTFFPSSDVPCDVKLVEKSFETDTNLNFQNLSVIGFRILLLKVAGFNLLMTLRLWSS

SEQ ID NO: 44647 - protein, 764 aa, synthetic construct
MALPVTALLLPLALLLHAARPDFVMTQSPDSLAVSLGERVTMSCKSSQSLLNSGNQKNYLTWYQQKPGQPPKLLIYWASTRESGVPDRFSGSGSGTDFTLTISSLQAEDVAVYYCQNDYSYPYTFGQGTKLEIKLEDLKNVFPPEVAVFEPSEAEISHTQKATLVCLATGFYPDHVELSWWVNGKEVHSGVCTDPQPLKEQPALNDSRYCLSSRLRVSATFWQNPRNHFRCQVQFYGLSENDEWTQDRAKPVTQIVSAEAWGRADCGFTSESYQQGVLSATILYEILLGKATLYAVLVSALVLMAMVKRKDSRGRAKRSGSGATNFSLLKQAGDVEENPGPTSTMDWIWRILFLVGAATGAHSGPEVQLVESGGGLVQPGGSLRLSCAASGRTFTMGWYRQAPGKEREFVAAISLSPTLAYYADSVKGRFTISRDNSKNTVVLQMNSLRAEDTALYYCAADRKSVMSIRPDYWGQGTLVTVSSGSGGGGSGGGGSGGGGSFEEVQLVQSGAELKKPGASVKVSCKASGYTFTDYYMKWVRQAPGQGLEWIGDIIPSNGATFYNQKFKGRVTITVDKSTSTAYMELSSLRSEDTAVYYCARSHLLRASWFAYWGQGTLVTVSSTRIQNPDPAVYQLRDSKSSDKSVCLFTDFDSQTNVSQSKDSDVYITDKCVLDMRSMDFKSNSAVAWSNKSDFACANAFNNSIIPEDTFFPSPESSCDVKLVEKSFETDTNLNFQNLSVIGFRILLLKVAGFNLLMTLRLWSS

SEQ ID NO: 44648 - protein, 771 aa, synthetic construct
MALPVTALLLPLALLLHAARPDFVMTQSPDSLAVSLGERVTMSCKSSQSLLNSGNQKNYLTWYQQKPGQPPKLLIYWASTRESGVPDRFSGSGSGTDFTLTISSLQAEDVAVYYCQNDYSYPYTFGQGTKLEIKLEDLKNVFPPEVAVFEPSEAEISHTQKATLVCLATGFYPDHVELSWWVNGKEVHSGVCTDPQPLKEQPALNDSRYCLSSRLRVSATFWQNPRNHFRCQVQFYGLSENDEWTQDRAKPVTQIVSAEAWGRADCGFTSESYQQGVLSATILYEILLGKATLYAVLVSALVLMAMVKRKDSRGRAKRSGSGATNFSLLKQAGDVEENPGPTSTMDWIWRILFLVGAATGAHSGPQVQLVESGGGLVQPGGSLRLSCAASGNINSRNCMGWFRQAPGKGREGVAAIGQVTGRTYYVDSVKGRFTISLDNSKNTLYLQMNSLRAEDTAVYYCAAAPGCLLSALRSADYRNWGQGTLVTVSSGSGGGGSGGGGSGGGGSFEEVQLVQSGAELKKPGASVKVSCKASGYTFTDYYMKWVRQAPGQGLEWIGDIIPSNGATFYNQKFKGRVTITVDKSTSTAYMELSSLRSEDTAVYYCARSHLLRASWFAYWGQGTLVTVSSTRIQNPDPAVYQLRDSKSSDKSVCLFTDFDSQTNVSQSKDSDVYITDKCVLDMRSMDFKSNSAVAWSNKSDFACANAFNNSIIPEDTFFPSPESSCDVKLVEKSFETDTNLNFQNLSVIGFRILLLKVAGFNLLMTLRLWSS

SEQ ID NO: 44649 - protein, 771 aa, synthetic construct
MALPVTALLLPLALLLHAARPDFVMTQSPDSLAVSLGERVTMSCKSSQSLLNSGNQKNYLTWYQQKPGQPPKLLIYWASTRESGVPDRFSGSGSGTDFTLTISSLQAEDVAVYYCQNDYSYPYTFGQGTKLEIKLEDLKNVFPPEVAVFEPSEAEISHTQKATLVCLATGFYPDHVELSWWVNGKEVHSGVCTDPQPLKEQPALNDSRYCLSSRLRVSATFWQNPRNHFRCQVQFYGLSENDEWTQDRAKPVTQIVSAEAWGRADCGFTSESYQQGVLSATILYEILLGKATLYAVLVSALVLMAMVKRKDSRGRAKRSGSGATNFSLLKQAGDVEENPGPTSTMDWIWRILFLVGAATGAHSGPQVQLVESGGGSVQAGGSLRLSCGASGNISSRNCMGWFRQAPGKEREGVAAIGQVTGRSYYVDSVKGRFTISLDNAKNTLYLQMNTLKPEDTAMYYCAAAPGCLLSALRSADYRNWGQGTQVTVSSGSGGGGSGGGGSGGGGSFEEVQLVQSGAELKKPGASVKVSCKASGYTFTDYYMKWVRQAPGQGLEWIGDIIPSNGATFYNQKFKGRVTITVDKSTSTAYMELSSLRSEDTAVYYCARSHLLRASWFAYWGQGTLVTVSSTRIQNPDPAVYQLRDSKSSDKSVCLFTDFDSQTNVSQSKDSDVYITDKCVLDMRSMDFKSNSAVAWSNKSDFACANAFNNSIIPEDTFFPSPESSCDVKLVEKSFETDTNLNFQNLSVIGFRILLLKVAGFNLLMTLRLWSS

SEQ ID NO: 44650 - protein, 912 aa, synthetic construct
MALPVTALLLPLALLLHAARPEVQLVESGGGLVQAGGSLRLSCAASGRTFSMGWFRQAPGKEREFVAAITYSGGSPYYADSVKGRFTISRDNAKNTVYLQMNSLKPEDTAVYYCAANPTYGSDWNAENWGQGTQVTVSSGTGGGGSGGGGSGGGGSEFDFVMTQSPDSLAVSLGERVTMSCKSSQSLLNSGNQKNYLTWYQQKPGQPPKLLIYWASTRESGVPDRFSGSGSGTDFTLTISSLQAEDVAVYYCQNDYSYPYTFGQGTKLEIKLEIQNPDPAVYQLRDSKSSDKSVCLFTDFDSQTNVSQSKDSDVYITDKCVLDMRSMDFKSNSAVAWSNKSDFACANAFNNSIIPEDTFFPSSDVPCDVKLVEKSFETDTNLNFQNLSVIGFRILLLKVAGFNLLMTLRLWSSRAKRSGSGVKQTLNFDLLKLAGDVESNPGPTSTMDWIWRILFLVGAATGAHSGPQVQLVESGGGSVQAGGSLRLSCGASGNISSRNCMGWFRQAPGKEREGVAAIGQVTGRSYYVDSVKGRFTISLDNAKNTLYLQMNTLKPEDTAMYYCAAAPGCLLSALRSADYRNWGQGTQVTVSSGSGGGGSGGGGSGGGGSFEEVQLVQSGAELKKPGASVKVSCKASGYTFTDYYMKWVRQAPGQGLEWIGDIIPSNGATFYNQKFKGRVTITVDKSTSTAYMELSSLRSEDTAVYYCARSHLLRASWFAYWGQGTLVTVSSTREDLKNVFPPEVAVFEPSKAEIAHTQKATLVCLATGFYPDHVELSWWVNGKEVHSGVCTDPQPLKEQPALNDSRYCLSSRLRVSATFWQNPRNHFRCQVQFYGLSENDEWTQDRAKPVTQIVSAEAWGRADCGITSASYHQGVLSATILYEILLGKATLYAVLVSALVLMAMVKRKDSRG

SEQ ID NO: 44651 - protein, 909 aa, synthetic construct
MALPVTALLLPLALLLHAARPQVQLVESGGGSVQAGGSLRLSCGASGNISSRNCMGWFRQAPGKEREGVAAIGQVTGRSYYVDSVKGRFTISLDNAKNTLYLQMNTLKPEDTAMYYCAAAPGCLLSALRSADYRNWGQGTQVTVSSGTGGGGSGGGGSGGGGSEFDFVMTQSPDSLAVSLGERVTMSCKSSQSLLNSGNQKNYLTWYQQKPGQPPKLLIYWASTRESGVPDRFSGSGSGTDFTLTISSLQAEDVAVYYCQNDYSYPYTFGQGTKLEIKLEDLKNVFPPEVAVFEPSEAEISHTQKATLVCLATGFYPDHVELSWWVNGKEVHSGVCTDPQPLKEQPALNDSRYCLSSRLRVSATFWQNPRNHFRCQVQFYGLSENDEWTQDRAKPVTQIVSAEAWGRADCGFTSESYQQGVLSATILYEILLGKATLYAVLVSALVLMAMVKRKDSRGRAKRSGSGATNFSLLKQAGDVEENPGPTSATMDWIWRILFLVGAATGAHSGPEVQLVESGGGLVQAGGSLRLSCAASGRTFTMGWFRQAPGKEREFVAAISLSPTLAYYADSVKGRFTISRDNAKNTVVLQMNSLKPEDTALYYCAADRKSVMSIRPDYWGQGTQVTVSSGSGGGGSGGGGSGGGGSFEEVQLVQSGAELKKPGASVKVSCKASGYTFTDYYMKWVRQAPGQGLEWIGDIIPSNGATFYNQKFKGRVTITVDKSTSTAYMELSSLRSEDTAVYYCARSHLLRASWFAYWGQGTLVTVSSTRIQNPDPAVYQLRDSKSSDKSVCLFTDFDSQTNVSQSKDSDVYITDKCVLDMRSMDFKSNSAVAWSNKSDFACANAFNNSIIPEDTFFPSPESSCDVKLVEKSFETDTNLNFQNLSVIGFRILLLKVAGFNLLMTLRLWSS

SEQ ID NO: 44652 - protein, 772 aa, synthetic construct
MALPVTALLLPLALLLHAARPQVQLVESGGGSVQAGGSLRLSCGASGNISSRNCMGWFRQAPGKEREGVAAIGQVTGRSYYVDSVKGRFTISLDNAKNTLYLQMNTLKPEDTAMYYCAAAPGCLLSALRSADYRNWGQGTQVTVSSGTGGGGSGGGGSGGGGSEFDFVMTQSPDSLAVSLGERVTMSCKSSQSLLNSGNQKNYLTWYQQKPGQPPKLLIYWASTRESGVPDRFSGSGSGTDFTLTISSLQAEDVAVYYCQNDYSYPYTFGQGTKLEIKLEDLKNVFPPEVAVFEPSEAEISHTQKATLVCLATGFYPDHVELSWWVNGKEVHSGVCTDPQPLKEQPALNDSRYCLSSRLRVSATFWQNPRNHFRCQVQFYGLSENDEWTQDRAKPVTQIVSAEAWGRADCGFTSESYQQGVLSATILYEILLGKATLYAVLVSALVLMAMVKRKDSRGRAKRSGSGATNFSLLKQAGDVEENPGPTSATMDWIWRILFLVGAATGAHSFEEVQLVQSGAELKKPGASVKVSCKASGYTFTDYYMKWVRQAPGQGLEWIGDIIPSNGATFYNQKFKGRVTITVDKSTSTAYMELSSLRSEDTAVYYCARSHLLRASWFAYWGQGTLVTVSSTRIQNPDPAVYQLRDSKSSDKSVCLFTDFDSQTNVSQSKDSDVYITDKCVLDMRSMDFKSNSAVAWSNKSDFACANAFNNSIIPEDTFFPSPESSCDVKLVEKSFETDTNLNFQNLSVIGFRILLLKVAGFNLLMTLRLWSS

SEQ ID NO: 44653 - protein, 772 aa, synthetic construct
MALPVTALLLPLALLLHAARPQVQLVESGGGVVQPGGSLRLSCAASGLSFSTYTVAWFRQAPGKGLEGVAAIPYTSQHMVYTDSVRGRFTISRDNSKNTLYLQMNSLRAEDTAVYYCATDRRPGTSMLAINGYNRWGQGTTVTVSSGTGGGGSGGGGSGGGGSEFDFVMTQSPDSLAVSLGERVTMSCKSSQSLLNSGNQKNYLTWYQQKPGQPPKLLIYWASTRESGVPDRFSGSGSGTDFTLTISSLQAEDVAVYYCQNDYSYPYTFGQGTKLEIKLEDLKNVFPPEVAVFEPSEAEISHTQKATLVCLATGFYPDHVELSWWVNGKEVHSGVCTDPQPLKEQPALNDSRYCLSSRLRVSATFWQNPRNHFRCQVQFYGLSENDEWTQDRAKPVTQIVSAEAWGRADCGFTSESYQQGVLSATILYEILLGKATLYAVLVSALVLMAMVKRKDSRGRAKRSGSGATNFSLLKQAGDVEENPGPTSATMDWIWRILFLVGAATGAHSFEEVQLVQSGAELKKPGASVKVSCKASGYTFTDYYMKWVRQAPGQGLEWIGDIIPSNGATFYNQKFKGRVTITVDKSTSTAYMELSSLRSEDTAVYYCARSHLLRASWFAYWGQGTLVTVSSTRIQNPDPAVYQLRDSKSSDKSVCLFTDFDSQTNVSQSKDSDVYITDKCVLDMRSMDFKSNSAVAWSNKSDFACANAFNNSIIPEDTFFPSPESSCDVKLVEKSFETDTNLNFQNLSVIGFRILLLKVAGFNLLMTLRLWSS

SEQ ID NO: 44654 - protein, 771 aa, synthetic construct
MALPVTALLLPLALLLHAARPDFVMTQSPDSLAVSLGERVTMSCKSSQSLLNSGNQKNYLTWYQQKPGQPPKLLIYWASTRESGVPDRFSGSGSGTDFTLTISSLQAEDVAVYYCQNDYSYPYTFGQGTKLEIKLEDLKNVFPPEVAVFEPSEAEISHTQKATLVCLATGFYPDHVELSWWVNGKEVHSGVCTDPQPLKEQPALNDSRYCLSSRLRVSATFWQNPRNHFRCQVQFYGLSENDEWTQDRAKPVTQIVSAEAWGRADCGFTSESYQQGVLSATILYEILLGKATLYAVLVSALVLMAMVKRKDSRGRAKRSGSGATNFSLLKQAGDVEENPGPTSTMDWIWRILFLVGAATGAHSGPQVQLVESGGGVVQPGGSLRLSCAASGLSFSTYTVAWFRQAPGKGLEGVAAIPYTSQHMVYTDSVRGRFTISRDNSKNTLYLQMNSLRAEDTAVYYCATDRRPGTSMLAINGYNRWGQGTTVTVSSGSGGGGSGGGGSGGGGSFEEVQLVQSGAELKKPGASVKVSCKASGYTFTDYYMKWVRQAPGQGLEWIGDIIPSNGATFYNQKFKGRVTITVDKSTSTAYMELSSLRSEDTAVYYCARSHLLRASWFAYWGQGTLVTVSSTRIQNPDPAVYQLRDSKSSDKSVCLFTDFDSQTNVSQSKDSDVYITDKCVLDMRSMDFKSNSAVAWSNKSDFACANAFNNSIIPEDTFFPSPESSCDVKLVEKSFETDTNLNFQNLSVIGFRILLLKVAGFNLLMTLRLWSS

SEQ ID NO: 44655 - protein, 773 aa, synthetic construct
MALPVTALLLPLALLLHAARPDFVMTQSPDSLAVSLGERVTMSCKSSQSLLNSGNQKNYLTWYQQKPGQPPKLLIYWASTRESGVPDRFSGSGSGTDFTLTISSLQAEDVAVYYCQNDYSYPYTFGQGTKLEIKLEDLKNVFPPEVAVFEPSEAEISHTQKATLVCLATGFYPDHVELSWWVNGKEVHSGVCTDPQPLKEQPALNDSRYCLSSRLRVSATFWQNPRNHFRCQVQFYGLSENDEWTQDRAKPVTQIVSAEAWGRADCGFTSESYQQGVLSATILYEILLGKATLYAVLVSALVLMAMVKRKDSRGRAKRSGSGATNFSLLKQAGDVEENPGPTSTMDWIWRILFLVGAATGAHSGPEVQLVESGGGSVQAGGSLRLSCAASGYTYSINCMGWFRQAPGKEREGVAAISTGGGRTDYRDSVKGRFTISQDNAKNTVYLQMNSLKPEDTAMYYCAGKTTYPGYGCGLGRSAYNYWGQGTQVTVSSGSGGGGSGGGGSGGGGSFEEVQLVQSGAELKKPGASVKVSCKASGYTFTDYYMKWVRQAPGQGLEWIGDIIPSNGATFYNQKFKGRVTITVDKSTSTAYMELSSLRSEDTAVYYCARSHLLRASWFAYWGQGTLVTVSSTRIQNPDPAVYQLRDSKSSDKSVCLFTDFDSQTNVSQSKDSDVYITDKCVLDMRSMDFKSNSAVAWSNKSDFACANAFNNSIIPEDTFFPSPESSCDVKLVEKSFETDTNLNFQNLSVIGFRILLLKVAGFNLLMTLRLWSS

SEQ ID NO: 44656 - protein, 626 aa, synthetic construct
MALPVTALLLPLALLLHAARPDFVMTQSPDSLAVSLGERVTMSCKSSQSLLNSGNQKNYLTWYQQKPGQPPKLLIYWASTRESGVPDRFSGSGSGTDFTLTISSLQAEDVAVYYCQNDYSYPYTFGQGTKLEIKLEDLKHVFPPEVAVFEPSDAEIWHTQKATLVCLATGFYPDHVELSWWVNGKEVHSGVSTDPQPLKEQPALNDSRYCLSSRLRVSATFWQNPRNHFRCQVQFYGLSENDEWTQDRAKPVTQIVSAEAWGRADCGFTSESYQQGVLSATILYEILLGKATLYAVLVSALVLMAMVKRKDSRGRAKRSGSGATNFSLLKQAGDVEENPGPTSMDWIWRILFLVGAATGAHSFEEVQLVQSGAELKKPGASVKVSCKASGYTFTDYYMKWVRQAPGQGLEWIGDIIPSNGATFYNQKFKGRVTITVDKSTSTAYMELSSLRSEDTAVYYCARSHLLRASWFAYWGQGTLVTVSSTRIQNPDPAVYQLRDSKSSDKSVCLFTDFDSQTNVSQSKDSDVYITDKTVLDMRSMDFKSNSAVAWSSKSDFACANAFNNSIIPEDTFFPSPEMACDVKLVEKSFETDTNLNFQNLLVIWLRILLLKVAGFNLLMTLRLWSS

SEQ ID NO: 44657 - protein, 626 aa, synthetic construct
MALPVTALLLPLALLLHAARPDFVMTQSPDSLAVSLGERVTMSCKSSQSLLNSGNQKNYLTWYQQKPGQPPKLLIYWASTRESGVPDRFSGSGSGTDFTLTISSLQAEDVAVYYCQNDYSYPYTFGQGTKLEIKLEDLKHVFPPEVAVFEPSDAEIWHTQKATLVCLATGFYPDHVELSWWVNGKEVHSGVSTDPQPLKEQPALNDSRYCLSSRLRVSATFWQNPRNHFRCQVQFYGLSENDEWTQDRAKPVTQIVSAEAWGRADCGFTSESYQQGVLSATILYEILLGKATLYAVLVSALVLMAMVKRKDSRGRAKRSGSGATNFSLLKQAGDVEENPGPTSMDWIWRILFLVGAATGAHSFEEVQLVQSGAELKKPGASVKVSCKASGYTFTDYYMKWVRQAPGQGLEWIGDIIPSNGATFYNQKFKGRVTITVDKSTSTAYMELSSLRSEDTAVYYCARSHLLRASWFAYWGQGTLVTVSSTRIQNPDPAVYQLRDSKSSDKSVCLFTDFDSQTNVSQSKDSDVYITDKTVLDMRSMDFKSNSAVAWSTKSDFACANAFNNSIIPEDTFFPSPEVVCDVKLVEKSFETDTNLNFQNLVVIGARILLLKVAGFNLLMTLRLWSS

SEQ ID NO: 44658 - protein, 626 aa, synthetic construct
MALPVTALLLPLALLLHAARPDFVMTQSPDSLAVSLGERVTMSCKSSQSLLNSGNQKNYLTWYQQKPGQPPKLLIYWASTRESGVPDRFSGSGSGTDFTLTISSLQAEDVAVYYCQNDYSYPYTFGQGTKLEIKLEDLKNVFPPEVAVFEPSKAEISRTQKATLVCLATGFYPPHVELSWWVNGKEVHDGVCTDPQPLKEQPALNDSRYCLSSRLRVSATFWQNPRNHFRCQVQFYGLSENDEWTQDRAKPVTQIVSAEAWGRADCGFTSESYQQGVLSATILYEILLGKATLYAVLVSALVLMAMVKRKDSRGRAKRSGSGATNFSLLKQAGDVEENPGPTSMDWIWRILFLVGAATGAHSFEEVQLVQSGAELKKPGASVKVSCKASGYTFTDYYMKWVRQAPGQGLEWIGDIIPSNGATFYNQKFKGRVTITVDKSTSTAYMELSSLRSEDTAVYYCARSHLLRASWFAYWGQGTLVTVSSTRIQNPDPAVYQLRDSKSSDKFVCLFTDFDSQINVSQSKDSDVYITDKCVLDMRSMDFKSNSAVAWSNKSDFTCANAFNNSIIPEDTFFPSPESSCDVKLVEKSFETDTNLNFQNLSVIGFRILLLKVAGFNLLMTLRLWSS

SEQ ID NO: 44659 - protein, 768 aa, synthetic construct
MALPVTALLLPLALLLHAARPDFVMTQSPDSLAVSLGERVTMSCKSSQSLLNSGNQKNYLTWYQQKPGQPPKLLIYWASTRESGVPDRFSGSGSGTDFTLTISSLQAEDVAVYYCQNDYSYPYTFGQGTKLEIKLEDLKNVFPPEVAVFEPSEAEISHTQKATLVCLATGFYPDHVELSWWVNGKEVHSGVCTDPQPLKEQPALNDSRYCLSSRLRVSATFWQNPRNHFRCQVQFYGLSENDEWTQDRAKPVTQIVSAEAWGRADCGFTSESYQQGVLSATILYEILLGKATLYAVLVSALVLMAMVKRKDSRGRAKRSGSGATNFSLLKQAGDVEENPGPTSTMDWIWRILFLVGAATGAHSGPQVQLQESGPGLVKPSQTLSLTCTVSGASITTGEYYWNWFRQPPGKGLEWMGAIAASGSTTYSPSFESRTSISRDTSKNQFSLKLSSVTAADTAVYYCGRSFGVAAVTTGQNRGQGTLVTVSSGSGGGGSGGGGSGGGGSFEEVQLVQSGAELKKPGASVKVSCKASGYTFTDYYMKWVRQAPGQGLEWIGDIIPSNGATFYNQKFKGRVTITVDKSTSTAYMELSSLRSEDTAVYYCARSHLLRASWFAYWGQGTLVTVSSTRIQNPDPAVYQLRDSKSSDKSVCLFTDFDSQTNVSQSKDSDVYITDKCVLDMRSMDFKSNSAVAWSNKSDFACANAFNNSIIPEDTFFPSPESSCDVKLVEKSFETDTNLNFQNLSVIGFRILLLKVAGFNLLMTLRLWSS

SEQ ID NO: 44660 - protein, 909 aa, synthetic construct
MALPVTALLLPLALLLHAARPQVQLQESGPGLVKPSQTLSLTCTVSGGSITTGEFYWNWFRQPPGKGLEWMGAIAASGSTTYSPSFESRTSISRDTSKNQFSLKLSSVTAADTAVYYCGRSFGVAAVTTGQNRGQGTLVTVSSGTGGGGSGGGGSGGGGSEFDFVMTQSPDSLAVSLGERVTMSCKSSQSLLNSGNQKNYLTWYQQKPGQPPKLLIYWASTRESGVPDRFSGSGSGTDFTLTISSLQAEDVAVYYCQNDYSYPYTFGQGTKLEIKLEIQNPDPAVYQLRDSKSSDKSVCLFTDFDSQTNVSQSKDSDVYITDKCVLDMRSMDFKSNSAVAWSNKSDFACANAFNNSIIPEDTFFPSSDVPCDVKLVEKSFETDTNLNFQNLSVIGFRILLLKVAGFNLLMTLRLWSSRAKRSGSGVKQTLNFDLLKLAGDVESNPGPTSTMDWIWRILFLVGAATGAHSGPEVQLVESGGGLVQPGGSLRLSCAASGRTFTMGWYRQAPGKEREFVAAISLSPTLAYYADSVKGRFTISRDNSKNTVVLQMNSLRAEDTALYYCAADRKSVMSIRPDYWGQGTLVTVSSGSGGGGSGGGGSGGGGSFEEVQLVQSGAELKKPGASVKVSCKASGYTFTDYYMKWVRQAPGQGLEWIGDIIPSNGATFYNQKFKGRVTITVDKSTSTAYMELSSLRSEDTAVYYCARSHLLRASWFAYWGQGTLVTVSSTREDLKNVFPPEVAVFEPSKAEIAHTQKATLVCLATGFYPDHVELSWWVNGKEVHSGVCTDPQPLKEQPALNDSRYCLSSRLRVSATFWQNPRNHFRCQVQFYGLSENDEWTQDRAKPVTQIVSAEAWGRADCGITSASYHQGVLSATILYEILLGKATLYAVLVSALVLMAMVKRKDSRG

SEQ ID NO: 44661 - protein, 772 aa, synthetic construct
MALPVTALLLPLALLLHAARPQVQLQESGPGLVKPSQTLSLTCTVSGGSITTGEFYWNWFRQPPGKGLEWMGAIAASGSTTYSPSFESRTSISRDTSKNQFSLKLSSVTAADTAVYYCGRSFGVAAVTTGQNRGQGTLVTVSSGTGGGGSGGGGSGGGGSEFDFVMTQSPDSLAVSLGERVTMSCKSSQSLLNSGNQKNYLTWYQQKPGQPPKLLIYWASTRESGVPDRFSGSGSGTDFTLTISSLQAEDVAVYYCQNDYSYPYTFGQGTKLEIKLEIQNPDPAVYQLRDSKSSDKSVCLFTDFDSQTNVSQSKDSDVYITDKCVLDMRSMDFKSNSAVAWSNKSDFACANAFNNSIIPEDTFFPSSDVPCDVKLVEKSFETDTNLNFQNLSVIGFRILLLKVAGFNLLMTLRLWSSRAKRSGSGVKQTLNFDLLKLAGDVESNPGPTSTMDWIWRILFLVGAATGAHSFEEVQLVQSGAELKKPGASVKVSCKASGYTFTDYYMKWVRQAPGQGLEWIGDIIPSNGATFYNQKFKGRVTITVDKSTSTAYMELSSLRSEDTAVYYCARSHLLRASWFAYWGQGTLVTVSSTREDLKNVFPPEVAVFEPSKAEIAHTQKATLVCLATGFYPDHVELSWWVNGKEVHSGVCTDPQPLKEQPALNDSRYCLSSRLRVSATFWQNPRNHFRCQVQFYGLSENDEWTQDRAKPVTQIVSAEAWGRADCGITSASYHQGVLSATILYEILLGKATLYAVLVSALVLMAMVKRKDSRG

SEQ ID NO: 44662 - protein, 905 aa, synthetic construct
MALPVTALLLPLALLLHAARPEVQLVESGGGLVQAGGSLRLSCAASGRTFSMGWFRQAPGKEREFVAAITYSGGSPYYADSVKGRFTISRDNAKNTVYLQMNSLKPEDTAVYYCAANPTYGSDWNAENWGQGTQVTVSSGTGGGGSGGGGSGGGGSEFDFVMTQSPDSLAVSLGERVTMSCKSSQSLLNSGNQKNYLTWYQQKPGQPPKLLIYWASTRESGVPDRFSGSGSGTDFTLTISSLQAEDVAVYYCQNDYSYPYTFGQGTKLEIKLEDLKNVFPPEVAVFEPSEAEISHTQKATLVCLATGFYPDHVELSWWVNGKEVHSGVCTDPQPLKEQPALNDSRYCLSSRLRVSATFWQNPRNHFRCQVQFYGLSENDEWTQDRAKPVTQIVSAEAWGRADCGFTSESYQQGVLSATILYEILLGKATLYAVLVSALVLMAMVKRKDSRGRAKRSGSGATNFSLLKQAGDVEENPGPTSTMDWIWRILFLVGAATGAHSGPQVQLQESGPGLVKPSQTLSLTCTVSGASITTGEYYWNWFRQPPGKGLEWMGAIAASGSTTYSPSFESRTSISRDTSKNQFSLKLSSVTAADTAVYYCGRSFGVAAVTTGQNRGQGTLVTVSSGSGGGGSGGGGSGGGGSFEEVQLVQSGAELKKPGASVKVSCKASGYTFTDYYMKWVRQAPGQGLEWIGDIIPSNGATFYNQKFKGRVTITVDKSTSTAYMELSSLRSEDTAVYYCARSHLLRASWFAYWGQGTLVTVSSTRIQNPDPAVYQLRDSKSSDKSVCLFTDFDSQTNVSQSKDSDVYITDKCVLDMRSMDFKSNSAVAWSNKSDFACANAFNNSIIPEDTFFPSPESSCDVKLVEKSFETDTNLNFQNLSVIGFRILLLKVAGFNLLMTLRLWSS

SEQ ID NO: 44663 - protein, 912 aa, synthetic construct
MALPVTALLLPLALLLHAARPEVQLVESGGGLVQAGGSLRLSCAASGRTFSMGWFRQAPGKEREFVAAITYSGGSPYYADSVKGRFTISRDNAKNTVYLQMNSLKPEDTAVYYCAANPTYGSDWNAENWGQGTQVTVSSGTGGGGSGGGGSGGGGSEFDFVMTQSPDSLAVSLGERVTMSCKSSQSLLNSGNQKNYLTWYQQKPGQPPKLLIYWASTRESGVPDRFSGSGSGTDFTLTISSLQAEDVAVYYCQNDYSYPYTFGQGTKLEIKLEIQNPDPAVYQLRDSKSSDKSVCLFTDFDSQTNVSQSKDSDVYITDKCVLDMRSMDFKSNSAVAWSNKSDFACANAFNNSIIPEDTFFPSSDVPCDVKLVEKSFETDTNLNFQNLSVIGFRILLLKVAGFNLLMTLRLWSSRAKRSGSGVKQTLNFDLLKLAGDVESNPGPTSTMDWIWRILFLVGAATGAHSGPQVQLVESGGGLVQPGGSLRLSCAASGNINSRNCMGWFRQAPGKGREGVAAIGQVTGRTYYVDSVKGRFTISLDNSKNTLYLQMNSLRAEDTAVYYCAAAPGCLLSALRSADYRNWGQGTLVTVSSGSGGGGSGGGGSGGGGSFEEVQLVQSGAELKKPGASVKVSCKASGYTFTDYYMKWVRQAPGQGLEWIGDIIPSNGATFYNQKFKGRVTITVDKSTSTAYMELSSLRSEDTAVYYCARSHLLRASWFAYWGQGTLVTVSSTREDLKNVFPPEVAVFEPSKAEIAHTQKATLVCLATGFYPDHVELSWWVNGKEVHSGVCTDPQPLKEQPALNDSRYCLSSRLRVSATFWQNPRNHFRCQVQFYGLSENDEWTQDRAKPVTQIVSAEAWGRADCGITSASYHQGVLSATILYEILLGKATLYAVLVSALVLMAMVKRKDSRG

SEQ ID NO: 44664 - protein, 908 aa, synthetic construct
MALPVTALLLPLALLLHAARPEVQLVESGGGLVQAGGSLRLSCAASGRTFSMGWFRQAPGKEREFVAAITYSGGSPYYADSVKGRFTISRDNAKNTVYLQMNSLKPEDTAVYYCAANPTYGSDWNAENWGQGTQVTVSSGTGGGGSGGGGSGGGGSEFDFVMTQSPDSLAVSLGERVTMSCKSSQSLLNSGNQKNYLTWYQQKPGQPPKLLIYWASTRESGVPDRFSGSGSGTDFTLTISSLQAEDVAVYYCQNDYSYPYTFGQGTKLEIKLEDLKNVFPPEVAVFEPSEAEISHTQKATLVCLATGFYPDHVELSWWVNGKEVHSGVCTDPQPLKEQPALNDSRYCLSSRLRVSATFWQNPRNHFRCQVQFYGLSENDEWTQDRAKPVTQIVSAEAWGRADCGFTSESYQQGVLSATILYEILLGKATLYAVLVSALVLMAMVKRKDSRGRAKRSGSGATNFSLLKQAGDVEENPGPTSTMDWIWRILFLVGAATGAHSGPQVQLVESGGGLVQPGGSLRLSCAASGNINSRNCMGWFRQAPGKGREGVAAIGQVTGRTYYVDSVKGRFTISLDNSKNTLYLQMNSLRAEDTAVYYCAAAPGCLLSALRSADYRNWGQGTLVTVSSGSGGGGSGGGGSGGGGSFEEVQLVQSGAELKKPGASVKVSCKASGYTFTDYYMKWVRQAPGQGLEWIGDIIPSNGATFYNQKFKGRVTITVDKSTSTAYMELSSLRSEDTAVYYCARSHLLRASWFAYWGQGTLVTVSSTRIQNPDPAVYQLRDSKSSDKSVCLFTDFDSQTNVSQSKDSDVYITDKCVLDMRSMDFKSNSAVAWSNKSDFACANAFNNSIIPEDTFFPSPESSCDVKLVEKSFETDTNLNFQNLSVIGFRILLLKVAGFNLLMTLRLWSS

SEQ ID NO: 44665 - protein, 908 aa, synthetic construct
MALPVTALLLPLALLLHAARPEVQLVESGGGLVQAGGSLRLSCAASGRTFTMGWFRQAPGKEREFVAAISLSPTLAYYADSVKGRFTISRDNAKNTVVLQMNSLKPEDTALYYCAADRKSVMSIRPDYWGQGTQVTVSSGTGGGGSGGGGSGGGGSEFDFVMTQSPDSLAVSLGERVTMSCKSSQSLLNSGNQKNYLTWYQQKPGQPPKLLIYWASTRESGVPDRFSGSGSGTDFTLTISSLQAEDVAVYYCQNDYSYPYTFGQGTKLEIKLEDLKNVFPPEVAVFEPSEAEISHTQKATLVCLATGFYPDHVELSWWVNGKEVHSGVCTDPQPLKEQPALNDSRYCLSSRLRVSATFWQNPRNHFRCQVQFYGLSENDEWTQDRAKPVTQIVSAEAWGRADCGFTSESYQQGVLSATILYEILLGKATLYAVLVSALVLMAMVKRKDSRGRAKRSGSGATNFSLLKQAGDVEENPGPTSTMDWIWRILFLVGAATGAHSGPQVQLVESGGGLVQPGGSLRLSCAASGNINSRNCMGWFRQAPGKGREGVAAIGQVTGRTYYVDSVKGRFTISLDNSKNTLYLQMNSLRAEDTAVYYCAAAPGCLLSALRSADYRNWGQGTLVTVSSGSGGGGSGGGGSGGGGSFEEVQLVQSGAELKKPGASVKVSCKASGYTFTDYYMKWVRQAPGQGLEWIGDIIPSNGATFYNQKFKGRVTITVDKSTSTAYMELSSLRSEDTAVYYCARSHLLRASWFAYWGQGTLVTVSSTRIQNPDPAVYQLRDSKSSDKSVCLFTDFDSQTNVSQSKDSDVYITDKCVLDMRSMDFKSNSAVAWSNKSDFACANAFNNSIIPEDTFFPSPESSCDVKLVEKSFETDTNLNFQNLSVIGFRILLLKVAGFNLLMTLRLWSS

SEQ ID NO: 44666 - protein, 912 aa, synthetic construct
MALPVTALLLPLALLLHAARPQVQLQESGPGLVKPSQTLSLTCTVSGGSITTGEFYWNWFRQPPGKGLEWMGAIAASGSTTYSPSFESRTSISRDTSKNQFSLKLSSVTAADTAVYYCGRSFGVAAVTTGQNRGQGTLVTVSSGTGGGGSGGGGSGGGGSEFDFVMTQSPDSLAVSLGERVTMSCKSSQSLLNSGNQKNYLTWYQQKPGQPPKLLIYWASTRESGVPDRFSGSGSGTDFTLTISSLQAEDVAVYYCQNDYSYPYTFGQGTKLEIKLEDLKNVFPPEVAVFEPSEAEISHTQKATLVCLATGFYPDHVELSWWVNGKEVHSGVCTDPQPLKEQPALNDSRYCLSSRLRVSATFWQNPRNHFRCQVQFYGLSENDEWTQDRAKPVTQIVSAEAWGRADCGFTSESYQQGVLSATILYEILLGKATLYAVLVSALVLMAMVKRKDSRGRAKRSGSGATNFSLLKQAGDVEENPGPTSTMDWIWRILFLVGAATGAHSGPQVQLVESGGGLVQPGGSLRLSCAASGNINSRNCMGWFRQAPGKGREGVAAIGQVTGRTYYVDSVKGRFTISLDNSKNTLYLQMNSLRAEDTAVYYCAAAPGCLLSALRSADYRNWGQGTLVTVSSGSGGGGSGGGGSGGGGSFEEVQLVQSGAELKKPGASVKVSCKASGYTFTDYYMKWVRQAPGQGLEWIGDIIPSNGATFYNQKFKGRVTITVDKSTSTAYMELSSLRSEDTAVYYCARSHLLRASWFAYWGQGTLVTVSSTRIQNPDPAVYQLRDSKSSDKSVCLFTDFDSQTNVSQSKDSDVYITDKCVLDMRSMDFKSNSAVAWSNKSDFACANAFNNSIIPEDTFFPSPESSCDVKLVEKSFETDTNLNFQNLSVIGFRILLLKVAGFNLLMTLRLWSS

SEQ ID NO: 44667 - protein, 493 aa, synthetic construct
MALPVTALLLPLALLLHAARPEIVLTQSPATLSLSPGERATLSCSVSSSISSSNLHWYQQKPGQAPRLLIYATSNLASGIPARFSGSGSGTDFTLTISSLEPEDFAVYYCQQWSSYPHTFGGGTKVEIKRGGGGSGGGGSGGGGSQVQLVQSGAEVKKPGASVKVSCKASGYTFTNYLIEWVRQAPGQGLEWMGLINPGSGGTNYNEKFKGRVTMTTDTSTSTAYMELRSLRSDDTAVYYCARRSPLGSWIYYAYDGVAYWGQGTLVTVSSTRKIEVMYPPPYLDNEKSNGTIIHVKGKHLCPSPLFPGPSKPFWVLVVVGGVLACYSLLVTVAFIIFWVRSKRSRLLHSDYMNMTPRRPGPTRKHYQPYAPPRDFAAYRSRVKFSRSADAPAYQQGQNQLYNELNLGRREEYDVLDKRRGRDPEMGGKPRRKNPQEGLYNELQKDKMAEAYSEIGMKGERRRGKGHDGLYQGLSTATKDTYDALHMQALPPR

SEQ ID NO: 44668 - protein, 499 aa, synthetic construct
MALPVTALLLPLALLLHAARPEIVLTQSPATLSLSPGERATLSCSVSSSISSSNLHWYQQKPGQAPRLLIYATSNLASGIPARFSGSGSGTDFTLTISSLEPEDFAVYYCQQWSSYPHTFGGGTKVEIKRGGGGSGGGGSGGGGSQVQLVQSGAEVKKPGASVKVSCKASGYTFTNYLIEWVRQAPGQGLEWMGLINPGSGGTNYNEKFKGRVTMTTDTSTSTAYMELRSLRSDDTAVYYCARRSPLGSWIYYAYDGVAYWGQGTLVTVSSTRAKPTTTPAPRPPTPAPTIASQPLSLRPEACRPAAGGAVHTRGLDFACDIYIWAPLAGTCGVLLLSLVITLYCKRGRKKLLYIFKQPFMRPVQTTQEEDGCSCRFPEEEEGGCELRVKFSRSADAPAYQQGQNQLYNELNLGRREEYDVLDKRRGRDPEMGGKPRRKNPQEGLYNELQKDKMAEAYSEIGMKGERRRGKGHDGLYQGLSTATKDTYDALHMQALPPR

SEQ ID NO: 44669 - protein, 499 aa, synthetic construct
MALPVTALLLPLALLLHAARPQVQLVQSGAEVKKPGASVKVSCKASGYTFTNYLIEWVRQAPGQGLEWMGLINPGSGGTNYNEKFKGRVTMTTDTSTSTAYMELRSLRSDDTAVYYCARRSPLGSWIYYAYDGVAYWGQGTLVTVSSGGGGSGGGGSGGGGSEIVLTQSPATLSLSPGERATLSCSVSSSISSSNLHWYQQKPGQAPRLLIYATSNLASGIPARFSGSGSGTDFTLTISSLEPEDFAVYYCQQWSSYPHTFGGGTKVEIKRTRAKPTTTPAPRPPTPAPTIASQPLSLRPEACRPAAGGAVHTRGLDFACDIYIWAPLAGTCGVLLLSLVITLYCKRGRKKLLYIFKQPFMRPVQTTQEEDGCSCRFPEEEEGGCELRVKFSRSADAPAYQQGQNQLYNELNLGRREEYDVLDKRRGRDPEMGGKPRRKNPQEGLYNELQKDKMAEAYSEIGMKGERRRGKGHDGLYQGLSTATKDTYDALHMQALPPR

SEQ ID NO: 44670 - protein, 632 aa, synthetic construct
MALPVTALLLPLALLLHAARPEIVLTQSPATLSLSPGERATLSCSVSSSISSSNLHWYQQKPGQAPRLLIYATSNLASGIPARFSGSGSGTDFTLTISSLEPEDFAVYYCQQWSSYPHTFGGGTKVEIKRLEIQNPDPAVYQLRDSKSSDKSVCLFTDFDSQTNVSQSKDSDVYITDKCVLDMRSMDFKSNSAVAWSNKSDFACANAFNNSIIPEDTFFPSSDVPCDVKLVEKSFETDTNLNFQNLSVIGFRILLLKVAGFNLLMTLRLWSSRAKRSGSGVKQTLNFDLLKLAGDVESNPGPTSMDWIWRILFLVGAATGAHSFEQVQLVQSGAEVKKPGASVKVSCKASGYTFTNYLIEWVRQAPGQGLEWMGLINPGSGGTNYNEKFKGRVTMTTDTSTSTAYMELRSLRSDDTAVYYCARRSPLGSWIYYAYDGVAYWGQGTLVTVSSTREDLKNVFPPEVAVFEPSKAEIAHTQKATLVCLATGFYPDHVELSWWVNGKEVHSGVCTDPQPLKEQPALNDSRYCLSSRLRVSATFWQNPRNHFRCQVQFYGLSENDEWTQDRAKPVTQIVSAEAWGRADCGITSASYHQGVLSATILYEILLGKATLYAVLVSALVLMAMVKRKDSRG

SEQ ID NO: 44671 - protein, 628 aa, synthetic construct
MALPVTALLLPLALLLHAARPEIVLTQSPATLSLSPGERATLSCSVSSSISSSNLHWYQQKPGQAPRLLIYATSNLASGIPARFSGSGSGTDFTLTISSLEPEDFAVYYCQQWSSYPHTFGGGTKVEIKRLEDLKNVFPPEVAVFEPSKAEIAHTQKATLVCLATGFYPDHVELSWWVNGKEVHSGVCTDPQPLKEQPALNDSRYCLSSRLRVSATFWQNPRNHFRCQVQFYGLSENDEWTQDRAKPVTQIVSAEAWGRADCGITSASYHQGVLSATILYEILLGKATLYAVLVSALVLMAMVKRKDSRGRAKRSGSGATNFSLLKQAGDVEENPGPTSMDWIWRILFLVGAATGAHSFEQVQLVQSGAEVKKPGASVKVSCKASGYTFTNYLIEWVRQAPGQGLEWMGLINPGSGGTNYNEKFKGRVTMTTDTSTSTAYMELRSLRSDDTAVYYCARRSPLGSWIYYAYDGVAYWGQGTLVTVSSTRIQNPDPAVYQLRDSKSSDKSVCLFTDFDSQTNVSQSKDSDVYITDKCVLDMRSMDFKSNSAVAWSNKSDFACANAFNNSIIPEDTFFPSSDVPCDVKLVEKSFETDTNLNFQNLSVIGFRILLLKVAGFNLLMTLRLWSS

SEQ ID NO: 44672 - protein, 628 aa, synthetic construct
MALPVTALLLPLALLLHAARPEIVLTQSPATLSLSPGERATLSCSVSSSISSSNLHWYQQKPGQAPRLLIYATSNLASGIPARFSGSGSGTDFTLTISSLEPEDFAVYYCQQWSSYPHTFGGGTKVEIKRLEDLKNVFPPEVAVFEPSEAEISHTQKATLVCLATGFYPDHVELSWWVNGKEVHSGVCTDPQPLKEQPALNDSRYCLSSRLRVSATFWQNPRNHFRCQVQFYGLSENDEWTQDRAKPVTQIVSAEAWGRADCGFTSESYQQGVLSATILYEILLGKATLYAVLVSALVLMAMVKRKDSRGRAKRSGSGATNFSLLKQAGDVEENPGPTSMDWIWRILFLVGAATGAHSFEQVQLVQSGAEVKKPGASVKVSCKASGYTFTNYLIEWVRQAPGQGLEWMGLINPGSGGTNYNEKFKGRVTMTTDTSTSTAYMELRSLRSDDTAVYYCARRSPLGSWIYYAYDGVAYWGQGTLVTVSSTRIQNPDPAVYQLRDSKSSDKSVCLFTDFDSQTNVSQSKDSDVYITDKCVLDMRSMDFKSNSAVAWSNKSDFACANAFNNSIIPEDTFFPSPESSCDVKLVEKSFETDTNLNFQNLSVIGFRILLLKVAGFNLLMTLRLWSS

SEQ ID NO: 44673 - protein, 632 aa, synthetic construct
MALPVTALLLPLALLLHAARPEIVLTQSPATLSLSPGERATLSCSVSSSISSSNLHWYQQKPGQAPRLLIYATSNLASGIPARFSGSGSGTDFTLTISSLEPEDFAVYYCQQWSSYPHTFGGGTKVEIKRLEIQNPDPAVYQLRDSKSSDKSVCLFTDFDSQTNVSQSKDSDVYITDKCVLDMRSMDFKSNSAVAWSNKSDFACANAFNNSIIPEDTFFPSPESSCDVKLVEKSFETDTNLNFQNLSVIGFRILLLKVAGFNLLMTLRLWSSRAKRSGSGVKQTLNFDLLKLAGDVESNPGPTSMDWIWRILFLVGAATGAHSFEQVQLVQSGAEVKKPGASVKVSCKASGYTFTNYLIEWVRQAPGQGLEWMGLINPGSGGTNYNEKFKGRVTMTTDTSTSTAYMELRSLRSDDTAVYYCARRSPLGSWIYYAYDGVAYWGQGTLVTVSSTREDLKNVFPPEVAVFEPSEAEISHTQKATLVCLATGFYPDHVELSWWVNGKEVHSGVCTDPQPLKEQPALNDSRYCLSSRLRVSATFWQNPRNHFRCQVQFYGLSENDEWTQDRAKPVTQIVSAEAWGRADCGFTSESYQQGVLSATILYEILLGKATLYAVLVSALVLMAMVKRKDSRG

SEQ ID NO: 44674 - protein, 644 aa, synthetic construct
MALPVTALLLPLALLLHAARPLEEDLKNVFPPEVAVFEPSKAEIAHTQKATLVCLATGFYPDHVELSWWVNGKEVHSGVCTDPQPLKEQPALNDSRYCLSSRLRVSATFWQNPRNHFRCQVQFYGLSENDEWTQDRAKPVTQIVSAEAWGRADCGITSASYHQGVLSATILYEILLGKATLYAVLVSALVLMAMVKRKDSRGRAKRSGSGATNFSLLKQAGDVEENPGPTSMALPVTALLLPLALLLHAARPEIVLTQSPATLSLSPGERATLSCSVSSSISSSNLHWYQQKPGQAPRLLIYATSNLASGIPARFSGSGSGTDFTLTISSLEPEDFAVYYCQQWSSYPHTFGGGTKVEIKRGGGGSGGGGSGGGGSQVQLVQSGAEVKKPGASVKVSCKASGYTFTNYLIEWVRQAPGQGLEWMGLINPGSGGTNYNEKFKGRVTMTTDTSTSTAYMELRSLRSDDTAVYYCARRSPLGSWIYYAYDGVAYWGQGTLVTVSSTRIQNPDPAVYQLRDSKSSDKSVCLFTDFDSQTNVSQSKDSDVYITDKCVLDMRSMDFKSNSAVAWSNKSDFACANAFNNSIIPEDTFFPSSDVPCDVKLVEKSFETDTNLNFQNLSVIGFRILLLKVAGFNLLMTLRLWSS

SEQ ID NO: 44675 - protein, 651 aa, synthetic construct
MALPVTALLLPLALLLHAARPLEGSGDRPDPAVYQLRDSKSSDKSVCLFTDFDSQTNVSQSKDSDVYITDKCVLDMRSMDFKSNSAVAWSNKSDFACANAFNNSIIPEDTFFPSPESSCDVKLVEKSFETDTNLNFQNLSVIGFRILLLKVAGFNLLMTLRLWSSSSRAKRSGSGVKQTLNFDLLKLAGDVESNPGPTSMALPVTALLLPLALLLHAARPEIVLTQSPATLSLSPGERATLSCSVSSSISSSNLHWYQQKPGQAPRLLIYATSNLASGIPARFSGSGSGTDFTLTISSLEPEDFAVYYCQQWSSYPHTFGGGTKVEIKRGGGGSGGGGSGGGGSQVQLVQSGAEVKKPGASVKVSCKASGYTFTNYLIEWVRQAPGQGLEWMGLINPGSGGTNYNEKFKGRVTMTTDTSTSTAYMELRSLRSDDTAVYYCARRSPLGSWIYYAYDGVAYWGQGTLVTVSSTREDLKNVFPPEVAVFEPSEAEISHTQKATLVCLATGFYPDHVELSWWVNGKEVHSGVCTDPQPLKEQPALNDSRYCLSSRLRVSATFWQNPRNHFRCQVQFYGLSENDEWTQDRAKPVTQIVSAEAWGRADCGFTSESYQQGVLSATILYEILLGKATLYAVLVSALVLMAMVKRKDSRG

SEQ ID NO: 44676 - protein, 628 aa, synthetic construct
MALPVTALLLPLALLLHAARPEIVLTQSPATLSLSPGERATLSCSVSSSISSSNLHWYQQKPGQAPRLLIYATSNLASGIPARFSGSGSGTDFTLTISSLEPEDFAVYYCQQWSSYPHTFGGGTKVEIKRLEDLKNVFPPEVAVFEPSEAEISHTQKATLVCLATGFYPDHVELSWWVNGKEVHSGVSTDPQPLKEQPALNDSRYCLSSRLRVSATFWQNPRNHFRCQVQFYGLSENDEWTQDRAKPVTQIVSAEAWGRADCGFTSESYQQGVLSATILYEILLGKATLYAVLVSALVLMAMVKRKDSRGRAKRSGSGATNFSLLKQAGDVEENPGPTSMDWIWRILFLVGAATGAHSFEQVQLVQSGAEVKKPGASVKVSCKASGYTFTNYLIEWVRQAPGQGLEWMGLINPGSGGTNYNEKFKGRVTMTTDTSTSTAYMELRSLRSDDTAVYYCARRSPLGSWIYYAYDGVAYWGQGTLVTVSSTRIQNPDPAVYQLRDSKSSDKSVCLFTDFDSQTNVSQSKDSDVYITDKTVLDMRSMDFKSNSAVAWSNKSDFACANAFNNSIIPEDTFFPSPESSCDVKLVEKSFETDTNLNFQNLSVIGFRILLLKVAGFNLLMTLRLWSS

SEQ ID NO: 44677 - protein, 636 aa, synthetic construct
MALPVTALLLPLALLLHAARPEIVLTQSPATLSLSPGERATLSCSVSSSISSSNLHWYQQKPGQAPRLLIYATSNLASGIPARFSGSGSGTDFTLTISSLEPEDFAVYYCQQWSSYPHTFGGGTKVEIKRLEDKQLDADVSPKPTIFLPSIAETKLQKAGTYLCLLEKFFPDVIKIHWQEKKSNTILGSQEGNTMKTNDTYMKFSWLTVPEKSLDKEHRCIVRHENNKNGVDQEIIFPPIKTDVITMDPKDNCSKDANDTLLLQLTNTSAYYMYLLLLLKSVVYFAIITCCLLRRTAFCCNGEKSRAKRSGSGATNFSLLKQAGDVEENPGPTSMDWIWRILFLVGAATGAHSFEQVQLVQSGAEVKKPGASVKVSCKASGYTFTNYLIEWVRQAPGQGLEWMGLINPGSGGTNYNEKFKGRVTMTTDTSTSTAYMELRSLRSDDTAVYYCARRSPLGSWIYYAYDGVAYWGQGTLVTVSSTRSQPHTKPSVFVMKNGTNVACLVKEFYPKDIRINLVSSKKITEFDPAIVISPSGKYNAVKLGKYEDSNSVTCSVQHDNKTVHSTDFEVKTDSTDHVKPKETENTKQPSKSCHKPKAIVHTEKVNMMSLTVLGLRMLFAKTVAVNFLLTAKLFFL

SEQ ID NO: 44678 - protein, 636 aa, synthetic construct
MALPVTALLLPLALLLHAARPEIVLTQSPATLSLSPGERATLSCSVSSSISSSNLHWYQQKPGQAPRLLIYATSNLASGIPARFSGSGSGTDFTLTISSLEPEDFAVYYCQQWSSYPHTFGGGTKVEIKRLESQPHTKPSVFVMKNGTNVACLVKEFYPKDIRINLVSSKKITEFDPAIVISPSGKYNAVKLGKYEDSNSVTCSVQHDNKTVHSTDFEVKTDSTDHVKPKETENTKQPSKSCHKPKAIVHTEKVNMMSLTVLGLRMLFAKTVAVNFLLTAKLFFLRAKRSGSGATNFSLLKQAGDVEENPGPTSMDWIWRILFLVGAATGAHSFEQVQLVQSGAEVKKPGASVKVSCKASGYTFTNYLIEWVRQAPGQGLEWMGLINPGSGGTNYNEKFKGRVTMTTDTSTSTAYMELRSLRSDDTAVYYCARRSPLGSWIYYAYDGVAYWGQGTLVTVSSTRDKQLDADVSPKPTIFLPSIAETKLQKAGTYLCLLEKFFPDVIKIHWQEKKSNTILGSQEGNTMKTNDTYMKFSWLTVPEKSLDKEHRCIVRHENNKNGVDQEIIFPPIKTDVITMDPKDNCSKDANDTLLLQLTNTSAYYMYLLLLLKSVVYFAIITCCLLRRTAFCCNGEKS

SEQ ID NO: 44679 - protein, 651 aa, synthetic construct
MALPVTALLLPLALLLHAARPLEDKQLDADVSPKPTIFLPSIAETKLQKAGTYLCLLEKFFPDVIKIHWQEKKSNTILGSQEGNTMKTNDTYMKFSWLTVPEKSLDKEHRCIVRHENNKNGVDQEIIFPPIKTDVITMDPKDNCSKDANDTLLLQLTNTSAYYMYLLLLLKSVVYFAIITCCLLRRTAFCCNGEKSRAKRSGSGATNFSLLKQAGDVEENPGPTSMALPVTALLLPLALLLHAARPEIVLTQSPATLSLSPGERATLSCSVSSSISSSNLHWYQQKPGQAPRLLIYATSNLASGIPARFSGSGSGTDFTLTISSLEPEDFAVYYCQQWSSYPHTFGGGTKVEIKRGGGGSGGGGSGGGGSQVQLVQSGAEVKKPGASVKVSCKASGYTFTNYLIEWVRQAPGQGLEWMGLINPGSGGTNYNEKFKGRVTMTTDTSTSTAYMELRSLRSDDTAVYYCARRSPLGSWIYYAYDGVAYWGQGTLVTVSSTRSQPHTKPSVFVMKNGTNVACLVKEFYPKDIRINLVSSKKITEFDPAIVISPSGKYNAVKLGKYEDSNSVTCSVQHDNKTVHSTDFEVKTDSTDHVKPKETENTKQPSKSCHKPKAIVHTEKVNMMSLTVLGLRMLFAKTVAVNFLLTAKLFFL

SEQ ID NO: 44680 - protein, 805 aa, synthetic construct
MALPVTALLLPLALLLHAARPEIVLTQSPATLSLSPGERATLSCSVSSSISSSNLHWYQQKPGQAPRLLIYATSNLASGIPARFSGSGSGTDFTLTISSLEPEDFAVYYCQQWSSYPHTFGGGTKVEIKRGQPKANPTVTLFPPSSEELQANKATLVCLISDFYPGAVTVAWKADGSPVKAGVETTKPSKQSNNKYAASSYLSLTPEQWKSHRSYSCQVTHEGSTVEKTVAPTECSGSQSFGLLDPKLCYLLDGILFIYGVILTALFLRVKFSRSADAPAYQQGQNQLYNELNLGRREEYDVLDKRRGRDPEMGGKPQRRKNPQEGLYNELQKDKMAEAYSEIGMKGERRRGKGHDGLYQGLSTATKDTYDALHMQALPPRRAKRSGSGATNFSLLKQAGDVEENPGPTSMDWIWRILFLVGAATGAHSFEQVQLVQSGAEVKKPGASVKVSCKASGYTFTNYLIEWVRQAPGQGLEWMGLINPGSGGTNYNEKFKGRVTMTTDTSTSTAYMELRSLRSDDTAVYYCARRSPLGSWIYYAYDGVAYWGQGTLVTVSSASTKGPSVFPLAPSSKSTSGGTAALGCLVKDYFPEPVTVSWNSGALTSGVHTFPAVLQSSGLYSLSSVVTVPSSSLGTQTYICNVNHKPSNTKVDKRVEPKSCGTQSFGLLDPKLCYLLDGILFIYGVILTALFLRVKFSRSADAPAYQQGQNQLYNELNLGRREEYDVLDKRRGRDPEMGGKPQRRKNPQEGLYNELQKDKMAEAYSEIGMKGERRRGKGHDGLYQGLSTATKDTYDALHMQALPPR

SEQ ID NO: 44681 - protein, 824 aa, synthetic construct
MALPVTALLLPLALLLHAARPEIVLTQSPATLSLSPGERATLSCSVSSSISSSNLHWYQQKPGQAPRLLIYATSNLASGIPARFSGSGSGTDFTLTISSLEPEDFAVYYCQQWSSYPHTFGGGTKVEIKRLEDLKNVFPPEVAVFEPSEAEISHTQKATLVCLATGFYPDHVELSWWVNGKEVHSGVSTDPQPLKEQPALNDSRYCLSSRLRVSATFWQNPRNHFRCQVQFYGLSENDEWTQDRAKPVTQIVSAEAWGRADCGSQSFGLLDPKLCYLLDGILFIYGVILTALFLRVKFSRSADAPAYQQGQNQLYNELNLGRREEYDVLDKRRGRDPEMGGKPQRRKNPQEGLYNELQKDKMAEAYSEIGMKGERRRGKGHDGLYQGLSTATKDTYDALHMQALPPRRAKRSGSGATNFSLLKQAGDVEENPGPTSMDWIWRILFLVGAATGAHSFEQVQLVQSGAEVKKPGASVKVSCKASGYTFTNYLIEWVRQAPGQGLEWMGLINPGSGGTNYNEKFKGRVTMTTDTSTSTAYMELRSLRSDDTAVYYCARRSPLGSWIYYAYDGVAYWGQGTLVTVSSTRIQNPDPAVYQLRDSKSSDKSVCLFTDFDSQTNVSQSKDSDVYITDKTVLDMRSMDFKSNSAVAWSNKSDFACANAFNNSIIPEDTFFPSPESSCGTQSFGLLDPKLCYLLDGILFIYGVILTALFLRVKFSRSADAPAYQQGQNQLYNELNLGRREEYDVLDKRRGRDPEMGGKPQRRKNPQEGLYNELQKDKMAEAYSEIGMKGERRRGKGHDGLYQGLSTATKDTYDALHMQALPPR

SEQ ID NO: 44682 - protein, 866 aa, synthetic construct
MALPVTALLLPLALLLHAARPEIVLTQSPATLSLSPGERATLSCSVSSSISSSNLHWYQQKPGQAPRLLIYATSNLASGIPARFSGSGSGTDFTLTISSLEPEDFAVYYCQQWSSYPHTFGGGTKVEIKRLEEDLKNVFPPEVAVFEPSEAEISHTQKATLVCLATGFYPDHVELSWWVNGKEVHSGVSTDPQPLKEQPALNDSRYCLSSRLRVSATFWQNPRNHFRCQVQFYGLSENDEWTQDRAKPVTQIVSAEAWGRADCGSQSFGLLDPKLCYLLDGILFIYGVILTALFLRVKFSRSADAPAYQQGQNQLYNELNLGRREEYDVLDKRRGRDPEMGGKPQRRKNPQEGLYNELQKDKMAEAYSEIGMKGERRRGKGHDGLYQGLSTATKDTYDALHMQALPPRRAKRSGSGATNFSLLKQAGDVEENPGPTSMDWIWRILFLVGAATGAHSFEQVQLVQSGAEVKKPGASVKVSCKASGYTFTNYLIEWVRQAPGQGLEWMGLINPGSGGTNYNEKFKGRVTMTTDTSTSTAYMELRSLRSDDTAVYYCARRSPLGSWIYYAYDGVAYWGQGTLVTVSSTRIQNPDPAVYQLRDSKSSDKSVCLFTDFDSQTNVSQSKDSDVYITDKTVLDMRSMDFKSNSAVAWSNKSDFACANAFNNSIIPEDTFFPSPESSCGTQSFGLLDPKLCYLLDGILFIYGVILTALFLRSKRSRLLHSDYMNMTPRRPGPTRKHYQPYAPPRDFAAYRSRVKFSRSADAPAYQQGQNQLYNELNLGRREEYDVLDKRRGRDPEMGGKPQRRKNPQEGLYNELQKDKMAEAYSEIGMKGERRRGKGHDGLYQGLSTATKDTYDALHMQALPPR

SEQ ID NO: 44683 - protein, 909 aa, synthetic construct
MALPVTALLLPLALLLHAARPEIVLTQSPATLSLSPGERATLSCSVSSSISSSNLHWYQQKPGQAPRLLIYATSNLASGIPARFSGSGSGTDFTLTISSLEPEDFAVYYCQQWSSYPHTFGGGTKVEIKRLEEDLKNVFPPEVAVFEPSEAEISHTQKATLVCLATGFYPDHVELSWWVNGKEVHSGVSTDPQPLKEQPALNDSRYCLSSRLRVSATFWQNPRNHFRCQVQFYGLSENDEWTQDRAKPVTQIVSAEAWGRADCGSQSFGLLDPKLCYLLDGILFIYGVILTALFLKRGRKKLLYIFKQPFMRPVQTTQEEDGCSCRFPEEEEGGCELRVKFSRSADAPAYQQGQNQLYNELNLGRREEYDVLDKRRGRDPEMGGKPQRRKNPQEGLYNELQKDKMAEAYSEIGMKGERRRGKGHDGLYQGLSTATKDTYDALHMQALPPRRAKRSGSGATNFSLLKQAGDVEENPGPTSMDWIWRILFLVGAATGAHSFEQVQLVQSGAEVKKPGASVKVSCKASGYTFTNYLIEWVRQAPGQGLEWMGLINPGSGGTNYNEKFKGRVTMTTDTSTSTAYMELRSLRSDDTAVYYCARRSPLGSWIYYAYDGVAYWGQGTLVTVSSTRIQNPDPAVYQLRDSKSSDKSVCLFTDFDSQTNVSQSKDSDVYITDKTVLDMRSMDFKSNSAVAWSNKSDFACANAFNNSIIPEDTFFPSPESSCGTQSFGLLDPKLCYLLDGILFIYGVILTALFLKRGRKKLLYIFKQPFMRPVQTTQEEDGCSCRFPEEEEGGCELRVKFSRSADAPAYQQGQNQLYNELNLGRREEYDVLDKRRGRDPEMGGKPQRRKNPQEGLYNELQKDKMAEAYSEIGMKGERRRGKGHDGLYQGLSTATKDTYDALHMQALPPR

SEQ ID NO: 44684 - protein, 596 aa, synthetic construct
MALPVTALLLPLALLLHAARPEIVLTQSPATLSLSPGERATLSCSVSSSISSSNLHWYQQKPGQAPRLLIYATSNLASGIPARFSGSGSGTDFTLTISSLEPEDFAVYYCQQWSSYPHTFGGGTKVEIKRLEQSFGLLDPKLCYLLDGILFIYGVILTALFLRVKFSRSADAPAYQQGQNQLYNELNLGRREEYDVLDKRRGRDPEMGGKPQRRKNPQEGLYNELQKDKMAEAYSEIGMKGERRRGKGHDGLYQGLSTATKDTYDALHMQALPPRRAKRSGSGATNFSLLKQAGDVEENPGPTSMDWIWRILFLVGAATGAHSFEQVQLVQSGAEVKKPGASVKVSCKASGYTFTNYLIEWVRQAPGQGLEWMGLINPGSGGTNYNEKFKGRVTMTTDTSTSTAYMELRSLRSDDTAVYYCARRSPLGSWIYYAYDGVAYWGQGTLVTVSSTRQSFGLLDPKLCYLLDGILFIYGVILTALFLRVKFSRSADAPAYQQGQNQLYNELNLGRREEYDVLDKRRGRDPEMGGKPQRRKNPQEGLYNELQKDKMAEAYSEIGMKGERRRGKGHDGLYQGLSTATKDTYDALHMQALPPR

SEQ ID NO: 44685 - protein, 654 aa, synthetic construct
MALPVTALLLPLALLLHAARPEIVLTQSPATLSLSPGERATLSCSVSSSISSSNLHWYQQKPGQAPRLLIYATSNLASGIPARFSGSGSGTDFTLTISSLEPEDFAVYYCQQWSSYPHTFGGGTKVEIKRLEGQPKANPTVTLFPPSSEELQANKATLVCLISDFYPGAVTVAWKADGSPVKAGVETTKPSKQSNNKYAASSYLSLTPEQWKSHRSYSCQVTHEGSTVEKTVAPTECSPIKTDVITMDPKDNCSKDANDTLLLQLTNTSAYYMYLLLLLKSVVYFAIITCCLLRRTAFCCNGEKSRAKRSGSGATNFSLLKQAGDVEENPGPTSMDWIWRILFLVGAATGAHSFEQVQLVQSGAEVKKPGASVKVSCKASGYTFTNYLIEWVRQAPGQGLEWMGLINPGSGGTNYNEKFKGRVTMTTDTSTSTAYMELRSLRSDDTAVYYCARRSPLGSWIYYAYDGVAYWGQGTLVTVSSTRASTKGPSVFPLAPSSKSTSGGTAALGCLVKDYFPEPVTVSWNSGALTSGVHTFPAVLQSSGLYSLSSVVTVPSSSLGTQTYICNVNHKPSNTKVDKRVEPKSCEVKTDSTDHVKPKETENTKQPSKSCHKPKAIVHTEKVNMMSLTVLGLRMLFAKTVAVNFLLTAKLFFL

SEQ ID NO: 44686 - protein, 632 aa, synthetic construct
MALPVTALLLPLALLLHAARPEIVLTQSPATLSLSPGERATLSCSVSSSISSSNLHWYQQKPGQAPRLLIYATSNLASGIPARFSGSGSGTDFTLTISSLEPEDFAVYYCQQWSSYPHTFGGGTKVEIKRLEGQPKANPTVTLFPPSSEELQANKATLVCLISDFYPGAVTVAWKADGSPVKAGVETTKPSKQSNNKYAASSYLSLTPEQWKSHRSYSCQVTHEGSTVEKTVAPTECSGRADCGITSASYHQGVLSATILYEILLGKATLYAVLVSALVLMAMVKRKDSRGRAKRSGSGATNFSLLKQAGDVEENPGPTSMDWIWRILFLVGAATGAHSFEQVQLVQSGAEVKKPGASVKVSCKASGYTFTNYLIEWVRQAPGQGLEWMGLINPGSGGTNYNEKFKGRVTMTTDTSTSTAYMELRSLRSDDTAVYYCARRSPLGSWIYYAYDGVAYWGQGTLVTVSSTRASTKGPSVFPLAPSSKSTSGGTAALGCLVKDYFPEPVTVSWNSGALTSGVHTFPAVLQSSGLYSLSSVVTVPSSSLGTQTYICNVNHKPSNTKVDKRVEPKSCIPEDTFFPSSDVPCDVKLVEKSFETDTNLNFQNLSVIGFRILLLKVAGFNLLMTLRLWSS

SEQ ID NO: 44687 - protein, 632 aa, synthetic construct
MALPVTALLLPLALLLHAARPEIVLTQSPATLSLSPGERATLSCSVSSSISSSNLHWYQQKPGQAPRLLIYATSNLASGIPARFSGSGSGTDFTLTISSLEPEDFAVYYCQQWSSYPHTFGGGTKVEIKRLEGQPKANPTVTLFPPSSEELQANKATLVCLISDFYPGAVTVAWKADGSPVKAGVETTKPSKQSNNKYAASSYLSLTPEQWKSHRSYSCQVTHEGSTVEKTVAPTECSGRADCGFTSESYQQGVLSATILYEILLGKATLYAVLVSALVLMAMVKRKDSRGRAKRSGSGATNFSLLKQAGDVEENPGPTSMDWIWRILFLVGAATGAHSFEQVQLVQSGAEVKKPGASVKVSCKASGYTFTNYLIEWVRQAPGQGLEWMGLINPGSGGTNYNEKFKGRVTMTTDTSTSTAYMELRSLRSDDTAVYYCARRSPLGSWIYYAYDGVAYWGQGTLVTVSSTRASTKGPSVFPLAPSSKSTSGGTAALGCLVKDYFPEPVTVSWNSGALTSGVHTFPAVLQSSGLYSLSSVVTVPSSSLGTQTYICNVNHKPSNTKVDKRVEPKSCIPEDTFFPSPESSCDVKLVEKSFETDTNLNFQNLSVIGFRILLLKVAGFNLLMTLRLWSS

SEQ ID NO: 44688 - protein, 458 aa, synthetic construct
MALPVTALLLPLALLLHAARPEIVLTQSPATLSLSPGERATLSCSVSSSISSSNLHWYQQKPGQAPRLLIYATSNLASGIPARFSGSGSGTDFTLTISSLEPEDFAVYYCQQWSSYPHTFGGGTKVEIKRGGGGSGGGGSGGGGSQVQLVQSGAEVKKPGASVKVSCKASGYTFTNYLIEWVRQAPGQGLEWMGLINPGSGGTNYNEKFKGRVTMTTDTSTSTAYMELRSLRSDDTAVYYCARRSPLGSWIYYAYDGVAYWGQGTLVTVSSTRDGNEEMGGITQTPYKVSISGTTVILTCPQYPGSEILWQHNDKNIGGDEDDKNIGSDEDHLSLKEFSELEQSGYYVCYPRGSKPEDANFYLYLRARVCENCMEMDVMSVATIVIVDICITGGLLLLVYYWSKNRKAKAKPVTRGAGAGGRQRGQNKERPPPVPNPDYEPIRKGQRDLYSGLNQRRI

SEQ ID NO: 44689 - protein, 423 aa, synthetic construct
MALPVTALLLPLALLLHAARPEIVLTQSPATLSLSPGERATLSCSVSSSISSSNLHWYQQKPGQAPRLLIYATSNLASGIPARFSGSGSGTDFTLTISSLEPEDFAVYYCQQWSSYPHTFGGGTKVEIKRGGGGSGGGGSGGGGSQVQLVQSGAEVKKPGASVKVSCKASGYTFTNYLIEWVRQAPGQGLEWMGLINPGSGGTNYNEKFKGRVTMTTDTSTSTAYMELRSLRSDDTAVYYCARRSPLGSWIYYAYDGVAYWGQGTLVTVSSTRFKIPIEELEDRVFVNCNTSITWVEGTVGTLLSDITRLDLGKRILDPRGIYRCNGTDIYKDKESTVQVHYRMCQSCVELDPATVAGIIVTDVIATLLLALGVFCFAGHETGRLSGAADTQALLRNDQVYQPLRDRDDAQYSHLGGNWARNK

SEQ ID NO: 44690 - protein, 433 aa, synthetic construct
MALPVTALLLPLALLLHAARPEIVLTQSPATLSLSPGERATLSCSVSSSISSSNLHWYQQKPGQAPRLLIYATSNLASGIPARFSGSGSGTDFTLTISSLEPEDFAVYYCQQWSSYPHTFGGGTKVEIKRGGGGSGGGGSGGGGSQVQLVQSGAEVKKPGASVKVSCKASGYTFTNYLIEWVRQAPGQGLEWMGLINPGSGGTNYNEKFKGRVTMTTDTSTSTAYMELRSLRSDDTAVYYCARRSPLGSWIYYAYDGVAYWGQGTLVTVSSTRQSIKGNHLVKVYDYQEDGSVLLTCDAEAKNITWFKDGKMIGFLTEDKKKWNLGSNAKDPRGMYQCKGSQNKSKPLQVYYRMCQNCIELNAATISGFLFAEIVSIFVLAVGVYFIAGQDGVRQSRASDKQTLLPNDQLYQPLKDREDDQYSHLQGNQLRRN

SEQ ID NO: 44691 - protein, 416 aa, synthetic construct
MALPVTALLLPLALLLHAARPEIVLTQSPATLSLSPGERATLSCSVSSSISSSNLHWYQQKPGQAPRLLIYATSNLASGIPARFSGSGSGTDFTLTISSLEPEDFAVYYCQQWSSYPHTFGGGTKVEIKRGGGGSGGGGSGGGGSQVQLVQSGAEVKKPGASVKVSCKASGYTFTNYLIEWVRQAPGQGLEWMGLINPGSGGTNYNEKFKGRVTMTTDTSTSTAYMELRSLRSDDTAVYYCARRSPLGSWIYYAYDGVAYWGQGTLVTVSSTRQSFGLLDPKLCYLLDGILFIYGVILTALFLRVKFSRSADAPAYQQGQNQLYNELNLGRREEYDVLDKRRGRDPEMGGKPQRRKNPQEGLYNELQKDKMAEAYSEIGMKGERRRGKGHDGLYQGLSTATKDTYDALHMQALPPR

SEQ ID NO: 44692 - protein, 511 aa, synthetic construct
MALPVTALLLPLALLLHAARPEIVLTQSPATLSLSPGERATLSCSVSSSISSSNLHWYQQKPGQAPRLLIYATSNLASGIPARFSGSGSGTDFTLTISSLEPEDFAVYYCQQWSSYPHTFGGGTKVEIKRGGGGSGGGGSGGGGSQVQLVQSGAEVKKPGASVKVSCKASGYTFTNYLIEWVRQAPGQGLEWMGLINPGSGGTNYNEKFKGRVTMTTDTSTSTAYMELRSLRSDDTAVYYCARRSPLGSWIYYAYDGVAYWGQGTLVTVSSTRGMRTEDLPKAVVFLEPQWYRVLEKDSVTLKCQGAYSPEDNSTQWFHNESLISSQASSYFIDAATVDDSGEYRCQTNLSTLSDPVQLEVHIGWLLLQAPRWVFKEEDPIHLRCHSWKNTALHKVTYLQNGKGRKYFHHNSDFYIPKATLKDSGSYFCRGLVGSKNVSSETVNITITQGLAVPTISSFFPPGYQVSFCLVMVLLFAVDTGLYFSVKTNIRSSTRDWKDHKFKWRKDPQDK

SEQ ID NO: 44693 - protein, 486 aa, synthetic construct
MALPVTALLLPLALLLHAARPEIVLTQSPATLSLSPGERATLSCSVSSSISSSNLHWYQQKPGQAPRLLIYATSNLASGIPARFSGSGSGTDFTLTISSLEPEDFAVYYCQQWSSYPHTFGGGTKVEIKRGGGGSGGGGSGGGGSQVQLVQSGAEVKKPGASVKVSCKASGYTFTNYLIEWVRQAPGQGLEWMGLINPGSGGTNYNEKFKGRVTMTTDTSTSTAYMELRSLRSDDTAVYYCARRSPLGSWIYYAYDGVAYWGQGTLVTVSSTRGMRTEDLPKAVVFLEPQWYRVLEKDSVTLKCQGAYSPEDNSTQWFHNESLISSQASSYFIDAATVDDSGEYRCQTNLSTLSDPVQLEVHIGWLLLQAPRWVFKEEDPIHLRCHSWKNTALHKVTYLQNGKGRKYFHHNSDFYIPKATLKDSGSYFCRGLVGSKNVSSETVNITITQGLAVPTISSFFPPGYQVSFCLVMVLLFAVDTGLYFSV

SEQ ID NO: 44694 - protein, 487 aa, synthetic construct
MALPVTALLLPLALLLHAARPEIVLTQSPATLSLSPGERATLSCSVSSSISSSNLHWYQQKPGQAPRLLIYATSNLASGIPARFSGSGSGTDFTLTISSLEPEDFAVYYCQQWSSYPHTFGGGTKVEIKRGGGGSGGGGSGGGGSQVQLVQSGAEVKKPGASVKVSCKASGYTFTNYLIEWVRQAPGQGLEWMGLINPGSGGTNYNEKFKGRVTMTTDTSTSTAYMELRSLRSDDTAVYYCARRSPLGSWIYYAYDGVAYWGQGTLVTVSSTRGMRTEDLPKAVVFLEPQWYRVLEKDSVTLKCQGAYSPEDNSTQWFHNESLISSQASSYFIDAATVDDSGEYRCQTNLSTLSDPVQLEVHIGWLLLQAPRWVFKEEDPIHLRCHSWKNTALHKVTYLQNGKGRKYFHHNSDFYIPKATLKDSGSYFCRGLVGSKNVSSETVNITITQGLAVPTISSFFPPGYQVSFCLVMVLLFAVDTGLYFSVK

SEQ ID NO: 44695 - protein, 731 aa, synthetic construct
MALPVTALLLPLALLLHAARPEIVLTQSPATLSLSPGERATLSCSVSSSISSSNLHWYQQKPGQAPRLLIYATSNLASGIPARFSGSGSGTDFTLTISSLEPEDFAVYYCQQWSSYPHTFGGGTKVEIKRLEGQPKANPTVTLFPPSSEELQANKATLVCLISDFYPGAVTVAWKADGSPVKAGVETTKPSKQSNNKYAASSYLSLTPEQWKSHRSYSCQVTHEGSTVEKTVAPTECSGSQSFGLLDPKLCYLLDGILFIYGVILTALFLRVKFSRSADAPAYQQGQNQLYNELNLGRREEYDVLDKRRGRDPEMGGKPQRRKNPQEGLYNELQKDKMAEAYSEIGMKGERRRGKGHDGLYQGLSTATKDTYDALHMQALPPRRAKRSGSGATNFSLLKQAGDVEENPGPTSMDWIWRILFLVGAATGAHSFEQVQLVQSGAEVKKPGASVKVSCKASGYTFTNYLIEWVRQAPGQGLEWMGLINPGSGGTNYNEKFKGRVTMTTDTSTSTAYMELRSLRSDDTAVYYCARRSPLGSWIYYAYDGVAYWGQGTLVTVSSTRASTKGPSVFPLAPSSKSTSGGTAALGCLVKDYFPEPVTVSWNSGALTSGVHTFPAVLQSSGLYSLSSVVTVPSSSLGTQTYICNVNHKPSNTKVDKRVEPKSCGTITQGLAVSTISSFFPPGYQVSFCLVMVLLFAVDTGLYFSVKTNIRSSTRDWKDHKFKWRKDPQDK

SEQ ID NO: 44696 - protein, 746 aa, synthetic construct
MALPVTALLLPLALLLHAARPEIVLTQSPATLSLSPGERATLSCSVSSSISSSNLHWYQQKPGQAPRLLIYATSNLASGIPARFSGSGSGTDFTLTISSLEPEDFAVYYCQQWSSYPHTFGGGTKVEIKRLEDLKNVFPPEVAVFEPSEAEISHTQKATLVCLATGFYPDHVELSWWVNGKEVHSGVSTDPQPLKEQPALNDSRYCLSSRLRVSATFWQNPRNHFRCQVQFYGLSENDEWTQDRAKPVTQIVSAEAWGRADCGSQSFGLLDPKLCYLLDGILFIYGVILTALFLRVKFSRSADAPAYQQGQNQLYNELNLGRREEYDVLDKRRGRDPEMGGKPQRRKNPQEGLYNELQKDKMAEAYSEIGMKGERRRGKGHDGLYQGLSTATKDTYDALHMQALPPRRAKRSGSGATNFSLLKQAGDVEENPGPTSMDWIWRILFLVGAATGAHSFEQVQLVQSGAEVKKPGASVKVSCKASGYTFTNYLIEWVRQAPGQGLEWMGLINPGSGGTNYNEKFKGRVTMTTDTSTSTAYMELRSLRSDDTAVYYCARRSPLGSWIYYAYDGVAYWGQGTLVTVSSTRIQNPDPAVYQLRDSKSSDKSVCLFTDFDSQTNVSQSKDSDVYITDKTVLDMRSMDFKSNSAVAWSNKSDFACANAFNNSIIPEDTFFPSPESSCGTITQGLAVSTISSFFPPGYQVSFCLVMVLLFAVDTGLYFSVKTNIRSSTRDWKDHKFKWRKDPQDK

SEQ ID NO: 44697 - protein, 721 aa, synthetic construct
MALPVTALLLPLALLLHAARPEIVLTQSPATLSLSPGERATLSCSVSSSISSSNLHWYQQKPGQAPRLLIYATSNLASGIPARFSGSGSGTDFTLTISSLEPEDFAVYYCQQWSSYPHTFGGGTKVEIKRLEDLKNVFPPEVAVFEPSEAEISHTQKATLVCLATGFYPDHVELSWWVNGKEVHSGVSTDPQPLKEQPALNDSRYCLSSRLRVSATFWQNPRNHFRCQVQFYGLSENDEWTQDRAKPVTQIVSAEAWGRADCGSQSFGLLDPKLCYLLDGILFIYGVILTALFLRVKFSRSADAPAYQQGQNQLYNELNLGRREEYDVLDKRRGRDPEMGGKPQRRKNPQEGLYNELQKDKMAEAYSEIGMKGERRRGKGHDGLYQGLSTATKDTYDALHMQALPPRRAKRSGSGATNFSLLKQAGDVEENPGPTSMDWIWRILFLVGAATGAHSFEQVQLVQSGAEVKKPGASVKVSCKASGYTFTNYLIEWVRQAPGQGLEWMGLINPGSGGTNYNEKFKGRVTMTTDTSTSTAYMELRSLRSDDTAVYYCARRSPLGSWIYYAYDGVAYWGQGTLVTVSSTRIQNPDPAVYQLRDSKSSDKSVCLFTDFDSQTNVSQSKDSDVYITDKTVLDMRSMDFKSNSAVAWSNKSDFACANAFNNSIIPEDTFFPSPESSCGTITQGLAVSTISSFFPPGYQVSFCLVMVLLFAVDTGLYFSV

SEQ ID NO: 44698 - protein, 722 aa, synthetic construct
MALPVTALLLPLALLLHAARPEIVLTQSPATLSLSPGERATLSCSVSSSISSSNLHWYQQKPGQAPRLLIYATSNLASGIPARFSGSGSGTDFTLTISSLEPEDFAVYYCQQWSSYPHTFGGGTKVEIKRLEDLKNVFPPEVAVFEPSEAEISHTQKATLVCLATGFYPDHVELSWWVNGKEVHSGVSTDPQPLKEQPALNDSRYCLSSRLRVSATFWQNPRNHFRCQVQFYGLSENDEWTQDRAKPVTQIVSAEAWGRADCGSQSFGLLDPKLCYLLDGILFIYGVILTALFLRVKFSRSADAPAYQQGQNQLYNELNLGRREEYDVLDKRRGRDPEMGGKPQRRKNPQEGLYNELQKDKMAEAYSEIGMKGERRRGKGHDGLYQGLSTATKDTYDALHMQALPPRRAKRSGSGATNFSLLKQAGDVEENPGPTSMDWIWRILFLVGAATGAHSFEQVQLVQSGAEVKKPGASVKVSCKASGYTFTNYLIEWVRQAPGQGLEWMGLINPGSGGTNYNEKFKGRVTMTTDTSTSTAYMELRSLRSDDTAVYYCARRSPLGSWIYYAYDGVAYWGQGTLVTVSSTRIQNPDPAVYQLRDSKSSDKSVCLFTDFDSQTNVSQSKDSDVYITDKTVLDMRSMDFKSNSAVAWSNKSDFACANAFNNSIIPEDTFFPSPESSCGTITQGLAVSTISSFFPPGYQVSFCLVMVLLFAVDTGLYFSVK

SEQ ID NO: 44699 - protein, 723 aa, synthetic construct
MALPVTALLLPLALLLHAARPEIVLTQSPATLSLSPGERATLSCSVSSSISSSNLHWYQQKPGQAPRLLIYATSNLASGIPARFSGSGSGTDFTLTISSLEPEDFAVYYCQQWSSYPHTFGGGTKVEIKRLEDLKNVFPPEVAVFEPSEAEISHTQKATLVCLATGFYPDHVELSWWVNGKEVHSGVSTDPQPLKEQPALNDSRYCLSSRLRVSATFWQNPRNHFRCQVQFYGLSENDEWTQDRAKPVTQIVSAEAWGRADCGSQSFGLLDPKLCYLLDGILFIYGVILTALFLRVKFSRSADAPAYQQGQNQLYNELNLGRREEYDVLDKRRGRDPEMGGKPQRRKNPQEGLYNELQKDKMAEAYSEIGMKGERRRGKGHDGLYQGLSTATKDTYDALHMQALPPRRAKRSGSGATNFSLLKQAGDVEENPGPTSMDWIWRILFLVGAATGAHSFEQVQLVQSGAEVKKPGASVKVSCKASGYTFTNYLIEWVRQAPGQGLEWMGLINPGSGGTNYNEKFKGRVTMTTDTSTSTAYMELRSLRSDDTAVYYCARRSPLGSWIYYAYDGVAYWGQGTLVTVSSTRIQNPDPAVYQLRDSKSSDKSVCLFTDFDSQTNVSQSKDSDVYITDKTVLDMRSMDFKSNSAVAWSNKSDFACANAFNNSIIPEDTFFPSPESSCGTITQGLAVSTISSFFPPGYQVSFCLVMVLLFAVDTGLYFSVKT

SEQ ID NO: 44700 - protein, 659 aa, synthetic construct
MALPVTALLLPLALLLHAARPEIVLTQSPATLSLSPGERATLSCSVSSSISSSNLHWYQQKPGQAPRLLIYATSNLASGIPARFSGSGSGTDFTLTISSLEPEDFAVYYCQQWSSYPHTFGGGTKVEIKRLEGQPKANPTVTLFPPSSEELQANKATLVCLISDFYPGAVTVAWKADGSPVKAGVETTKPSKQSNNKYAASSYLSLTPEQWKSHRSYSCQVTHEGSTVEKTVAPTECSGSLGEPQLCYILDAILFLYGIVLTLLYCRLKIQVRKAAITSYEKSDGVYTGLSTRNQETYETLKHEKPPQRAKRSGSGATNFSLLKQAGDVEENPGPTSMDWIWRILFLVGAATGAHSFEQVQLVQSGAEVKKPGASVKVSCKASGYTFTNYLIEWVRQAPGQGLEWMGLINPGSGGTNYNEKFKGRVTMTTDTSTSTAYMELRSLRSDDTAVYYCARRSPLGSWIYYAYDGVAYWGQGTLVTVSSTRASTKGPSVFPLAPSSKSTSGGTAALGCLVKDYFPEPVTVSWNSGALTSGVHTFPAVLQSSGLYSLSSVVTVPSSSLGTQTYICNVNHKPSNTKVDKRVEPKSCGTLGEPQLCYILDAILFLYGIVLTLLYCRLKIQVRKAAITSYEKSDGVYTGLSTRNQETYETLKHEKPPQ

SEQ ID NO: 44701 - protein, 629 aa, synthetic construct
MALPVTALLLPLALLLHAARPEIVLTQSPATLSLSPGERATLSCSVSSSISSSNLHWYQQKPGQAPRLLIYATSNLASGIPARFSGSGSGTDFTLTISSLEPEDFAVYYCQQWSSYPHTFGGGTKVEIKRLEDLKNVFPPEVAVFEPSEAEISHTQKATLVCLATGFYPDHVELSWWVNGKEVHSGVCTDPQPLKEQPALNDSRYCLSSRLRVSATFWQNPRNHFRCQVQFYGLSENDEWTQDRAKPVTQIVSAEAWGRADCGFTSESYQQGVLSAYYMYLLLLLKSVVYFAIITCCLLRRTAFCCNGEKSRAKRSGSGATNFSLLKQAGDVEENPGPTSMDWIWRILFLVGAATGAHSFEQVQLVQSGAEVKKPGASVKVSCKASGYTFTNYLIEWVRQAPGQGLEWMGLINPGSGGTNYNEKFKGRVTMTTDTSTSTAYMELRSLRSDDTAVYYCARRSPLGSWIYYAYDGVAYWGQGTLVTVSSTRIQNPDPAVYQLRDSKSSDKSVCLFTDFDSQTNVSQSKDSDVYITDKCVLDMRSMDFKSNSAVAWSNKSDFACANAFNNSIIPEDTFFPSPESSCDVKLVEKSFETDTNLNFQNLSVIGFRILLLKVAGFNLLMTLRLWSS

SEQ ID NO: 44702 - protein, 635 aa, synthetic construct
MALPVTALLLPLALLLHAARPEIVLTQSPATLSLSPGERATLSCSVSSSISSSNLHWYQQKPGQAPRLLIYATSNLASGIPARFSGSGSGTDFTLTISSLEPEDFAVYYCQQWSSYPHTFGGGTKVEIKRLEDKQLDADVSPKPTIFLPSIAETKLQKAGTYLCLLEKFFPDVIKIHWQEKKSNTILGSQEGNTMKTNDTYMKFSWLTVPEKSLDKEHRCIVRHENNKNGVDQEIIFPPIKTDVITMDPKDNCSKDANDTLLLQLTNTSAYYMYEILLGKATLYAVLVSALVLMAMVKRKDSRGRAKRSGSGATNFSLLKQAGDVEENPGPTSMDWIWRILFLVGAATGAHSFEQVQLVQSGAEVKKPGASVKVSCKASGYTFTNYLIEWVRQAPGQGLEWMGLINPGSGGTNYNEKFKGRVTMTTDTSTSTAYMELRSLRSDDTAVYYCARRSPLGSWIYYAYDGVAYWGQGTLVTVSSTRSQPHTKPSVFVMKNGTNVACLVKEFYPKDIRINLVSSKKITEFDPAIVISPSGKYNAVKLGKYEDSNSVTCSVQHDNKTVHSTDFEVKTDSTDHVKPKETENTKQPSKSCHKPKAIVHTEKVNMMSLTVIGFRILLLKVAGFNLLMTLRLWSS

SEQ ID NO: 44703 - protein, 635 aa, synthetic construct
MALPVTALLLPLALLLHAARPEIVLTQSPATLSLSPGERATLSCSVSSSISSSNLHWYQQKPGQAPRLLIYATSNLASGIPARFSGSGSGTDFTLTISSLEPEDFAVYYCQQWSSYPHTFGGGTKVEIKRLEDKQLDADVSPKPTIFLPSIAETKLQKAGTYLCLLEKFFPDVIKIHWQEKKSNTILGSQEGNTMKTNDTYMKFSWLTVPEKSLDKEHRCIVRHENNKNGVDQEIIFPPIKTDVITMDPKDNCSKDANDTLLLQLTNTSATILYEILLGKATLYAVLVSALVLMAMVKRKDSRGRAKRSGSGATNFSLLKQAGDVEENPGPTSMDWIWRILFLVGAATGAHSFEQVQLVQSGAEVKKPGASVKVSCKASGYTFTNYLIEWVRQAPGQGLEWMGLINPGSGGTNYNEKFKGRVTMTTDTSTSTAYMELRSLRSDDTAVYYCARRSPLGSWIYYAYDGVAYWGQGTLVTVSSTRSQPHTKPSVFVMKNGTNVACLVKEFYPKDIRINLVSSKKITEFDPAIVISPSGKYNAVKLGKYEDSNSVTCSVQHDNKTVHSTDFEVKTDSTDHVKPKETENTKQPSKSCHKPKAIVHTEKVNMMSLTVIGFRILLLKVAGFNLLMTLRLWSS

SEQ ID NO: 44704 - protein, 635 aa, synthetic construct
MALPVTALLLPLALLLHAARPEIVLTQSPATLSLSPGERATLSCSVSSSISSSNLHWYQQKPGQAPRLLIYATSNLASGIPARFSGSGSGTDFTLTISSLEPEDFAVYYCQQWSSYPHTFGGGTKVEIKRLEDKQLDADVSPKPTIFLPSIAETKLQKAGTYLCLLEKFFPDVIKIHWQEKKSNTILGSQEGNTMKTNDTYMKFSWLTVPEKSLDKEHRCIVRHENNKNGVDQEIIFPPIKTDVITMDPKDNCSKDANDTLLLQLTNTSAYYMYEILLGKATLYAVLVSALVLMAMVKRKDSRGRAKRSGSGATNFSLLKQAGDVEENPGPTSMDWIWRILFLVGAATGAHSFEQVQLVQSGAEVKKPGASVKVSCKASGYTFTNYLIEWVRQAPGQGLEWMGLINPGSGGTNYNEKFKGRVTMTTDTSTSTAYMELRSLRSDDTAVYYCARRSPLGSWIYYAYDGVAYWGQGTLVTVSSTRSQPHTKPSVFVMKNGTNVACLVKEFYPKDIRINLVSSKKITEFDPAIVISPSGKYNAVKLGKYEDSNSVTCSVQHDNKTVHSTDFEVKTDSTDHVKPKETENTKQPSKSCHKPKAIVHTEKVNMMSLTVLGFRILLLKVAGFNLLMTLRLWSS

SEQ ID NO: 44705 - protein, 635 aa, synthetic construct
MALPVTALLLPLALLLHAARPEIVLTQSPATLSLSPGERATLSCSVSSSISSSNLHWYQQKPGQAPRLLIYATSNLASGIPARFSGSGSGTDFTLTISSLEPEDFAVYYCQQWSSYPHTFGGGTKVEIKRLEDKQLDADVSPKPTIFLPSIAETKLQKAGTYLCLLEKFFPDVIKIHWQEKKSNTILGSQEGNTMKTNDTYMKFSWLTVPEKSLDKEHRCIVRHENNKNGVDQEIIFPPIKTDVITMDPKDNCSKDANDTLLLQLTNTSATILYEILLGKATLYAVLVSALVLMAMVKRKDSRGRAKRSGSGATNFSLLKQAGDVEENPGPTSMDWIWRILFLVGAATGAHSFEQVQLVQSGAEVKKPGASVKVSCKASGYTFTNYLIEWVRQAPGQGLEWMGLINPGSGGTNYNEKFKGRVTMTTDTSTSTAYMELRSLRSDDTAVYYCARRSPLGSWIYYAYDGVAYWGQGTLVTVSSTRSQPHTKPSVFVMKNGTNVACLVKEFYPKDIRINLVSSKKITEFDPAIVISPSGKYNAVKLGKYEDSNSVTCSVQHDNKTVHSTDFEVKTDSTDHVKPKETENTKQPSKSCHKPKAIVHTEKVNMMSLTVLGFRILLLKVAGFNLLMTLRLWSS

SEQ ID NO: 44706 - protein, 629 aa, synthetic construct
MALPVTALLLPLALLLHAARPEIVLTQSPATLSLSPGERATLSCSVSSSISSSNLHWYQQKPGQAPRLLIYATSNLASGIPARFSGSGSGTDFTLTISSLEPEDFAVYYCQQWSSYPHTFGGGTKVEIKRLEDLKNVFPPEVAVFEPSEAEISHTQKATLVCLATGFYPDHVELSWWVNGKEVHSGVCTDPQPLKEQPALNDSRYCLSSRLRVSATFWQNPRNHFRCQVQFYGLSENDEWTQDRAKPVTQIVSAEAWGRADCGFTSESYQQGVLSATILYLLLLLKSVVYFAIITCCLLRRTAFCCNGEKSRAKRSGSGATNFSLLKQAGDVEENPGPTSMDWIWRILFLVGAATGAHSFEQVQLVQSGAEVKKPGASVKVSCKASGYTFTNYLIEWVRQAPGQGLEWMGLINPGSGGTNYNEKFKGRVTMTTDTSTSTAYMELRSLRSDDTAVYYCARRSPLGSWIYYAYDGVAYWGQGTLVTVSSTRIQNPDPAVYQLRDSKSSDKSVCLFTDFDSQTNVSQSKDSDVYITDKCVLDMRSMDFKSNSAVAWSNKSDFACANAFNNSIIPEDTFFPSPESSCDVKLVEKSFETDTNLNFQNLSVIGLRMLFAKTVAVNFLLTAKLFFL

SEQ ID NO: 44707 - protein, 658 aa, synthetic construct
MALPVTALLLPLALLLHAARPEIVLTQSPATLSLSPGERATLSCSVSSSISSSNLHWYQQKPGQAPRLLIYATSNLASGIPARFSGSGSGTDFTLTISSLEPEDFAVYYCQQWSSYPHTFGGGTKVEIKRLEDLKNVFPPEVAVFEPSEAEISHTQKATLVCLATGFYPDHVELSWWVNGKEVHSGVSTDPQPLKEQPALNDSRYCLSSRLRVSATFWQNPRNHFRCQVQFYGLSENDEWTQDRAKPVTQIVSAEAWGRADCGSSKDANDTLLLQLTNTSAYYMYLLLLLKSVVYFAIITCCLLRRTAFCCNGEKSRAKRSGSGATNFSLLKQAGDVEENPGPTSMDWIWRILFLVGAATGAHSFEQVQLVQSGAEVKKPGASVKVSCKASGYTFTNYLIEWVRQAPGQGLEWMGLINPGSGGTNYNEKFKGRVTMTTDTSTSTAYMELRSLRSDDTAVYYCARRSPLGSWIYYAYDGVAYWGQGTLVTVSSTRIQNPDPAVYQLRDSKSSDKSVCLFTDFDSQTNVSQSKDSDVYITDKTVLDMRSMDFKSNSAVAWSNKSDFACANAFNNSIIPEDTFFPSPESSCGTEVKTDSTDHVKPKETENTKQPSKSCHKPKAIVHTEKVNMMSLTVLGLRMLFAKTVAVNFLLTAKLFFL

SEQ ID NO: 44708 - protein, 628 aa, synthetic construct
MALPVTALLLPLALLLHAARPEIVLTQSPATLSLSPGERATLSCSVSSSISSSNLHWYQQKPGQAPRLLIYATSNLASGIPARFSGSGSGTDFTLTISSLEPEDFAVYYCQQWSSYPHTFGGGTKVEIKRLEDLKNVFPPEVAVFEPSEAEISHTQKATLVCLATGFYPDHVELSWWVNGKEVHSGVCTDPQPLKEQPALNDSRYCLSSRLRVSATFWQNPRNHFRCQVQFYGLSENDEWTQDRAKPVTQIVSAEAWGRADCDVKLVEKSFETDTNLNFQNLSVIGFRILLLKVAGFNLLMTLRLWSSRAKRSGSGATNFSLLKQAGDVEENPGPTSMDWIWRILFLVGAATGAHSFEQVQLVQSGAEVKKPGASVKVSCKASGYTFTNYLIEWVRQAPGQGLEWMGLINPGSGGTNYNEKFKGRVTMTTDTSTSTAYMELRSLRSDDTAVYYCARRSPLGSWIYYAYDGVAYWGQGTLVTVSSTRIQNPDPAVYQLRDSKSSDKSVCLFTDFDSQTNVSQSKDSDVYITDKCVLDMRSMDFKSNSAVAWSNKSDFACANAFNNSIIPEDTFFPSPESSCGFTSESYQQGVLSATILYEILLGKATLYAVLVSALVLMAMVKRKDSRG

SEQ ID NO: 44709 - protein, 628 aa, synthetic construct
MALPVTALLLPLALLLHAARPEIVLTQSPATLSLSPGERATLSCSVSSSISSSNLHWYQQKPGQAPRLLIYATSNLASGIPARFSGSGSGTDFTLTISSLEPEDFAVYYCQQWSSYPHTFGGGTKVEIKRLEDLKNVFPPEVAVFEPSEAEISHTQKATLVCLATGFYPDHVELSWWVNGKEVHSGVCTDPQPLKEQPALNDSRYCLSSRLRVSATFWQNPRNHFRCQVQFYGLSENDEWTQDRAKPVTQIVSAEAWGRADCGFTSESYQQGVLSATNLSVIGFRILLLKVAGFNLLMTLRLWSSRAKRSGSGATNFSLLKQAGDVEENPGPTSMDWIWRILFLVGAATGAHSFEQVQLVQSGAEVKKPGASVKVSCKASGYTFTNYLIEWVRQAPGQGLEWMGLINPGSGGTNYNEKFKGRVTMTTDTSTSTAYMELRSLRSDDTAVYYCARRSPLGSWIYYAYDGVAYWGQGTLVTVSSTRIQNPDPAVYQLRDSKSSDKSVCLFTDFDSQTNVSQSKDSDVYITDKCVLDMRSMDFKSNSAVAWSNKSDFACANAFNNSIIPEDTFFPSPESSCDVKLVEKSFETDTNLNFQILYEILLGKATLYAVLVSALVLMAMVKRKDSRG

SEQ ID NO: 44710 - protein, 628 aa, synthetic construct; identical to SEQ ID NO: 44708

SEQ ID NO: 44711 - protein, 628 aa, synthetic construct; identical to SEQ ID NO: 44709

SEQ ID NO: 44712 - protein, 628 aa, synthetic construct; identical to SEQ ID NO: 44708

SEQ ID NO: 44713 - protein, 631 aa, synthetic construct
MALPVTALLLPLALLLHAARPEIVLTQSPATLSLSPGERATLSCSVSSSISSSNLHWYQQKPGQAPRLLIYATSNLASGIPARFSGSGSGTDFTLTISSLEPEDFAVYYCQQWSSYPHTFGGGTKVEIKRLEADVSPKPTIFLPSIAETKLQKAGTYLCLLEKFFPDVIKIHWQEKKSNTILGSQEGNTMKTNDTYMKFSWLTVPEKSLDKEHRCIVRHENNKNGVDQEIIFPPIKTDVITMDPKDNCSKDANDTLLLQLTNTSAYYMYLLLLLKSVVYFAIITCCLLRRTAFCCNGEKSRAKRSGSGATNFSLLKQAGDVEENPGPTSMDWIWRILFLVGAATGAHSFEQVQLVQSGAEVKKPGASVKVSCKASGYTFTNYLIEWVRQAPGQGLEWMGLINPGSGGTNYNEKFKGRVTMTTDTSTSTAYMELRSLRSDDTAVYYCARRSPLGSWIYYAYDGVAYWGQGTLVTVSSTRSQPHTKPSVFVMKNGTNVACLVKEFYPKDIRINLVSSKKITEFDPAIVISPSGKYNAVKLGKYEDSNSVTCSVQHDNKTVHSTDFEVKTDSTDHVKPKETENTKQPSKSCHKPKAIVHTEKVNMMSLTVIGFRILLLKVAGFNLLMTLRLWSS

SEQ ID NO: 44714 - protein, 631 aa, synthetic construct
MALPVTALLLPLALLLHAARPEIVLTQSPATLSLSPGERATLSCSVSSSISSSNLHWYQQKPGQAPRLLIYATSNLASGIPARFSGSGSGTDFTLTISSLEPEDFAVYYCQQWSSYPHTFGGGTKVEIKRLEADVSPKPTIFLPSIAETKLQKAGTYLCLLEKFFPDVIKIHWQEKKSNTILGSQEGNTMKTNDTYMKFSWLTVPEKSLDKEHRCIVRHENNKNGVDQEIIFPPIKTDVITMDPKDNCSKDANDTLLLQLTNTSAYYMYLLLLLKSVVYFAIITCCLLRRTAFCCNGEKSRAKRSGSGATNFSLLKQAGDVEENPGPTSMDWIWRILFLVGAATGAHSFEQVQLVQSGAEVKKPGASVKVSCKASGYTFTNYLIEWVRQAPGQGLEWMGLINPGSGGTNYNEKFKGRVTMTTDTSTSTAYMELRSLRSDDTAVYYCARRSPLGSWIYYAYDGVAYWGQGTLVTVSSTRSQPHTKPSVFVMKNGTNVACLVKEFYPKDIRINLVSSKKITEFDPAIVISPSGKYNAVKLGKYEDSNSVTCSVQHDNKTVHSTDFEVKTDSTDHVKPKETENTKQPSKSCHKPKAIVHTEKVNMMSLTVLGFRILLLKVAGFNLLMTLRLWSS

SEQ ID NO: 44715 - protein, 628 aa, synthetic construct; identical to SEQ ID NO: 44708

SEQ ID NO: 44716 - protein, 632 aa, synthetic construct
MALPVTALLLPLALLLHAARPEIVLTQSPATLSLSPGERATLSCSVSSSISSSNLHWYQQKPGQAPRLLIYATSNLASGIPARFSGSGSGTDFTLTISSLEPEDFAVYYCQQWSSYPHTFGGGTKVEIKRLEIQNPDPAVYQLRDSKSSDKSVCLFTDFDSQTNVSQSKDSDVYITDKCVLDMRSMDFKSNSAVAWSNKSDFACANAFNNSIIPEDTFFPSPESSCGFTSESYQQGVLSATILYEILLGKATLYAVLVSALVLMAMVKRKDSRGRAKRSGSGVKQTLNFDLLKLAGDVESNPGPTSMDWIWRILFLVGAATGAHSFEQVQLVQSGAEVKKPGASVKVSCKASGYTFTNYLIEWVRQAPGQGLEWMGLINPGSGGTNYNEKFKGRVTMTTDTSTSTAYMELRSLRSDDTAVYYCARRSPLGSWIYYAYDGVAYWGQGTLVTVSSTREDLKNVFPPEVAVFEPSEAEISHTQKATLVCLATGFYPDHVELSWWVNGKEVHSGVCTDPQPLKEQPALNDSRYCLSSRLRVSATFWQNPRNHFRCQVQFYGLSENDEWTQDRAKPVTQIVSAEAWGRADCDVKLVEKSFETDTNLNFQNLSVIGFRILLLKVAGFNLLMTLRLWSS

SEQ ID NO: 44717 - protein, 763 aa, synthetic construct
MALPVTALLLPLALLLHAARPEVQLVESGGGLVQPGGSLRLSCAASGFSFSDFWMSWVRQAPGKGLEWVATISQAGSEKDYVDSVKGRFTISRDNAKKSLYLQMNSLRAEDTAVYYCASGVYSFDYRGQGTLVTVSSGTGGGGSGGGGSGGGGSEFEIVLTQSPATLSLSPGERATLSCSVSSSISSSNLHWYQQKPGQAPRLLIYATSNLASGIPARFSGSGSGTDFTLTISSLEPEDFAVYYCQQWSSYPHTFGGGTKVEIKRLEDLKNVFPPEVAVFEPSEAEISHTQKATLVCLATGFYPDHVELSWWVNGKEVHSGVCTDPQPLKEQPALNDSRYCLSSRLRVSATFWQNPRNHFRCQVQFYGLSENDEWTQDRAKPVTQIVSAEAWGRADCDVKLVEKSFETDTNLNFQNLSVIGFRILLLKVAGFNLLMTLRLWSSRAKRSGSGATNFSLLKQAGDVEENPGPTSMDWIWRILFLVGAATGAHSFEQVQLVQSGAEVKKPGASVKVSCKASGYTFTNYLIEWVRQAPGQGLEWMGLINPGSGGTNYNEKFKGRVTMTTDTSTSTAYMELRSLRSDDTAVYYCARRSPLGSWIYYAYDGVAYWGQGTLVTVSSTRIQNPDPAVYQLRDSKSSDKSVCLFTDFDSQTNVSQSKDSDVYITDKCVLDMRSMDFKSNSAVAWSNKSDFACANAFNNSIIPEDTFFPSPESSCGFTSESYQQGVLSATILYEILLGKATLYAVLVSALVLMAMVKRKDSRG

SEQ ID NO: 44718 - protein, 767 aa, synthetic construct
MALPVTALLLPLALLLHAARPEVQLVESGGGLVQPGGSLRLSCAASGFSFSDFWMSWVRQAPGKGLEWVATISQAGSEKDYVDSVKGRFTISRDNAKKSLYLQMNSLRAEDTAVYYCASGVYSFDYRGQGTLVTVSSGTGGGGSGGGGSGGGGSEFEIVLTQSPATLSLSPGERATLSCSVSSSISSSNLHWYQQKPGQAPRLLIYATSNLASGIPARFSGSGSGTDFTLTISSLEPEDFAVYYCQQWSSYPHTFGGGTKVEIKRLEIQNPDPAVYQLRDSKSSDKSVCLFTDFDSQTNVSQSKDSDVYITDKCVLDMRSMDFKSNSAVAWSNKSDFACANAFNNSIIPEDTFFPSPESSCGFTSESYQQGVLSATILYEILLGKATLYAVLVSALVLMAMVKRKDSRGRAKRSGSGVKQTLNFDLLKLAGDVESNPGPTSMDWIWRILFLVGAATGAHSFEQVQLVQSGAEVKKPGASVKVSCKASGYTFTNYLIEWVRQAPGQGLEWMGLINPGSGGTNYNEKFKGRVTMTTDTSTSTAYMELRSLRSDDTAVYYCARRSPLGSWIYYAYDGVAYWGQGTLVTVSSTREDLKNVFPPEVAVFEPSEAEISHTQKATLVCLATGFYPDHVELSWWVNGKEVHSGVCTDPQPLKEQPALNDSRYCLSSRLRVSATFWQNPRNHFRCQVQFYGLSENDEWTQDRAKPVTQIVSAEAWGRADCDVKLVEKSFETDTNLNFQNLSVIGFRILLLKVAGFNLLMTLRLWSS

SEQ ID NO: 44719 - protein, 900 aa, synthetic construct
MALPVTALLLPLALLLHAARPEVQLVESGGGLVQPGGSLRLSCAASGFSFSDFWMSWVRQAPGKGLEWVATISQAGSEKDYVDSVKGRFTISRDNAKKSLYLQMNSLRAEDTAVYYCASGVYSFDYRGQGTLVTVSSGTGGGGSGGGGSGGGGSEFEIVLTQSPATLSLSPGERATLSCSVSSSISSSNLHWYQQKPGQAPRLLIYATSNLASGIPARFSGSGSGTDFTLTISSLEPEDFAVYYCQQWSSYPHTFGGGTKVEIKRLEDLKNVFPPEVAVFEPSEAEISHTQKATLVCLATGFYPDHVELSWWVNGKEVHSGVCTDPQPLKEQPALNDSRYCLSSRLRVSATFWQNPRNHFRCQVQFYGLSENDEWTQDRAKPVTQIVSAEAWGRADCDVKLVEKSFETDTNLNFQNLSVIGFRILLLKVAGFNLLMTLRLWSSRAKRSGSGATNFSLLKQAGDVEENPGPTSMDWIWRILFLVGAATGAHSGPQLQLQESGPGLVKPSETLSLTCTVSGDSISSGDYYWGWIRQPPGKGLEWIGHIYYSGVTYYNPSLKSRVTISVDTSRNQFSLKLSSVTAADTAVYYCTREDSSNWRSRGQGTLVTVSSGSGGGGSGGGGSGGGGSFEQVQLVQSGAEVKKPGASVKVSCKASGYTFTNYLIEWVRQAPGQGLEWMGLINPGSGGTNYNEKFKGRVTMTTDTSTSTAYMELRSLRSDDTAVYYCARRSPLGSWIYYAYDGVAYWGQGTLVTVSSTRIQNPDPAVYQLRDSKSSDKSVCLFTDFDSQTNVSQSKDSDVYITDKCVLDMRSMDFKSNSAVAWSNKSDFACANAFNNSIIPEDTFFPSPESSCGFTSESYQQGVLSATILYEILLGKATLYAVLVSALVLMAMVKRKDSRG

SEQ ID NO: 44720 - protein, 904 aa, synthetic construct
MALPVTALLLPLALLLHAARPEVQLVESGGGLVQPGGSLRLSCAASGFSFSDFWMSWVRQAPGKGLEWVATISQAGSEKDYVDSVKGRFTISRDNAKKSLYLQMNSLRAEDTAVYYCASGVYSFDYRGQGTLVTVSSGTGGGGSGGGGSGGGGSEFEIVLTQSPATLSLSPGERATLSCSVSSSISSSNLHWYQQKPGQAPRLLIYATSNLASGIPARFSGSGSGTDFTLTISSLEPEDFAVYYCQQWSSYPHTFGGGTKVEIKRLEIQNPDPAVYQLRDSKSSDKSVCLFTDFDSQTNVSQSKDSDVYITDKCVLDMRSMDFKSNSAVAWSNKSDFACANAFNNSIIPEDTFFPSPESSCGFTSESYQQGVLSATILYEILLGKATLYAVLVSALVLMAMVKRKDSRGRAKRSGSGVKQTLNFDLLKLAGDVESNPGPTSMDWIWRILFLVGAATGAHSGPQLQLQESGPGLVKPSETLSLTCTVSGDSISSGDYYWGWIRQPPGKGLEWIGHIYYSGVTYYNPSLKSRVTISVDTSRNQFSLKLSSVTAADTAVYYCTREDSSNWRSRGQGTLVTVSSGSGGGGSGGGGSGGGGSFEQVQLVQSGAEVKKPGASVKVSCKASGYTFTNYLIEWVRQAPGQGLEWMGLINPGSGGTNYNEKFKGRVTMTTDTSTSTAYMELRSLRSDDTAVYYCARRSPLGSWIYYAYDGVAYWGQGTLVTVSSTREDLKNVFPPEVAVFEPSEAEISHTQKATLVCLATGFYPDHVELSWWVNGKEVHSGVCTDPQPLKEQPALNDSRYCLSSRLRVSATFWQNPRNHFRCQVQFYGLSENDEWTQDRAKPVTQIVSAEAWGRADCDVKLVEKSFETDTNLNFQNLSVIGFRILLLKVAGFNLLMTLRLWSS

SEQ ID NO: 44721 - protein, 698 aa, synthetic construct
MALPVTALLLPLALLLHAARPEIVLTQSPATLSLSPGERATLSCSVSSSISSSNLHWYQQKPGQAPRLLIYATSNLASGIPARFSGSGSGTDFTLTISSLEPEDFAVYYCQQWSSYPHTFGGGTKVEIKRLEDLKNVFPPEVAVFEPSEAEISHTQKATLVCLATGFYPDHVELSWWVNGKEVHSGVCTDPQPLKEQPALNDSRYCLSSRLRVSATFWQNPRNHFRCQVQFYGLSENDEWTQDRAKPVTQIVSAEAWGRADCDVKLVEKSFETDTNLNFQNLSVIGFRILLLKVAGFNLLMTLRLWSSRAKRSGSGATNFSLLKQAGDVEENPGPTSMDWIWRILFLVGAATGAHSGPMDPDLEIRAAFLRQRNTALRTEVAELEQEVQRLENEVSQYETRYGPLGGGKGSGGGGSGGGGSGGGGSFEQVQLVQSGAEVKKPGASVKVSCKASGYTFTNYLIEWVRQAPGQGLEWMGLINPGSGGTNYNEKFKGRVTMTTDTSTSTAYMELRSLRSDDTAVYYCARRSPLGSWIYYAYDGVAYWGQGTLVTVSSTRIQNPDPAVYQLRDSKSSDKSVCLFTDFDSQTNVSQSKDSDVYITDKCVLDMRSMDFKSNSAVAWSNKSDFACANAFNNSIIPEDTFFPSPESSCGFTSESYQQGVLSATILYEILLGKATLYAVLVSALVLMAMVKRKDSRG

SEQ ID NO: 44722 - protein, 702 aa, synthetic construct
MALPVTALLLPLALLLHAARPEIVLTQSPATLSLSPGERATLSCSVSSSISSSNLHWYQQKPGQAPRLLIYATSNLASGIPARFSGSGSGTDFTLTISSLEPEDFAVYYCQQWSSYPHTFGGGTKVEIKRLEIQNPDPAVYQLRDSKSSDKSVCLFTDFDSQTNVSQSKDSDVYITDKCVLDMRSMDFKSNSAVAWSNKSDFACANAFNNSIIPEDTFFPSPESSCGFTSESYQQGVLSATILYEILLGKATLYAVLVSALVLMAMVKRKDSRGRAKRSGSGVKQTLNFDLLKLAGDVESNPGPTSMDWIWRILFLVGAATGAHSGPMDPDLEIRAAFLRQRNTALRTEVAELEQEVQRLENEVSQYETRYGPLGGGKGSGGGGSGGGGSGGGGSFEQVQLVQSGAEVKKPGASVKVSCKASGYTFTNYLIEWVRQAPGQGLEWMGLINPGSGGTNYNEKFKGRVTMTTDTSTSTAYMELRSLRSDDTAVYYCARRSPLGSWIYYAYDGVAYWGQGTLVTVSSTREDLKNVFPPEVAVFEPSEAEISHTQKATLVCLATGFYPDHVELSWWVNGKEVHSGVCTDPQPLKEQPALNDSRYCLSSRLRVSATFWQNPRNHFRCQVQFYGLSENDEWTQDRAKPVTQIVSAEAWGRADCDVKLVEKSFETDTNLNFQNLSVIGFRILLLKVAGFNLLMTLRLWSS

SEQ ID NO: 44723 - protein, 675 aa, synthetic construct
MALPVTALLLPLALLLHAARPEIVLTQSPATLSLSPGERATLSCSVSSSISSSNLHWYQQKPGQAPRLLIYATSNLASGIPARFSGSGSGTDFTLTISSLEPEDFAVYYCQQWSSYPHTFGGGTKVEIKRLEDLKNVFPPEVAVFEPSEAEISHTQKATLVCLATGFYPDHVELSWWVNGKEVHSGVCTDPQPLKEQPALNDSRYCLSSRLRVSATFWQNPRNHFRCQVQFYGLSENDEWTQDRAKPVTQIVSAEAWGRADCDVKLVEKSFETDTNLNFQNLSVIGFRILLLKVAGFNLLMTLRLWSSRAKRSGSGATNFSLLKQAGDVEENPGPTSMDWIWRILFLVGAATGAHSGPEVAALEKEVAALEKEVAALEKEVAALEKGSGGGGSGGGGSGGGGSFEQVQLVQSGAEVKKPGASVKVSCKASGYTFTNYLIEWVRQAPGQGLEWMGLINPGSGGTNYNEKFKGRVTMTTDTSTSTAYMELRSLRSDDTAVYYCARRSPLGSWIYYAYDGVAYWGQGTLVTVSSTRIQNPDPAVYQLRDSKSSDKSVCLFTDFDSQTNVSQSKDSDVYITDKCVLDMRSMDFKSNSAVAWSNKSDFACANAFNNSIIPEDTFFPSPESSCGFTSESYQQGVLSATILYEILLGKATLYAVLVSALVLMAMVKRKDSRG

SEQ ID NO: 44724 - protein, 679 aa, synthetic construct
MALPVTALLLPLALLLHAARPEIVLTQSPATLSLSPGERATLSCSVSSSISSSNLHWYQQKPGQAPRLLIYATSNLASGIPARFSGSGSGTDFTLTISSLEPEDFAVYYCQQWSSYPHTFGGGTKVEIKRLEIQNPDPAVYQLRDSKSSDKSVCLFTDFDSQTNVSQSKDSDVYITDKCVLDMRSMDFKSNSAVAWSNKSDFACANAFNNSIIPEDTFFPSPESSCGFTSESYQQGVLSATILYEILLGKATLYAVLVSALVLMAMVKRKDSRGRAKRSGSGVKQTLNFDLLKLAGDVESNPGPTSMDWIWRILFLVGAATGAHSGPEVAALEKEVAALEKEVAALEKEVAALEKGSGGGGSGGGGSGGGGSFEQVQLVQSGAEVKKPGASVKVSCKASGYTFTNYLIEWVRQAPGQGLEWMGLINPGSGGTNYNEKFKGRVTMTTDTSTSTAYMELRSLRSDDTAVYYCARRSPLGSWIYYAYDGVAYWGQGTLVTVSSTREDLKNVFPPEVAVFEPSEAEISHTQKATLVCLATGFYPDHVELSWWVNGKEVHSGVCTDPQPLKEQPALNDSRYCLSSRLRVSATFWQNPRNHFRCQVQFYGLSENDEWTQDRAKPVTQIVSAEAWGRADCDVKLVEKSFETDTNLNFQNLSVIGFRILLLKVAGFNLLMTLRLWSS

SEQ ID NO: 44725 - protein, 765 aa, synthetic construct
MALPVTALLLPLALLLHAARPEIVLTQSPATLSLSPGERATLSCSVSSSISSSNLHWYQQKPGQAPRLLIYATSNLASGIPARFSGSGSGTDFTLTISSLEPEDFAVYYCQQWSSYPHTFGGGTKVEIKRLEDLKNVFPPEVAVFEPSEAEISHTQKATLVCLATGFYPDHVELSWWVNGKEVHSGVCTDPQPLKEQPALNDSRYCLSSRLRVSATFWQNPRNHFRCQVQFYGLSENDEWTQDRAKPVTQIVSAEAWGRADCDVKLVEKSFETDTNLNFQNLSVIGFRILLLKVAGFNLLMTLRLWSSRAKRSGSGATNFSLLKQAGDVEENPGPTSMDWIWRILFLVGAATGAHSGPQVQLQESGGGLAQAGGSLRLSCAASGRTFSMGWFRQAPGKEREFVAAITYSGGSPYYASSVRGRFTISRDNAKNTVYLQMNSLKPEDTAVYYCAANPTYGSDWNAENWGQGTQVTVSSGSGGGGSGGGGSGGGGSFEQVQLVQSGAEVKKPGASVKVSCKASGYTFTNYLIEWVRQAPGQGLEWMGLINPGSGGTNYNEKFKGRVTMTTDTSTSTAYMELRSLRSDDTAVYYCARRSPLGSWIYYAYDGVAYWGQGTLVTVSSTRIQNPDPAVYQLRDSKSSDKSVCLFTDFDSQTNVSQSKDSDVYITDKCVLDMRSMDFKSNSAVAWSNKSDFACANAFNNSIIPEDTFFPSPESSCGFTSESYQQGVLSATILYEILLGKATLYAVLVSALVLMAMVKRKDSRG

SEQ ID NO: 44726 - protein, 769 aa, synthetic construct
MALPVTALLLPLALLLHAARPEIVLTQSPATLSLSPGERATLSCSVSSSISSSNLHWYQQKPGQAPRLLIYATSNLASGIPARFSGSGSGTDFTLTISSLEPEDFAVYYCQQWSSYPHTFGGGTKVEIKRLEIQNPDPAVYQLRDSKSSDKSVCLFTDFDSQTNVSQSKDSDVYITDKCVLDMRSMDFKSNSAVAWSNKSDFACANAFNNSIIPEDTFFPSPESSCGFTSESYQQGVLSATILYEILLGKATLYAVLVSALVLMAMVKRKDSRGRAKRSGSGVKQTLNFDLLKLAGDVESNPGPTSMDWIWRILFLVGAATGAHSGPQVQLQESGGGLAQAGGSLRLSCAASGRTFSMGWFRQAPGKEREFVAAITYSGGSPYYASSVRGRFTISRDNAKNTVYLQMNSLKPEDTAVYYCAANPTYGSDWNAENWGQGTQVTVSSGSGGGGSGGGGSGGGGSFEQVQLVQSGAEVKKPGASVKVSCKASGYTFTNYLIEWVRQAPGQGLEWMGLINPGSGGTNYNEKFKGRVTMTTDTSTSTAYMELRSLRSDDTAVYYCARRSPLGSWIYYAYDGVAYWGQGTLVTVSSTREDLKNVFPPEVAVFEPSEAEISHTQKATLVCLATGFYPDHVELSWWVNGKEVHSGVCTDPQPLKEQPALNDSRYCLSSRLRVSATFWQNPRNHFRCQVQFYGLSENDEWTQDRAKPVTQIVSAEAWGRADCDVKLVEKSFETDTNLNFQNLSVIGFRILLLKVAGFNLLMTLRLWSS

SEQ ID NO: 44727 - protein, 771 aa, synthetic construct
MALPVTALLLPLALLLHAARPEVQLVESGGSLVQPGGSLRLSCAASGFTFDDYAMSWVRQVPGKGLEWVSSINWSGTHTDYADSVKGRFTISRNNANNTLYLQMNSLKSEDTAVYYCAKNWRDAGTTWFEKSGSAGQGTQVTVSSGTGGGGSGGGGSGGGGSEFEIVLTQSPATLSLSPGERATLSCSVSSSISSSNLHWYQQKPGQAPRLLIYATSNLASGIPARFSGSGSGTDFTLTISSLEPEDFAVYYCQQWSSYPHTFGGGTKVEIKRLEDLKNVFPPEVAVFEPSEAEISHTQKATLVCLATGFYPDHVELSWWVNGKEVHSGVCTDPQPLKEQPALNDSRYCLSSRLRVSATFWQNPRNHFRCQVQFYGLSENDEWTQDRAKPVTQIVSAEAWGRADCDVKLVEKSFETDTNLNFQNLSVIGFRILLLKVAGFNLLMTLRLWSSRAKRSGSGATNFSLLKQAGDVEENPGPTSMDWIWRILFLVGAATGAHSFEQVQLVQSGAEVKKPGASVKVSCKASGYTFTNYLIEWVRQAPGQGLEWMGLINPGSGGTNYNEKFKGRVTMTTDTSTSTAYMELRSLRSDDTAVYYCARRSPLGSWIYYAYDGVAYWGQGTLVTVSSTRIQNPDPAVYQLRDSKSSDKSVCLFTDFDSQTNVSQSKDSDVYITDKCVLDMRSMDFKSNSAVAWSNKSDFACANAFNNSIIPEDTFFPSPESSCGFTSESYQQGVLSATILYEILLGKATLYAVLVSALVLMAMVKRKDSRG

SEQ ID NO: 44728 - protein, 775 aa, synthetic construct
MALPVTALLLPLALLLHAARPEVQLVESGGSLVQPGGSLRLSCAASGFTFDDYAMSWVRQVPGKGLEWVSSINWSGTHTDYADSVKGRFTISRNNANNTLYLQMNSLKSEDTAVYYCAKNWRDAGTTWFEKSGSAGQGTQVTVSSGTGGGGSGGGGSGGGGSEFEIVLTQSPATLSLSPGERATLSCSVSSSISSSNLHWYQQKPGQAPRLLIYATSNLASGIPARFSGSGSGTDFTLTISSLEPEDFAVYYCQQWSSYPHTFGGGTKVEIKRLEIQNPDPAVYQLRDSKSSDKSVCLFTDFDSQTNVSQSKDSDVYITDKCVLDMRSMDFKSNSAVAWSNKSDFACANAFNNSIIPEDTFFPSPESSCGFTSESYQQGVLSATILYEILLGKATLYAVLVSALVLMAMVKRKDSRGRAKRSGSGVKQTLNFDLLKLAGDVESNPGPTSMDWIWRILFLVGAATGAHSFEQVQLVQSGAEVKKPGASVKVSCKASGYTFTNYLIEWVRQAPGQGLEWMGLINPGSGGTNYNEKFKGRVTMTTDTSTSTAYMELRSLRSDDTAVYYCARRSPLGSWIYYAYDGVAYWGQGTLVTVSSTREDLKNVFPPEVAVFEPSEAEISHTQKATLVCLATGFYPDHVELSWWVNGKEVHSGVCTDPQPLKEQPALNDSRYCLSSRLRVSATFWQNPRNHFRCQVQFYGLSENDEWTQDRAKPVTQIVSAEAWGRADCDVKLVEKSFETDTNLNFQNLSVIGFRILLLKVAGFNLLMTLRLWSS

SEQ ID NO: 44729 - protein, 769 aa, synthetic construct
MALPVTALLLPLALLLHAARPEVQLLESGGGLVQPGGSLRLSCAASGFIFSSYAMSWVRQAPGKGQEWVSGVSGTGVNTYYADSVKGRFTISRDNSKNTLYLQMNSLRAEDTAVYYCASGKGWDSGSWYEDYRGQGTLVTVSSGTGGGGSGGGGSGGGGSEFEIVLTQSPATLSLSPGERATLSCSVSSSISSSNLHWYQQKPGQAPRLLIYATSNLASGIPARFSGSGSGTDFTLTISSLEPEDFAVYYCQQWSSYPHTFGGGTKVEIKRLEDLKNVFPPEVAVFEPSEAEISHTQKATLVCLATGFYPDHVELSWWVNGKEVHSGVCTDPQPLKEQPALNDSRYCLSSRLRVSATFWQNPRNHFRCQVQFYGLSENDEWTQDRAKPVTQIVSAEAWGRADCDVKLVEKSFETDTNLNFQNLSVIGFRILLLKVAGFNLLMTLRLWSSRAKRSGSGATNFSLLKQAGDVEENPGPTSMDWIWRILFLVGAATGAHSFEQVQLVQSGAEVKKPGASVKVSCKASGYTFTNYLIEWVRQAPGQGLEWMGLINPGSGGTNYNEKFKGRVTMTTDTSTSTAYMELRSLRSDDTAVYYCARRSPLGSWIYYAYDGVAYWGQGTLVTVSSTRIQNPDPAVYQLRDSKSSDKSVCLFTDFDSQTNVSQSKDSDVYITDKCVLDMRSMDFKSNSAVAWSNKSDFACANAFNNSIIPEDTFFPSPESSCGFTSESYQQGVLSATILYEILLGKATLYAVLVSALVLMAMVKRKDSRG

SEQ ID NO: 44730 - protein, 773 aa, synthetic construct
MALPVTALLLPLALLLHAARPEVQLLESGGGLVQPGGSLRLSCAASGFIFSSYAMSWVRQAPGKGQEWVSGVSGTGVNTYYADSVKGRFTISRDNSKNTLYLQMNSLRAEDTAVYYCASGKGWDSGSWYEDYRGQGTLVTVSSGTGGGGSGGGGSGGGGSEFEIVLTQSPATLSLSPGERATLSCSVSSSISSSNLHWYQQKPGQAPRLLIYATSNLASGIPARFSGSGSGTDFTLTISSLEPEDFAVYYCQQWSSYPHTFGGGTKVEIKRLEIQNPDPAVYQLRDSKSSDKSVCLFTDFDSQTNVSQSKDSDVYITDKCVLDMRSMDFKSNSAVAWSNKSDFACANAFNNSIIPEDTFFPSPESSCGFTSESYQQGVLSATILYEILLGKATLYAVLVSALVLMAMVKRKDSRGRAKRSGSGVKQTLNFDLLKLAGDVESNPGPTSMDWIWRILFLVGAATGAHSFEQVQLVQSGAEVKKPGASVKVSCKASGYTFTNYLIEWVRQAPGQGLEWMGLINPGSGGTNYNEKFKGRVTMTTDTSTSTAYMELRSLRSDDTAVYYCARRSPLGSWIYYAYDGVAYWGQGTLVTVSSTREDLKNVFPPEVAVFEPSEAEISHTQKATLVCLATGFYPDHVELSWWVNGKEVHSGVCTDPQPLKEQPALNDSRYCLSSRLRVSATFWQNPRNHFRCQVQFYGLSENDEWTQDRAKPVTQIVSAEAWGRADCDVKLVEKSFETDTNLNFQNLSVIGFRILLLKVAGFNLLMTLRLWSS

SEQ ID NO: 44731 - protein, 737 aa, synthetic construct
MALPVTALLLPLALLLHAARPMLPAPKNLVVSRITEDSARLSWTAPDAAFDSFPIRYIETLIWGEAIWLDVPGSERSYDLTGLKPGTEYAVVITGVKGGRFSSPLVASFTTGTGGGGSGGGGSGGGGSEFEIVLTQSPATLSLSPGERATLSCSVSSSISSSNLHWYQQKPGQAPRLLIYATSNLASGIPARFSGSGSGTDFTLTISSLEPEDFAVYYCQQWSSYPHTFGGGTKVEIKRLEDLKNVFPPEVAVFEPSEAEISHTQKATLVCLATGFYPDHVELSWWVNGKEVHSGVCTDPQPLKEQPALNDSRYCLSSRLRVSATFWQNPRNHFRCQVQFYGLSENDEWTQDRAKPVTQIVSAEAWGRADCDVKLVEKSFETDTNLNFQNLSVIGFRILLLKVAGFNLLMTLRLWSSRAKRSGSGATNFSLLKQAGDVEENPGPTSMDWIWRILFLVGAATGAHSFEQVQLVQSGAEVKKPGASVKVSCKASGYTFTNYLIEWVRQAPGQGLEWMGLINPGSGGTNYNEKFKGRVTMTTDTSTSTAYMELRSLRSDDTAVYYCARRSPLGSWIYYAYDGVAYWGQGTLVTVSSTRIQNPDPAVYQLRDSKSSDKSVCLFTDFDSQTNVSQSKDSDVYITDKCVLDMRSMDFKSNSAVAWSNKSDFACANAFNNSIIPEDTFFPSPESSCGFTSESYQQGVLSATILYEILLGKATLYAVLVSALVLMAMVKRKDSRG

SEQ ID NO: 44732 - protein, 741 aa, synthetic construct
MALPVTALLLPLALLLHAARPMLPAPKNLVVSRITEDSARLSWTAPDAAFDSFPIRYIETLIWGEAIWLDVPGSERSYDLTGLKPGTEYAVVITGVKGGRFSSPLVASFTTGTGGGGSGGGGSGGGGSEFEIVLTQSPATLSLSPGERATLSCSVSSSISSSNLHWYQQKPGQAPRLLIYATSNLASGIPARFSGSGSGTDFTLTISSLEPEDFAVYYCQQWSSYPHTFGGGTKVEIKRLEIQNPDPAVYQLRDSKSSDKSVCLFTDFDSQTNVSQSKDSDVYITDKCVLDMRSMDFKSNSAVAWSNKSDFACANAFNNSIIPEDTFFPSPESSCGFTSESYQQGVLSATILYEILLGKATLYAVLVSALVLMAMVKRKDSRGRAKRSGSGVKQTLNFDLLKLAGDVESNPGPTSMDWIWRILFLVGAATGAHSFEQVQLVQSGAEVKKPGASVKVSCKASGYTFTNYLIEWVRQAPGQGLEWMGLINPGSGGTNYNEKFKGRVTMTTDTSTSTAYMELRSLRSDDTAVYYCARRSPLGSWIYYAYDGVAYWGQGTLVTVSSTREDLKNVFPPEVAVFEPSEAEISHTQKATLVCLATGFYPDHVELSWWVNGKEVHSGVCTDPQPLKEQPALNDSRYCLSSRLRVSATFWQNPRNHFRCQVQFYGLSENDEWTQDRAKPVTQIVSAEAWGRADCDVKLVEKSFETDTNLNFQNLSVIGFRILLLKVAGFNLLMTLRLWSS

SEQ ID NO: 44733 - protein, 766 aa, synthetic construct
MALPVTALLLPLALLLHAARPEVQLVESGGGLVQPGGSLRLSCAASGFNIKDTCIGWVRRAPGKEEELVAKICKYSGHTRYADSVKGRFTISADTSKNTAYLQMNSLRAEDTAVYYCAAVSVRDGHYNYWGQGTTVTVSSGTGGGGSGGGGSGGGGSEFEIVLTQSPATLSLSPGERATLSCSVSSSISSSNLHWYQQKPGQAPRLLIYATSNLASGIPARFSGSGSGTDFTLTISSLEPEDFAVYYCQQWSSYPHTFGGGTKVEIKRLEDLKNVFPPEVAVFEPSEAEISHTQKATLVCLATGFYPDHVELSWWVNGKEVHSGVCTDPQPLKEQPALNDSRYCLSSRLRVSATFWQNPRNHFRCQVQFYGLSENDEWTQDRAKPVTQIVSAEAWGRADCDVKLVEKSFETDTNLNFQNLSVIGFRILLLKVAGFNLLMTLRLWSSRAKRSGSGATNFSLLKQAGDVEENPGPTSMDWIWRILFLVGAATGAHSFEQVQLVQSGAEVKKPGASVKVSCKASGYTFTNYLIEWVRQAPGQGLEWMGLINPGSGGTNYNEKFKGRVTMTTDTSTSTAYMELRSLRSDDTAVYYCARRSPLGSWIYYAYDGVAYWGQGTLVTVSSTRIQNPDPAVYQLRDSKSSDKSVCLFTDFDSQTNVSQSKDSDVYITDKCVLDMRSMDFKSNSAVAWSNKSDFACANAFNNSIIPEDTFFPSPESSCGFTSESYQQGVLSATILYEILLGKATLYAVLVSALVLMAMVKRKDSRG

SEQ ID NO: 44734 - protein, 770 aa, synthetic construct
MALPVTALLLPLALLLHAARPEVQLVESGGGLVQPGGSLRLSCAASGFNIKDTCIGWVRRAPGKEEELVAKICKYSGHTRYADSVKGRFTISADTSKNTAYLQMNSLRAEDTAVYYCAAVSVRDGHYNYWGQGTTVTVSSGTGGGGSGGGGSGGGGSEFEIVLTQSPATLSLSPGERATLSCSVSSSISSSNLHWYQQKPGQAPRLLIYATSNLASGIPARFSGSGSGTDFTLTISSLEPEDFAVYYCQQWSSYPHTFGGGTKVEIKRLEIQNPDPAVYQLRDSKSSDKSVCLFTDFDSQTNVSQSKDSDVYITDKCVLDMRSMDFKSNSAVAWSNKSDFACANAFNNSIIPEDTFFPSPESSCGFTSESYQQGVLSATILYEILLGKATLYAVLVSALVLMAMVKRKDSRGRAKRSGSGVKQTLNFDLLKLAGDVESNPGPTSMDWIWRILFLVGAATGAHSFEQVQLVQSGAEVKKPGASVKVSCKASGYTFTNYLIEWVRQAPGQGLEWMGLINPGSGGTNYNEKFKGRVTMTTDTSTSTAYMELRSLRSDDTAVYYCARRSPLGSWIYYAYDGVAYWGQGTLVTVSSTREDLKNVFPPEVAVFEPSEAEISHTQKATLVCLATGFYPDHVELSWWVNGKEVHSGVCTDPQPLKEQPALNDSRYCLSSRLRVSATFWQNPRNHFRCQVQFYGLSENDEWTQDRAKPVTQIVSAEAWGRADCDVKLVEKSFETDTNLNFQNLSVIGFRILLLKVAGFNLLMTLRLWSS

SEQ ID NO: 44735 - protein, 1137 aa, synthetic construct
MALPVTALLLPLALLLHAARPEVQLVESGGGLVQAGGSLRLSCAASGRTFSMGWFRQAPGKEREFVAAITYSGGSPYYADSVKGRFTISRDNAKNTVYLQMNSLKPEDTAVYYCAANPTYGSDWNAENWGQGTQVTVSSGTGGGGSGGGGSGGGGSEFEIVLTQSPATLSLSPGERATLSCSVSSSISSSNLHWYQQKPGQAPRLLIYATSNLASGIPARFSGSGSGTDFTLTISSLEPEDFAVYYCQQWSSYPHTFGGGTKVEIKRLEDLKNVFPPEVAVFEPSEAEISHTQKATLVCLATGFYPDHVELSWWVNGKEVHSGVCTDPQPLKEQPALNDSRYCLSSRLRVSATFWQNPRNHFRCQVQFYGLSENDEWTQDRAKPVTQIVSAEAWGRADCDVKLVEKSFETDTNLNFQNLSVIGFRILLLKVAGFNLLMTLRLWSSRAKRSGSGATNFSLLKQAGDVEENPGPTSATMDWIWRILFLVGAATGAHSGPEVQLVESGGGLVQAGGSLRLSCAASGRTFTMGWFRQAPGKEREFVAAISLSPTLAYYADSVKGRFTISRDNAKNTVVLQMNSLKPEDTALYYCAADRKSVMSIRPDYWGQGTQVTVSSGSGGGGSGGGGSGGGGSFEQVQLVQSGAEVKKPGASVKVSCKASGYTFTNYLIEWVRQAPGQGLEWMGLINPGSGGTNYNEKFKGRVTMTTDTSTSTAYMELRSLRSDDTAVYYCARRSPLGSWIYYAYDGVAYWGQGTLVTVSSTRIQNPDPAVYQLRDSKSSDKSVCLFTDFDSQTNVSQSKDSDVYITDKCVLDMRSMDFKSNSAVAWSNKSDFACANAFNNSIIPEDTFFPSPESSCGFTSESYQQGVLSATILYEILLGKATLYAVLVSALVLMAMVKRKDSRGRAKRSGSGVKQTLNFDLLKLAGDVESNPGPSRGHMTEYKPTVRLATRDDVPRAVRTLAAAFADYPATRHTVDPDRHIERVTELQELFLTRVGLDIGKVWVADDGAAVAVWTTPESVEAGAVFAEIGPRMAELSGSRLAAQQQMEGLLAPHRPKEPAWFLATVGVSPDHQGKGLGSAVVLPGVEAAERAGVPAFLETSAPRNLPFYERLGFTVTADVEVPEGPRTWCMTRKPGA

SEQ ID NO: 44736 - protein, 775 aa, synthetic construct
MALPVTALLLPLALLLHAARPEVQLVESGGGLVQPGGSLRLSCAASGFASDYYIIGWFRQAPGKEREGVSCISSRYANTNYADSVKGRFTISRDNAKNTVYLQMNSLKPEDTAVYYCAADTRRYTCPDIATMHRNFDSWGQGTLVTVSSGTGGGGSGGGGSGGGGSEFEIVLTQSPATLSLSPGERATLSCSVSSSISSSNLHWYQQKPGQAPRLLIYATSNLASGIPARFSGSGSGTDFTLTISSLEPEDFAVYYCQQWSSYPHTFGGGTKVEIKRLEDLKNVFPPEVAVFEPSEAEISHTQKATLVCLATGFYPDHVELSWWVNGKEVHSGVCTDPQPLKEQPALNDSRYCLSSRLRVSATFWQNPRNHFRCQVQFYGLSENDEWTQDRAKPVTQIVSAEAWGRADCDVKLVEKSFETDTNLNFQNLSVIGFRILLLKVAGFNLLMTLRLWSSRAKRSGSGATNFSLLKQAGDVEENPGPTSMDWIWRILFLVGAATGAHSFEQVQLVQSGAEVKKPGASVKVSCKASGYTFTNYLIEWVRQAPGQGLEWMGLINPGSGGTNYNEKFKGRVTMTTDTSTSTAYMELRSLRSDDTAVYYCARRSPLGSWIYYAYDGVAYWGQGTLVTVSSTRIQNPDPAVYQLRDSKSSDKSVCLFTDFDSQTNVSQSKDSDVYITDKCVLDMRSMDFKSNSAVAWSNKSDFACANAFNNSIIPEDTFFPSPESSCGFTSESYQQGVLSATILYEILLGKATLYAVLVSALVLMAMVKRKDSRG

SEQ ID NO: 44737 - protein, 775 aa, synthetic construct
MALPVTALLLPLALLLHAARPEVQLVESGGGLVQPGGSLRLSCEASGFASDDYIIGWFRQAPGKEREGVSCISSKYANTVYTDSVKGRFRLSRGTAKNTVYLQMSALKPEDTAVYYCAMDSRRVTCPEISTMHRNFDSWGQGTLVTVSSGTGGGGSGGGGSGGGGSEFEIVLTQSPATLSLSPGERATLSCSVSSSISSSNLHWYQQKPGQAPRLLIYATSNLASGIPARFSGSGSGTDFTLTISSLEPEDFAVYYCQQWSSYPHTFGGGTKVEIKRLEDLKNVFPPEVAVFEPSEAEISHTQKATLVCLATGFYPDHVELSWWVNGKEVHSGVCTDPQPLKEQPALNDSRYCLSSRLRVSATFWQNPRNHFRCQVQFYGLSENDEWTQDRAKPVTQIVSAEAWGRADCDVKLVEKSFETDTNLNFQNLSVIGFRILLLKVAGFNLLMTLRLWSSRAKRSGSGATNFSLLKQAGDVEENPGPTSMDWIWRILFLVGAATGAHSFEQVQLVQSGAEVKKPGASVKVSCKASGYTFTNYLIEWVRQAPGQGLEWMGLINPGSGGTNYNEKFKGRVTMTTDTSTSTAYMELRSLRSDDTAVYYCARRSPLGSWIYYAYDGVAYWGQGTLVTVSSTRIQNPDPAVYQLRDSKSSDKSVCLFTDFDSQTNVSQSKDSDVYITDKCVLDMRSMDFKSNSAVAWSNKSDFACANAFNNSIIPEDTFFPSPESSCGFTSESYQQGVLSATILYEILLGKATLYAVLVSALVLMAMVKRKDSRG

SEQ ID NO: 44738 - protein, 775 aa, synthetic construct
MALPVTALLLPLALLLHAARPEVQLVESGGGLVQPGGSLRLSCAASGFASDYYIIGWFRQAPGKEREGVSCISSRYANTNYADSVKGRFTISRDNAKNTVYLQMNSLKPEDTAVYYCAADTRRYTCPDIATMHRNFDSWGQGTLVTVSSGTGGGGSGGGGSGGGGSEFEIVLTQSPATLSLSPGERATLSCSVSSSISSSNLHWYQQKPGQAPRLLIYATSNLASGIPARFSGSGSGTDFTLTISSLEPEDFAVYYCQQWSSYPHTFGGGTKVEIKRLEIQNPDPAVYQLRDSKSSDKSVCLFTDFDSQTNVSQSKDSDVYITDKCVLDMRSMDFKSNSAVAWSNKSDFACANAFNNSIIPEDTFFPSPESSCGFTSESYQQGVLSATILYEILLGKATLYAVLVSALVLMAMVKRKDSRGRAKRSGSGATNFSLLKQAGDVEENPGPTSMDWIWRILFLVGAATGAHSFEQVQLVQSGAEVKKPGASVKVSCKASGYTFTNYLIEWVRQAPGQGLEWMGLINPGSGGTNYNEKFKGRVTMTTDTSTSTAYMELRSLRSDDTAVYYCARRSPLGSWIYYAYDGVAYWGQGTLVTVSSTRDLKNVFPPEVAVFEPSEAEISHTQKATLVCLATGFYPDHVELSWWVNGKEVHSGVCTDPQPLKEQPALNDSRYCLSSRLRVSATFWQNPRNHFRCQVQFYGLSENDEWTQDRAKPVTQIVSAEAWGRADCDVKLVEKSFETDTNLNFQNLSVIGFRILLLKVAGFNLLMTLRLWSS

SEQ ID NO: 44739 - protein, 775 aa, synthetic construct
MALPVTALLLPLALLLHAARPEVQLVESGGGLVQPGGSLRLSCEASGFASDDYIIGWFRQAPGKEREGVSCISSKYANTVYTDSVKGRFRLSRGTAKNTVYLQMSALKPEDTAVYYCAMDSRRVTCPEISTMHRNFDSWGQGTLVTVSSGTGGGGSGGGGSGGGGSEFEIVLTQSPATLSLSPGERATLSCSVSSSISSSNLHWYQQKPGQAPRLLIYATSNLASGIPARFSGSGSGTDFTLTISSLEPEDFAVYYCQQWSSYPHTFGGGTKVEIKRLEIQNPDPAVYQLRDSKSSDKSVCLFTDFDSQTNVSQSKDSDVYITDKCVLDMRSMDFKSNSAVAWSNKSDFACANAFNNSIIPEDTFFPSPESSCGFTSESYQQGVLSATILYEILLGKATLYAVLVSALVLMAMVKRKDSRGRAKRSGSGATNFSLLKQAGDVEENPGPTSMDWIWRILFLVGAATGAHSFEQVQLVQSGAEVKKPGASVKVSCKASGYTFTNYLIEWVRQAPGQGLEWMGLINPGSGGTNYNEKFKGRVTMTTDTSTSTAYMELRSLRSDDTAVYYCARRSPLGSWIYYAYDGVAYWGQGTLVTVSSTRDLKNVFPPEVAVFEPSEAEISHTQKATLVCLATGFYPDHVELSWWVNGKEVHSGVCTDPQPLKEQPALNDSRYCLSSRLRVSATFWQNPRNHFRCQVQFYGLSENDEWTQDRAKPVTQIVSAEAWGRADCDVKLVEKSFETDTNLNFQNLSVIGFRILLLKVAGFNLLMTLRLWSS

SEQ ID NO: 44740 - protein, 766 aa, synthetic construct
MALPVTALLLPLALLLHAARPQVKLEESGGGLVQPGESLRLSCSASGSIFKVFRVFAMSWYRQGPGKQRELVASISSGETTTYAESVKGRFTISRDNAKNTAYLQMDSLKPEDTAVYYCNADHTFTGDFWGQGTQVTVSSGTGGGGSGGGGSGGGGSEFEIVLTQSPATLSLSPGERATLSCSVSSSISSSNLHWYQQKPGQAPRLLIYATSNLASGIPARFSGSGSGTDFTLTISSLEPEDFAVYYCQQWSSYPHTFGGGTKVEIKRLEIQNPDPAVYQLRDSKSSDKSVCLFTDFDSQTNVSQSKDSDVYITDKCVLDMRSMDFKSNSAVAWSNKSDFACANAFNNSIIPEDTFFPSPESSCGFTSESYQQGVLSATILYEILLGKATLYAVLVSALVLMAMVKRKDSRGRAKRSGSGATNFSLLKQAGDVEENPGPTSMDWIWRILFLVGAATGAHSFEQVQLVQSGAEVKKPGASVKVSCKASGYTFTNYLIEWVRQAPGQGLEWMGLINPGSGGTNYNEKFKGRVTMTTDTSTSTAYMELRSLRSDDTAVYYCARRSPLGSWIYYAYDGVAYWGQGTLVTVSSTRDLKNVFPPEVAVFEPSEAEISHTQKATLVCLATGFYPDHVELSWWVNGKEVHSGVCTDPQPLKEQPALNDSRYCLSSRLRVSATFWQNPRNHFRCQVQFYGLSENDEWTQDRAKPVTQIVSAEAWGRADCDVKLVEKSFETDTNLNFQNLSVIGFRILLLKVAGFNLLMTLRLWSS

SEQ ID NO: 44741 - protein, 767 aa, synthetic construct
MALPVTALLLPLALLLHAARPEIVLTQSPATLSLSPGERATLSCSVSSSISSSNLHWYQQKPGQAPRLLIYATSNLASGIPARFSGSGSGTDFTLTISSLEPEDFAVYYCQQWSSYPHTFGGGTKVEIKRLEDLKNVFPPEVAVFEPSEAEISHTQKATLVCLATGFYPDHVELSWWVNGKEVHSGVCTDPQPLKEQPALNDSRYCLSSRLRVSATFWQNPRNHFRCQVQFYGLSENDEWTQDRAKPVTQIVSAEAWGRADCDVKLVEKSFETDTNLNFQNLSVIGFRILLLKVAGFNLLMTLRLWSSRAKRSGSGATNFSLLKQAGDVEENPGPTSATMDWIWRILFLVGAATGAHSGPEVQLVESGGGLVQAGGSLRLSCAASGRTFSMGWFRQAPGKEREFVAAITYSGGSPYYADSVKGRFTISRDNAKNTVYLQMNSLKPEDTAVYYCAANPTYGSDWNAENWGQGTQVTVSSGSGGGGSGGGGSGGGGSFEQVQLVQSGAEVKKPGASVKVSCKASGYTFTNYLIEWVRQAPGQGLEWMGLINPGSGGTNYNEKFKGRVTMTTDTSTSTAYMELRSLRSDDTAVYYCARRSPLGSWIYYAYDGVAYWGQGTLVTVSSTRIQNPDPAVYQLRDSKSSDKSVCLFTDFDSQTNVSQSKDSDVYITDKCVLDMRSMDFKSNSAVAWSNKSDFACANAFNNSIIPEDTFFPSPESSCGFTSESYQQGVLSATILYEILLGKATLYAVLVSALVLMAMVKRKDSRG

SEQ ID NO: 44742 - protein, 768 aa, synthetic construct
MALPVTALLLPLALLLHAARPEIVLTQSPATLSLSPGERATLSCSVSSSISSSNLHWYQQKPGQAPRLLIYATSNLASGIPARFSGSGSGTDFTLTISSLEPEDFAVYYCQQWSSYPHTFGGGTKVEIKRLEDLKNVFPPEVAVFEPSEAEISHTQKATLVCLATGFYPDHVELSWWVNGKEVHSGVCTDPQPLKEQPALNDSRYCLSSRLRVSATFWQNPRNHFRCQVQFYGLSENDEWTQDRAKPVTQIVSAEAWGRADCDVKLVEKSFETDTNLNFQNLSVIGFRILLLKVAGFNLLMTLRLWSSRAKRSGSGATNFSLLKQAGDVEENPGPTSATMDWIWRILFLVGAATGAHSGPEVQLVESGGGLVQPGGSLRLSCAASGSIFGFNDMAWYRQAPGKQRELVALISRVGVTSSADSVKGRFTISRVNAKDTVYLQMNSLKPEDTAVYYCYMDQRLDGSTLAYWGQGTQVTVSSGSGGGGSGGGGSGGGGSFEQVQLVQSGAEVKKPGASVKVSCKASGYTFTNYLIEWVRQAPGQGLEWMGLINPGSGGTNYNEKFKGRVTMTTDTSTSTAYMELRSLRSDDTAVYYCARRSPLGSWIYYAYDGVAYWGQGTLVTVSSTRIQNPDPAVYQLRDSKSSDKSVCLFTDFDSQTNVSQSKDSDVYITDKCVLDMRSMDFKSNSAVAWSNKSDFACANAFNNSIIPEDTFFPSPESSCGFTSESYQQGVLSATILYEILLGKATLYAVLVSALVLMAMVKRKDSRG

SEQ ID NO: 44743 - protein, 764 aa, synthetic construct
MALPVTALLLPLALLLHAARPEIVLTQSPATLSLSPGERATLSCSVSSSISSSNLHWYQQKPGQAPRLLIYATSNLASGIPARFSGSGSGTDFTLTISSLEPEDFAVYYCQQWSSYPHTFGGGTKVEIKRLEDLKNVFPPEVAVFEPSEAEISHTQKATLVCLATGFYPDHVELSWWVNGKEVHSGVCTDPQPLKEQPALNDSRYCLSSRLRVSATFWQNPRNHFRCQVQFYGLSENDEWTQDRAKPVTQIVSAEAWGRADCDVKLVEKSFETDTNLNFQNLSVIGFRILLLKVAGFNLLMTLRLWSSRAKRSGSGATNFSLLKQAGDVEENPGPTSATMDWIWRILFLVGAATGAHSGPEVQLVESGGGLVQAGGSLRLSCAASGSVFSGNVMGWYRQAPGKEREWVAAIASGGSIYYRDSVKGRFTISRDNAKNTVYLQMNSLKPEDTAVYYCNSHPPTLPYWGLGTQVTVSSGSGGGGSGGGGSGGGGSFEQVQLVQSGAEVKKPGASVKVSCKASGYTFTNYLIEWVRQAPGQGLEWMGLINPGSGGTNYNEKFKGRVTMTTDTSTSTAYMELRSLRSDDTAVYYCARRSPLGSWIYYAYDGVAYWGQGTLVTVSSTRIQNPDPAVYQLRDSKSSDKSVCLFTDFDSQTNVSQSKDSDVYITDKCVLDMRSMDFKSNSAVAWSNKSDFACANAFNNSIIPEDTFFPSPESSCGFTSESYQQGVLSATILYEILLGKATLYAVLVSALVLMAMVKRKDSRG

SEQ ID NO: 44744 - protein, 762 aa, synthetic construct
MALPVTALLLPLALLLHAARPEIVLTQSPATLSLSPGERATLSCSVSSSISSSNLHWYQQKPGQAPRLLIYATSNLASGIPARFSGSGSGTDFTLTISSLEPEDFAVYYCQQWSSYPHTFGGGTKVEIKRLEDLKNVFPPEVAVFEPSEAEISHTQKATLVCLATGFYPDHVELSWWVNGKEVHSGVCTDPQPLKEQPALNDSRYCLSSRLRVSATFWQNPRNHFRCQVQFYGLSENDEWTQDRAKPVTQIVSAEAWGRADCDVKLVEKSFETDTNLNFQNLSVIGFRILLLKVAGFNLLMTLRLWSSRAKRSGSGATNFSLLKQAGDVEENPGPTSATMDWIWRILFLVGAATGAHSGPEVQLLESGGGLVQPGGSLRLSCAASGFSFSSYALSWVRQAPGKGLEWVSSIGENDGTTDYADAVKGRFTISRDNSKNTLYLQMNSLRVEDTAVYYCVKDGIHWGQGTLVTVSSGSGGGGSGGGGSGGGGSFEQVQLVQSGAEVKKPGASVKVSCKASGYTFTNYLIEWVRQAPGQGLEWMGLINPGSGGTNYNEKFKGRVTMTTDTSTSTAYMELRSLRSDDTAVYYCARRSPLGSWIYYAYDGVAYWGQGTLVTVSSTRIQNPDPAVYQLRDSKSSDKSVCLFTDFDSQTNVSQSKDSDVYITDKCVLDMRSMDFKSNSAVAWSNKSDFACANAFNNSIIPEDTFFPSPESSCGFTSESYQQGVLSATILYEILLGKATLYAVLVSALVLMAMVKRKDSRG

SEQ ID NO: 44745 - protein, 1131 aa, synthetic construct
MGPRLLFWALLCLLGTGPVEAGVTQSPTHLIKTRGQQATLRCSPISGHTSVYWYQQALGLGLQFLLWYDEGEERNRGNFPPRFSGRQFPNYSSELNVNALELEDSALYLCASSLGGPRGLAGLRGDEQFFGPGTRLTVLEGTGGGGSGGGEFEIVLTQSPATLSLSPGERATLSCSVSSSISSSNLHWYQQKPGQAPRLLIYATSNLASGIPARFSGSGSGTDFTLTISSLEPEDFAVYYCQQWSSYPHTFGGGTKVEIKRLEDLKNVFPPEVAVFEPSEAEISHTQKATLVCLATGFYPDHVELSWWVNGKEVHSGVCTDPQPLKEQPALNDSRYCLSSRLRVSATFWQNPRNHFRCQVQFYGLSENDEWTQDRAKPVTQIVSAEAWGRADCDVKLVEKSFETDTNLNFQNLSVIGFRILLLKVAGFNLLMTLRLWSSRAKRSGSGATNFSLLKQAGDVEENPGPTSATMDWIWRILFLVGAATGAHSGPEVQLVESGGGLVQAGGSLRLSCAASGRTFSMGWFRQAPGKEREFVAAITYSGGSPYYADSVKGRFTISRDNAKNTVYLQMNSLKPEDTAVYYCAANPTYGSDWNAENWGQGTQVTVSSGSGGGGSGGGGSGGGGSFEQVQLVQSGAEVKKPGASVKVSCKASGYTFTNYLIEWVRQAPGQGLEWMGLINPGSGGTNYNEKFKGRVTMTTDTSTSTAYMELRSLRSDDTAVYYCARRSPLGSWIYYAYDGVAYWGQGTLVTVSSTRIQNPDPAVYQLRDSKSSDKSVCLFTDFDSQTNVSQSKDSDVYITDKCVLDMRSMDFKSNSAVAWSNKSDFACANAFNNSIIPEDTFFPSPESSCGFTSESYQQGVLSATILYEILLGKATLYAVLVSALVLMAMVKRKDSRGRAKRSGSGVKQTLNFDLLKLAGDVESNPGPSRGHMTEYKPTVRLATRDDVPRAVRTLAAAFADYPATRHTVDPDRHIERVTELQELFLTRVGLDIGKVWVADDGAAVAVWTTPESVEAGAVFAEIGPRMAELSGSRLAAQQQMEGLLAPHRPKEPAWFLATVGVSPDHQGKGLGSAVVLPGVEAAERAGVPAFLETSAPRNLPFYERLGFTVTADVEVPEGPRTWCMTRKPGA

SEQ ID NO: 44746 - protein, 1130 aa, synthetic construct
MGPRLLFWALLCLLGTGPVEAGVTQSPTHLIKTRGQQATLRCSPISGHTSVYWYQQALGLGLQFLLWYDEGEERNRGNFPPRFSGRQFPNYSSELNVNALELEDSALYLCASSLGGDELGADGNEQFFGPGTRLTVLEGTGGGGSGGGSEFEIVLTQSPATLSLSPGERATLSCSVSSSISSSNLHWYQQKPGQAPRLLIYATSNLASGIPARFSGSGSGTDFTLTISSLEPEDFAVYYCQQWSSYPHTFGGGTKVEIKRLEDLKNVFPPEVAVFEPSEAEISHTQKATLVCLATGFYPDHVELSWWVNGKEVHSGVCTDPQPLKEQPALNDSRYCLSSRLRVSATFWQNPRNHFRCQVQFYGLSENDEWTQDRAKPVTQIVSAEAWGRADCDVKLVEKSFETDTNLNFQNLSVIGFRILLLKVAGFNLLMTLRLWSSRAKRSGSGATNFSLLKQAGDVEENPGPTSATMDWIWRILFLVGAATGAHSGPEVQLVESGGGLVQAGGSLRLSCAASGRTFSMGWFRQAPGKEREFVAAITYSGGSPYYADSVKGRFTISRDNAKNTVYLQMNSLKPEDTAVYYCAANPTYGSDWNAENWGQGTQVTVSSGSGGGGSGGGGSGGGGSFEQVQLVQSGAEVKKPGASVKVSCKASGYTFTNYLIEWVRQAPGQGLEWMGLINPGSGGTNYNEKFKGRVTMTTDTSTSTAYMELRSLRSDDTAVYYCARRSPLGSWIYYAYDGVAYWGQGTLVTVSSTRIQNPDPAVYQLRDSKSSDKSVCLFTDFDSQTNVSQSKDSDVYITDKCVLDMRSMDFKSNSAVAWSNKSDFACANAFNNSIIPEDTFFPSPESSCGFTSESYQQGVLSATILYEILLGKATLYAVLVSALVLMAMVKRKDSRGRAKRSGSGVKQTLNFDLLKLAGDVESNPGPSRGHMTEYKPTVRLATRDDVPRAVRTLAAAFADYPATRHTVDPDRHIERVTELQELFLTRVGLDIGKVWVADDGAAVAVWTTPESVEAGAVFAEIGPRMAELSGSRLAAQQQMEGLLAPHRPKEPAWFLATVGVSPDHQGKGLGSAVVLPGVEAAERAGVPAFLETSAPRNLPFYERLGFTVTADVEVPEGPRTWCMTRKPGA

SEQ ID NO: 44747 - protein, 955 aa, synthetic construct
MALPVTALLLPLALLLHAARPEIVLTQSPATLSLSPGERATLSCSVSSSISSSNLHWYQQKPGQAPRLLIYATSNLASGIPARFSGSGSGTDFTLTISSLEPEDFAVYYCQQWSSYPHTFGGGTKVEIKRLEDLKNVFPPEVAVFEPSEAEISHTQKATLVCLATGFYPDHVELSWWVNGKEVHSGVCTDPQPLKEQPALNDSRYCLSSRLRVSATFWQNPRNHFRCQVQFYGLSENDEWTQDRAKPVTQIVSAEAWGRADCDVKLVEKSFETDTNLNFQNLSVIGFRILLLKVAGFNLLMTLRLWSSRAKRSGSGATNFSLLKQAGDVEENPGPTSATMDWIWRILFLVGAATGAHSGPMGSWLEFYHRLNAIDSRLWALGGSEAELAAFEKEIAAFESELQAYKGKGNPEVESLRDHAAHIREWLQAYRHNGSGGGGSGGGGSGGGGSFEQVQLVQSGAEVKKPGASVKVSCKASGYTFTNYLIEWVRQAPGQGLEWMGLINPGSGGTNYNEKFKGRVTMTTDTSTSTAYMELRSLRSDDTAVYYCARRSPLGSWIYYAYDGVAYWGQGTLVTVSSTRIQNPDPAVYQLRDSKSSDKSVCLFTDFDSQTNVSQSKDSDVYITDKCVLDMRSMDFKSNSAVAWSNKSDFACANAFNNSIIPEDTFFPSPESSCGFTSESYQQGVLSATILYEILLGKATLYAVLVSALVLMAMVKRKDSRGRAKRSGSGVKQTLNFDLLKLAGDVESNPGPSRGHMTEYKPTVRLATRDDVPRAVRTLAAAFADYPATRHTVDPDRHIERVTELQELFLTRVGLDIGKVWVADDGAAVAVWTTPESVEAGAVFAEIGPRMAELSGSRLAAQQQMEGLLAPHRPKEPAWFLATVGVSPDHQGKGLGSAVVLPGVEAAERAGVPAFLETSAPRNLPFYERLGFTVTADVEVPEGPRTWCMTRKPGA

SEQ ID NO: 44748 - protein, 955 aa, synthetic construct
MALPVTALLLPLALLLHAARPACMGSWFEFYDRLNAIDARLWALGGSEAELAAFEKEIAAFESELQAYKGKGNPEVENLRVHAAAIREWLQAYRHNGTGGGGSGGGGSGGGGSEFEIVLTQSPATLSLSPGERATLSCSVSSSISSSNLHWYQQKPGQAPRLLIYATSNLASGIPARFSGSGSGTDFTLTISSLEPEDFAVYYCQQWSSYPHTFGGGTKVEIKRLEDLKNVFPPEVAVFEPSEAEISHTQKATLVCLATGFYPDHVELSWWVNGKEVHSGVCTDPQPLKEQPALNDSRYCLSSRLRVSATFWQNPRNHFRCQVQFYGLSENDEWTQDRAKPVTQIVSAEAWGRADCDVKLVEKSFETDTNLNFQNLSVIGFRILLLKVAGFNLLMTLRLWSSRAKRSGSGATNFSLLKQAGDVEENPGPTSMDWIWRILFLVGAATGAHSFEQVQLVQSGAEVKKPGASVKVSCKASGYTFTNYLIEWVRQAPGQGLEWMGLINPGSGGTNYNEKFKGRVTMTTDTSTSTAYMELRSLRSDDTAVYYCARRSPLGSWIYYAYDGVAYWGQGTLVTVSSTRIQNPDPAVYQLRDSKSSDKSVCLFTDFDSQTNVSQSKDSDVYITDKCVLDMRSMDFKSNSAVAWSNKSDFACANAFNNSIIPEDTFFPSPESSCGFTSESYQQGVLSATILYEILLGKATLYAVLVSALVLMAMVKRKDSRGRAKRSGSGVKQTLNFDLLKLAGDVESNPGPSRGHMTEYKPTVRLATRDDVPRAVRTLAAAFADYPATRHTVDPDRHIERVTELQELFLTRVGLDIGKVWVADDGAAVAVWTTPESVEAGAVFAEIGPRMAELSGSRLAAQQQMEGLLAPHRPKEPAWFLATVGVSPDHQGKGLGSAVVLPGVEAAERAGVPAFLETSAPRNLPFYERLGFTVTADVEVPEGPRTWCMTRKPGA

SEQ ID NO: 44749 - protein, 1072 aa, synthetic construct
MALPVTALLLPLALLLHAARPACMDPDLEIRAAFLRQRNTALRTEVAELEQEVQRLENEVSQYETRYGPLGGGKGTGGGGSGGGGSGGGGSEFEIVLTQSPATLSLSPGERATLSCSVSSSISSSNLHWYQQKPGQAPRLLIYATSNLASGIPARFSGSGSGTDFTLTISSLEPEDFAVYYCQQWSSYPHTFGGGTKVEIKRLEDLKNVFPPEVAVFEPSEAEISHTQKATLVCLATGFYPDHVELSWWVNGKEVHSGVCTDPQPLKEQPALNDSRYCLSSRLRVSATFWQNPRNHFRCQVQFYGLSENDEWTQDRAKPVTQIVSAEAWGRADCDVKLVEKSFETDTNLNFQNLSVIGFRILLLKVAGFNLLMTLRLWSSRAKRSGSGATNFSLLKQAGDVEENPGPTSATMDWIWRILFLVGAATGAHSGPEVQLVESGGGLVQAGGSLRLSCAASGRTFSMGWFRQAPGKEREFVAAITYSGGSPYYADSVKGRFTISRDNAKNTVYLQMNSLKPEDTAVYYCAANPTYGSDWNAENWGQGTQVTVSSGSGGGGSGGGGSGGGGSFEQVQLVQSGAEVKKPGASVKVSCKASGYTFTNYLIEWVRQAPGQGLEWMGLINPGSGGTNYNEKFKGRVTMTTDTSTSTAYMELRSLRSDDTAVYYCARRSPLGSWIYYAYDGVAYWGQGTLVTVSSTRIQNPDPAVYQLRDSKSSDKSVCLFTDFDSQTNVSQSKDSDVYITDKCVLDMRSMDFKSNSAVAWSNKSDFACANAFNNSIIPEDTFFPSPESSCGFTSESYQQGVLSATILYEILLGKATLYAVLVSALVLMAMVKRKDSRGRAKRSGSGVKQTLNFDLLKLAGDVESNPGPSRGHMTEYKPTVRLATRDDVPRAVRTLAAAFADYPATRHTVDPDRHIERVTELQELFLTRVGLDIGKVWVADDGAAVAVWTTPESVEAGAVFAEIGPRMAELSGSRLAAQQQMEGLLAPHRPKEPAWFLATVGVSPDHQGKGLGSAVVLPGVEAAERAGVPAFLETSAPRNLPFYERLGFTVTADVEVPEGPRTWCMTRKPGA

SEQ ID NO: 44750 - protein, 955 aa, synthetic construct
MALPVTALLLPLALLLHAARPEIVLTQSPATLSLSPGERATLSCSVSSSISSSNLHWYQQKPGQAPRLLIYATSNLASGIPARFSGSGSGTDFTLTISSLEPEDFAVYYCQQWSSYPHTFGGGTKVEIKRLEDLKNVFPPEVAVFEPSEAEISHTQKATLVCLATGFYPDHVELSWWVNGKEVHSGVCTDPQPLKEQPALNDSRYCLSSRLRVSATFWQNPRNHFRCQVQFYGLSENDEWTQDRAKPVTQIVSAEAWGRADCDVKLVEKSFETDTNLNFQNLSVIGFRILLLKVAGFNLLMTLRLWSSRAKRSGSGATNFSLLKQAGDVEENPGPTSATMDWIWRILFLVGAATGAHSGPMGSWSEFYDRLHAIHHRLYALGGSEAELAAFEKEIAAFESELQAYKGKGNPEVEALRDTAAFIRTRLQAYRHNGSGGGGSGGGGSGGGGSFEQVQLVQSGAEVKKPGASVKVSCKASGYTFTNYLIEWVRQAPGQGLEWMGLINPGSGGTNYNEKFKGRVTMTTDTSTSTAYMELRSLRSDDTAVYYCARRSPLGSWIYYAYDGVAYWGQGTLVTVSSTRIQNPDPAVYQLRDSKSSDKSVCLFTDFDSQTNVSQSKDSDVYITDKCVLDMRSMDFKSNSAVAWSNKSDFACANAFNNSIIPEDTFFPSPESSCGFTSESYQQGVLSATILYEILLGKATLYAVLVSALVLMAMVKRKDSRGRAKRSGSGVKQTLNFDLLKLAGDVESNPGPSRGHMTEYKPTVRLATRDDVPRAVRTLAAAFADYPATRHTVDPDRHIERVTELQELFLTRVGLDIGKVWVADDGAAVAVWTTPESVEAGAVFAEIGPRMAELSGSRLAAQQQMEGLLAPHRPKEPAWFLATVGVSPDHQGKGLGSAVVLPGVEAAERAGVPAFLETSAPRNLPFYERLGFTVTADVEVPEGPRTWCMTRKPGA

SEQ ID NO: 44751 - protein, 1165 aa, synthetic construct
MALPVTALLLPLALLLHAARPEIVLTQSPATLSLSPGERATLSCSVSSSISSSNLHWYQQKPGQAPRLLIYATSNLASGIPARFSGSGSGTDFTLTISSLEPEDFAVYYCQQWSSYPHTFGGGTKVEIKRLEDLKNVFPPEVAVFEPSEAEISHTQKATLVCLATGFYPDHVELSWWVNGKEVHSGVCTDPQPLKEQPALNDSRYCLSSRLRVSATFWQNPRNHFRCQVQFYGLSENDEWTQDRAKPVTQIVSAEAWGRADCDVKLVEKSFETDTNLNFQNLSVIGFRILLLKVAGFNLLMTLRLWSSRAKRSGSGATNFSLLKQAGDVEENPGPTSTMDWIWRILFLVGAATGAHSLFNQEVQIPLTESYCGPCPKNWICYKNNCYQFFDESKNWYESQASCMSQNASLLKVYSKEDQDLLKLVKSAHWMGLVHIPTNGSWQWEDGSILSPNLLTIIEMQKGDCALYASSFKGYIENCSTPNTYICMQRTVSGGGGSGGGGSGGGGDLFNQEVQIPLTESYCGPCPKNWICYKNNCYQFFDESKNWYESQASCMSQNASLLKVYSKEDQDLLKLVKSAHWMGLVHIPTNGSWQWEDGSILSPNLLTIIEMQKGDCALYASSFKGYIENCSTPNTYICMQRTVGSGGGGSGGGGSGGGGSFEQVQLVQSGAEVKKPGASVKVSCKASGYTFTNYLIEWVRQAPGQGLEWMGLINPGSGGTNYNEKFKGRVTMTTDTSTSTAYMELRSLRSDDTAVYYCARRSPLGSWIYYAYDGVAYWGQGTLVTVSSTRIQNPDPAVYQLRDSKSSDKSVCLFTDFDSQTNVSQSKDSDVYITDKCVLDMRSMDFKSNSAVAWSNKSDFACANAFNNSIIPEDTFFPSPESSCGFTSESYQQGVLSATILYEILLGKATLYAVLVSALVLMAMVKRKDSRGRAKRSGSGVKQTLNFDLLKLAGDVESNPGPSRGHMTEYKPTVRLATRDDVPRAVRTLAAAFADYPATRHTVDPDRHIERVTELQELFLTRVGLDIGKVWVADDGAAVAVWTTPESVEAGAVFAEIGPRMAELSGSRLAAQQQMEGLLAPHRPKEPAWFLATVGVSPDHQGKGLGSAVVLPGVEAAERAGVPAFLETSAPRNLPFYERLGFTVTADVEVPEGPRTWCMTRKPGA

SEQ ID NO: 44752 - protein, 628 aa, synthetic construct; identical to SEQ ID NO: 44709

SEQ ID NO: 44753 - protein, 632 aa, synthetic construct
MALPVTALLLPLALLLHAARPEIVLTQSPATLSLSPGERATLSCSVSSSISSSNLHWYQQKPGQAPRLLIYATSNLASGIPARFSGSGSGTDFTLTISSLEPEDFAVYYCQQWSSYPHTFGGGTKVEIKRLEIQNPDPAVYQLRDSKSSDKSVCLFTDFDSQTNVSQSKDSDVYITDKCVLDMRSMDFKSNSAVAWSNKSDFACANAFNNSIIPEDTFFPSPESSCDVKLVEKSFETDTNLNFQILYEILLGKATLYAVLVSALVLMAMVKRKDSRGRAKRSGSGVKQTLNFDLLKLAGDVESNPGPTSMDWIWRILFLVGAATGAHSFEQVQLVQSGAEVKKPGASVKVSCKASGYTFTNYLIEWVRQAPGQGLEWMGLINPGSGGTNYNEKFKGRVTMTTDTSTSTAYMELRSLRSDDTAVYYCARRSPLGSWIYYAYDGVAYWGQGTLVTVSSTREDLKNVFPPEVAVFEPSEAEISHTQKATLVCLATGFYPDHVELSWWVNGKEVHSGVCTDPQPLKEQPALNDSRYCLSSRLRVSATFWQNPRNHFRCQVQFYGLSENDEWTQDRAKPVTQIVSAEAWGRADCGFTSESYQQGVLSATNLSVIGFRILLLKVAGFNLLMTLRLWSS

SEQ ID NO: 44754 - protein, 763 aa, synthetic construct
MALPVTALLLPLALLLHAARPEVQLVESGGGLVQPGGSLRLSCAASGFSFSDFWMSWVRQAPGKGLEWVATISQAGSEKDYVDSVKGRFTISRDNAKKSLYLQMNSLRAEDTAVYYCASGVYSFDYRGQGTLVTVSSGTGGGGSGGGGSGGGGSEFEIVLTQSPATLSLSPGERATLSCSVSSSISSSNLHWYQQKPGQAPRLLIYATSNLASGIPARFSGSGSGTDFTLTISSLEPEDFAVYYCQQWSSYPHTFGGGTKVEIKRLEDLKNVFPPEVAVFEPSEAEISHTQKATLVCLATGFYPDHVELSWWVNGKEVHSGVCTDPQPLKEQPALNDSRYCLSSRLRVSATFWQNPRNHFRCQVQFYGLSENDEWTQDRAKPVTQIVSAEAWGRADCGFTSESYQQGVLSATNLSVIGFRILLLKVAGFNLLMTLRLWSSRAKRSGSGATNFSLLKQAGDVEENPGPTSMDWIWRILFLVGAATGAHSFEQVQLVQSGAEVKKPGASVKVSCKASGYTFTNYLIEWVRQAPGQGLEWMGLINPGSGGTNYNEKFKGRVTMTTDTSTSTAYMELRSLRSDDTAVYYCARRSPLGSWIYYAYDGVAYWGQGTLVTVSSTRIQNPDPAVYQLRDSKSSDKSVCLFTDFDSQTNVSQSKDSDVYITDKCVLDMRSMDFKSNSAVAWSNKSDFACANAFNNSIIPEDTFFPSPESSCDVKLVEKSFETDTNLNFQILYEILLGKATLYAVLVSALVLMAMVKRKDSRG

SEQ ID NO: 44755 - protein, 767 aa, synthetic construct
MALPVTALLLPLALLLHAARPEVQLVESGGGLVQPGGSLRLSCAASGFSFSDFWMSWVRQAPGKGLEWVATISQAGSEKDYVDSVKGRFTISRDNAKKSLYLQMNSLRAEDTAVYYCASGVYSFDYRGQGTLVTVSSGTGGGGSGGGGSGGGGSEFEIVLTQSPATLSLSPGERATLSCSVSSSISSSNLHWYQQKPGQAPRLLIYATSNLASGIPARFSGSGSGTDFTLTISSLEPEDFAVYYCQQWSSYPHTFGGGTKVEIKRLEIQNPDPAVYQLRDSKSSDKSVCLFTDFDSQTNVSQSKDSDVYITDKCVLDMRSMDFKSNSAVAWSNKSDFACANAFNNSIIPEDTFFPSPESSCDVKLVEKSFETDTNLNFQILYEILLGKATLYAVLVSALVLMAMVKRKDSRGRAKRSGSGVKQTLNFDLLKLAGDVESNPGPTSMDWIWRILFLVGAATGAHSFEQVQLVQSGAEVKKPGASVKVSCKASGYTFTNYLIEWVRQAPGQGLEWMGLINPGSGGTNYNEKFKGRVTMTTDTSTSTAYMELRSLRSDDTAVYYCARRSPLGSWIYYAYDGVAYWGQGTLVTVSSTREDLKNVFPPEVAVFEPSEAEISHTQKATLVCLATGFYPDHVELSWWVNGKEVHSGVCTDPQPLKEQPALNDSRYCLSSRLRVSATFWQNPRNHFRCQVQFYGLSENDEWTQDRAKPVTQIVSAEAWGRADCGFTSESYQQGVLSATNLSVIGFRILLLKVAGFNLLMTLRLWSS

SEQ ID NO: 44756 - protein, 900 aa, synthetic construct
MALPVTALLLPLALLLHAARPEVQLVESGGGLVQPGGSLRLSCAASGFSFSDFWMSWVRQAPGKGLEWVATISQAGSEKDYVDSVKGRFTISRDNAKKSLYLQMNSLRAEDTAVYYCASGVYSFDYRGQGTLVTVSSGTGGGGSGGGGSGGGGSEFEIVLTQSPATLSLSPGERATLSCSVSSSISSSNLHWYQQKPGQAPRLLIYATSNLASGIPARFSGSGSGTDFTLTISSLEPEDFAVYYCQQWSSYPHTFGGGTKVEIKRLEDLKNVFPPEVAVFEPSEAEISHTQKATLVCLATGFYPDHVELSWWVNGKEVHSGVCTDPQPLKEQPALNDSRYCLSSRLRVSATFWQNPRNHFRCQVQFYGLSENDEWTQDRAKPVTQIVSAEAWGRADCGFTSESYQQGVLSATNLSVIGFRILLLKVAGFNLLMTLRLWSSRAKRSGSGATNFSLLKQAGDVEENPGPTSMDWIWRILFLVGAATGAHSGPQLQLQESGPGLVKPSETLSLTCTVSGDSISSGDYYWGWIRQPPGKGLEWIGHIYYSGVTYYNPSLKSRVTISVDTSRNQFSLKLSSVTAADTAVYYCTREDSSNWRSRGQGTLVTVSSGSGGGGSGGGGSGGGGSFEQVQLVQSGAEVKKPGASVKVSCKASGYTFTNYLIEWVRQAPGQGLEWMGLINPGSGGTNYNEKFKGRVTMTTDTSTSTAYMELRSLRSDDTAVYYCARRSPLGSWIYYAYDGVAYWGQGTLVTVSSTRIQNPDPAVYQLRDSKSSDKSVCLFTDFDSQTNVSQSKDSDVYITDKCVLDMRSMDFKSNSAVAWSNKSDFACANAFNNSIIPEDTFFPSPESSCDVKLVEKSFETDTNLNFQILYEILLGKATLYAVLVSALVLMAMVKRKDSRG

SEQ ID NO: 44757 - protein, 904 aa, synthetic construct
MALPVTALLLPLALLLHAARPEVQLVESGGGLVQPGGSLRLSCAASGFSFSDFWMSWVRQAPGKGLEWVATISQAGSEKDYVDSVKGRFTISRDNAKKSLYLQMNSLRAEDTAVYYCASGVYSFDYRGQGTLVTVSSGTGGGGSGGGGSGGGGSEFEIVLTQSPATLSLSPGERATLSCSVSSSISSSNLHWYQQKPGQAPRLLIYATSNLASGIPARFSGSGSGTDFTLTISSLEPEDFAVYYCQQWSSYPHTFGGGTKVEIKRLEIQNPDPAVYQLRDSKSSDKSVCLFTDFDSQTNVSQSKDSDVYITDKCVLDMRSMDFKSNSAVAWSNKSDFACANAFNNSIIPEDTFFPSPESSCDVKLVEKSFETDTNLNFQILYEILLGKATLYAVLVSALVLMAMVKRKDSRGRAKRSGSGVKQTLNFDLLKLAGDVESNPGPTSMDWIWRILFLVGAATGAHSGPQLQLQESGPGLVKPSETLSLTCTVSGDSISSGDYYWGWIRQPPGKGLEWIGHIYYSGVTYYNPSLKSRVTISVDTSRNQFSLKLSSVTAADTAVYYCTREDSSNWRSRGQGTLVTVSSGSGGGGSGGGGSGGGGSFEQVQLVQSGAEVKKPGASVKVSCKASGYTFTNYLIEWVRQAPGQGLEWMGLINPGSGGTNYNEKFKGRVTMTTDTSTSTAYMELRSLRSDDTAVYYCARRSPLGSWIYYAYDGVAYWGQGTLVTVSSTREDLKNVFPPEVAVFEPSEAEISHTQKATLVCLATGFYPDHVELSWWVNGKEVHSGVCTDPQPLKEQPALNDSRYCLSSRLRVSATFWQNPRNHFRCQVQFYGLSENDEWTQDRAKPVTQIVSAEAWGRADCGFTSESYQQGVLSATNLSVIGFRILLLKVAGFNLLMTLRLWSS

SEQ ID NO: 44758 - protein, 732 aa, synthetic construct
MALPVTALLLPLALLLHAARPEIVLTQSPATLSLSPGERATLSCSVSSSISSSNLHWYQQKPGQAPRLLIYATSNLASGIPARFSGSGSGTDFTLTISSLEPEDFAVYYCQQWSSYPHTFGGGTKVEIKRLEDLKNVFPPEVAVFEPSEAEISHTQKATLVCLATGFYPDHVELSWWVNGKEVHSGVCTDPQPLKEQPALNDSRYCLSSRLRVSATFWQNPRNHFRCQVQFYGLSENDEWTQDRAKPVTQIVSAEAWGRADDVIKIHWQEKKSNTILGSQEGNTMKTNDTYMKFSWLTVPEKSLDKEHRCIVRHENNKNGVDQEIIFPPIKTDVITMDPKDNCSKDANDTLLLQLTNTSAYYMYLLLLLKSVVYFAIITCCLLMAMVKRKDSRGRAKRSGSGATNFSLLKQAGDVEENPGPTSMDWIWRILFLVGAATGAHSFEQVQLVQSGAEVKKPGASVKVSCKASGYTFTNYLIEWVRQAPGQGLEWMGLINPGSGGTNYNEKFKGRVTMTTDTSTSTAYMELRSLRSDDTAVYYCARRSPLGSWIYYAYDGVAYWGQGTLVTVSSTRIQNPDPAVYQLRDSKSSDKSVCLFTDFDSQTNVSQSKDSDVYITDKCVLDMRSMDFKSNSAVAWSNKSDFACANAFNNSIIPEDTFFPSPESSDSTDHVKPKETENTKQPSKSCHKPKAIVHTEKVNMMSLTVLGLRMLFAKTVAVNFLLTAKLFFLLTA

SEQ ID NO: 44759 - protein, 736 aa, synthetic construct
MALPVTALLLPLALLLHAARPEIVLTQSPATLSLSPGERATLSCSVSSSISSSNLHWYQQKPGQAPRLLIYATSNLASGIPARFSGSGSGTDFTLTISSLEPEDFAVYYCQQWSSYPHTFGGGTKVEIKRLEIQNPDPAVYQLRDSKSSDKSVCLFTDFDSQTNVSQSKDSDVYITDKCVLDMRSMDFKSNSAVAWSNKSDFACANAFNNSIIPEDTFFPSPESSDSTDHVKPKETENTKQPSKSCHKPKAIVHTEKVNMMSLTVLGLRMLFAKTVAVNFLLTAKLFFLLTARAKRSGSGVKQTLNFDLLKLAGDVESNPGPTSMDWIWRILFLVGAATGAHSFEQVQLVQSGAEVKKPGASVKVSCKASGYTFTNYLIEWVRQAPGQGLEWMGLINPGSGGTNYNEKFKGRVTMTTDTSTSTAYMELRSLRSDDTAVYYCARRSPLGSWIYYAYDGVAYWGQGTLVTVSSTREDLKNVFPPEVAVFEPSEAEISHTQKATLVCLATGFYPDHVELSWWVNGKEVHSGVCTDPQPLKEQPALNDSRYCLSSRLRVSATFWQNPRNHFRCQVQFYGLSENDEWTQDRAKPVTQIVSAEAWGRADDVIKIHWQEKKSNTILGSQEGNTMKTNDTYMKFSWLTVPEKSLDKEHRCIVRHENNKNGVDQEIIFPPIKTDVITMDPKDNCSKDANDTLLLQLTNTSAYYMYLLLLLKSVVYFAIITCCLLMAMVKRKDSRG

SEQ ID NO: 44760 - protein, 867 aa, synthetic construct
MALPVTALLLPLALLLHAARPEVQLVESGGGLVQPGGSLRLSCAASGFSFSDFWMSWVRQAPGKGLEWVATISQAGSEKDYVDSVKGRFTISRDNAKKSLYLQMNSLRAEDTAVYYCASGVYSFDYRGQGTLVTVSSGTGGGGSGGGGSGGGGSEFEIVLTQSPATLSLSPGERATLSCSVSSSISSSNLHWYQQKPGQAPRLLIYATSNLASGIPARFSGSGSGTDFTLTISSLEPEDFAVYYCQQWSSYPHTFGGGTKVEIKRLEDLKNVFPPEVAVFEPSEAEISHTQKATLVCLATGFYPDHVELSWWVNGKEVHSGVCTDPQPLKEQPALNDSRYCLSSRLRVSATFWQNPRNHFRCQVQFYGLSENDEWTQDRAKPVTQIVSAEAWGRADDVIKIHWQEKKSNTILGSQEGNTMKTNDTYMKFSWLTVPEKSLDKEHRCIVRHENNKNGVDQEIIFPPIKTDVITMDPKDNCSKDANDTLLLQLTNTSAYYMYLLLLLKSVVYFAIITCCLLMAMVKRKDSRGRAKRSGSGATNFSLLKQAGDVEENPGPTSMDWIWRILFLVGAATGAHSFEQVQLVQSGAEVKKPGASVKVSCKASGYTFTNYLIEWVRQAPGQGLEWMGLINPGSGGTNYNEKFKGRVTMTTDTSTSTAYMELRSLRSDDTAVYYCARRSPLGSWIYYAYDGVAYWGQGTLVTVSSTRIQNPDPAVYQLRDSKSSDKSVCLFTDFDSQTNVSQSKDSDVYITDKCVLDMRSMDFKSNSAVAWSNKSDFACANAFNNSIIPEDTFFPSPESSDSTDHVKPKETENTKQPSKSCHKPKAIVHTEKVNMMSLTVLGLRMLFAKTVAVNFLLTAKLFFLLTA

SEQ ID NO: 44761 - protein, 871 aa, synthetic construct
MALPVTALLLPLALLLHAARPEVQLVESGGGLVQPGGSLRLSCAASGFSFSDFWMSWVRQAPGKGLEWVATISQAGSEKDYVDSVKGRFTISRDNAKKSLYLQMNSLRAEDTAVYYCASGVYSFDYRGQGTLVTVSSGTGGGGSGGGGSGGGGSEFEIVLTQSPATLSLSPGERATLSCSVSSSISSSNLHWYQQKPGQAPRLLIYATSNLASGIPARFSGSGSGTDFTLTISSLEPEDFAVYYCQQWSSYPHTFGGGTKVEIKRLEIQNPDPAVYQLRDSKSSDKSVCLFTDFDSQTNVSQSKDSDVYITDKCVLDMRSMDFKSNSAVAWSNKSDFACANAFNNSIIPEDTFFPSPESSDSTDHVKPKETENTKQPSKSCHKPKAIVHTEKVNMMSLTVLGLRMLFAKTVAVNFLLTAKLFFLLTARAKRSGSGVKQTLNFDLLKLAGDVESNPGPTSMDWIWRILFLVGAATGAHSFEQVQLVQSGAEVKKPGASVKVSCKASGYTFTNYLIEWVRQAPGQGLEWMGLINPGSGGTNYNEKFKGRVTMTTDTSTSTAYMELRSLRSDDTAVYYCARRSPLGSWIYYAYDGVAYWGQGTLVTVSSTREDLKNVFPPEVAVFEPSEAEISHTQKATLVCLATGFYPDHVELSWWVNGKEVHSGVCTDPQPLKEQPALNDSRYCLSSRLRVSATFWQNPRNHFRCQVQFYGLSENDEWTQDRAKPVTQIVSAEAWGRADDVIKIHWQEKKSNTILGSQEGNTMKTNDTYMKFSWLTVPEKSLDKEHRCIVRHENNKNGVDQEIIFPPIKTDVITMDPKDNCSKDANDTLLLQLTNTSAYYMYLLLLLKSVVYFAIITCCLLMAMVKRKDSRG

SEQ ID NO: 44762 - protein, 1004 aa, synthetic construct
MALPVTALLLPLALLLHAARPEVQLVESGGGLVQPGGSLRLSCAASGFSFSDFWMSWVRQAPGKGLEWVATISQAGSEKDYVDSVKGRFTISRDNAKKSLYLQMNSLRAEDTAVYYCASGVYSFDYRGQGTLVTVSSGTGGGGSGGGGSGGGGSEFEIVLTQSPATLSLSPGERATLSCSVSSSISSSNLHWYQQKPGQAPRLLIYATSNLASGIPARFSGSGSGTDFTLTISSLEPEDFAVYYCQQWSSYPHTFGGGTKVEIKRLEDLKNVFPPEVAVFEPSEAEISHTQKATLVCLATGFYPDHVELSWWVNGKEVHSGVCTDPQPLKEQPALNDSRYCLSSRLRVSATFWQNPRNHFRCQVQFYGLSENDEWTQDRAKPVTQIVSAEAWGRADDVIKIHWQEKKSNTILGSQEGNTMKTNDTYMKFSWLTVPEKSLDKEHRCIVRHENNKNGVDQEIIFPPIKTDVITMDPKDNCSKDANDTLLLQLTNTSAYYMYLLLLLKSVVYFAIITCCLLMAMVKRKDSRGRAKRSGSGATNFSLLKQAGDVEENPGPTSMDWIWRILFLVGAATGAHSGPQLQLQESGPGLVKPSETLSLTCTVSGDSISSGDYYWGWIRQPPGKGLEWIGHIYYSGVTYYNPSLKSRVTISVDTSRNQFSLKLSSVTAADTAVYYCTREDSSNWRSRGQGTLVTVSSGSGGGGSGGGGSGGGGSFEQVQLVQSGAEVKKPGASVKVSCKASGYTFTNYLIEWVRQAPGQGLEWMGLINPGSGGTNYNEKFKGRVTMTTDTSTSTAYMELRSLRSDDTAVYYCARRSPLGSWIYYAYDGVAYWGQGTLVTVSSTRIQNPDPAVYQLRDSKSSDKSVCLFTDFDSQTNVSQSKDSDVYITDKCVLDMRSMDFKSNSAVAWSNKSDFACANAFNNSIIPEDTFFPSPESSDSTDHVKPKETENTKQPSKSCHKPKAIVHTEKVNMMSLTVLGLRMLFAKTVAVNFLLTAKLFFLLTA

SEQ ID NO: 44763 - protein, 1008 aa, synthetic construct
MALPVTALLLPLALLLHAARPEVQLVESGGGLVQPGGSLRLSCAASGFSFSDFWMSWVRQAPGKGLEWVATISQAGSEKDYVDSVKGRFTISRDNAKKSLYLQMNSLRAEDTAVYYCASGVYSFDYRGQGTLVTVSSGTGGGGSGGGGSGGGGSEFEIVLTQSPATLSLSPGERATLSCSVSSSISSSNLHWYQQKPGQAPRLLIYATSNLASGIPARFSGSGSGTDFTLTISSLEPEDFAVYYCQQWSSYPHTFGGGTKVEIKRLEIQNPDPAVYQLRDSKSSDKSVCLFTDFDSQTNVSQSKDSDVYITDKCVLDMRSMDFKSNSAVAWSNKSDFACANAFNNSIIPEDTFFPSPESSDSTDHVKPKETENTKQPSKSCHKPKAIVHTEKVNMMSLTVLGLRMLFAKTVAVNFLLTAKLFFLLTARAKRSGSGVKQTLNFDLLKLAGDVESNPGPTSMDWIWRILFLVGAATGAHSGPQLQLQESGPGLVKPSETLSLTCTVSGDSISSGDYYWGWIRQPPGKGLEWIGHIYYSGVTYYNPSLKSRVTISVDTSRNQFSLKLSSVTAADTAVYYCTREDSSNWRSRGQGTLVTVSSGSGGGGSGGGGSGGGGSFEQVQLVQSGAEVKKPGASVKVSCKASGYTFTNYLIEWVRQAPGQGLEWMGLINPGSGGTNYNEKFKGRVTMTTDTSTSTAYMELRSLRSDDTAVYYCARRSPLGSWIYYAYDGVAYWGQGTLVTVSSTREDLKNVFPPEVAVFEPSEAEISHTQKATLVCLATGFYPDHVELSWWVNGKEVHSGVCTDPQPLKEQPALNDSRYCLSSRLRVSATFWQNPRNHFRCQVQFYGLSENDEWTQDRAKPVTQIVSAEAWGRADDVIKIHWQEKKSNTILGSQEGNTMKTNDTYMKFSWLTVPEKSLDKEHRCIVRHENNKNGVDQEIIFPPIKTDVITMDPKDNCSKDANDTLLLQLTNTSAYYMYLLLLLKSVVYFAIITCCLLMAMVKRKDSRG

SEQ ID NO: 44764 - protein, 730 aa, synthetic construct
MALPVTALLLPLALLLHAARPEIVLTQSPATLSLSPGERATLSCSVSSSISSSNLHWYQQKPGQAPRLLIYATSNLASGIPARFSGSGSGTDFTLTISSLEPEDFAVYYCQQWSSYPHTFGGGTKVEIKRLEDLKNVFPPEVAVFEPSEAEISHTQKATLVCLATGFYPDHVELSWWVNGKEVHSGVCTDPQPLKEQPALNDSRYCLSSRLRVSATFWQNPRNHFRCQVQFYGLSENDEWTQDRAKPVTQIVSAEAWGRADDVIKIHWQEKKSNTILGSQEGNTMKTNDTYMKFSWLTVPEKSLDKEHRCIVRHENNKNGVDQEIIFPPIKTDVITMDPKDNCSKDANDTLLLQLTNTSAYYMYLLLLLKSVVYFAIITCCLLRRTAFCCNGEKSRAKRSGSGATNFSLLKQAGDVEENPGPTSMDWIWRILFLVGAATGAHSFEQVQLVQSGAEVKKPGASVKVSCKASGYTFTNYLIEWVRQAPGQGLEWMGLINPGSGGTNYNEKFKGRVTMTTDTSTSTAYMELRSLRSDDTAVYYCARRSPLGSWIYYAYDGVAYWGQGTLVTVSSTRIQNPDPAVYQLRDSKSSDKSVCLFTDFDSQTNVSQSKDSDVYITDKCVLDMRSMDFKSNSAVAWSNKSDFACANAFNNSIIPEDTFFPSPESSDSTDHVKPKETENTKQPSKSCHKPKAIVHTEKVNMMSLTVLGLRMLFAKTVAVNFLLTAKLFFL

SEQ ID NO: 44765 - protein, 734 aa, synthetic construct
MALPVTALLLPLALLLHAARPEIVLTQSPATLSLSPGERATLSCSVSSSISSSNLHWYQQKPGQAPRLLIYATSNLASGIPARFSGSGSGTDFTLTISSLEPEDFAVYYCQQWSSYPHTFGGGTKVEIKRLEIQNPDPAVYQLRDSKSSDKSVCLFTDFDSQTNVSQSKDSDVYITDKCVLDMRSMDFKSNSAVAWSNKSDFACANAFNNSIIPEDTFFPSPESSDSTDHVKPKETENTKQPSKSCHKPKAIVHTEKVNMMSLTVLGLRMLFAKTVAVNFLLTAKLFFLRAKRSGSGVKQTLNFDLLKLAGDVESNPGPTSMDWIWRILFLVGAATGAHSFEQVQLVQSGAEVKKPGASVKVSCKASGYTFTNYLIEWVRQAPGQGLEWMGLINPGSGGTNYNEKFKGRVTMTTDTSTSTAYMELRSLRSDDTAVYYCARRSPLGSWIYYAYDGVAYWGQGTLVTVSSTREDLKNVFPPEVAVFEPSEAEISHTQKATLVCLATGFYPDHVELSWWVNGKEVHSGVCTDPQPLKEQPALNDSRYCLSSRLRVSATFWQNPRNHFRCQVQFYGLSENDEWTQDRAKPVTQIVSAEAWGRADDVIKIHWQEKKSNTILGSQEGNTMKTNDTYMKFSWLTVPEKSLDKEHRCIVRHENNKNGVDQEIIFPPIKTDVITMDPKDNCSKDANDTLLLQLTNTSAYYMYLLLLLKSVVYFAIITCCLLRRTAFCCNGEKS

SEQ ID NO: 44766 - protein, 865 aa, synthetic construct
MALPVTALLLPLALLLHAARPEVQLVESGGGLVQPGGSLRLSCAASGFSFSDFWMSWVRQAPGKGLEWVATISQAGSEKDYVDSVKGRFTISRDNAKKSLYLQMNSLRAEDTAVYYCASGVYSFDYRGQGTLVTVSSGTGGGGSGGGGSGGGGSEFEIVLTQSPATLSLSPGERATLSCSVSSSISSSNLHWYQQKPGQAPRLLIYATSNLASGIPARFSGSGSGTDFTLTISSLEPEDFAVYYCQQWSSYPHTFGGGTKVEIKRLEDLKNVFPPEVAVFEPSEAEISHTQKATLVCLATGFYPDHVELSWWVNGKEVHSGVCTDPQPLKEQPALNDSRYCLSSRLRVSATFWQNPRNHFRCQVQFYGLSENDEWTQDRAKPVTQIVSAEAWGRADDVIKIHWQEKKSNTILGSQEGNTMKTNDTYMKFSWLTVPEKSLDKEHRCIVRHENNKNGVDQEIIFPPIKTDVITMDPKDNCSKDANDTLLLQLTNTSAYYMYLLLLLKSVVYFAIITCCLLRRTAFCCNGEKSRAKRSGSGATNFSLLKQAGDVEENPGPTSMDWIWRILFLVGAATGAHSFEQVQLVQSGAEVKKPGASVKVSCKASGYTFTNYLIEWVRQAPGQGLEWMGLINPGSGGTNYNEKFKGRVTMTTDTSTSTAYMELRSLRSDDTAVYYCARRSPLGSWIYYAYDGVAYWGQGTLVTVSSTRIQNPDPAVYQLRDSKSSDKSVCLFTDFDSQTNVSQSKDSDVYITDKCVLDMRSMDFKSNSAVAWSNKSDFACANAFNNSIIPEDTFFPSPESSDSTDHVKPKETENTKQPSKSCHKPKAIVHTEKVNMMSLTVLGLRMLFAKTVAVNFLLTAKLFFL

SEQ ID NO: 44767 - protein, 1002 aa, synthetic construct
MALPVTALLLPLALLLHAARPEVQLVESGGGLVQPGGSLRLSCAASGFSFSDFWMSWVRQAPGKGLEWVATISQAGSEKDYVDSVKGRFTISRDNAKKSLYLQMNSLRAEDTAVYYCASGVYSFDYRGQGTLVTVSSGTGGGGSGGGGSGGGGSEFEIVLTQSPATLSLSPGERATLSCSVSSSISSSNLHWYQQKPGQAPRLLIYATSNLASGIPARFSGSGSGTDFTLTISSLEPEDFAVYYCQQWSSYPHTFGGGTKVEIKRLEDLKNVFPPEVAVFEPSEAEISHTQKATLVCLATGFYPDHVELSWWVNGKEVHSGVCTDPQPLKEQPALNDSRYCLSSRLRVSATFWQNPRNHFRCQVQFYGLSENDEWTQDRAKPVTQIVSAEAWGRADDVIKIHWQEKKSNTILGSQEGNTMKTNDTYMKFSWLTVPEKSLDKEHRCIVRHENNKNGVDQEIIFPPIKTDVITMDPKDNCSKDANDTLLLQLTNTSAYYMYLLLLLKSVVYFAIITCCLLRRTAFCCNGEKSRAKRSGSGATNFSLLKQAGDVEENPGPTSMDWIWRILFLVGAATGAHSGPQLQLQESGPGLVKPSETLSLTCTVSGDSISSGDYYWGWIRQPPGKGLEWIGHIYYSGVTYYNPSLKSRVTISVDTSRNQFSLKLSSVTAADTAVYYCTREDSSNWRSRGQGTLVTVSSGSGGGGSGGGGSGGGGSFEQVQLVQSGAEVKKPGASVKVSCKASGYTFTNYLIEWVRQAPGQGLEWMGLINPGSGGTNYNEKFKGRVTMTTDTSTSTAYMELRSLRSDDTAVYYCARRSPLGSWIYYAYDGVAYWGQGTLVTVSSTRIQNPDPAVYQLRDSKSSDKSVCLFTDFDSQTNVSQSKDSDVYITDKCVLDMRSMDFKSNSAVAWSNKSDFACANAFNNSIIPEDTFFPSPESSDSTDHVKPKETENTKQPSKSCHKPKAIVHTEKVNMMSLTVLGLRMLFAKTVAVNFLLTAKLFFL

SEQ ID NO: 44768 - protein, 628 aa, synthetic construct
MALPVTALLLPLALLLHAARPEIVLTQSPATLSLSPGERATLSCSVSSSISSSNLHWYQQKPGQAPRLLIYATSNLASGIPARFSGSGSGTDFTLTISSLEPEDFAVYYCQQWSSYPHTFGGGTKVEIKRLEDLKNVFPPEVAVFEPSEAEISHTQKATLVCLATGFYPDHVELSWWVNGKEVHSGVSTDPQPLKEQPALNDSRYCLSSRLRVSATFWQNPRNHFRCQVQFYGLSENDEWTQDRAKPVTQIVSAEAWGRADCDVKLVEKSFETDTNLNFQNLSVIGFRILLLKVAGFNLLMTLRLWSSRAKRSGSGATNFSLLKQAGDVEENPGPTSMDWIWRILFLVGAATGAHSFEQVQLVQSGAEVKKPGASVKVSCKASGYTFTNYLIEWVRQAPGQGLEWMGLINPGSGGTNYNEKFKGRVTMTTDTSTSTAYMELRSLRSDDTAVYYCARRSPLGSWIYYAYDGVAYWGQGTLVTVSSTRIQNPDPAVYQLRDSKSSDKSVCLFTDFDSQTNVSQSKDSDVYITDKTVLDMRSMDFKSNSAVAWSNKSDFACANAFNNSIIPEDTFFPSPESSCGFTSESYQQGVLSATILYEILLGKATLYAVLVSALVLMAMVKRKDSRG

SEQ ID NO: 44769 - protein, 628 aa, synthetic construct
MALPVTALLLPLALLLHAARPEIVLTQSPATLSLSPGERATLSCSVSSSISSSNLHWYQQKPGQAPRLLIYATSNLASGIPARFSGSGSGTDFTLTISSLEPEDFAVYYCQQWSSYPHTFGGGTKVEIKRLEDLKNVFPPEVAVFEPSEAEISHTQKATLVCLATGFYPDHVELSWWVNGKEVHSGVSTDPQPLKEQPALNDSRYCLSSRLRVSATFWQNPRNHFRCQVQFYGLSENDEWTQDRAKPVTQIVSAEAWGRADCGFTSESYQQGVLSATNLSVIGFRILLLKVAGFNLLMTLRLWSSRAKRSGSGATNFSLLKQAGDVEENPGPTSMDWIWRILFLVGAATGAHSFEQVQLVQSGAEVKKPGASVKVSCKASGYTFTNYLIEWVRQAPGQGLEWMGLINPGSGGTNYNEKFKGRVTMTTDTSTSTAYMELRSLRSDDTAVYYCARRSPLGSWIYYAYDGVAYWGQGTLVTVSSTRIQNPDPAVYQLRDSKSSDKSVCLFTDFDSQTNVSQSKDSDVYITDKTVLDMRSMDFKSNSAVAWSNKSDFACANAFNNSIIPEDTFFPSPESSCDVKLVEKSFETDTNLNFQILYEILLGKATLYAVLVSALVLMAMVKRKDSRG

SEQ ID NO: 44770 - protein, 732 aa, synthetic construct
MALPVTALLLPLALLLHAARPEIVLTQSPATLSLSPGERATLSCSVSSSISSSNLHWYQQKPGQAPRLLIYATSNLASGIPARFSGSGSGTDFTLTISSLEPEDFAVYYCQQWSSYPHTFGGGTKVEIKRLEDLKNVFPPEVAVFEPSEAEISHTQKATLVCLATGFYPDHVELSWWVNGKEVHSGVSTDPQPLKEQPALNDSRYCLSSRLRVSATFWQNPRNHFRCQVQFYGLSENDEWTQDRAKPVTQIVSAEAWGRADDVIKIHWQEKKSNTILGSQEGNTMKTNDTYMKFSWLTVPEKSLDKEHRCIVRHENNKNGVDQEIIFPPIKTDVITMDPKDNCSKDANDTLLLQLTNTSAYYMYLLLLLKSVVYFAIITCCLLMAMVKRKDSRGRAKRSGSGATNFSLLKQAGDVEENPGPTSMDWIWRILFLVGAATGAHSFEQVQLVQSGAEVKKPGASVKVSCKASGYTFTNYLIEWVRQAPGQGLEWMGLINPGSGGTNYNEKFKGRVTMTTDTSTSTAYMELRSLRSDDTAVYYCARRSPLGSWIYYAYDGVAYWGQGTLVTVSSTRIQNPDPAVYQLRDSKSSDKSVCLFTDFDSQTNVSQSKDSDVYITDKTVLDMRSMDFKSNSAVAWSNKSDFACANAFNNSIIPEDTFFPSPESSDSTDHVKPKETENTKQPSKSCHKPKAIVHTEKVNMMSLTVLGLRMLFAKTVAVNFLLTAKLFFLLTA

SEQ ID NO: 44771 - protein, 730 aa, synthetic construct
MALPVTALLLPLALLLHAARPEIVLTQSPATLSLSPGERATLSCSVSSSISSSNLHWYQQKPGQAPRLLIYATSNLASGIPARFSGSGSGTDFTLTISSLEPEDFAVYYCQQWSSYPHTFGGGTKVEIKRLEDLKNVFPPEVAVFEPSEAEISHTQKATLVCLATGFYPDHVELSWWVNGKEVHSGVSTDPQPLKEQPALNDSRYCLSSRLRVSATFWQNPRNHFRCQVQFYGLSENDEWTQDRAKPVTQIVSAEAWGRADDVIKIHWQEKKSNTILGSQEGNTMKTNDTYMKFSWLTVPEKSLDKEHRCIVRHENNKNGVDQEIIFPPIKTDVITMDPKDNCSKDANDTLLLQLTNTSAYYMYLLLLLKSVVYFAIITCCLLRRTAFCCNGEKSRAKRSGSGATNFSLLKQAGDVEENPGPTSMDWIWRILFLVGAATGAHSFEQVQLVQSGAEVKKPGASVKVSCKASGYTFTNYLIEWVRQAPGQGLEWMGLINPGSGGTNYNEKFKGRVTMTTDTSTSTAYMELRSLRSDDTAVYYCARRSPLGSWIYYAYDGVAYWGQGTLVTVSSTRIQNPDPAVYQLRDSKSSDKSVCLFTDFDSQTNVSQSKDSDVYITDKTVLDMRSMDFKSNSAVAWSNKSDFACANAFNNSIIPEDTFFPSPESSDSTDHVKPKETENTKQPSKSCHKPKAIVHTEKVNMMSLTVLGLRMLFAKTVAVNFLLTAKLFFL

SEQ ID NO: 44772 - protein, 873 aa, synthetic construct
MALPVTALLLPLALLLHAARPLEEDLKNVFPPEVAVFEPSEAEISHTQKATLVCLATGFYPDHVELSWWVNGKEVHSGVCTDPQPLKEQPALNDSRYCLSSRLRVSATFWQNPRNHFRCQVQFYGLSENDEWTQDRAKPVTQIVSAEAWGRADCGFTSESYQQGVLSATNLSVIGFRILLLKVAGFNLLMTLRLWSSRAKRSGSGATNFSLLKQAGDVEENPGPTSMALPVTALLLPLALLLHAARPEIVLTQSPATLSLSPGERATLSCSVSSSISSSNLHWYQQKPGQAPRLLIYATSNLASGIPARFSGSGSGTDFTLTISSLEPEDFAVYYCQQWSSYPHTFGGGTKVEIKRGGGGSGGGGSGGGGSQVQLVQSGAEVKKPGASVKVSCKASGYTFTNYLIEWVRQAPGQGLEWMGLINPGSGGTNYNEKFKGRVTMTTDTSTSTAYMELRSLRSDDTAVYYCARRSPLGSWIYYAYDGVAYWGQGTLVTVSSTRIQNPDPAVYQLRDSKSSDKSVCLFTDFDSQTNVSQSKDSDVYITDKCVLDMRSMDFKSNSAVAWSNKSDFACANAFNNSIIPEDTFFPSPESSCDVKLVEKSFETDTNLNFQILYEVIGFRILLLKVAGFNLLMTLRLWSSRAKRSGSGVKQTLNFDLLKLAGDVESNPGPSRGHMTEYKPTVRLATRDDVPRAVRTLAAAFADYPATRHTVDPDRHIERVTELQELFLTRVGLDIGKVWVADDGAAVAVWTTPESVEAGAVFAEIGPRMAELSGSRLAAQQQMEGLLAPHRPKEPAWFLATVGVSPDHQGKGLGSAVVLPGVEAAERAGVPAFLETSAPRNLPFYERLGFTVTADVEVPEGPRTWCMTRKPGA

SEQ ID NO: 44773 - protein, 873 aa, synthetic construct
MALPVTALLLPLALLLHAARPLEIQNPDPAVYQLRDSKSSDKSVCLFTDFDSQTNVSQSKDSDVYITDKCVLDMRSMDFKSNSAVAWSNKSDFACANAFNNSIIPEDTFFPSPESSCDVKLVEKSFETDTNLNFQILYEVIGFRILLLKVAGFNLLMTLRLWSSRAKRSGSGATNFSLLKQAGDVEENPGPTSMALPVTALLLPLALLLHAARPEIVLTQSPATLSLSPGERATLSCSVSSSISSSNLHWYQQKPGQAPRLLIYATSNLASGIPARFSGSGSGTDFTLTISSLEPEDFAVYYCQQWSSYPHTFGGGTKVEIKRGGGGSGGGGSGGGGSQVQLVQSGAEVKKPGASVKVSCKASGYTFTNYLIEWVRQAPGQGLEWMGLINPGSGGTNYNEKFKGRVTMTTDTSTSTAYMELRSLRSDDTAVYYCARRSPLGSWIYYAYDGVAYWGQGTLVTVSSTREDLKNVFPPEVAVFEPSEAEISHTQKATLVCLATGFYPDHVELSWWVNGKEVHSGVCTDPQPLKEQPALNDSRYCLSSRLRVSATFWQNPRNHFRCQVQFYGLSENDEWTQDRAKPVTQIVSAEAWGRADCGFTSESYQQGVLSATNLSVIGFRILLLKVAGFNLLMTLRLWSSRAKRSGSGVKQTLNFDLLKLAGDVESNPGPSRGHMTEYKPTVRLATRDDVPRAVRTLAAAFADYPATRHTVDPDRHIERVTELQELFLTRVGLDIGKVWVADDGAAVAVWTTPESVEAGAVFAEIGPRMAELSGSRLAAQQQMEGLLAPHRPKEPAWFLATVGVSPDHQGKGLGSAVVLPGVEAAERAGVPAFLETSAPRNLPFYERLGFTVTADVEVPEGPRTWCMTRKPGA

SEQ ID NO: 44774 - protein, 873 aa, synthetic construct; identical to SEQ ID NO: 44772

SEQ ID NO: 44775 - protein, 981 aa, synthetic construct
MALPVTALLLPLALLLHAARPLEEDLKNVFPPEVAVFEPSEAEISHTQKATLVCLATGFYPDHVELSWWVNGKEVHSGVSTDPQPLKEQPALNDSRYCLSSRLRVSATFWQNPRNHFRCQVQFYGLSENDEWTQDRAKPVTQIVSAEAWGRADDVIKIHWQEKKSNTILGSQEGNTMKTNDTYMKFSWLTVPEKSLDKEHRCIVRHENNKNGVDQEIIFPPIKTDVITMDPKDNCSKDANDTLLLQLTNTSAYYMYLLLLLKSVVYFAIITCCLLMAMVKRKDSRGRAKRSGSGATNFSLLKQAGDVEENPGPTSMALPVTALLLPLALLLHAARPEIVLTQSPATLSLSPGERATLSCSVSSSISSSNLHWYQQKPGQAPRLLIYATSNLASGIPARFSGSGSGTDFTLTISSLEPEDFAVYYCQQWSSYPHTFGGGTKVEIKRGGGGSGGGGSGGGGSQVQLVQSGAEVKKPGASVKVSCKASGYTFTNYLIEWVRQAPGQGLEWMGLINPGSGGTNYNEKFKGRVTMTTDTSTSTAYMELRSLRSDDTAVYYCARRSPLGSWIYYAYDGVAYWGQGTLVTVSSTRIQNPDPAVYQLRDSKSSDKSVCLFTDFDSQTNVSQSKDSDVYITDKTVLDMRSMDFKSNSAVAWSNKSDFACANAFNNSIIPEDTFFPSPESSDSTDHVKPKETENTKQPSKSCHKPKAIVHTEKVNMMSLTVLGLRMLFAKTVAVNFLLTAKLFFLLTARAKRSGSGVKQTLNFDLLKLAGDVESNPGPSRGHMTEYKPTVRLATRDDVPRAVRTLAAAFADYPATRHTVDPDRHIERVTELQELFLTRVGLDIGKVWVADDGAAVAVWTTPESVEAGAVFAEIGPRMAELSGSRLAAQQQMEGLLAPHRPKEPAWFLATVGVSPDHQGKGLGSAVVLPGVEAAERAGVPAFLETSAPRNLPFYERLGFTVTADVEVPEGPRTWCMTRKPGA

SEQ ID NO: 44776 - protein, 981 aa, synthetic construct
MALPVTALLLPLALLLHAARPLEIQNPDPAVYQLRDSKSSDKSVCLFTDFDSQTNVSQSKDSDVYITDKTVLDMRSMDFKSNSAVAWSNKSDFACANAFNNSIIPEDTFFPSPESSDSTDHVKPKETENTKQPSKSCHKPKAIVHTEKVNMMSLTVLGLRMLFAKTVAVNFLLTAKLFFLLTARAKRSGSGATNFSLLKQAGDVEENPGPTSMALPVTALLLPLALLLHAARPEIVLTQSPATLSLSPGERATLSCSVSSSISSSNLHWYQQKPGQAPRLLIYATSNLASGIPARFSGSGSGTDFTLTISSLEPEDFAVYYCQQWSSYPHTFGGGTKVEIKRGGGGSGGGGSGGGGSQVQLVQSGAEVKKPGASVKVSCKASGYTFTNYLIEWVRQAPGQGLEWMGLINPGSGGTNYNEKFKGRVTMTTDTSTSTAYMELRSLRSDDTAVYYCARRSPLGSWIYYAYDGVAYWGQGTLVTVSSTREDLKNVFPPEVAVFEPSEAEISHTQKATLVCLATGFYPDHVELSWWVNGKEVHSGVSTDPQPLKEQPALNDSRYCLSSRLRVSATFWQNPRNHFRCQVQFYGLSENDEWTQDRAKPVTQIVSAEAWGRADDVIKIHWQEKKSNTILGSQEGNTMKTNDTYMKFSWLTVPEKSLDKEHRCIVRHENNKNGVDQEIIFPPIKTDVITMDPKDNCSKDANDTLLLQLTNTSAYYMYLLLLLKSVVYFAIITCCLLMAMVKRKDSRGRAKRSGSGVKQTLNFDLLKLAGDVESNPGPSRGHMTEYKPTVRLATRDDVPRAVRTLAAAFADYPATRHTVDPDRHIERVTELQELFLTRVGLDIGKVWVADDGAAVAVWTTPESVEAGAVFAEIGPRMAELSGSRLAAQQQMEGLLAPHRPKEPAWFLATVGVSPDHQGKGLGSAVVLPGVEAAERAGVPAFLETSAPRNLPFYERLGFTVTADVEVPEGPRTWCMTRKPGA

SEQ ID NO: 44777 - protein, 979 aa, synthetic construct
MALPVTALLLPLALLLHAARPLEEDLKNVFPPEVAVFEPSEAEISHTQKATLVCLATGFYPDHVELSWWVNGKEVHSGVCTDPQPLKEQPALNDSRYCLSSRLRVSATFWQNPRNHFRCQVQFYGLSENDEWTQDRAKPVTQIVSAEAWGRADDVIKIHWQEKKSNTILGSQEGNTMKTNDTYMKFSWLTVPEKSLDKEHRCIVRHENNKNGVDQEIIFPPIKTDVITMDPKDNCSKDANDTLLLQLTNTSAYYMYLLLLLKSVVYFAIITCCLLRRTAFCCNGEKSRAKRSGSGATNFSLLKQAGDVEENPGPTSMALPVTALLLPLALLLHAARPEIVLTQSPATLSLSPGERATLSCSVSSSISSSNLHWYQQKPGQAPRLLIYATSNLASGIPARFSGSGSGTDFTLTISSLEPEDFAVYYCQQWSSYPHTFGGGTKVEIKRGGGGSGGGGSGGGGSQVQLVQSGAEVKKPGASVKVSCKASGYTFTNYLIEWVRQAPGQGLEWMGLINPGSGGTNYNEKFKGRVTMTTDTSTSTAYMELRSLRSDDTAVYYCARRSPLGSWIYYAYDGVAYWGQGTLVTVSSTRIQNPDPAVYQLRDSKSSDKSVCLFTDFDSQTNVSQSKDSDVYITDKCVLDMRSMDFKSNSAVAWSNKSDFACANAFNNSIIPEDTFFPSPESSDSTDHVKPKETENTKQPSKSCHKPKAIVHTEKVNMMSLTVLGLRMLFAKTVAVNFLLTAKLFFLRAKRSGSGVKQTLNFDLLKLAGDVESNPGPSRGHMTEYKPTVRLATRDDVPRAVRTLAAAFADYPATRHTVDPDRHIERVTELQELFLTRVGLDIGKVWVADDGAAVAVWTTPESVEAGAVFAEIGPRMAELSGSRLAAQQQMEGLLAPHRPKEPAWFLATVGVSPDHQGKGLGSAVVLPGVEAAERAGVPAFLETSAPRNLPFYERLGFTVTADVEVPEGPRTWCMTRKPGA

SEQ ID NO: 44778 - protein, 979 aa, synthetic construct
MALPVTALLLPLALLLHAARPLEIQNPDPAVYQLRDSKSSDKSVCLFTDFDSQTNVSQSKDSDVYITDKCVLDMRSMDFKSNSAVAWSNKSDFACANAFNNSIIPEDTFFPSPESSDSTDHVKPKETENTKQPSKSCHKPKAIVHTEKVNMMSLTVLGLRMLFAKTVAVNFLLTAKLFFLRAKRSGSGATNFSLLKQAGDVEENPGPTSMALPVTALLLPLALLLHAARPEIVLTQSPATLSLSPGERATLSCSVSSSISSSNLHWYQQKPGQAPRLLIYATSNLASGIPARFSGSGSGTDFTLTISSLEPEDFAVYYCQQWSSYPHTFGGGTKVEIKRGGGGSGGGGSGGGGSQVQLVQSGAEVKKPGASVKVSCKASGYTFTNYLIEWVRQAPGQGLEWMGLINPGSGGTNYNEKFKGRVTMTTDTSTSTAYMELRSLRSDDTAVYYCARRSPLGSWIYYAYDGVAYWGQGTLVTVSSTREDLKNVFPPEVAVFEPSEAEISHTQKATLVCLATGFYPDHVELSWWVNGKEVHSGVCTDPQPLKEQPALNDSRYCLSSRLRVSATFWQNPRNHFRCQVQFYGLSENDEWTQDRAKPVTQIVSAEAWGRADDVIKIHWQEKKSNTILGSQEGNTMKTNDTYMKFSWLTVPEKSLDKEHRCIVRHENNKNGVDQEIIFPPIKTDVITMDPKDNCSKDANDTLLLQLTNTSAYYMYLLLLLKSVVYFAIITCCLLRRTAFCCNGEKSRAKRSGSGVKQTLNFDLLKLAGDVESNPGPSRGHMTEYKPTVRLATRDDVPRAVRTLAAAFADYPATRHTVDPDRHIERVTELQELFLTRVGLDIGKVWVADDGAAVAVWTTPESVEAGAVFAEIGPRMAELSGSRLAAQQQMEGLLAPHRPKEPAWFLATVGVSPDHQGKGLGSAVVLPGVEAAERAGVPAFLETSAPRNLPFYERLGFTVTADVEVPEGPRTWCMTRKPGA

SEQ ID NO: 44779 - protein, 979 aa, synthetic construct
MALPVTALLLPLALLLHAARPLEEDLKNVFPPEVAVFEPSEAEISHTQKATLVCLATGFYPDHVELSWWVNGKEVHSGVSTDPQPLKEQPALNDSRYCLSSRLRVSATFWQNPRNHFRCQVQFYGLSENDEWTQDRAKPVTQIVSAEAWGRADDVIKIHWQEKKSNTILGSQEGNTMKTNDTYMKFSWLTVPEKSLDKEHRCIVRHENNKNGVDQEIIFPPIKTDVITMDPKDNCSKDANDTLLLQLTNTSAYYMYLLLLLKSVVYFAIITCCLLRRTAFCCNGEKSRAKRSGSGATNFSLLKQAGDVEENPGPTSMALPVTALLLPLALLLHAARPEIVLTQSPATLSLSPGERATLSCSVSSSISSSNLHWYQQKPGQAPRLLIYATSNLASGIPARFSGSGSGTDFTLTISSLEPEDFAVYYCQQWSSYPHTFGGGTKVEIKRGGGGSGGGGSGGGGSQVQLVQSGAEVKKPGASVKVSCKASGYTFTNYLIEWVRQAPGQGLEWMGLINPGSGGTNYNEKFKGRVTMTTDTSTSTAYMELRSLRSDDTAVYYCARRSPLGSWIYYAYDGVAYWGQGTLVTVSSTRIQNPDPAVYQLRDSKSSDKSVCLFTDFDSQTNVSQSKDSDVYITDKTVLDMRSMDFKSNSAVAWSNKSDFACANAFNNSIIPEDTFFPSPESSDSTDHVKPKETENTKQPSKSCHKPKAIVHTEKVNMMSLTVLGLRMLFAKTVAVNFLLTAKLFFLRAKRSGSGVKQTLNFDLLKLAGDVESNPGPSRGHMTEYKPTVRLATRDDVPRAVRTLAAAFADYPATRHTVDPDRHIERVTELQELFLTRVGLDIGKVWVADDGAAVAVWTTPESVEAGAVFAEIGPRMAELSGSRLAAQQQMEGLLAPHRPKEPAWFLATVGVSPDHQGKGLGSAVVLPGVEAAERAGVPAFLETSAPRNLPFYERLGFTVTADVEVPEGPRTWCMTRKPGA

SEQ ID NO: 44780 - protein, 979 aa, synthetic construct
MALPVTALLLPLALLLHAARPLEIQNPDPAVYQLRDSKSSDKSVCLFTDFDSQTNVSQSKDSDVYITDKTVLDMRSMDFKSNSAVAWSNKSDFACANAFNNSIIPEDTFFPSPESSDSTDHVKPKETENTKQPSKSCHKPKAIVHTEKVNMMSLTVLGLRMLFAKTVAVNFLLTAKLFFLRAKRSGSGATNFSLLKQAGDVEENPGPTSMALPVTALLLPLALLLHAARPEIVLTQSPATLSLSPGERATLSCSVSSSISSSNLHWYQQKPGQAPRLLIYATSNLASGIPARFSGSGSGTDFTLTISSLEPEDFAVYYCQQWSSYPHTFGGGTKVEIKRGGGGSGGGGSGGGGSQVQLVQSGAEVKKPGASVKVSCKASGYTFTNYLIEWVRQAPGQGLEWMGLINPGSGGTNYNEKFKGRVTMTTDTSTSTAYMELRSLRSDDTAVYYCARRSPLGSWIYYAYDGVAYWGQGTLVTVSSTREDLKNVFPPEVAVFEPSEAEISHTQKATLVCLATGFYPDHVELSWWVNGKEVHSGVSTDPQPLKEQPALNDSRYCLSSRLRVSATFWQNPRNHFRCQVQFYGLSENDEWTQDRAKPVTQIVSAEAWGRADDVIKIHWQEKKSNTILGSQEGNTMKTNDTYMKFSWLTVPEKSLDKEHRCIVRHENNKNGVDQEIIFPPIKTDVITMDPKDNCSKDANDTLLLQLTNTSAYYMYLLLLLKSVVYFAIITCCLLRRTAFCCNGEKSRAKRSGSGVKQTLNFDLLKLAGDVESNPGPSRGHMTEYKPTVRLATRDDVPRAVRTLAAAFADYPATRHTVDPDRHIERVTELQELFLTRVGLDIGKVWVADDGAAVAVWTTPESVEAGAVFAEIGPRMAELSGSRLAAQQQMEGLLAPHRPKEPAWFLATVGVSPDHQGKGLGSAVVLPGVEAAERAGVPAFLETSAPRNLPFYERLGFTVTADVEVPEGPRTWCMTRKPGA

SEQ ID NO: 44781 - protein, 877 aa, synthetic construct
MALPVTALLLPLALLLHAARPLEEDLKNVFPPEVAVFEPSKAEIAHTQKATLVCLATGFYPDHVELSWWVNGKEVHSGVCTDPQPLKEQPALNDSRYCLSSRLRVSATFWQNPRNHFRCQVQFYGLSENDEWTQDRAKPVTQIVSAEAWGRADCGITSASYHQGVLSATILYEILLGKATLYAVLVSALVLMAMVKRKDSRGRAKRSGSGATNFSLLKQAGDVEENPGPTSMALPVTALLLPLALLLHAARPEIVLTQSPATLSLSPGERATLSCSVSSSISSSNLHWYQQKPGQAPRLLIYATSNLASGIPARFSGSGSGTDFTLTISSLEPEDFAVYYCQQWSSYPHTFGGGTKVEIKRGGGGSGGGGSGGGGSQVQLVQSGAEVKKPGASVKVSCKASGYTFTNYLIEWVRQAPGQGLEWMGLINPGSGGTNYNEKFKGRVTMTTDTSTSTAYMELRSLRSDDTAVYYCARRSPLGSWIYYAYDGVAYWGQGTLVTVSSTRIQNPDPAVYQLRDSKSSDKSVCLFTDFDSQTNVSQSKDSDVYITDKCVLDMRSMDFKSNSAVAWSNKSDFACANAFNNSIIPEDTFFPSSDVPCDVKLVEKSFETDTNLNFQNLSVIGFRILLLKVAGFNLLMTLRLWSSRAKRSGSGVKQTLNFDLLKLAGDVESNPGPSRGHMTEYKPTVRLATRDDVPRAVRTLAAAFADYPATRHTVDPDRHIERVTELQELFLTRVGLDIGKVWVADDGAAVAVWTTPESVEAGAVFAEIGPRMAELSGSRLAAQQQMEGLLAPHRPKEPAWFLATVGVSPDHQGKGLGSAVVLPGVEAAERAGVPAFLETSAPRNLPFYERLGFTVTADVEVPEGPRTWCMTRKPGA

SEQ ID NO: 44782 - protein, 877 aa, synthetic construct
MALPVTALLLPLALLLHAARPLEIQNPDPAVYQLRDSKSSDKSVCLFTDFDSQTNVSQSKDSDVYITDKCVLDMRSMDFKSNSAVAWSNKSDFACANAFNNSIIPEDTFFPSSDVPCDVKLVEKSFETDTNLNFQNLSVIGFRILLLKVAGFNLLMTLRLWSSRAKRSGSGATNFSLLKQAGDVEENPGPTSMALPVTALLLPLALLLHAARPEIVLTQSPATLSLSPGERATLSCSVSSSISSSNLHWYQQKPGQAPRLLIYATSNLASGIPARFSGSGSGTDFTLTISSLEPEDFAVYYCQQWSSYPHTFGGGTKVEIKRGGGGSGGGGSGGGGSQVQLVQSGAEVKKPGASVKVSCKASGYTFTNYLIEWVRQAPGQGLEWMGLINPGSGGTNYNEKFKGRVTMTTDTSTSTAYMELRSLRSDDTAVYYCARRSPLGSWIYYAYDGVAYWGQGTLVTVSSTREDLKNVFPPEVAVFEPSKAEIAHTQKATLVCLATGFYPDHVELSWWVNGKEVHSGVCTDPQPLKEQPALNDSRYCLSSRLRVSATFWQNPRNHFRCQVQFYGLSENDEWTQDRAKPVTQIVSAEAWGRADCGITSASYHQGVLSATILYEILLGKATLYAVLVSALVLMAMVKRKDSRGRAKRSGSGVKQTLNFDLLKLAGDVESNPGPSRGHMTEYKPTVRLATRDDVPRAVRTLAAAFADYPATRHTVDPDRHIERVTELQELFLTRVGLDIGKVWVADDGAAVAVWTTPESVEAGAVFAEIGPRMAELSGSRLAAQQQMEGLLAPHRPKEPAWFLATVGVSPDHQGKGLGSAVVLPGVEAAERAGVPAFLETSAPRNLPFYERLGFTVTADVEVPEGPRTWCMTRKPGA

SEQ ID NO: 44783 - protein, 770 aa, synthetic construct
MALPVTALLLPLALLLHAARPLEQSFGLLDPKLCYLLDGILFIYGVILTALFLRVKFSRSADAPAYQQGQNQLYNELNLGRREEYDVLDKRRGRDPEMGGKPQRRKNPQEGLYNELQKDKMAEAYSEIGMKGERRRGKGHDGLYQGLSTATKDTYDALHMQALPPRRAKRSGSGATNFSLLKQAGDVEENPGPTSMALPVTALLLPLALLLHAARPEIVLTQSPATLSLSPGERATLSCSVSSSISSSNLHWYQQKPGQAPRLLIYATSNLASGIPARFSGSGSGTDFTLTISSLEPEDFAVYYCQQWSSYPHTFGGGTKVEIKRGGGGSGGGGSGGGGSQVQLVQSGAEVKKPGASVKVSCKASGYTFTNYLIEWVRQAPGQGLEWMGLINPGSGGTNYNEKFKGRVTMTTDTSTSTAYMELRSLRSDDTAVYYCARRSPLGSWIYYAYDGVAYWGQGTLVTVSSTRELGEPQLCYILDAILFLYGIVLTLLYCRLKIQVRKAAITSYEKSDGVYTGLSTRNQETYETLKHEKPPQRAKRSGSGVKQTLNFDLLKLAGDVESNPGPSRGHMTEYKPTVRLATRDDVPRAVRTLAAAFADYPATRHTVDPDRHIERVTELQELFLTRVGLDIGKVWVADDGAAVAVWTTPESVEAGAVFAEIGPRMAELSGSRLAAQQQMEGLLAPHRPKEPAWFLATVGVSPDHQGKGLGSAVVLPGVEAAERAGVPAFLETSAPRNLPFYERLGFTVTADVEVPEGPRTWCMTRKPGA

SEQ ID NO: 44784 - protein, 981 aa, synthetic construct; identical to SEQ ID NO: 44775

SEQ ID NO: 44785 - protein, 981 aa, synthetic construct; identical to SEQ ID NO: 44776

SEQ ID NO: 44786 - protein, 980 aa, synthetic construct
MALPVTALLLPLALLLHAARPLEEEDLKNVFPPEVAVFEPSEAEISHTQKATLVCLATGFYPDHVELSWWVNGKEVHSGVCTDPQPLKEQPALNDSRYCLSSRLRVSATFWQNPRNHFRCQVQFYGLSENDEWTQDRAKPVTQIVSAEAWGRADDVIKIHWQEKKSNTILGSQEGNTMKTNDTYMKFSWLTVPEKSLDKEHRCIVRHENNKNGVDQEIIFPPIKTDVITMDPKDNCSKDANDTLLLQLTNTSAYYMYLLLLLKSVVYFAIITCCLLRRTAFCCNGEKSRAKRSGSGATNFSLLKQAGDVEENPGPTSMALPVTALLLPLALLLHAARPEIVLTQSPATLSLSPGERATLSCSVSSSISSSNLHWYQQKPGQAPRLLIYATSNLASGIPARFSGSGSGTDFTLTISSLEPEDFAVYYCQQWSSYPHTFGGGTKVEIKRGGGGSGGGGSGGGGSQVQLVQSGAEVKKPGASVKVSCKASGYTFTNYLIEWVRQAPGQGLEWMGLINPGSGGTNYNEKFKGRVTMTTDTSTSTAYMELRSLRSDDTAVYYCARRSPLGSWIYYAYDGVAYWGQGTLVTVSSTRIQNPDPAVYQLRDSKSSDKSVCLFTDFDSQTNVSQSKDSDVYITDKCVLDMRSMDFKSNSAVAWSNKSDFACANAFNNSIIPEDTFFPSPESSDSTDHVKPKETENTKQPSKSCHKPKAIVHTEKVNMMSLTVLGLRMLFAKTVAVNFLLTAKLFFLRAKRSGSGVKQTLNFDLLKLAGDVESNPGPSRGHMTEYKPTVRLATRDDVPRAVRTLAAAFADYPATRHTVDPDRHIERVTELQELFLTRVGLDIGKVWVADDGAAVAVWTTPESVEAGAVFAEIGPRMAELSGSRLAAQQQMEGLLAPHRPKEPAWFLATVGVSPDHQGKGLGSAVVLPGVEAAERAGVPAFLETSAPRNLPFYERLGFTVTADVEVPEGPRTWCMTRKPGA

SEQ ID NO: 44787 - protein, 980 aa, synthetic construct
MALPVTALLLPLALLLHAARPLEIQNPDPAVYQLRDSKSSDKSVCLFTDFDSQTNVSQSKDSDVYITDKCVLDMRSMDFKSNSAVAWSNKSDFACANAFNNSIIPEDTFFPSPESSDSTDHVKPKETENTKQPSKSCHKPKAIVHTEKVNMMSLTVLGLRMLFAKTVAVNFLLTAKLFFLRAKRSGSGATNFSLLKQAGDVEENPGPTSMALPVTALLLPLALLLHAARPEIVLTQSPATLSLSPGERATLSCSVSSSISSSNLHWYQQKPGQAPRLLIYATSNLASGIPARFSGSGSGTDFTLTISSLEPEDFAVYYCQQWSSYPHTFGGGTKVEIKRGGGGSGGGGSGGGGSQVQLVQSGAEVKKPGASVKVSCKASGYTFTNYLIEWVRQAPGQGLEWMGLINPGSGGTNYNEKFKGRVTMTTDTSTSTAYMELRSLRSDDTAVYYCARRSPLGSWIYYAYDGVAYWGQGTLVTVSSTREEDLKNVFPPEVAVFEPSEAEISHTQKATLVCLATGFYPDHVELSWWVNGKEVHSGVCTDPQPLKEQPALNDSRYCLSSRLRVSATFWQNPRNHFRCQVQFYGLSENDEWTQDRAKPVTQIVSAEAWGRADDVIKIHWQEKKSNTILGSQEGNTMKTNDTYMKFSWLTVPEKSLDKEHRCIVRHENNKNGVDQEIIFPPIKTDVITMDPKDNCSKDANDTLLLQLTNTSAYYMYLLLLLKSVVYFAIITCCLLRRTAFCCNGEKSRAKRSGSGVKQTLNFDLLKLAGDVESNPGPSRGHMTEYKPTVRLATRDDVPRAVRTLAAAFADYPATRHTVDPDRHIERVTELQELFLTRVGLDIGKVWVADDGAAVAVWTTPESVEAGAVFAEIGPRMAELSGSRLAAQQQMEGLLAPHRPKEPAWFLATVGVSPDHQGKGLGSAVVLPGVEAAERAGVPAFLETSAPRNLPFYERLGFTVTADVEVPEGPRTWCMTRKPGA

SEQ ID NO: 44788 - protein, 877 aa, synthetic construct
MALPVTALLLPLALLLHAARPLEEDLKNVFPPEVAVFEPSEAEISHTQKATLVCLATGFYPDHVELSWWVNGKEVHSGVSTDPQPLKEQPALNDSRYCLSSRLRVSATFWQNPRNHFRCQVQFYGLSENDEWTQDRAKPVTQIVSAEAWGRADCGFTSESYQQGVLSATNLSVIGFRILLLKVAGFNLLMTLRLWSSRAKRSGSGATNFSLLKQAGDVEENPGPTSMALPVTALLLPLALLLHAARPEIVLTQSPATLSLSPGERATLSCSVSSSISSSNLHWYQQKPGQAPRLLIYATSNLASGIPARFSGSGSGTDFTLTISSLEPEDFAVYYCQQWSSYPHTFGGGTKVEIKRGGGGSGGGGSGGGGSQVQLVQSGAEVKKPGASVKVSCKASGYTFTNYLIEWVRQAPGQGLEWMGLINPGSGGTNYNEKFKGRVTMTTDTSTSTAYMELRSLRSDDTAVYYCARRSPLGSWIYYAYDGVAYWGQGTLVTVSSTRIQNPDPAVYQLRDSKSSDKSVCLFTDFDSQTNVSQSKDSDVYITDKTVLDMRSMDFKSNSAVAWSNKSDFACANAFNNSIIPEDTFFPSPESSCDVKLVEKSFETDTNLNFQILYEILLGKATLYAVLVSALVLMAMVKRKDSRGRAKRSGSGVKQTLNFDLLKLAGDVESNPGPSRGHMTEYKPTVRLATRDDVPRAVRTLAAAFADYPATRHTVDPDRHIERVTELQELFLTRVGLDIGKVWVADDGAAVAVWTTPESVEAGAVFAEIGPRMAELSGSRLAAQQQMEGLLAPHRPKEPAWFLATVGVSPDHQGKGLGSAVVLPGVEAAERAGVPAFLETSAPRNLPFYERLGFTVTADVEVPEGPRTWCMTRKPGA

SEQ ID NO: 44789 - protein, 877 aa, synthetic construct
MALPVTALLLPLALLLHAARPLEIQNPDPAVYQLRDSKSSDKSVCLFTDFDSQTNVSQSKDSDVYITDKTVLDMRSMDFKSNSAVAWSNKSDFACANAFNNSIIPEDTFFPSPESSCDVKLVEKSFETDTNLNFQILYEILLGKATLYAVLVSALVLMAMVKRKDSRGRAKRSGSGATNFSLLKQAGDVEENPGPTSMALPVTALLLPLALLLHAARPEIVLTQSPATLSLSPGERATLSCSVSSSISSSNLHWYQQKPGQAPRLLIYATSNLASGIPARFSGSGSGTDFTLTISSLEPEDFAVYYCQQWSSYPHTFGGGTKVEIKRGGGGSGGGGSGGGGSQVQLVQSGAEVKKPGASVKVSCKASGYTFTNYLIEWVRQAPGQGLEWMGLINPGSGGTNYNEKFKGRVTMTTDTSTSTAYMELRSLRSDDTAVYYCARRSPLGSWIYYAYDGVAYWGQGTLVTVSSTREDLKNVFPPEVAVFEPSEAEISHTQKATLVCLATGFYPDHVELSWWVNGKEVHSGVSTDPQPLKEQPALNDSRYCLSSRLRVSATFWQNPRNHFRCQVQFYGLSENDEWTQDRAKPVTQIVSAEAWGRADCGFTSESYQQGVLSATNLSVIGFRILLLKVAGFNLLMTLRLWSSRAKRSGSGVKQTLNFDLLKLAGDVESNPGPSRGHMTEYKPTVRLATRDDVPRAVRTLAAAFADYPATRHTVDPDRHIERVTELQELFLTRVGLDIGKVWVADDGAAVAVWTTPESVEAGAVFAEIGPRMAELSGSRLAAQQQMEGLLAPHRPKEPAWFLATVGVSPDHQGKGLGSAVVLPGVEAAERAGVPAFLETSAPRNLPFYERLGFTVTADVEVPEGPRTWCMTRKPGA

SEQ ID NO: 44790 - protein, 877 aa, synthetic construct
MALPVTALLLPLALLLHAARPLEEDLKNVFPPEVAVFEPSEAEISHTQKATLVCLATGFYPDHVELSWWVNGKEVHSGVCTDPQPLKEQPALNDSRYCLSSRLRVSATFWQNPRNHFRCQVQFYGLSENDEWTQDRAKPVTQIVSAEAWGRADCDVKLVEKSFETDTNLNFQNLSVIGFRILLLKVAGFNLLMTLRLWSSRAKRSGSGATNFSLLKQAGDVEENPGPTSMALPVTALLLPLALLLHAARPEIVLTQSPATLSLSPGERATLSCSVSSSISSSNLHWYQQKPGQAPRLLIYATSNLASGIPARFSGSGSGTDFTLTISSLEPEDFAVYYCQQWSSYPHTFGGGTKVEIKRGGGGSGGGGSGGGGSQVQLVQSGAEVKKPGASVKVSCKASGYTFTNYLIEWVRQAPGQGLEWMGLINPGSGGTNYNEKFKGRVTMTTDTSTSTAYMELRSLRSDDTAVYYCARRSPLGSWIYYAYDGVAYWGQGTLVTVSSTRIQNPDPAVYQLRDSKSSDKSVCLFTDFDSQTNVSQSKDSDVYITDKCVLDMRSMDFKSNSAVAWSNKSDFACANAFNNSIIPEDTFFPSPESSCGFTSESYQQGVLSATILYEILLGKATLYAVLVSALVLMAMVKRKDSRGRAKRSGSGVKQTLNFDLLKLAGDVESNPGPSRGHMTEYKPTVRLATRDDVPRAVRTLAAAFADYPATRHTVDPDRHIERVTELQELFLTRVGLDIGKVWVADDGAAVAVWTTPESVEAGAVFAEIGPRMAELSGSRLAAQQQMEGLLAPHRPKEPAWFLATVGVSPDHQGKGLGSAVVLPGVEAAERAGVPAFLETSAPRNLPFYERLGFTVTADVEVPEGPRTWCMTRKPGA

SEQ ID NO: 44791 - protein, 877 aa, synthetic construct
MALPVTALLLPLALLLHAARPLEEDLKNVFPPEVAVFEPSEAEISHTQKATLVCLATGFYPDHVELSWWVNGKEVHSGVSTDPQPLKEQPALNDSRYCLSSRLRVSATFWQNPRNHFRCQVQFYGLSENDEWTQDRAKPVTQIVSAEAWGRADCDVKLVEKSFETDTNLNFQNLSVIGFRILLLKVAGFNLLMTLRLWSSRAKRSGSGATNFSLLKQAGDVEENPGPTSMALPVTALLLPLALLLHAARPEIVLTQSPATLSLSPGERATLSCSVSSSISSSNLHWYQQKPGQAPRLLIYATSNLASGIPARFSGSGSGTDFTLTISSLEPEDFAVYYCQQWSSYPHTFGGGTKVEIKRGGGGSGGGGSGGGGSQVQLVQSGAEVKKPGASVKVSCKASGYTFTNYLIEWVRQAPGQGLEWMGLINPGSGGTNYNEKFKGRVTMTTDTSTSTAYMELRSLRSDDTAVYYCARRSPLGSWIYYAYDGVAYWGQGTLVTVSSTRIQNPDPAVYQLRDSKSSDKSVCLFTDFDSQTNVSQSKDSDVYITDKTVLDMRSMDFKSNSAVAWSNKSDFACANAFNNSIIPEDTFFPSPESSCGFTSESYQQGVLSATILYEILLGKATLYAVLVSALVLMAMVKRKDSRGRAKRSGSGVKQTLNFDLLKLAGDVESNPGPSRGHMTEYKPTVRLATRDDVPRAVRTLAAAFADYPATRHTVDPDRHIERVTELQELFLTRVGLDIGKVWVADDGAAVAVWTTPESVEAGAVFAEIGPRMAELSGSRLAAQQQMEGLLAPHRPKEPAWFLATVGVSPDHQGKGLGSAVVLPGVEAAERAGVPAFLETSAPRNLPFYERLGFTVTADVEVPEGPRTWCMTRKPGA

SEQ ID NO: 44792 - protein, 980 aa, synthetic construct
MALPVTALLLPLALLLHAARPLEEEDLKNVFPPEVAVFEPSEAEISHTQKATLVCLATGFYPDHVELSWWVNGKEVHSGVSTDPQPLKEQPALNDSRYCLSSRLRVSATFWQNPRNHFRCQVQFYGLSENDEWTQDRAKPVTQIVSAEAWGRADDVIKIHWQEKKSNTILGSQEGNTMKTNDTYMKFSWLTVPEKSLDKEHRCIVRHENNKNGVDQEIIFPPIKTDVITMDPKDNCSKDANDTLLLQLTNTSAYYMYLLLLLKSVVYFAIITCCLLRRTAFCCNGEKSRAKRSGSGATNFSLLKQAGDVEENPGPTSMALPVTALLLPLALLLHAARPEIVLTQSPATLSLSPGERATLSCSVSSSISSSNLHWYQQKPGQAPRLLIYATSNLASGIPARFSGSGSGTDFTLTISSLEPEDFAVYYCQQWSSYPHTFGGGTKVEIKRGGGGSGGGGSGGGGSQVQLVQSGAEVKKPGASVKVSCKASGYTFTNYLIEWVRQAPGQGLEWMGLINPGSGGTNYNEKFKGRVTMTTDTSTSTAYMELRSLRSDDTAVYYCARRSPLGSWIYYAYDGVAYWGQGTLVTVSSTRIQNPDPAVYQLRDSKSSDKSVCLFTDFDSQTNVSQSKDSDVYITDKTVLDMRSMDFKSNSAVAWSNKSDFACANAFNNSIIPEDTFFPSPESSDSTDHVKPKETENTKQPSKSCHKPKAIVHTEKVNMMSLTVLGLRMLFAKTVAVNFLLTAKLFFLRAKRSGSGVKQTLNFDLLKLAGDVESNPGPSRGHMTEYKPTVRLATRDDVPRAVRTLAAAFADYPATRHTVDPDRHIERVTELQELFLTRVGLDIGKVWVADDGAAVAVWTTPESVEAGAVFAEIGPRMAELSGSRLAAQQQMEGLLAPHRPKEPAWFLATVGVSPDHQGKGLGSAVVLPGVEAAERAGVPAFLETSAPRNLPFYERLGFTVTADVEVPEGPRTWCMTRKPGA

SEQ ID NO: 44793 - protein, 877 aa, synthetic construct
MALPVTALLLPLALLLHAARPLEEDLKNVFPPEVAVFEPSEAEISHTQKATLVCLATGFYPDHVELSWWVNGKEVHSGVCTDPQPLKEQPALNDSRYCLSSRLRVSATFWQNPRNHFRCQVQFYGLSENDEWTQDRAKPVTQIVSAEAWGRADCGFTSESYQQGVLSATNLSVIGFRILLLKVAGFNLLMTLRLWSSRAKRSGSGATNFSLLKQAGDVEENPGPTSMALPVTALLLPLALLLHAARPEIVLTQSPATLSLSPGERATLSCSVSSSISSSNLHWYQQKPGQAPRLLIYATSNLASGIPARFSGSGSGTDFTLTISSLEPEDFAVYYCQQWSSYPHTFGGGTKVEIKRGGGGSGGGGSGGGGSQVQLVQSGAEVKKPGASVKVSCKASGYTFTNYLIEWVRQAPGQGLEWMGLINPGSGGTNYNEKFKGRVTMTTDTSTSTAYMELRSLRSDDTAVYYCARRSPLGSWIYYAYDGVAYWGQGTLVTVSSTRIQNPDPAVYQLRDSKSSDKSVCLFTDFDSQTNVSQSKDSDVYITDKCVLDMRSMDFKSNSAVAWSNKSDFACANAFNNSIIPEDTFFPSPESSCDVKLVEKSFETDTNLNFQILYEILLGKATLYAVLVSALVLMAMVKRKDSRGRAKRSGSGVKQTLNFDLLKLAGDVESNPGPSRGHMTEYKPTVRLATRDDVPRAVRTLAAAFADYPATRHTVDPDRHIERVTELQELFLTRVGLDIGKVWVADDGAAVAVWTTPESVEAGAVFAEIGPRMAELSGSRLAAQQQMEGLLAPHRPKEPAWFLATVGVSPDHQGKGLGSAVVLPGVEAAERAGVPAFLETSAPRNLPFYERLGFTVTADVEVPEGPRTWCMTRKPGA

SEQ ID NO: 44794 - protein, 906 aa, synthetic construct
MALPVTALLLPLALLLHAARPLEEEDLKNVFPPEVAVFEPSEAEISHTQKATLVCLATGFYPDHVELSWWVNGKEVHSGVCTDPQPLKEQPALNDSRYCLSSRLRVSATFWQNPRNHFRCQVQFYGLSENDEWTQDRAKPVTQIVSAEAWGRADCGFTSESYQQGVLSATNLSVIGFRILLLKVAGFNLLMTLRLWSSRAKRSGSGATNFSLLKQAGDVEENPGPTSMALPVTALLLPLALLLHAARPEIVLTQSPATLSLSPGERATLSCSVSSSISSSNLHWYQQKPGQAPRLLIYATSNLASGIPARFSGSGSGTDFTLTISSLEPEDFAVYYCQQWSSYPHTFGGGTKVEIKRGGGGSGGGGSGGGGSQVQLVQSGAEVKKPGASVKVSCKASGYTFTNYLIEWVRQAPGQGLEWMGLINPGSGGTNYNEKFKGRVTMTTDTSTSTAYMELRSLRSDDTAVYYCARRSPLGSWIYYAYDGVAYWGQGTLVTVSSTRGQPKANPTVTLFPPSSEELQANKATLVCLISDFYPGAVTVAWKADGSPVKAGVETTKPSKQSNNKYAASSYLSLTPEQWKSHRSYSCQVTHEGSTVEKTVAPTECSPIKTDVITMDPKDNCSKDANDTLLLQLTNTSAYYMYLLLLLKSVVYFAIITCCLLRRTAFCCNGEKSRAKRSGSGVKQTLNFDLLKLAGDVESNPGPSRGHMTEYKPTVRLATRDDVPRAVRTLAAAFADYPATRHTVDPDRHIERVTELQELFLTRVGLDIGKVWVADDGAAVAVWTTPESVEAGAVFAEIGPRMAELSGSRLAAQQQMEGLLAPHRPKEPAWFLATVGVSPDHQGKGLGSAVVLPGVEAAERAGVPAFLETSAPRNLPFYERLGFTVTADVEVPEGPRTWCMTRKPGA

SEQ ID NO: 44795 - protein, 906 aa, synthetic construct
MALPVTALLLPLALLLHAARPLEGQPKANPTVTLFPPSSEELQANKATLVCLISDFYPGAVTVAWKADGSPVKAGVETTKPSKQSNNKYAASSYLSLTPEQWKSHRSYSCQVTHEGSTVEKTVAPTECSPIKTDVITMDPKDNCSKDANDTLLLQLTNTSAYYMYLLLLLKSVVYFAIITCCLLRRTAFCCNGEKSRAKRSGSGATNFSLLKQAGDVEENPGPTSMALPVTALLLPLALLLHAARPEIVLTQSPATLSLSPGERATLSCSVSSSISSSNLHWYQQKPGQAPRLLIYATSNLASGIPARFSGSGSGTDFTLTISSLEPEDFAVYYCQQWSSYPHTFGGGTKVEIKRGGGGSGGGGSGGGGSQVQLVQSGAEVKKPGASVKVSCKASGYTFTNYLIEWVRQAPGQGLEWMGLINPGSGGTNYNEKFKGRVTMTTDTSTSTAYMELRSLRSDDTAVYYCARRSPLGSWIYYAYDGVAYWGQGTLVTVSSTREEDLKNVFPPEVAVFEPSEAEISHTQKATLVCLATGFYPDHVELSWWVNGKEVHSGVCTDPQPLKEQPALNDSRYCLSSRLRVSATFWQNPRNHFRCQVQFYGLSENDEWTQDRAKPVTQIVSAEAWGRADCGFTSESYQQGVLSATNLSVIGFRILLLKVAGFNLLMTLRLWSSRAKRSGSGVKQTLNFDLLKLAGDVESNPGPSRGHMTEYKPTVRLATRDDVPRAVRTLAAAFADYPATRHTVDPDRHIERVTELQELFLTRVGLDIGKVWVADDGAAVAVWTTPESVEAGAVFAEIGPRMAELSGSRLAAQQQMEGLLAPHRPKEPAWFLATVGVSPDHQGKGLGSAVVLPGVEAAERAGVPAFLETSAPRNLPFYERLGFTVTADVEVPEGPRTWCMTRKPGA

SEQ ID NO: 44796 - protein, 903 aa, synthetic construct
MALPVTALLLPLALLLHAARPLEEASTKGPSVFPLAPSSKSTSGGTAALGCLVKDYFPEPVTVSWNSGALTSGVHTFPAVLQSSGLYSLSSVVTVPSSSLGTQTYICNVNHKPSNTKVDKRVEPKSCPIKTDVITMDPKDNCSKDANDTLLLQLTNTSAYYMYLLLLLKSVVYFAIITCCLLRRTAFCCNGEKSRAKRSGSGATNFSLLKQAGDVEENPGPTSMALPVTALLLPLALLLHAARPEIVLTQSPATLSLSPGERATLSCSVSSSISSSNLHWYQQKPGQAPRLLIYATSNLASGIPARFSGSGSGTDFTLTISSLEPEDFAVYYCQQWSSYPHTFGGGTKVEIKRGGGGSGGGGSGGGGSQVQLVQSGAEVKKPGASVKVSCKASGYTFTNYLIEWVRQAPGQGLEWMGLINPGSGGTNYNEKFKGRVTMTTDTSTSTAYMELRSLRSDDTAVYYCARRSPLGSWIYYAYDGVAYWGQGTLVTVSSTRGQPKANPTVTLFPPSSEELQANKATLVCLISDFYPGAVTVAWKADGSPVKAGVETTKPSKQSNNKYAASSYLSLTPEQWKSHRSYSCQVTHEGSTVEKTVAPTECSEVKTDSTDHVKPKETENTKQPSKSCHKPKAIVHTEKVNMMSLTVLGLRMLFAKTVAVNFLLTAKLFFLRAKRSGSGVKQTLNFDLLKLAGDVESNPGPSRGHMTEYKPTVRLATRDDVPRAVRTLAAAFADYPATRHTVDPDRHIERVTELQELFLTRVGLDIGKVWVADDGAAVAVWTTPESVEAGAVFAEIGPRMAELSGSRLAAQQQMEGLLAPHRPKEPAWFLATVGVSPDHQGKGLGSAVVLPGVEAAERAGVPAFLETSAPRNLPFYERLGFTVTADVEVPEGPRTWCMTRKPGA

SEQ ID NO: 44797 - protein, 881 aa, synthetic construct
MALPVTALLLPLALLLHAARPLEEASTKGPSVFPLAPSSKSTSGGTAALGCLVKDYFPEPVTVSWNSGALTSGVHTFPAVLQSSGLYSLSSVVTVPSSSLGTQTYICNVNHKPSNTKVDKRVEPKSCGRADCGFTSESYQQGVLSATILYEILLGKATLYAVLVSALVLMAMVKRKDSRGRAKRSGSGATNFSLLKQAGDVEENPGPTSMALPVTALLLPLALLLHAARPEIVLTQSPATLSLSPGERATLSCSVSSSISSSNLHWYQQKPGQAPRLLIYATSNLASGIPARFSGSGSGTDFTLTISSLEPEDFAVYYCQQWSSYPHTFGGGTKVEIKRGGGGSGGGGSGGGGSQVQLVQSGAEVKKPGASVKVSCKASGYTFTNYLIEWVRQAPGQGLEWMGLINPGSGGTNYNEKFKGRVTMTTDTSTSTAYMELRSLRSDDTAVYYCARRSPLGSWIYYAYDGVAYWGQGTLVTVSSTRGQPKANPTVTLFPPSSEELQANKATLVCLISDFYPGAVTVAWKADGSPVKAGVETTKPSKQSNNKYAASSYLSLTPEQWKSHRSYSCQVTHEGSTVEKTVAPTECSIPEDTFFPSPESSCDVKLVEKSFETDTNLNFQNLSVIGFRILLLKVAGFNLLMTLRLWSSRAKRSGSGVKQTLNFDLLKLAGDVESNPGPSRGHMTEYKPTVRLATRDDVPRAVRTLAAAFADYPATRHTVDPDRHIERVTELQELFLTRVGLDIGKVWVADDGAAVAVWTTPESVEAGAVFAEIGPRMAELSGSRLAAQQQMEGLLAPHRPKEPAWFLATVGVSPDHQGKGLGSAVVLPGVEAAERAGVPAFLETSAPRNLPFYERLGFTVTADVEVPEGPRTWCMTRKPGA

SEQ ID NO: 44798 - protein, 881 aa, synthetic construct
MALPVTALLLPLALLLHAARPLEEASTKGPSVFPLAPSSKSTSGGTAALGCLVKDYFPEPVTVSWNSGALTSGVHTFPAVLQSSGLYSLSSVVTVPSSSLGTQTYICNVNHKPSNTKVDKRVEPKSCIPEDTFFPSPESSCDVKLVEKSFETDTNLNFQNLSVIGFRILLLKVAGFNLLMTLRLWSSRAKRSGSGATNFSLLKQAGDVEENPGPTSMALPVTALLLPLALLLHAARPEIVLTQSPATLSLSPGERATLSCSVSSSISSSNLHWYQQKPGQAPRLLIYATSNLASGIPARFSGSGSGTDFTLTISSLEPEDFAVYYCQQWSSYPHTFGGGTKVEIKRGGGGSGGGGSGGGGSQVQLVQSGAEVKKPGASVKVSCKASGYTFTNYLIEWVRQAPGQGLEWMGLINPGSGGTNYNEKFKGRVTMTTDTSTSTAYMELRSLRSDDTAVYYCARRSPLGSWIYYAYDGVAYWGQGTLVTVSSTRGQPKANPTVTLFPPSSEELQANKATLVCLISDFYPGAVTVAWKADGSPVKAGVETTKPSKQSNNKYAASSYLSLTPEQWKSHRSYSCQVTHEGSTVEKTVAPTECSGRADCGFTSESYQQGVLSATILYEILLGKATLYAVLVSALVLMAMVKRKDSRGRAKRSGSGVKQTLNFDLLKLAGDVESNPGPSRGHMTEYKPTVRLATRDDVPRAVRTLAAAFADYPATRHTVDPDRHIERVTELQELFLTRVGLDIGKVWVADDGAAVAVWTTPESVEAGAVFAEIGPRMAELSGSRLAAQQQMEGLLAPHRPKEPAWFLATVGVSPDHQGKGLGSAVVLPGVEAAERAGVPAFLETSAPRNLPFYERLGFTVTADVEVPEGPRTWCMTRKPGA

SEQ ID NO: 44799 - protein, 628 aa, synthetic construct
MALPVTALLLPLALLLHAARPEIVLTQSPATLSLSPGERATLSCSVSSSISSSNLHWYQQKPGQAPRLLIYATSNLASGIPARFSGSGSGTDFTLTISSLEPEDFAVYYCQQWSSYPHTFGGGTKVEIKRLEDLKNVFPPEVAVFEPSEAEISHTQKATLVCLATGFYPDHVELSWWVNGKEVHSGVCTDPQPLKEQPALNDSRYCLSSRLRVSATFWQNPRNHFRCQVQFYGLSENDEWTQDRAKPVTQIVSAEAWGRADSGFTSESYQQGVLSATILYEILLGKATLYAVLVSALVLMAMVKRKDSRGRAKRSGSGATNFSLLKQAGDVEENPGPTSMDWIWRILFLVGAATGAHSFEQVQLVQSGAEVKKPGASVKVSCKASGYTFTNYLIEWVRQAPGQGLEWMGLINPGSGGTNYNEKFKGRVTMTTDTSTSTAYMELRSLRSDDTAVYYCARRSPLGSWIYYAYDGVAYWGQGTLVTVSSTRIQNPDPAVYQLRDSKSSDKSVCLFTDFDSQTNVSQSKDSDVYITDKCVLDMRSMDFKSNSAVAWSNKSDFACANAFNNSIIPEDTFFPSPESSSDVKLVEKSFETDTNLNFQNLSVIGFRILLLKVAGFNLLMTLRLWSS

SEQ ID NO: 44800 - protein, 907 aa, synthetic construct
MALPVTALLLPLALLLHAARPEVQLLESGGGLVQPGGSLRLSCAASGRTFSMGWYRQAPGKGLEFVSAITYSGGSPYYADSVKGRFTISRDNSKNTVYLQMNSLRAEDTAVYYCAANPTYGSDWNAENWGQGTLVTVSSGTGGGGSGGGGSGGGGSEFEIVLTQSPATLSLSPGERATLSCSVSSSISSSNLHWYQQKPGQAPRLLIYATSNLASGIPARFSGSGSGTDFTLTISSLEPEDFAVYYCQQWSSYPHTFGGGTKVEIKRLEIQNPDPAVYQLRDSKSSDKSVCLFTDFDSQTNVSQSKDSDVYITDKCVLDMRSMDFKSNSAVAWSNKSDFACANAFNNSIIPEDTFFPSSDVPCDVKLVEKSFETDTNLNFQNLSVIGFRILLLKVAGFNLLMTLRLWSSRAKRSGSGVKQTLNFDLLKLAGDVESNPGPTSTMDWIWRILFLVGAATGTHSGPEVQLVESGGGLVQPGGSLRLSCAASGRTFTMGWYRQAPGKEREFVAAISLSPTLAYYADSVKGRFTISRDNSKNTVVLQMNSLRAEDTALYYCAADRKSVMSIRPDYWGQGTLVTVSSGSGGGGSGGGGSGGGGSFEQVQLVQSGAEVKKPGASVKVSCKASGYTFTNYLIEWVRQAPGQGLEWMGLINPGSGGTNYNEKFKGRVTMTTDTSTSTAYMELRSLRSDDTAVYYCARRSPLGSWIYYAYDGVAYWGQGTLVTVSSTREDLKNVFPPEVAVFEPSKAEIAHTQKATLVCLATGFYPDHVELSWWVNGKEVHSGVCTDPQPLKEQPALNDSRYCLSSRLRVSATFWQNPRNHFRCQVQFYGLSENDEWTQDRAKPVTQIVSAEAWGRADCGITSASYHQGVLSATILYEILLGKATLYAVLVSALVLMAMVKRKDSRG

SEQ ID NO: 44801 - protein, 907 aa, synthetic construct
MALPVTALLLPLALLLHAARPEVQLVESGGGLVQAGGSLRLSCAASGRTFSMGWFRQAPGKEREFVAAITYSGGSPYYADSVKGRFTISRDNAKNTVYLQMNSLKPEDTAVYYCAANPTYGSDWNAENWGQGTQVTVSSGTGGGGSGGGGSGGGGSEFEIVLTQSPATLSLSPGERATLSCSVSSSISSSNLHWYQQKPGQAPRLLIYATSNLASGIPARFSGSGSGTDFTLTISSLEPEDFAVYYCQQWSSYPHTFGGGTKVEIKRLEIQNPDPAVYQLRDSKSSDKSVCLFTDFDSQTNVSQSKDSDVYITDKCVLDMRSMDFKSNSAVAWSNKSDFACANAFNNSIIPEDTFFPSSDVPCDVKLVEKSFETDTNLNFQNLSVIGFRILLLKVAGFNLLMTLRLWSSRAKRSGSGVKQTLNFDLLKLAGDVESNPGPTSTMDWIWRILFLVGAATGAHSGPEVQLVESGGGLVQPGGSLRLSCAASGRTFTMGWYRQAPGKEREFVAAISLSPTLAYYADSVKGRFTISRDNSKNTVVLQMNSLRAEDTALYYCAADRKSVMSIRPDYWGQGTLVTVSSGSGGGGSGGGGSGGGGSFEQVQLVQSGAEVKKPGASVKVSCKASGYTFTNYLIEWVRQAPGQGLEWMGLINPGSGGTNYNEKFKGRVTMTTDTSTSTAYMELRSLRSDDTAVYYCARRSPLGSWIYYAYDGVAYWGQGTLVTVSSTREDLKNVFPPEVAVFEPSKAEIAHTQKATLVCLATGFYPDHVELSWWVNGKEVHSGVCTDPQPLKEQPALNDSRYCLSSRLRVSATFWQNPRNHFRCQVQFYGLSENDEWTQDRAKPVTQIVSAEAWGRADCGITSASYHQGVLSATILYEILLGKATLYAVLVSALVLMAMVKRKDSRG

SEQ ID NO: 44802 - protein, 904 aa, synthetic construct
MALPVTALLLPLALLLHAARPEVQLVESGGGLVQAGGSLRLSCAASGRTFSMGWFRQAPGKEREFVAAITYSGGSPYYADSVKGRFTISRDNAKNTVYLQMNSLKPEDTAVYYCAANPTYGSDWNAENWGQGTQVTVSSGTGGGGSGGGGSGGGGSEFEIVLTQSPATLSLSPGERATLSCSVSSSISSSNLHWYQQKPGQAPRLLIYATSNLASGIPARFSGSGSGTDFTLTISSLEPEDFAVYYCQQWSSYPHTFGGGTKVEIKRLEDLKNVFPPEVAVFEPSEAEISHTQKATLVCLATGFYPDHVELSWWVNGKEVHSGVCTDPQPLKEQPALNDSRYCLSSRLRVSATFWQNPRNHFRCQVQFYGLSENDEWTQDRAKPVTQIVSAEAWGRADCGFTSESYQQGVLSATILYEILLGKATLYAVLVSALVLMAMVKRKDSRGRAKRSGSGATNFSLLKQAGDVEENPGPTSATMDWIWRILFLVGAATGAHSGPEVQLVESGGGLVQAGGSLRLSCAASGRTFTMGWFRQAPGKEREFVAAISLSPTLAYYADSVKGRFTISRDNAKNTVVLQMNSLKPEDTALYYCAADRKSVMSIRPDYWGQGTQVTVSSGSGGGGSGGGGSGGGGSFEQVQLVQSGAEVKKPGASVKVSCKASGYTFTNYLIEWVRQAPGQGLEWMGLINPGSGGTNYNEKFKGRVTMTTDTSTSTAYMELRSLRSDDTAVYYCARRSPLGSWIYYAYDGVAYWGQGTLVTVSSTRIQNPDPAVYQLRDSKSSDKSVCLFTDFDSQTNVSQSKDSDVYITDKCVLDMRSMDFKSNSAVAWSNKSDFACANAFNNSIIPEDTFFPSPESSCDVKLVEKSFETDTNLNFQNLSVIGFRILLLKVAGFNLLMTLRLWSS

SEQ ID NO: 44803 - protein, 775 aa, synthetic construct
MALPVTALLLPLALLLHAARPEVQLVESGGGLVQPGGSLRLSCEASGFASDDYIIGWFRQAPGKEREGVSCISSKYANTVYTDSVKGRFRLSRGTAKNTVYLQMSALKPEDTAVYYCAMDSRRVTCPEISTMHRNFDSWGQGTLVTVSSGTGGGGSGGGGSGGGGSEFEIVLTQSPATLSLSPGERATLSCSVSSSISSSNLHWYQQKPGQAPRLLIYATSNLASGIPARFSGSGSGTDFTLTISSLEPEDFAVYYCQQWSSYPHTFGGGTKVEIKRLEDLKNVFPPEVAVFEPSKAEIAHTQKATLVCLATGFYPDHVELSWWVNGKEVHSGVCTDPQPLKEQPALNDSRYCLSSRLRVSATFWQNPRNHFRCQVQFYGLSENDEWTQDRAKPVTQIVSAEAWGRADCGITSASYHQGVLSATILYEILLGKATLYAVLVSALVLMAMVKRKDSRGRAKRSGSGATNFSLLKQAGDVEENPGPTSMDWIWRILFLVGAATGAHSFEQVQLVQSGAEVKKPGASVKVSCKASGYTFTNYLIEWVRQAPGQGLEWMGLINPGSGGTNYNEKFKGRVTMTTDTSTSTAYMELRSLRSDDTAVYYCARRSPLGSWIYYAYDGVAYWGQGTLVTVSSTRIQNPDPAVYQLRDSKSSDKSVCLFTDFDSQTNVSQSKDSDVYITDKCVLDMRSMDFKSNSAVAWSNKSDFACANAFNNSIIPEDTFFPSSDVPCDVKLVEKSFETDTNLNFQNLSVIGFRILLLKVAGFNLLMTLRLWSS

SEQ ID NO: 44804 - protein, 766 aa, synthetic construct
MALPVTALLLPLALLLHAARPEIVLTQSPATLSLSPGERATLSCSVSSSISSSNLHWYQQKPGQAPRLLIYATSNLASGIPARFSGSGSGTDFTLTISSLEPEDFAVYYCQQWSSYPHTFGGGTKVEIKRLEDLKNVFPPEVAVFEPSEAEISHTQKATLVCLATGFYPDHVELSWWVNGKEVHSGVCTDPQPLKEQPALNDSRYCLSSRLRVSATFWQNPRNHFRCQVQFYGLSENDEWTQDRAKPVTQIVSAEAWGRADCGFTSESYQQGVLSATILYEILLGKATLYAVLVSALVLMAMVKRKDSRGRAKRSGSGATNFSLLKQAGDVEENPGPTSTMDWIWRILFLVGAATGAHSGPEVQLVESGGGLVQPGGSLRLSCAASGRTFTMGWYRQAPGKEREFVAAISLSPTLAYYADSVKGRFTISRDNSKNTVVLQMNSLRAEDTALYYCAADRKSVMSIRPDYWGQGTLVTVSSGSGGGGSGGGGSGGGGSFEQVQLVQSGAEVKKPGASVKVSCKASGYTFTNYLIEWVRQAPGQGLEWMGLINPGSGGTNYNEKFKGRVTMTTDTSTSTAYMELRSLRSDDTAVYYCARRSPLGSWIYYAYDGVAYWGQGTLVTVSSTRIQNPDPAVYQLRDSKSSDKSVCLFTDFDSQTNVSQSKDSDVYITDKCVLDMRSMDFKSNSAVAWSNKSDFACANAFNNSIIPEDTFFPSPESSCDVKLVEKSFETDTNLNFQNLSVIGFRILLLKVAGFNLLMTLRLWSS

SEQ ID NO: 44805 - protein, 773 aa, synthetic construct
MALPVTALLLPLALLLHAARPEIVLTQSPATLSLSPGERATLSCSVSSSISSSNLHWYQQKPGQAPRLLIYATSNLASGIPARFSGSGSGTDFTLTISSLEPEDFAVYYCQQWSSYPHTFGGGTKVEIKRLEDLKNVFPPEVAVFEPSEAEISHTQKATLVCLATGFYPDHVELSWWVNGKEVHSGVCTDPQPLKEQPALNDSRYCLSSRLRVSATFWQNPRNHFRCQVQFYGLSENDEWTQDRAKPVTQIVSAEAWGRADCGFTSESYQQGVLSATILYEILLGKATLYAVLVSALVLMAMVKRKDSRGRAKRSGSGATNFSLLKQAGDVEENPGPTSTMDWIWRILFLVGAATGAHSGPQVQLVESGGGLVQPGGSLRLSCAASGNINSRNCMGWFRQAPGKGREGVAAIGQVTGRTYYVDSVKGRFTISLDNSKNTLYLQMNSLRAEDTAVYYCAAAPGCLLSALRSADYRNWGQGTLVTVSSGSGGGGSGGGGSGGGGSFEQVQLVQSGAEVKKPGASVKVSCKASGYTFTNYLIEWVRQAPGQGLEWMGLINPGSGGTNYNEKFKGRVTMTTDTSTSTAYMELRSLRSDDTAVYYCARRSPLGSWIYYAYDGVAYWGQGTLVTVSSTRIQNPDPAVYQLRDSKSSDKSVCLFTDFDSQTNVSQSKDSDVYITDKCVLDMRSMDFKSNSAVAWSNKSDFACANAFNNSIIPEDTFFPSPESSCDVKLVEKSFETDTNLNFQNLSVIGFRILLLKVAGFNLLMTLRLWSS

SEQ ID NO: 44806 - protein, 773 aa, synthetic construct
MALPVTALLLPLALLLHAARPEIVLTQSPATLSLSPGERATLSCSVSSSISSSNLHWYQQKPGQAPRLLIYATSNLASGIPARFSGSGSGTDFTLTISSLEPEDFAVYYCQQWSSYPHTFGGGTKVEIKRLEDLKNVFPPEVAVFEPSEAEISHTQKATLVCLATGFYPDHVELSWWVNGKEVHSGVCTDPQPLKEQPALNDSRYCLSSRLRVSATFWQNPRNHFRCQVQFYGLSENDEWTQDRAKPVTQIVSAEAWGRADCGFTSESYQQGVLSATILYEILLGKATLYAVLVSALVLMAMVKRKDSRGRAKRSGSGATNFSLLKQAGDVEENPGPTSTMDWIWRILFLVGAATGAHSGPQVQLVESGGGSVQAGGSLRLSCGASGNISSRNCMGWFRQAPGKEREGVAAIGQVTGRSYYVDSVKGRFTISLDNAKNTLYLQMNTLKPEDTAMYYCAAAPGCLLSALRSADYRNWGQGTQVTVSSGSGGGGSGGGGSGGGGSFEQVQLVQSGAEVKKPGASVKVSCKASGYTFTNYLIEWVRQAPGQGLEWMGLINPGSGGTNYNEKFKGRVTMTTDTSTSTAYMELRSLRSDDTAVYYCARRSPLGSWIYYAYDGVAYWGQGTLVTVSSTRIQNPDPAVYQLRDSKSSDKSVCLFTDFDSQTNVSQSKDSDVYITDKCVLDMRSMDFKSNSAVAWSNKSDFACANAFNNSIIPEDTFFPSPESSCDVKLVEKSFETDTNLNFQNLSVIGFRILLLKVAGFNLLMTLRLWSS

SEQ ID NO: 44807 - protein, 914 aa, synthetic construct
MALPVTALLLPLALLLHAARPEVQLVESGGGLVQAGGSLRLSCAASGRTFSMGWFRQAPGKEREFVAAITYSGGSPYYADSVKGRFTISRDNAKNTVYLQMNSLKPEDTAVYYCAANPTYGSDWNAENWGQGTQVTVSSGTGGGGSGGGGSGGGGSEFEIVLTQSPATLSLSPGERATLSCSVSSSISSSNLHWYQQKPGQAPRLLIYATSNLASGIPARFSGSGSGTDFTLTISSLEPEDFAVYYCQQWSSYPHTFGGGTKVEIKRLEIQNPDPAVYQLRDSKSSDKSVCLFTDFDSQTNVSQSKDSDVYITDKCVLDMRSMDFKSNSAVAWSNKSDFACANAFNNSIIPEDTFFPSSDVPCDVKLVEKSFETDTNLNFQNLSVIGFRILLLKVAGFNLLMTLRLWSSRAKRSGSGVKQTLNFDLLKLAGDVESNPGPTSTMDWIWRILFLVGAATGAHSGPQVQLVESGGGSVQAGGSLRLSCGASGNISSRNCMGWFRQAPGKEREGVAAIGQVTGRSYYVDSVKGRFTISLDNAKNTLYLQMNTLKPEDTAMYYCAAAPGCLLSALRSADYRNWGQGTQVTVSSGSGGGGSGGGGSGGGGSFEQVQLVQSGAEVKKPGASVKVSCKASGYTFTNYLIEWVRQAPGQGLEWMGLINPGSGGTNYNEKFKGRVTMTTDTSTSTAYMELRSLRSDDTAVYYCARRSPLGSWIYYAYDGVAYWGQGTLVTVSSTREDLKNVFPPEVAVFEPSKAEIAHTQKATLVCLATGFYPDHVELSWWVNGKEVHSGVCTDPQPLKEQPALNDSRYCLSSRLRVSATFWQNPRNHFRCQVQFYGLSENDEWTQDRAKPVTQIVSAEAWGRADCGITSASYHQGVLSATILYEILLGKATLYAVLVSALVLMAMVKRKDSRG

SEQ ID NO: 44808 - protein, 911 aa, synthetic construct
MALPVTALLLPLALLLHAARPQVQLVESGGGSVQAGGSLRLSCGASGNISSRNCMGWFRQAPGKEREGVAAIGQVTGRSYYVDSVKGRFTISLDNAKNTLYLQMNTLKPEDTAMYYCAAAPGCLLSALRSADYRNWGQGTQVTVSSGTGGGGSGGGGSGGGGSEFEIVLTQSPATLSLSPGERATLSCSVSSSISSSNLHWYQQKPGQAPRLLIYATSNLASGIPARFSGSGSGTDFTLTISSLEPEDFAVYYCQQWSSYPHTFGGGTKVEIKRLEDLKNVFPPEVAVFEPSEAEISHTQKATLVCLATGFYPDHVELSWWVNGKEVHSGVCTDPQPLKEQPALNDSRYCLSSRLRVSATFWQNPRNHFRCQVQFYGLSENDEWTQDRAKPVTQIVSAEAWGRADCGFTSESYQQGVLSATILYEILLGKATLYAVLVSALVLMAMVKRKDSRGRAKRSGSGATNFSLLKQAGDVEENPGPTSATMDWIWRILFLVGAATGAHSGPEVQLVESGGGLVQAGGSLRLSCAASGRTFTMGWFRQAPGKEREFVAAISLSPTLAYYADSVKGRFTISRDNAKNTVVLQMNSLKPEDTALYYCAADRKSVMSIRPDYWGQGTQVTVSSGSGGGGSGGGGSGGGGSFEQVQLVQSGAEVKKPGASVKVSCKASGYTFTNYLIEWVRQAPGQGLEWMGLINPGSGGTNYNEKFKGRVTMTTDTSTSTAYMELRSLRSDDTAVYYCARRSPLGSWIYYAYDGVAYWGQGTLVTVSSTRIQNPDPAVYQLRDSKSSDKSVCLFTDFDSQTNVSQSKDSDVYITDKCVLDMRSMDFKSNSAVAWSNKSDFACANAFNNSIIPEDTFFPSPESSCDVKLVEKSFETDTNLNFQNLSVIGFRILLLKVAGFNLLMTLRLWSS

SEQ ID NO: 44809 - protein, 774 aa, synthetic construct
MALPVTALLLPLALLLHAARPQVQLVESGGGSVQAGGSLRLSCGASGNISSRNCMGWFRQAPGKEREGVAAIGQVTGRSYYVDSVKGRFTISLDNAKNTLYLQMNTLKPEDTAMYYCAAAPGCLLSALRSADYRNWGQGTQVTVSSGTGGGGSGGGGSGGGGSEFEIVLTQSPATLSLSPGERATLSCSVSSSISSSNLHWYQQKPGQAPRLLIYATSNLASGIPARFSGSGSGTDFTLTISSLEPEDFAVYYCQQWSSYPHTFGGGTKVEIKRLEDLKNVFPPEVAVFEPSEAEISHTQKATLVCLATGFYPDHVELSWWVNGKEVHSGVCTDPQPLKEQPALNDSRYCLSSRLRVSATFWQNPRNHFRCQVQFYGLSENDEWTQDRAKPVTQIVSAEAWGRADCGFTSESYQQGVLSATILYEILLGKATLYAVLVSALVLMAMVKRKDSRGRAKRSGSGATNFSLLKQAGDVEENPGPTSATMDWIWRILFLVGAATGAHSFEQVQLVQSGAEVKKPGASVKVSCKASGYTFTNYLIEWVRQAPGQGLEWMGLINPGSGGTNYNEKFKGRVTMTTDTSTSTAYMELRSLRSDDTAVYYCARRSPLGSWIYYAYDGVAYWGQGTLVTVSSTRIQNPDPAVYQLRDSKSSDKSVCLFTDFDSQTNVSQSKDSDVYITDKCVLDMRSMDFKSNSAVAWSNKSDFACANAFNNSIIPEDTFFPSPESSCDVKLVEKSFETDTNLNFQNLSVIGFRILLLKVAGFNLLMTLRLWSS

SEQ ID NO: 44810 - protein, 774 aa, synthetic construct
MALPVTALLLPLALLLHAARPQVQLVESGGGVVQPGGSLRLSCAASGLSFSTYTVAWFRQAPGKGLEGVAAIPYTSQHMVYTDSVRGRFTISRDNSKNTLYLQMNSLRAEDTAVYYCATDRRPGTSMLAINGYNRWGQGTTVTVSSGTGGGGSGGGGSGGGGSEFEIVLTQSPATLSLSPGERATLSCSVSSSISSSNLHWYQQKPGQAPRLLIYATSNLASGIPARFSGSGSGTDFTLTISSLEPEDFAVYYCQQWSSYPHTFGGGTKVEIKRLEDLKNVFPPEVAVFEPSEAEISHTQKATLVCLATGFYPDHVELSWWVNGKEVHSGVCTDPQPLKEQPALNDSRYCLSSRLRVSATFWQNPRNHFRCQVQFYGLSENDEWTQDRAKPVTQIVSAEAWGRADCGFTSESYQQGVLSATILYEILLGKATLYAVLVSALVLMAMVKRKDSRGRAKRSGSGATNFSLLKQAGDVEENPGPTSATMDWIWRILFLVGAATGAHSFEQVQLVQSGAEVKKPGASVKVSCKASGYTFTNYLIEWVRQAPGQGLEWMGLINPGSGGTNYNEKFKGRVTMTTDTSTSTAYMELRSLRSDDTAVYYCARRSPLGSWIYYAYDGVAYWGQGTLVTVSSTRIQNPDPAVYQLRDSKSSDKSVCLFTDFDSQTNVSQSKDSDVYITDKCVLDMRSMDFKSNSAVAWSNKSDFACANAFNNSIIPEDTFFPSPESSCDVKLVEKSFETDTNLNFQNLSVIGFRILLLKVAGFNLLMTLRLWSS

SEQ ID NO: 44811 - protein, 773 aa, synthetic construct
MALPVTALLLPLALLLHAARPEIVLTQSPATLSLSPGERATLSCSVSSSISSSNLHWYQQKPGQAPRLLIYATSNLASGIPARFSGSGSGTDFTLTISSLEPEDFAVYYCQQWSSYPHTFGGGTKVEIKRLEDLKNVFPPEVAVFEPSEAEISHTQKATLVCLATGFYPDHVELSWWVNGKEVHSGVCTDPQPLKEQPALNDSRYCLSSRLRVSATFWQNPRNHFRCQVQFYGLSENDEWTQDRAKPVTQIVSAEAWGRADCGFTSESYQQGVLSATILYEILLGKATLYAVLVSALVLMAMVKRKDSRGRAKRSGSGATNFSLLKQAGDVEENPGPTSTMDWIWRILFLVGAATGAHSGPQVQLVESGGGVVQPGGSLRLSCAASGLSFSTYTVAWFRQAPGKGLEGVAAIPYTSQHMVYTDSVRGRFTISRDNSKNTLYLQMNSLRAEDTAVYYCATDRRPGTSMLAINGYNRWGQGTTVTVSSGSGGGGSGGGGSGGGGSFEQVQLVQSGAEVKKPGASVKVSCKASGYTFTNYLIEWVRQAPGQGLEWMGLINPGSGGTNYNEKFKGRVTMTTDTSTSTAYMELRSLRSDDTAVYYCARRSPLGSWIYYAYDGVAYWGQGTLVTVSSTRIQNPDPAVYQLRDSKSSDKSVCLFTDFDSQTNVSQSKDSDVYITDKCVLDMRSMDFKSNSAVAWSNKSDFACANAFNNSIIPEDTFFPSPESSCDVKLVEKSFETDTNLNFQNLSVIGFRILLLKVAGFNLLMTLRLWSS

SEQ ID NO: 44812 - protein, 775 aa, synthetic construct
MALPVTALLLPLALLLHAARPEIVLTQSPATLSLSPGERATLSCSVSSSISSSNLHWYQQKPGQAPRLLIYATSNLASGIPARFSGSGSGTDFTLTISSLEPEDFAVYYCQQWSSYPHTFGGGTKVEIKRLEDLKNVFPPEVAVFEPSEAEISHTQKATLVCLATGFYPDHVELSWWVNGKEVHSGVCTDPQPLKEQPALNDSRYCLSSRLRVSATFWQNPRNHFRCQVQFYGLSENDEWTQDRAKPVTQIVSAEAWGRADCGFTSESYQQGVLSATILYEILLGKATLYAVLVSALVLMAMVKRKDSRGRAKRSGSGATNFSLLKQAGDVEENPGPTSTMDWIWRILFLVGAATGAHSGPEVQLVESGGGSVQAGGSLRLSCAASGYTYSINCMGWFRQAPGKEREGVAAISTGGGRTDYRDSVKGRFTISQDNAKNTVYLQMNSLKPEDTAMYYCAGKTTYPGYGCGLGRSAYNYWGQGTQVTVSSGSGGGGSGGGGSGGGGSFEQVQLVQSGAEVKKPGASVKVSCKASGYTFTNYLIEWVRQAPGQGLEWMGLINPGSGGTNYNEKFKGRVTMTTDTSTSTAYMELRSLRSDDTAVYYCARRSPLGSWIYYAYDGVAYWGQGTLVTVSSTRIQNPDPAVYQLRDSKSSDKSVCLFTDFDSQTNVSQSKDSDVYITDKCVLDMRSMDFKSNSAVAWSNKSDFACANAFNNSIIPEDTFFPSPESSCDVKLVEKSFETDTNLNFQNLSVIGFRILLLKVAGFNLLMTLRLWSS

SEQ ID NO: 44813 - protein, 628 aa, synthetic construct
MALPVTALLLPLALLLHAARPEIVLTQSPATLSLSPGERATLSCSVSSSISSSNLHWYQQKPGQAPRLLIYATSNLASGIPARFSGSGSGTDFTLTISSLEPEDFAVYYCQQWSSYPHTFGGGTKVEIKRLEDLKHVFPPEVAVFEPSDAEIWHTQKATLVCLATGFYPDHVELSWWVNGKEVHSGVSTDPQPLKEQPALNDSRYCLSSRLRVSATFWQNPRNHFRCQVQFYGLSENDEWTQDRAKPVTQIVSAEAWGRADCGFTSESYQQGVLSATILYEILLGKATLYAVLVSALVLMAMVKRKDSRGRAKRSGSGATNFSLLKQAGDVEENPGPTSMDWIWRILFLVGAATGAHSFEQVQLVQSGAEVKKPGASVKVSCKASGYTFTNYLIEWVRQAPGQGLEWMGLINPGSGGTNYNEKFKGRVTMTTDTSTSTAYMELRSLRSDDTAVYYCARRSPLGSWIYYAYDGVAYWGQGTLVTVSSTRIQNPDPAVYQLRDSKSSDKSVCLFTDFDSQTNVSQSKDSDVYITDKTVLDMRSMDFKSNSAVAWSSKSDFACANAFNNSIIPEDTFFPSPEMACDVKLVEKSFETDTNLNFQNLLVIWLRILLLKVAGFNLLMTLRLWSS

SEQ ID NO: 44814 - protein, 628 aa, synthetic construct
MALPVTALLLPLALLLHAARPEIVLTQSPATLSLSPGERATLSCSVSSSISSSNLHWYQQKPGQAPRLLIYATSNLASGIPARFSGSGSGTDFTLTISSLEPEDFAVYYCQQWSSYPHTFGGGTKVEIKRLEDLKHVFPPEVAVFEPSDAEIWHTQKATLVCLATGFYPDHVELSWWVNGKEVHSGVSTDPQPLKEQPALNDSRYCLSSRLRVSATFWQNPRNHFRCQVQFYGLSENDEWTQDRAKPVTQIVSAEAWGRADCGFTSESYQQGVLSATILYEILLGKATLYAVLVSALVLMAMVKRKDSRGRAKRSGSGATNFSLLKQAGDVEENPGPTSMDWIWRILFLVGAATGAHSFEQVQLVQSGAEVKKPGASVKVSCKASGYTFTNYLIEWVRQAPGQGLEWMGLINPGSGGTNYNEKFKGRVTMTTDTSTSTAYMELRSLRSDDTAVYYCARRSPLGSWIYYAYDGVAYWGQGTLVTVSSTRIQNPDPAVYQLRDSKSSDKSVCLFTDFDSQTNVSQSKDSDVYITDKTVLDMRSMDFKSNSAVAWSTKSDFACANAFNNSIIPEDTFFPSPEVVCDVKLVEKSFETDTNLNFQNLVVIGARILLLKVAGFNLLMTLRLWSS

SEQ ID NO: 44815 - protein, 628 aa, synthetic construct
MALPVTALLLPLALLLHAARPEIVLTQSPATLSLSPGERATLSCSVSSSISSSNLHWYQQKPGQAPRLLIYATSNLASGIPARFSGSGSGTDFTLTISSLEPEDFAVYYCQQWSSYPHTFGGGTKVEIKRLEDLKNVFPPEVAVFEPSKAEISRTQKATLVCLATGFYPPHVELSWWVNGKEVHDGVCTDPQPLKEQPALNDSRYCLSSRLRVSATFWQNPRNHFRCQVQFYGLSENDEWTQDRAKPVTQIVSAEAWGRADCGFTSESYQQGVLSATILYEILLGKATLYAVLVSALVLMAMVKRKDSRGRAKRSGSGATNFSLLKQAGDVEENPGPTSMDWIWRILFLVGAATGAHSFEQVQLVQSGAEVKKPGASVKVSCKASGYTFTNYLIEWVRQAPGQGLEWMGLINPGSGGTNYNEKFKGRVTMTTDTSTSTAYMELRSLRSDDTAVYYCARRSPLGSWIYYAYDGVAYWGQGTLVTVSSTRIQNPDPAVYQLRDSKSSDKFVCLFTDFDSQINVSQSKDSDVYITDKCVLDMRSMDFKSNSAVAWSNKSDFTCANAFNNSIIPEDTFFPSPESSCDVKLVEKSFETDTNLNFQNLSVIGFRILLLKVAGFNLLMTLRLWSS

SEQ ID NO: 44816 - protein, 770 aa, synthetic construct
MALPVTALLLPLALLLHAARPEIVLTQSPATLSLSPGERATLSCSVSSSISSSNLHWYQQKPGQAPRLLIYATSNLASGIPARFSGSGSGTDFTLTISSLEPEDFAVYYCQQWSSYPHTFGGGTKVEIKRLEDLKNVFPPEVAVFEPSEAEISHTQKATLVCLATGFYPDHVELSWWVNGKEVHSGVCTDPQPLKEQPALNDSRYCLSSRLRVSATFWQNPRNHFRCQVQFYGLSENDEWTQDRAKPVTQIVSAEAWGRADCGFTSESYQQGVLSATILYEILLGKATLYAVLVSALVLMAMVKRKDSRGRAKRSGSGATNFSLLKQAGDVEENPGPTSTMDWIWRILFLVGAATGAHSGPQVQLQESGPGLVKPSQTLSLTCTVSGASITTGEYYWNWFRQPPGKGLEWMGAIAASGSTTYSPSFESRTSISRDTSKNQFSLKLSSVTAADTAVYYCGRSFGVAAVTTGQNRGQGTLVTVSSGSGGGGSGGGGSGGGGSFEQVQLVQSGAEVKKPGASVKVSCKASGYTFTNYLIEWVRQAPGQGLEWMGLINPGSGGTNYNEKFKGRVTMTTDTSTSTAYMELRSLRSDDTAVYYCARRSPLGSWIYYAYDGVAYWGQGTLVTVSSTRIQNPDPAVYQLRDSKSSDKSVCLFTDFDSQTNVSQSKDSDVYITDKCVLDMRSMDFKSNSAVAWSNKSDFACANAFNNSIIPEDTFFPSPESSCDVKLVEKSFETDTNLNFQNLSVIGFRILLLKVAGFNLLMTLRLWSS

SEQ ID NO: 44817 - protein, 911 aa, synthetic construct
MALPVTALLLPLALLLHAARPQVQLQESGPGLVKPSQTLSLTCTVSGGSITTGEFYWNWFRQPPGKGLEWMGAIAASGSTTYSPSFESRTSISRDTSKNQFSLKLSSVTAADTAVYYCGRSFGVAAVTTGQNRGQGTLVTVSSGTGGGGSGGGGSGGGGSEFEIVLTQSPATLSLSPGERATLSCSVSSSISSSNLHWYQQKPGQAPRLLIYATSNLASGIPARFSGSGSGTDFTLTISSLEPEDFAVYYCQQWSSYPHTFGGGTKVEIKRLEIQNPDPAVYQLRDSKSSDKSVCLFTDFDSQTNVSQSKDSDVYITDKCVLDMRSMDFKSNSAVAWSNKSDFACANAFNNSIIPEDTFFPSSDVPCDVKLVEKSFETDTNLNFQNLSVIGFRILLLKVAGFNLLMTLRLWSSRAKRSGSGVKQTLNFDLLKLAGDVESNPGPTSTMDWIWRILFLVGAATGAHSGPEVQLVESGGGLVQPGGSLRLSCAASGRTFTMGWYRQAPGKEREFVAAISLSPTLAYYADSVKGRFTISRDNSKNTVVLQMNSLRAEDTALYYCAADRKSVMSIRPDYWGQGTLVTVSSGSGGGGSGGGGSGGGGSFEQVQLVQSGAEVKKPGASVKVSCKASGYTFTNYLIEWVRQAPGQGLEWMGLINPGSGGTNYNEKFKGRVTMTTDTSTSTAYMELRSLRSDDTAVYYCARRSPLGSWIYYAYDGVAYWGQGTLVTVSSTREDLKNVFPPEVAVFEPSKAEIAHTQKATLVCLATGFYPDHVELSWWVNGKEVHSGVCTDPQPLKEQPALNDSRYCLSSRLRVSATFWQNPRNHFRCQVQFYGLSENDEWTQDRAKPVTQIVSAEAWGRADCGITSASYHQGVLSATILYEILLGKATLYAVLVSALVLMAMVKRKDSRG

SEQ ID NO: 44818 - protein, 774 aa, synthetic construct
MALPVTALLLPLALLLHAARPQVQLQESGPGLVKPSQTLSLTCTVSGGSITTGEFYWNWFRQPPGKGLEWMGAIAASGSTTYSPSFESRTSISRDTSKNQFSLKLSSVTAADTAVYYCGRSFGVAAVTTGQNRGQGTLVTVSSGTGGGGSGGGGSGGGGSEFEIVLTQSPATLSLSPGERATLSCSVSSSISSSNLHWYQQKPGQAPRLLIYATSNLASGIPARFSGSGSGTDFTLTISSLEPEDFAVYYCQQWSSYPHTFGGGTKVEIKRLEIQNPDPAVYQLRDSKSSDKSVCLFTDFDSQTNVSQSKDSDVYITDKCVLDMRSMDFKSNSAVAWSNKSDFACANAFNNSIIPEDTFFPSSDVPCDVKLVEKSFETDTNLNFQNLSVIGFRILLLKVAGFNLLMTLRLWSSRAKRSGSGVKQTLNFDLLKLAGDVESNPGPTSTMDWIWRILFLVGAATGAHSFEQVQLVQSGAEVKKPGASVKVSCKASGYTFTNYLIEWVRQAPGQGLEWMGLINPGSGGTNYNEKFKGRVTMTTDTSTSTAYMELRSLRSDDTAVYYCARRSPLGSWIYYAYDGVAYWGQGTLVTVSSTREDLKNVFPPEVAVFEPSKAEIAHTQKATLVCLATGFYPDHVELSWWVNGKEVHSGVCTDPQPLKEQPALNDSRYCLSSRLRVSATFWQNPRNHFRCQVQFYGLSENDEWTQDRAKPVTQIVSAEAWGRADCGITSASYHQGVLSATILYEILLGKATLYAVLVSALVLMAMVKRKDSRG

SEQ ID NO: 44819 - protein, 907 aa, synthetic construct
MALPVTALLLPLALLLHAARPEVQLVESGGGLVQAGGSLRLSCAASGRTFSMGWFRQAPGKEREFVAAITYSGGSPYYADSVKGRFTISRDNAKNTVYLQMNSLKPEDTAVYYCAANPTYGSDWNAENWGQGTQVTVSSGTGGGGSGGGGSGGGGSEFEIVLTQSPATLSLSPGERATLSCSVSSSISSSNLHWYQQKPGQAPRLLIYATSNLASGIPARFSGSGSGTDFTLTISSLEPEDFAVYYCQQWSSYPHTFGGGTKVEIKRLEDLKNVFPPEVAVFEPSEAEISHTQKATLVCLATGFYPDHVELSWWVNGKEVHSGVCTDPQPLKEQPALNDSRYCLSSRLRVSATFWQNPRNHFRCQVQFYGLSENDEWTQDRAKPVTQIVSAEAWGRADCGFTSESYQQGVLSATILYEILLGKATLYAVLVSALVLMAMVKRKDSRGRAKRSGSGATNFSLLKQAGDVEENPGPTSTMDWIWRILFLVGAATGAHSGPQVQLQESGPGLVKPSQTLSLTCTVSGASITTGEYYWNWFRQPPGKGLEWMGAIAASGSTTYSPSFESRTSISRDTSKNQFSLKLSSVTAADTAVYYCGRSFGVAAVTTGQNRGQGTLVTVSSGSGGGGSGGGGSGGGGSFEQVQLVQSGAEVKKPGASVKVSCKASGYTFTNYLIEWVRQAPGQGLEWMGLINPGSGGTNYNEKFKGRVTMTTDTSTSTAYMELRSLRSDDTAVYYCARRSPLGSWIYYAYDGVAYWGQGTLVTVSSTRIQNPDPAVYQLRDSKSSDKSVCLFTDFDSQTNVSQSKDSDVYITDKCVLDMRSMDFKSNSAVAWSNKSDFACANAFNNSIIPEDTFFPSPESSCDVKLVEKSFETDTNLNFQNLSVIGFRILLLKVAGFNLLMTLRLWSS

SEQ ID NO: 44820 - protein, 914 aa, synthetic construct
MALPVTALLLPLALLLHAARPEVQLVESGGGLVQAGGSLRLSCAASGRTFSMGWFRQAPGKEREFVAAITYSGGSPYYADSVKGRFTISRDNAKNTVYLQMNSLKPEDTAVYYCAANPTYGSDWNAENWGQGTQVTVSSGTGGGGSGGGGSGGGGSEFEIVLTQSPATLSLSPGERATLSCSVSSSISSSNLHWYQQKPGQAPRLLIYATSNLASGIPARFSGSGSGTDFTLTISSLEPEDFAVYYCQQWSSYPHTFGGGTKVEIKRLEIQNPDPAVYQLRDSKSSDKSVCLFTDFDSQTNVSQSKDSDVYITDKCVLDMRSMDFKSNSAVAWSNKSDFACANAFNNSIIPEDTFFPSSDVPCDVKLVEKSFETDTNLNFQNLSVIGFRILLLKVAGFNLLMTLRLWSSRAKRSGSGVKQTLNFDLLKLAGDVESNPGPTSTMDWIWRILFLVGAATGAHSGPQVQLVESGGGLVQPGGSLRLSCAASGNINSRNCMGWFRQAPGKGREGVAAIGQVTGRTYYVDSVKGRFTISLDNSKNTLYLQMNSLRAEDTAVYYCAAAPGCLLSALRSADYRNWGQGTLVTVSSGSGGGGSGGGGSGGGGSFEQVQLVQSGAEVKKPGASVKVSCKASGYTFTNYLIEWVRQAPGQGLEWMGLINPGSGGTNYNEKFKGRVTMTTDTSTSTAYMELRSLRSDDTAVYYCARRSPLGSWIYYAYDGVAYWGQGTLVTVSSTREDLKNVFPPEVAVFEPSKAEIAHTQKATLVCLATGFYPDHVELSWWVNGKEVHSGVCTDPQPLKEQPALNDSRYCLSSRLRVSATFWQNPRNHFRCQVQFYGLSENDEWTQDRAKPVTQIVSAEAWGRADCGITSASYHQGVLSATILYEILLGKATLYAVLVSALVLMAMVKRKDSRG

SEQ ID NO: 44821 - protein, 910 aa, synthetic construct
MALPVTALLLPLALLLHAARPEVQLVESGGGLVQAGGSLRLSCAASGRTFSMGWFRQAPGKEREFVAAITYSGGSPYYADSVKGRFTISRDNAKNTVYLQMNSLKPEDTAVYYCAANPTYGSDWNAENWGQGTQVTVSSGTGGGGSGGGGSGGGGSEFEIVLTQSPATLSLSPGERATLSCSVSSSISSSNLHWYQQKPGQAPRLLIYATSNLASGIPARFSGSGSGTDFTLTISSLEPEDFAVYYCQQWSSYPHTFGGGTKVEIKRLEDLKNVFPPEVAVFEPSEAEISHTQKATLVCLATGFYPDHVELSWWVNGKEVHSGVCTDPQPLKEQPALNDSRYCLSSRLRVSATFWQNPRNHFRCQVQFYGLSENDEWTQDRAKPVTQIVSAEAWGRADCGFTSESYQQGVLSATILYEILLGKATLYAVLVSALVLMAMVKRKDSRGRAKRSGSGATNFSLLKQAGDVEENPGPTSTMDWIWRILFLVGAATGAHSGPQVQLVESGGGLVQPGGSLRLSCAASGNINSRNCMGWFRQAPGKGREGVAAIGQVTGRTYYVDSVKGRFTISLDNSKNTLYLQMNSLRAEDTAVYYCAAAPGCLLSALRSADYRNWGQGTLVTVSSGSGGGGSGGGGSGGGGSFEQVQLVQSGAEVKKPGASVKVSCKASGYTFTNYLIEWVRQAPGQGLEWMGLINPGSGGTNYNEKFKGRVTMTTDTSTSTAYMELRSLRSDDTAVYYCARRSPLGSWIYYAYDGVAYWGQGTLVTVSSTRIQNPDPAVYQLRDSKSSDKSVCLFTDFDSQTNVSQSKDSDVYITDKCVLDMRSMDFKSNSAVAWSNKSDFACANAFNNSIIPEDTFFPSPESSCDVKLVEKSFETDTNLNFQNLSVIGFRILLLKVAGFNLLMTLRLWSS

SEQ ID NO: 44822 - protein, 910 aa, synthetic construct
MALPVTALLLPLALLLHAARPEVQLVESGGGLVQAGGSLRLSCAASGRTFTMGWFRQAPGKEREFVAAISLSPTLAYYADSVKGRFTISRDNAKNTVVLQMNSLKPEDTALYYCAADRKSVMSIRPDYWGQGTQVTVSSGTGGGGSGGGGSGGGGSEFEIVLTQSPATLSLSPGERATLSCSVSSSISSSNLHWYQQKPGQAPRLLIYATSNLASGIPARFSGSGSGTDFTLTISSLEPEDFAVYYCQQWSSYPHTFGGGTKVEIKRLEDLKNVFPPEVAVFEPSEAEISHTQKATLVCLATGFYPDHVELSWWVNGKEVHSGVCTDPQPLKEQPALNDSRYCLSSRLRVSATFWQNPRNHFRCQVQFYGLSENDEWTQDRAKPVTQIVSAEAWGRADCGFTSESYQQGVLSATILYEILLGKATLYAVLVSALVLMAMVKRKDSRGRAKRSGSGATNFSLLKQAGDVEENPGPTSTMDWIWRILFLVGAATGAHSGPQVQLVESGGGLVQPGGSLRLSCAASGNINSRNCMGWFRQAPGKGREGVAAIGQVTGRTYYVDSVKGRFTISLDNSKNTLYLQMNSLRAEDTAVYYCAAAPGCLLSALRSADYRNWGQGTLVTVSSGSGGGGSGGGGSGGGGSFEQVQLVQSGAEVKKPGASVKVSCKASGYTFTNYLIEWVRQAPGQGLEWMGLINPGSGGTNYNEKFKGRVTMTTDTSTSTAYMELRSLRSDDTAVYYCARRSPLGSWIYYAYDGVAYWGQGTLVTVSSTRIQNPDPAVYQLRDSKSSDKSVCLFTDFDSQTNVSQSKDSDVYITDKCVLDMRSMDFKSNSAVAWSNKSDFACANAFNNSIIPEDTFFPSPESSCDVKLVEKSFETDTNLNFQNLSVIGFRILLLKVAGFNLLMTLRLWSS

SEQ ID NO: 44823 - protein, 914 aa, synthetic construct
MALPVTALLLPLALLLHAARPQVQLQESGPGLVKPSQTLSLTCTVSGGSITTGEFYWNWFRQPPGKGLEWMGAIAASGSTTYSPSFESRTSISRDTSKNQFSLKLSSVTAADTAVYYCGRSFGVAAVTTGQNRGQGTLVTVSSGTGGGGSGGGGSGGGGSEFEIVLTQSPATLSLSPGERATLSCSVSSSISSSNLHWYQQKPGQAPRLLIYATSNLASGIPARFSGSGSGTDFTLTISSLEPEDFAVYYCQQWSSYPHTFGGGTKVEIKRLEDLKNVFPPEVAVFEPSEAEISHTQKATLVCLATGFYPDHVELSWWVNGKEVHSGVCTDPQPLKEQPALNDSRYCLSSRLRVSATFWQNPRNHFRCQVQFYGLSENDEWTQDRAKPVTQIVSAEAWGRADCGFTSESYQQGVLSATILYEILLGKATLYAVLVSALVLMAMVKRKDSRGRAKRSGSGATNFSLLKQAGDVEENPGPTSTMDWIWRILFLVGAATGAHSGPQVQLVESGGGLVQPGGSLRLSCAASGNINSRNCMGWFRQAPGKGREGVAAIGQVTGRTYYVDSVKGRFTISLDNSKNTLYLQMNSLRAEDTAVYYCAAAPGCLLSALRSADYRNWGQGTLVTVSSGSGGGGSGGGGSGGGGSFEQVQLVQSGAEVKKPGASVKVSCKASGYTFTNYLIEWVRQAPGQGLEWMGLINPGSGGTNYNEKFKGRVTMTTDTSTSTAYMELRSLRSDDTAVYYCARRSPLGSWIYYAYDGVAYWGQGTLVTVSSTRIQNPDPAVYQLRDSKSSDKSVCLFTDFDSQTNVSQSKDSDVYITDKCVLDMRSMDFKSNSAVAWSNKSDFACANAFNNSIIPEDTFFPSPESSCDVKLVEKSFETDTNLNFQNLSVIGFRILLLKVAGFNLLMTLRLWSS

SEQ ID NO: 44824 - protein, 482 aa, synthetic construct
MALPVTALLLPLALLLHAARPQIVLTQSPAIMSVSPGEKVTMTCSASSSVNYMHWFQQKPGTSPKLWVYSTSNLASGVPARFSGSGSGTSYSLTISSMEAEDAATYYCQQRSIYPPWTFGGGTKLEIKGGGGSGGGGSGGGGSEVQLQQSGPELVKPGASVKISCKASGYSFTGYTMNWVKQSHGKNLEWIGLINPYNGGTSYNQKFKAKATLTVDKSSSTAYMQLKSLTSEDSAVYYCARDYGYVLDYWGQGTSVTVSSTRKIEVMYPPPYLDNEKSNGTIIHVKGKHLCPSPLFPGPSKPFWVLVVVGGVLACYSLLVTVAFIIFWVRSKRSRLLHSDYMNMTPRRPGPTRKHYQPYAPPRDFAAYRSRVKFSRSADAPAYQQGQNQLYNELNLGRREEYDVLDKRRGRDPEMGGKPRRKNPQEGLYNELQKDKMAEAYSEIGMKGERRRGKGHDGLYQGLSTATKDTYDALHMQALPPR

SEQ ID NO: 44825 - protein, 488 aa, synthetic construct
MALPVTALLLPLALLLHAARPQIVLTQSPAIMSVSPGEKVTMTCSASSSVNYMHWFQQKPGTSPKLWVYSTSNLASGVPARFSGSGSGTSYSLTISSMEAEDAATYYCQQRSIYPPWTFGGGTKLEIKGGGGSGGGGSGGGGSEVQLQQSGPELVKPGASVKISCKASGYSFTGYTMNWVKQSHGKNLEWIGLINPYNGGTSYNQKFKAKATLTVDKSSSTAYMQLKSLTSEDSAVYYCARDYGYVLDYWGQGTSVTVSSTRAKPTTTPAPRPPTPAPTIASQPLSLRPEACRPAAGGAVHTRGLDFACDIYIWAPLAGTCGVLLLSLVITLYCKRGRKKLLYIFKQPFMRPVQTTQEEDGCSCRFPEEEEGGCELRVKFSRSADAPAYQQGQNQLYNELNLGRREEYDVLDKRRGRDPEMGGKPRRKNPQEGLYNELQKDKMAEAYSEIGMKGERRRGKGHDGLYQGLSTATKDTYDALHMQALPPR

SEQ ID NO: 44826 - protein, 488 aa, synthetic construct
MALPVTALLLPLALLLHAARPEVQLQQSGPELVKPGASVKISCKASGYSFTGYTMNWVKQSHGKNLEWIGLINPYNGGTSYNQKFKAKATLTVDKSSSTAYMQLKSLTSEDSAVYYCARDYGYVLDYWGQGTSVTVSSGGGGSGGGGSGGGGSQIVLTQSPAIMSVSPGEKVTMTCSASSSVNYMHWFQQKPGTSPKLWVYSTSNLASGVPARFSGSGSGTSYSLTISSMEAEDAATYYCQQRSIYPPWTFGGGTKLEIKTRAKPTTTPAPRPPTPAPTIASQPLSLRPEACRPAAGGAVHTRGLDFACDIYIWAPLAGTCGVLLLSLVITLYCKRGRKKLLYIFKQPFMRPVQTTQEEDGCSCRFPEEEEGGCELRVKFSRSADAPAYQQGQNQLYNELNLGRREEYDVLDKRRGRDPEMGGKPRRKNPQEGLYNELQKDKMAEAYSEIGMKGERRRGKGHDGLYQGLSTATKDTYDALHMQALPPR

SEQ ID NO: 44827 - protein, 621 aa, synthetic construct
MALPVTALLLPLALLLHAARPQIVLTQSPAIMSVSPGEKVTMTCSASSSVNYMHWFQQKPGTSPKLWVYSTSNLASGVPARFSGSGSGTSYSLTISSMEAEDAATYYCQQRSIYPPWTFGGGTKLEIKLEIQNPDPAVYQLRDSKSSDKSVCLFTDFDSQTNVSQSKDSDVYITDKCVLDMRSMDFKSNSAVAWSNKSDFACANAFNNSIIPEDTFFPSSDVPCDVKLVEKSFETDTNLNFQNLSVIGFRILLLKVAGFNLLMTLRLWSSRAKRSGSGVKQTLNFDLLKLAGDVESNPGPTSMDWIWRILFLVGAATGAHSFEEVQLQQSGPELVKPGASVKISCKASGYSFTGYTMNWVKQSHGKNLEWIGLINPYNGGTSYNQKFKAKATLTVDKSSSTAYMQLKSLTSEDSAVYYCARDYGYVLDYWGQGTSVTVSSTREDLKNVFPPEVAVFEPSKAEIAHTQKATLVCLATGFYPDHVELSWWVNGKEVHSGVCTDPQPLKEQPALNDSRYCLSSRLRVSATFWQNPRNHFRCQVQFYGLSENDEWTQDRAKPVTQIVSAEAWGRADCGITSASYHQGVLSATILYEILLGKATLYAVLVSALVLMAMVKRKDSRG

SEQ ID NO: 44828 - protein, 617 aa, synthetic construct
MALPVTALLLPLALLLHAARPQIVLTQSPAIMSVSPGEKVTMTCSASSSVNYMHWFQQKPGTSPKLWVYSTSNLASGVPARFSGSGSGTSYSLTISSMEAEDAATYYCQQRSIYPPWTFGGGTKLEIKLEDLKNVFPPEVAVFEPSKAEIAHTQKATLVCLATGFYPDHVELSWWVNGKEVHSGVCTDPQPLKEQPALNDSRYCLSSRLRVSATFWQNPRNHFRCQVQFYGLSENDEWTQDRAKPVTQIVSAEAWGRADCGITSASYHQGVLSATILYEILLGKATLYAVLVSALVLMAMVKRKDSRGRAKRSGSGATNFSLLKQAGDVEENPGPTSMDWIWRILFLVGAATGAHSFEEVQLQQSGPELVKPGASVKISCKASGYSFTGYTMNWVKQSHGKNLEWIGLINPYNGGTSYNQKFKAKATLTVDKSSSTAYMQLKSLTSEDSAVYYCARDYGYVLDYWGQGTSVTVSSTRIQNPDPAVYQLRDSKSSDKSVCLFTDFDSQTNVSQSKDSDVYITDKCVLDMRSMDFKSNSAVAWSNKSDFACANAFNNSIIPEDTFFPSSDVPCDVKLVEKSFETDTNLNFQNLSVIGFRILLLKVAGFNLLMTLRLWSS

SEQ ID NO: 44829 - protein, 617 aa, synthetic construct
MALPVTALLLPLALLLHAARPQIVLTQSPAIMSVSPGEKVTMTCSASSSVNYMHWFQQKPGTSPKLWVYSTSNLASGVPARFSGSGSGTSYSLTISSMEAEDAATYYCQQRSIYPPWTFGGGTKLEIKLEDLKNVFPPEVAVFEPSEAEISHTQKATLVCLATGFYPDHVELSWWVNGKEVHSGVCTDPQPLKEQPALNDSRYCLSSRLRVSATFWQNPRNHFRCQVQFYGLSENDEWTQDRAKPVTQIVSAEAWGRADCGFTSESYQQGVLSATILYEILLGKATLYAVLVSALVLMAMVKRKDSRGRAKRSGSGATNFSLLKQAGDVEENPGPTSMDWIWRILFLVGAATGAHSFEEVQLQQSGPELVKPGASVKISCKASGYSFTGYTMNWVKQSHGKNLEWIGLINPYNGGTSYNQKFKAKATLTVDKSSSTAYMQLKSLTSEDSAVYYCARDYGYVLDYWGQGTSVTVSSTRIQNPDPAVYQLRDSKSSDKSVCLFTDFDSQTNVSQSKDSDVYITDKCVLDMRSMDFKSNSAVAWSNKSDFACANAFNNSIIPEDTFFPSPESSCDVKLVEKSFETDTNLNFQNLSVIGFRILLLKVAGFNLLMTLRLWSS

SEQ ID NO: 44830 - protein, 621 aa, synthetic construct
MALPVTALLLPLALLLHAARPQIVLTQSPAIMSVSPGEKVTMTCSASSSVNYMHWFQQKPGTSPKLWVYSTSNLASGVPARFSGSGSGTSYSLTISSMEAEDAATYYCQQRSIYPPWTFGGGTKLEIKLEIQNPDPAVYQLRDSKSSDKSVCLFTDFDSQTNVSQSKDSDVYITDKCVLDMRSMDFKSNSAVAWSNKSDFACANAFNNSIIPEDTFFPSPESSCDVKLVEKSFETDTNLNFQNLSVIGFRILLLKVAGFNLLMTLRLWSSRAKRSGSGVKQTLNFDLLKLAGDVESNPGPTSMDWIWRILFLVGAATGAHSFEEVQLQQSGPELVKPGASVKISCKASGYSFTGYTMNWVKQSHGKNLEWIGLINPYNGGTSYNQKFKAKATLTVDKSSSTAYMQLKSLTSEDSAVYYCARDYGYVLDYWGQGTSVTVSSTREDLKNVFPPEVAVFEPSEAEISHTQKATLVCLATGFYPDHVELSWWVNGKEVHSGVCTDPQPLKEQPALNDSRYCLSSRLRVSATFWQNPRNHFRCQVQFYGLSENDEWTQDRAKPVTQIVSAEAWGRADCGFTSESYQQGVLSATILYEILLGKATLYAVLVSALVLMAMVKRKDSRG

SEQ ID NO: 44831 - protein, 633 aa, synthetic construct
MALPVTALLLPLALLLHAARPLEEDLKNVFPPEVAVFEPSKAEIAHTQKATLVCLATGFYPDHVELSWWVNGKEVHSGVCTDPQPLKEQPALNDSRYCLSSRLRVSATFWQNPRNHFRCQVQFYGLSENDEWTQDRAKPVTQIVSAEAWGRADCGITSASYHQGVLSATILYEILLGKATLYAVLVSALVLMAMVKRKDSRGRAKRSGSGATNFSLLKQAGDVEENPGPTSMALPVTALLLPLALLLHAARPQIVLTQSPAIMSVSPGEKVTMTCSASSSVNYMHWFQQKPGTSPKLWVYSTSNLASGVPARFSGSGSGTSYSLTISSMEAEDAATYYCQQRSIYPPWTFGGGTKLEIKGGGGSGGGGSGGGGSEVQLQQSGPELVKPGASVKISCKASGYSFTGYTMNWVKQSHGKNLEWIGLINPYNGGTSYNQKFKAKATLTVDKSSSTAYMQLKSLTSEDSAVYYCARDYGYVLDYWGQGTSVTVSSTRIQNPDPAVYQLRDSKSSDKSVCLFTDFDSQTNVSQSKDSDVYITDKCVLDMRSMDFKSNSAVAWSNKSDFACANAFNNSIIPEDTFFPSSDVPCDVKLVEKSFETDTNLNFQNLSVIGFRILLLKVAGFNLLMTLRLWSS

SEQ ID NO: 44832 - protein, 640 aa, synthetic construct
MALPVTALLLPLALLLHAARPLEGSGDRPDPAVYQLRDSKSSDKSVCLFTDFDSQTNVSQSKDSDVYITDKCVLDMRSMDFKSNSAVAWSNKSDFACANAFNNSIIPEDTFFPSPESSCDVKLVEKSFETDTNLNFQNLSVIGFRILLLKVAGFNLLMTLRLWSSSSRAKRSGSGVKQTLNFDLLKLAGDVESNPGPTSMALPVTALLLPLALLLHAARPQIVLTQSPAIMSVSPGEKVTMTCSASSSVNYMHWFQQKPGTSPKLWVYSTSNLASGVPARFSGSGSGTSYSLTISSMEAEDAATYYCQQRSIYPPWTFGGGTKLEIKGGGGSGGGGSGGGGSEVQLQQSGPELVKPGASVKISCKASGYSFTGYTMNWVKQSHGKNLEWIGLINPYNGGTSYNQKFKAKATLTVDKSSSTAYMQLKSLTSEDSAVYYCARDYGYVLDYWGQGTSVTVSSTREDLKNVFPPEVAVFEPSEAEISHTQKATLVCLATGFYPDHVELSWWVNGKEVHSGVCTDPQPLKEQPALNDSRYCLSSRLRVSATFWQNPRNHFRCQVQFYGLSENDEWTQDRAKPVTQIVSAEAWGRADCGFTSESYQQGVLSATILYEILLGKATLYAVLVSALVLMAMVKRKDSRG

SEQ ID NO: 44833 - protein, 617 aa, synthetic construct
MALPVTALLLPLALLLHAARPQIVLTQSPAIMSVSPGEKVTMTCSASSSVNYMHWFQQKPGTSPKLWVYSTSNLASGVPARFSGSGSGTSYSLTISSMEAEDAATYYCQQRSIYPPWTFGGGTKLEIKLEDLKNVFPPEVAVFEPSEAEISHTQKATLVCLATGFYPDHVELSWWVNGKEVHSGVSTDPQPLKEQPALNDSRYCLSSRLRVSATFWQNPRNHFRCQVQFYGLSENDEWTQDRAKPVTQIVSAEAWGRADCGFTSESYQQGVLSATILYEILLGKATLYAVLVSALVLMAMVKRKDSRGRAKRSGSGATNFSLLKQAGDVEENPGPTSMDWIWRILFLVGAATGAHSFEEVQLQQSGPELVKPGASVKISCKASGYSFTGYTMNWVKQSHGKNLEWIGLINPYNGGTSYNQKFKAKATLTVDKSSSTAYMQLKSLTSEDSAVYYCARDYGYVLDYWGQGTSVTVSSTRIQNPDPAVYQLRDSKSSDKSVCLFTDFDSQTNVSQSKDSDVYITDKTVLDMRSMDFKSNSAVAWSNKSDFACANAFNNSIIPEDTFFPSPESSCDVKLVEKSFETDTNLNFQNLSVIGFRILLLKVAGFNLLMTLRLWSS

SEQ ID NO: 44834 - protein, 625 aa, synthetic construct
MALPVTALLLPLALLLHAARPQIVLTQSPAIMSVSPGEKVTMTCSASSSVNYMHWFQQKPGTSPKLWVYSTSNLASGVPARFSGSGSGTSYSLTISSMEAEDAATYYCQQRSIYPPWTFGGGTKLEIKLEDKQLDADVSPKPTIFLPSIAETKLQKAGTYLCLLEKFFPDVIKIHWQEKKSNTILGSQEGNTMKTNDTYMKFSWLTVPEKSLDKEHRCIVRHENNKNGVDQEIIFPPIKTDVITMDPKDNCSKDANDTLLLQLTNTSAYYMYLLLLLKSVVYFAIITCCLLRRTAFCCNGEKSRAKRSGSGATNFSLLKQAGDVEENPGPTSMDWIWRILFLVGAATGAHSFEEVQLQQSGPELVKPGASVKISCKASGYSFTGYTMNWVKQSHGKNLEWIGLINPYNGGTSYNQKFKAKATLTVDKSSSTAYMQLKSLTSEDSAVYYCARDYGYVLDYWGQGTSVTVSSTRSQPHTKPSVFVMKNGTNVACLVKEFYPKDIRINLVSSKKITEFDPAIVISPSGKYNAVKLGKYEDSNSVTCSVQHDNKTVHSTDFEVKTDSTDHVKPKETENTKQPSKSCHKPKAIVHTEKVNMMSLTVLGLRMLFAKTVAVNFLLTAKLFFL

SEQ ID NO: 44835 - protein, 625 aa, synthetic construct
MALPVTALLLPLALLLHAARPQIVLTQSPAIMSVSPGEKVTMTCSASSSVNYMHWFQQKPGTSPKLWVYSTSNLASGVPARFSGSGSGTSYSLTISSMEAEDAATYYCQQRSIYPPWTFGGGTKLEIKLESQPHTKPSVFVMKNGTNVACLVKEFYPKDIRINLVSSKKITEFDPAIVISPSGKYNAVKLGKYEDSNSVTCSVQHDNKTVHSTDFEVKTDSTDHVKPKETENTKQPSKSCHKPKAIVHTEKVNMMSLTVLGLRMLFAKTVAVNFLLTAKLFFLRAKRSGSGATNFSLLKQAGDVEENPGPTSMDWIWRILFLVGAATGAHSFEEVQLQQSGPELVKPGASVKISCKASGYSFTGYTMNWVKQSHGKNLEWIGLINPYNGGTSYNQKFKAKATLTVDKSSSTAYMQLKSLTSEDSAVYYCARDYGYVLDYWGQGTSVTVSSTRDKQLDADVSPKPTIFLPSIAETKLQKAGTYLCLLEKFFPDVIKIHWQEKKSNTILGSQEGNTMKTNDTYMKFSWLTVPEKSLDKEHRCIVRHENNKNGVDQEIIFPPIKTDVITMDPKDNCSKDANDTLLLQLTNTSAYYMYLLLLLKSVVYFAIITCCLLRRTAFCCNGEKS

SEQ ID NO: 44836 - protein, 640 aa, synthetic construct
MALPVTALLLPLALLLHAARPLEDKQLDADVSPKPTIFLPSIAETKLQKAGTYLCLLEKFFPDVIKIHWQEKKSNTILGSQEGNTMKTNDTYMKFSWLTVPEKSLDKEHRCIVRHENNKNGVDQEIIFPPIKTDVITMDPKDNCSKDANDTLLLQLTNTSAYYMYLLLLLKSVVYFAIITCCLLRRTAFCCNGEKSRAKRSGSGATNFSLLKQAGDVEENPGPTSMALPVTALLLPLALLLHAARPQIVLTQSPAIMSVSPGEKVTMTCSASSSVNYMHWFQQKPGTSPKLWVYSTSNLASGVPARFSGSGSGTSYSLTISSMEAEDAATYYCQQRSIYPPWTFGGGTKLEIKGGGGSGGGGSGGGGSEVQLQQSGPELVKPGASVKISCKASGYSFTGYTMNWVKQSHGKNLEWIGLINPYNGGTSYNQKFKAKATLTVDKSSSTAYMQLKSLTSEDSAVYYCARDYGYVLDYWGQGTSVTVSSTRSQPHTKPSVFVMKNGTNVACLVKEFYPKDIRINLVSSKKITEFDPAIVISPSGKYNAVKLGKYEDSNSVTCSVQHDNKTVHSTDFEVKTDSTDHVKPKETENTKQPSKSCHKPKAIVHTEKVNMMSLTVLGLRMLFAKTVAVNFLLTAKLFFL

SEQ ID NO: 44837 - protein, 794 aa, synthetic construct
MALPVTALLLPLALLLHAARPQIVLTQSPAIMSVSPGEKVTMTCSASSSVNYMHWFQQKPGTSPKLWVYSTSNLASGVPARFSGSGSGTSYSLTISSMEAEDAATYYCQQRSIYPPWTFGGGTKLEIKGQPKANPTVTLFPPSSEELQANKATLVCLISDFYPGAVTVAWKADGSPVKAGVETTKPSKQSNNKYAASSYLSLTPEQWKSHRSYSCQVTHEGSTVEKTVAPTECSGSQSFGLLDPKLCYLLDGILFIYGVILTALFLRVKFSRSADAPAYQQGQNQLYNELNLGRREEYDVLDKRRGRDPEMGGKPQRRKNPQEGLYNELQKDKMAEAYSEIGMKGERRRGKGHDGLYQGLSTATKDTYDALHMQALPPRRAKRSGSGATNFSLLKQAGDVEENPGPTSMDWIWRILFLVGAATGAHSFEEVQLQQSGPELVKPGASVKISCKASGYSFTGYTMNWVKQSHGKNLEWIGLINPYNGGTSYNQKFKAKATLTVDKSSSTAYMQLKSLTSEDSAVYYCARDYGYVLDYWGQGTSVTVSSASTKGPSVFPLAPSSKSTSGGTAALGCLVKDYFPEPVTVSWNSGALTSGVHTFPAVLQSSGLYSLSSVVTVPSSSLGTQTYICNVNHKPSNTKVDKRVEPKSCGTQSFGLLDPKLCYLLDGILFIYGVILTALFLRVKFSRSADAPAYQQGQNQLYNELNLGRREEYDVLDKRRGRDPEMGGKPQRRKNPQEGLYNELQKDKMAEAYSEIGMKGERRRGKGHDGLYQGLSTATKDTYDALHMQALPPR

SEQ ID NO: 44838 - protein, 813 aa, synthetic construct
MALPVTALLLPLALLLHAARPQIVLTQSPAIMSVSPGEKVTMTCSASSSVNYMHWFQQKPGTSPKLWVYSTSNLASGVPARFSGSGSGTSYSLTISSMEAEDAATYYCQQRSIYPPWTFGGGTKLEIKLEDLKNVFPPEVAVFEPSEAEISHTQKATLVCLATGFYPDHVELSWWVNGKEVHSGVSTDPQPLKEQPALNDSRYCLSSRLRVSATFWQNPRNHFRCQVQFYGLSENDEWTQDRAKPVTQIVSAEAWGRADCGSQSFGLLDPKLCYLLDGILFIYGVILTALFLRVKFSRSADAPAYQQGQNQLYNELNLGRREEYDVLDKRRGRDPEMGGKPQRRKNPQEGLYNELQKDKMAEAYSEIGMKGERRRGKGHDGLYQGLSTATKDTYDALHMQALPPRRAKRSGSGATNFSLLKQAGDVEENPGPTSMDWIWRILFLVGAATGAHSFEEVQLQQSGPELVKPGASVKISCKASGYSFTGYTMNWVKQSHGKNLEWIGLINPYNGGTSYNQKFKAKATLTVDKSSSTAYMQLKSLTSEDSAVYYCARDYGYVLDYWGQGTSVTVSSTRIQNPDPAVYQLRDSKSSDKSVCLFTDFDSQTNVSQSKDSDVYITDKTVLDMRSMDFKSNSAVAWSNKSDFACANAFNNSIIPEDTFFPSPESSCGTQSFGLLDPKLCYLLDGILFIYGVILTALFLRVKFSRSADAPAYQQGQNQLYNELNLGRREEYDVLDKRRGRDPEMGGKPQRRKNPQEGLYNELQKDKMAEAYSEIGMKGERRRGKGHDGLYQGLSTATKDTYDALHMQALPPR

SEQ ID NO: 44839 - protein, 855 aa, synthetic construct
MALPVTALLLPLALLLHAARPQIVLTQSPAIMSVSPGEKVTMTCSASSSVNYMHWFQQKPGTSPKLWVYSTSNLASGVPARFSGSGSGTSYSLTISSMEAEDAATYYCQQRSIYPPWTFGGGTKLEIKLEEDLKNVFPPEVAVFEPSEAEISHTQKATLVCLATGFYPDHVELSWWVNGKEVHSGVSTDPQPLKEQPALNDSRYCLSSRLRVSATFWQNPRNHFRCQVQFYGLSENDEWTQDRAKPVTQIVSAEAWGRADCGSQSFGLLDPKLCYLLDGILFIYGVILTALFLRVKFSRSADAPAYQQGQNQLYNELNLGRREEYDVLDKRRGRDPEMGGKPQRRKNPQEGLYNELQKDKMAEAYSEIGMKGERRRGKGHDGLYQGLSTATKDTYDALHMQALPPRRAKRSGSGATNFSLLKQAGDVEENPGPTSMDWIWRILFLVGAATGAHSFEEVQLQQSGPELVKPGASVKISCKASGYSFTGYTMNWVKQSHGKNLEWIGLINPYNGGTSYNQKFKAKATLTVDKSSSTAYMQLKSLTSEDSAVYYCARDYGYVLDYWGQGTSVTVSSTRIQNPDPAVYQLRDSKSSDKSVCLFTDFDSQTNVSQSKDSDVYITDKTVLDMRSMDFKSNSAVAWSNKSDFACANAFNNSIIPEDTFFPSPESSCGTQSFGLLDPKLCYLLDGILFIYGVILTALFLRSKRSRLLHSDYMNMTPRRPGPTRKHYQPYAPPRDFAAYRSRVKFSRSADAPAYQQGQNQLYNELNLGRREEYDVLDKRRGRDPEMGGKPQRRKNPQEGLYNELQKDKMAEAYSEIGMKGERRRGKGHDGLYQGLSTATKDTYDALHMQALPPR

SEQ ID NO: 44840 - protein, 898 aa, synthetic construct
MALPVTALLLPLALLLHAARPQIVLTQSPAIMSVSPGEKVTMTCSASSSVNYMHWFQQKPGTSPKLWVYSTSNLASGVPARFSGSGSGTSYSLTISSMEAEDAATYYCQQRSIYPPWTFGGGTKLEIKLEEDLKNVFPPEVAVFEPSEAEISHTQKATLVCLATGFYPDHVELSWWVNGKEVHSGVSTDPQPLKEQPALNDSRYCLSSRLRVSATFWQNPRNHFRCQVQFYGLSENDEWTQDRAKPVTQIVSAEAWGRADCGSQSFGLLDPKLCYLLDGILFIYGVILTALFLKRGRKKLLYIFKQPFMRPVQTTQEEDGCSCRFPEEEEGGCELRVKFSRSADAPAYQQGQNQLYNELNLGRREEYDVLDKRRGRDPEMGGKPQRRKNPQEGLYNELQKDKMAEAYSEIGMKGERRRGKGHDGLYQGLSTATKDTYDALHMQALPPRRAKRSGSGATNFSLLKQAGDVEENPGPTSMDWIWRILFLVGAATGAHSFEEVQLQQSGPELVKPGASVKISCKASGYSFTGYTMNWVKQSHGKNLEWIGLINPYNGGTSYNQKFKAKATLTVDKSSSTAYMQLKSLTSEDSAVYYCARDYGYVLDYWGQGTSVTVSSTRIQNPDPAVYQLRDSKSSDKSVCLFTDFDSQTNVSQSKDSDVYITDKTVLDMRSMDFKSNSAVAWSNKSDFACANAFNNSIIPEDTFFPSPESSCGTQSFGLLDPKLCYLLDGILFIYGVILTALFLKRGRKKLLYIFKQPFMRPVQTTQEEDGCSCRFPEEEEGGCELRVKFSRSADAPAYQQGQNQLYNELNLGRREEYDVLDKRRGRDPEMGGKPQRRKNPQEGLYNELQKDKMAEAYSEIGMKGERRRGKGHDGLYQGLSTATKDTYDALHMQALPPR

SEQ ID NO: 44841 - protein, 585 aa, synthetic construct
MALPVTALLLPLALLLHAARPQIVLTQSPAIMSVSPGEKVTMTCSASSSVNYMHWFQQKPGTSPKLWVYSTSNLASGVPARFSGSGSGTSYSLTISSMEAEDAATYYCQQRSIYPPWTFGGGTKLEIKLEQSFGLLDPKLCYLLDGILFIYGVILTALFLRVKFSRSADAPAYQQGQNQLYNELNLGRREEYDVLDKRRGRDPEMGGKPQRRKNPQEGLYNELQKDKMAEAYSEIGMKGERRRGKGHDGLYQGLSTATKDTYDALHMQALPPRRAKRSGSGATNFSLLKQAGDVEENPGPTSMDWIWRILFLVGAATGAHSFEEVQLQQSGPELVKPGASVKISCKASGYSFTGYTMNWVKQSHGKNLEWIGLINPYNGGTSYNQKFKAKATLTVDKSSSTAYMQLKSLTSEDSAVYYCARDYGYVLDYWGQGTSVTVSSTRQSFGLLDPKLCYLLDGILFIYGVILTALFLRVKFSRSADAPAYQQGQNQLYNELNLGRREEYDVLDKRRGRDPEMGGKPQRRKNPQEGLYNELQKDKMAEAYSEIGMKGERRRGKGHDGLYQGLSTATKDTYDALHMQALPPR

SEQ ID NO: 44842 - protein, 643 aa, synthetic construct
MALPVTALLLPLALLLHAARPQIVLTQSPAIMSVSPGEKVTMTCSASSSVNYMHWFQQKPGTSPKLWVYSTSNLASGVPARFSGSGSGTSYSLTISSMEAEDAATYYCQQRSIYPPWTFGGGTKLEIKLEGQPKANPTVTLFPPSSEELQANKATLVCLISDFYPGAVTVAWKADGSPVKAGVETTKPSKQSNNKYAASSYLSLTPEQWKSHRSYSCQVTHEGSTVEKTVAPTECSPIKTDVITMDPKDNCSKDANDTLLLQLTNTSAYYMYLLLLLKSVVYFAIITCCLLRRTAFCCNGEKSRAKRSGSGATNFSLLKQAGDVEENPGPTSMDWIWRILFLVGAATGAHSFEEVQLQQSGPELVKPGASVKISCKASGYSFTGYTMNWVKQSHGKNLEWIGLINPYNGGTSYNQKFKAKATLTVDKSSSTAYMQLKSLTSEDSAVYYCARDYGYVLDYWGQGTSVTVSSTRASTKGPSVFPLAPSSKSTSGGTAALGCLVKDYFPEPVTVSWNSGALTSGVHTFPAVLQSSGLYSLSSVVTVPSSSLGTQTYICNVNHKPSNTKVDKRVEPKSCEVKTDSTDHVKPKETENTKQPSKSCHKPKAIVHTEKVNMMSLTVLGLRMLFAKTVAVNFLLTAKLFFL

SEQ ID NO: 44843 - protein, 621 aa, synthetic construct
MALPVTALLLPLALLLHAARPQIVLTQSPAIMSVSPGEKVTMTCSASSSVNYMHWFQQKPGTSPKLWVYSTSNLASGVPARFSGSGSGTSYSLTISSMEAEDAATYYCQQRSIYPPWTFGGGTKLEIKLEGQPKANPTVTLFPPSSEELQANKATLVCLISDFYPGAVTVAWKADGSPVKAGVETTKPSKQSNNKYAASSYLSLTPEQWKSHRSYSCQVTHEGSTVEKTVAPTECSGRADCGITSASYHQGVLSATILYEILLGKATLYAVLVSALVLMAMVKRKDSRGRAKRSGSGATNFSLLKQAGDVEENPGPTSMDWIWRILFLVGAATGAHSFEEVQLQQSGPELVKPGASVKISCKASGYSFTGYTMNWVKQSHGKNLEWIGLINPYNGGTSYNQKFKAKATLTVDKSSSTAYMQLKSLTSEDSAVYYCARDYGYVLDYWGQGTSVTVSSTRASTKGPSVFPLAPSSKSTSGGTAALGCLVKDYFPEPVTVSWNSGALTSGVHTFPAVLQSSGLYSLSSVVTVPSSSLGTQTYICNVNHKPSNTKVDKRVEPKSCIPEDTFFPSSDVPCDVKLVEKSFETDTNLNFQNLSVIGFRILLLKVAGFNLLMTLRLWSS

SEQ ID NO: 44844 - protein, 621 aa, synthetic construct
MALPVTALLLPLALLLHAARPQIVLTQSPAIMSVSPGEKVTMTCSASSSVNYMHWFQQKPGTSPKLWVYSTSNLASGVPARFSGSGSGTSYSLTISSMEAEDAATYYCQQRSIYPPWTFGGGTKLEIKLEGQPKANPTVTLFPPSSEELQANKATLVCLISDFYPGAVTVAWKADGSPVKAGVETTKPSKQSNNKYAASSYLSLTPEQWKSHRSYSCQVTHEGSTVEKTVAPTECSGRADCGFTSESYQQGVLSATILYEILLGKATLYAVLVSALVLMAMVKRKDSRGRAKRSGSGATNFSLLKQAGDVEENPGPTSMDWIWRILFLVGAATGAHSFEEVQLQQSGPELVKPGASVKISCKASGYSFTGYTMNWVKQSHGKNLEWIGLINPYNGGTSYNQKFKAKATLTVDKSSSTAYMQLKSLTSEDSAVYYCARDYGYVLDYWGQGTSVTVSSTRASTKGPSVFPLAPSSKSTSGGTAALGCLVKDYFPEPVTVSWNSGALTSGVHTFPAVLQSSGLYSLSSVVTVPSSSLGTQTYICNVNHKPSNTKVDKRVEPKSCIPEDTFFPSPESSCDVKLVEKSFETDTNLNFQNLSVIGFRILLLKVAGFNLLMTLRLWSS

SEQ ID NO: 44845 - protein, 447 aa, synthetic construct
MALPVTALLLPLALLLHAARPQIVLTQSPAIMSVSPGEKVTMTCSASSSVNYMHWFQQKPGTSPKLWVYSTSNLASGVPARFSGSGSGTSYSLTISSMEAEDAATYYCQQRSIYPPWTFGGGTKLEIKGGGGSGGGGSGGGGSEVQLQQSGPELVKPGASVKISCKASGYSFTGYTMNWVKQSHGKNLEWIGLINPYNGGTSYNQKFKAKATLTVDKSSSTAYMQLKSLTSEDSAVYYCARDYGYVLDYWGQGTSVTVSSTRDGNEEMGGITQTPYKVSISGTTVILTCPQYPGSEILWQHNDKNIGGDEDDKNIGSDEDHLSLKEFSELEQSGYYVCYPRGSKPEDANFYLYLRARVCENCMEMDVMSVATIVIVDICITGGLLLLVYYWSKNRKAKAKPVTRGAGAGGRQRGQNKERPPPVPNPDYEPIRKGQRDLYSGLNQRRI

SEQ ID NO: 44846 - protein, 412 aa, synthetic construct
MALPVTALLLPLALLLHAARPQIVLTQSPAIMSVSPGEKVTMTCSASSSVNYMHWFQQKPGTSPKLWVYSTSNLASGVPARFSGSGSGTSYSLTISSMEAEDAATYYCQQRSIYPPWTFGGGTKLEIKGGGGSGGGGSGGGGSEVQLQQSGPELVKPGASVKISCKASGYSFTGYTMNWVKQSHGKNLEWIGLINPYNGGTSYNQKFKAKATLTVDKSSSTAYMQLKSLTSEDSAVYYCARDYGYVLDYWGQGTSVTVSSTRFKIPIEELEDRVFVNCNTSITWVEGTVGTLLSDITRLDLGKRILDPRGIYRCNGTDIYKDKESTVQVHYRMCQSCVELDPATVAGIIVTDVIATLLLALGVFCFAGHETGRLSGAADTQALLRNDQVYQPLRDRDDAQYSHLGGNWARNK

SEQ ID NO: 44847 - protein, 422 aa, synthetic construct
MALPVTALLLPLALLLHAARPQIVLTQSPAIMSVSPGEKVTMTCSASSSVNYMHWFQQKPGTSPKLWVYSTSNLASGVPARFSGSGSGTSYSLTISSMEAEDAATYYCQQRSIYPPWTFGGGTKLEIKGGGGSGGGGSGGGGSEVQLQQSGPELVKPGASVKISCKASGYSFTGYTMNWVKQSHGKNLEWIGLINPYNGGTSYNQKFKAKATLTVDKSSSTAYMQLKSLTSEDSAVYYCARDYGYVLDYWGQGTSVTVSSTRQSIKGNHLVKVYDYQEDGSVLLTCDAEAKNITWFKDGKMIGFLTEDKKKWNLGSNAKDPRGMYQCKGSQNKSKPLQVYYRMCQNCIELNAATISGFLFAEIVSIFVLAVGVYFIAGQDGVRQSRASDKQTLLPNDQLYQPLKDREDDQYSHLQGNQLRRN

SEQ ID NO: 44848 - protein, 405 aa, synthetic construct
MALPVTALLLPLALLLHAARPQIVLTQSPAIMSVSPGEKVTMTCSASSSVNYMHWFQQKPGTSPKLWVYSTSNLASGVPARFSGSGSGTSYSLTISSMEAEDAATYYCQQRSIYPPWTFGGGTKLEIKGGGGSGGGGSGGGGSEVQLQQSGPELVKPGASVKISCKASGYSFTGYTMNWVKQSHGKNLEWIGLINPYNGGTSYNQKFKAKATLTVDKSSSTAYMQLKSLTSEDSAVYYCARDYGYVLDYWGQGTSVTVSSTRQSFGLLDPKLCYLLDGILFIYGVILTALFLRVKFSRSADAPAYQQGQNQLYNELNLGRREEYDVLDKRRGRDPEMGGKPQRRKNPQEGLYNELQKDKMAEAYSEIGMKGERRRGKGHDGLYQGLSTATKDTYDALHMQALPPR

SEQ ID NO: 44849 - protein, 500 aa, synthetic construct
MALPVTALLLPLALLLHAARPQIVLTQSPAIMSVSPGEKVTMTCSASSSVNYMHWFQQKPGTSPKLWVYSTSNLASGVPARFSGSGSGTSYSLTISSMEAEDAATYYCQQRSIYPPWTFGGGTKLEIKGGGGSGGGGSGGGGSEVQLQQSGPELVKPGASVKISCKASGYSFTGYTMNWVKQSHGKNLEWIGLINPYNGGTSYNQKFKAKATLTVDKSSSTAYMQLKSLTSEDSAVYYCARDYGYVLDYWGQGTSVTVSSTRGMRTEDLPKAVVFLEPQWYRVLEKDSVTLKCQGAYSPEDNSTQWFHNESLISSQASSYFIDAATVDDSGEYRCQTNLSTLSDPVQLEVHIGWLLLQAPRWVFKEEDPIHLRCHSWKNTALHKVTYLQNGKGRKYFHHNSDFYIPKATLKDSGSYFCRGLVGSKNVSSETVNITITQGLAVPTISSFFPPGYQVSFCLVMVLLFAVDTGLYFSVKTNIRSSTRDWKDHKFKWRKDPQDK

SEQ ID NO: 44850 - protein, 475 aa, synthetic construct
MALPVTALLLPLALLLHAARPQIVLTQSPAIMSVSPGEKVTMTCSASSSVNYMHWFQQKPGTSPKLWVYSTSNLASGVPARFSGSGSGTSYSLTISSMEAEDAATYYCQQRSIYPPWTFGGGTKLEIKGGGGSGGGGSGGGGSEVQLQQSGPELVKPGASVKISCKASGYSFTGYTMNWVKQSHGKNLEWIGLINPYNGGTSYNQKFKAKATLTVDKSSSTAYMQLKSLTSEDSAVYYCARDYGYVLDYWGQGTSVTVSSTRGMRTEDLPKAVVFLEPQWYRVLEKDSVTLKCQGAYSPEDNSTQWFHNESLISSQASSYFIDAATVDDSGEYRCQTNLSTLSDPVQLEVHIGWLLLQAPRWVFKEEDPIHLRCHSWKNTALHKVTYLQNGKGRKYFHHNSDFYIPKATLKDSGSYFCRGLVGSKNVSSETVNITITQGLAVPTISSFFPPGYQVSFCLVMVLLFAVDTGLYFSV

SEQ ID NO: 44851 - protein, 476 aa, synthetic construct
MALPVTALLLPLALLLHAARPQIVLTQSPAIMSVSPGEKVTMTCSASSSVNYMHWFQQKPGTSPKLWVYSTSNLASGVPARFSGSGSGTSYSLTISSMEAEDAATYYCQQRSIYPPWTFGGGTKLEIKGGGGSGGGGSGGGGSEVQLQQSGPELVKPGASVKISCKASGYSFTGYTMNWVKQSHGKNLEWIGLINPYNGGTSYNQKFKAKATLTVDKSSSTAYMQLKSLTSEDSAVYYCARDYGYVLDYWGQGTSVTVSSTRGMRTEDLPKAVVFLEPQWYRVLEKDSVTLKCQGAYSPEDNSTQWFHNESLISSQASSYFIDAATVDDSGEYRCQTNLSTLSDPVQLEVHIGWLLLQAPRWVFKEEDPIHLRCHSWKNTALHKVTYLQNGKGRKYFHHNSDFYIPKATLKDSGSYFCRGLVGSKNVSSETVNITITQGLAVPTISSFFPPGYQVSFCLVMVLLFAVDTGLYFSVK

SEQ ID NO: 44852 - protein, 720 aa, synthetic construct
MALPVTALLLPLALLLHAARPQIVLTQSPAIMSVSPGEKVTMTCSASSSVNYMHWFQQKPGTSPKLWVYSTSNLASGVPARFSGSGSGTSYSLTISSMEAEDAATYYCQQRSIYPPWTFGGGTKLEIKLEGQPKANPTVTLFPPSSEELQANKATLVCLISDFYPGAVTVAWKADGSPVKAGVETTKPSKQSNNKYAASSYLSLTPEQWKSHRSYSCQVTHEGSTVEKTVAPTECSGSQSFGLLDPKLCYLLDGILFIYGVILTALFLRVKFSRSADAPAYQQGQNQLYNELNLGRREEYDVLDKRRGRDPEMGGKPQRRKNPQEGLYNELQKDKMAEAYSEIGMKGERRRGKGHDGLYQGLSTATKDTYDALHMQALPPRRAKRSGSGATNFSLLKQAGDVEENPGPTSMDWIWRILFLVGAATGAHSFEEVQLQQSGPELVKPGASVKISCKASGYSFTGYTMNWVKQSHGKNLEWIGLINPYNGGTSYNQKFKAKATLTVDKSSSTAYMQLKSLTSEDSAVYYCARDYGYVLDYWGQGTSVTVSSTRASTKGPSVFPLAPSSKSTSGGTAALGCLVKDYFPEPVTVSWNSGALTSGVHTFPAVLQSSGLYSLSSVVTVPSSSLGTQTYICNVNHKPSNTKVDKRVEPKSCGTITQGLAVSTISSFFPPGYQVSFCLVMVLLFAVDTGLYFSVKTNIRSSTRDWKDHKFKWRKDPQDK

SEQ ID NO: 44853 - protein, 735 aa, synthetic construct
MALPVTALLLPLALLLHAARPQIVLTQSPAIMSVSPGEKVTMTCSASSSVNYMHWFQQKPGTSPKLWVYSTSNLASGVPARFSGSGSGTSYSLTISSMEAEDAATYYCQQRSIYPPWTFGGGTKLEIKLEDLKNVFPPEVAVFEPSEAEISHTQKATLVCLATGFYPDHVELSWWVNGKEVHSGVSTDPQPLKEQPALNDSRYCLSSRLRVSATFWQNPRNHFRCQVQFYGLSENDEWTQDRAKPVTQIVSAEAWGRADCGSQSFGLLDPKLCYLLDGILFIYGVILTALFLRVKFSRSADAPAYQQGQNQLYNELNLGRREEYDVLDKRRGRDPEMGGKPQRRKNPQEGLYNELQKDKMAEAYSEIGMKGERRRGKGHDGLYQGLSTATKDTYDALHMQALPPRRAKRSGSGATNFSLLKQAGDVEENPGPTSMDWIWRILFLVGAATGAHSFEEVQLQQSGPELVKPGASVKISCKASGYSFTGYTMNWVKQSHGKNLEWIGLINPYNGGTSYNQKFKAKATLTVDKSSSTAYMQLKSLTSEDSAVYYCARDYGYVLDYWGQGTSVTVSSTRIQNPDPAVYQLRDSKSSDKSVCLFTDFDSQTNVSQSKDSDVYITDKTVLDMRSMDFKSNSAVAWSNKSDFACANAFNNSIIPEDTFFPSPESSCGTITQGLAVSTISSFFPPGYQVSFCLVMVLLFAVDTGLYFSVKTNIRSSTRDWKDHKFKWRKDPQDK

SEQ ID NO: 44854 - protein, 710 aa, synthetic construct
MALPVTALLLPLALLLHAARPQIVLTQSPAIMSVSPGEKVTMTCSASSSVNYMHWFQQKPGTSPKLWVYSTSNLASGVPARFSGSGSGTSYSLTISSMEAEDAATYYCQQRSIYPPWTFGGGTKLEIKLEDLKNVFPPEVAVFEPSEAEISHTQKATLVCLATGFYPDHVELSWWVNGKEVHSGVSTDPQPLKEQPALNDSRYCLSSRLRVSATFWQNPRNHFRCQVQFYGLSENDEWTQDRAKPVTQIVSAEAWGRADCGSQSFGLLDPKLCYLLDGILFIYGVILTALFLRVKFSRSADAPAYQQGQNQLYNELNLGRREEYDVLDKRRGRDPEMGGKPQRRKNPQEGLYNELQKDKMAEAYSEIGMKGERRRGKGHDGLYQGLSTATKDTYDALHMQALPPRRAKRSGSGATNFSLLKQAGDVEENPGPTSMDWIWRILFLVGAATGAHSFEEVQLQQSGPELVKPGASVKISCKASGYSFTGYTMNWVKQSHGKNLEWIGLINPYNGGTSYNQKFKAKATLTVDKSSSTAYMQLKSLTSEDSAVYYCARDYGYVLDYWGQGTSVTVSSTRIQNPDPAVYQLRDSKSSDKSVCLFTDFDSQTNVSQSKDSDVYITDKTVLDMRSMDFKSNSAVAWSNKSDFACANAFNNSIIPEDTFFPSPESSCGTITQGLAVSTISSFFPPGYQVSFCLVMVLLFAVDTGLYFSV

SEQ ID NO: 44855 - protein, 711 aa, synthetic construct
MALPVTALLLPLALLLHAARPQIVLTQSPAIMSVSPGEKVTMTCSASSSVNYMHWFQQKPGTSPKLWVYSTSNLASGVPARFSGSGSGTSYSLTISSMEAEDAATYYCQQRSIYPPWTFGGGTKLEIKLEDLKNVFPPEVAVFEPSEAEISHTQKATLVCLATGFYPDHVELSWWVNGKEVHSGVSTDPQPLKEQPALNDSRYCLSSRLRVSATFWQNPRNHFRCQVQFYGLSENDEWTQDRAKPVTQIVSAEAWGRADCGSQSFGLLDPKLCYLLDGILFIYGVILTALFLRVKFSRSADAPAYQQGQNQLYNELNLGRREEYDVLDKRRGRDPEMGGKPQRRKNPQEGLYNELQKDKMAEAYSEIGMKGERRRGKGHDGLYQGLSTATKDTYDALHMQALPPRRAKRSGSGATNFSLLKQAGDVEENPGPTSMDWIWRILFLVGAATGAHSFEEVQLQQSGPELVKPGASVKISCKASGYSFTGYTMNWVKQSHGKNLEWIGLINPYNGGTSYNQKFKAKATLTVDKSSSTAYMQLKSLTSEDSAVYYCARDYGYVLDYWGQGTSVTVSSTRIQNPDPAVYQLRDSKSSDKSVCLFTDFDSQTNVSQSKDSDVYITDKTVLDMRSMDFKSNSAVAWSNKSDFACANAFNNSIIPEDTFFPSPESSCGTITQGLAVSTISSFFPPGYQVSFCLVMVLLFAVDTGLYFSVK

SEQ ID NO: 44856 - protein, 712 aa, synthetic construct
MALPVTALLLPLALLLHAARPQIVLTQSPAIMSVSPGEKVTMTCSASSSVNYMHWFQQKPGTSPKLWVYSTSNLASGVPARFSGSGSGTSYSLTISSMEAEDAATYYCQQRSIYPPWTFGGGTKLEIKLEDLKNVFPPEVAVFEPSEAEISHTQKATLVCLATGFYPDHVELSWWVNGKEVHSGVSTDPQPLKEQPALNDSRYCLSSRLRVSATFWQNPRNHFRCQVQFYGLSENDEWTQDRAKPVTQIVSAEAWGRADCGSQSFGLLDPKLCYLLDGILFIYGVILTALFLRVKFSRSADAPAYQQGQNQLYNELNLGRREEYDVLDKRRGRDPEMGGKPQRRKNPQEGLYNELQKDKMAEAYSEIGMKGERRRGKGHDGLYQGLSTATKDTYDALHMQALPPRRAKRSGSGATNFSLLKQAGDVEENPGPTSMDWIWRILFLVGAATGAHSFEEVQLQQSGPELVKPGASVKISCKASGYSFTGYTMNWVKQSHGKNLEWIGLINPYNGGTSYNQKFKAKATLTVDKSSSTAYMQLKSLTSEDSAVYYCARDYGYVLDYWGQGTSVTVSSTRIQNPDPAVYQLRDSKSSDKSVCLFTDFDSQTNVSQSKDSDVYITDKTVLDMRSMDFKSNSAVAWSNKSDFACANAFNNSIIPEDTFFPSPESSCGTITQGLAVSTISSFFPPGYQVSFCLVMVLLFAVDTGLYFSVKT

SEQ ID NO: 44857 - protein, 648 aa, synthetic construct
MALPVTALLLPLALLLHAARPQIVLTQSPAIMSVSPGEKVTMTCSASSSVNYMHWFQQKPGTSPKLWVYSTSNLASGVPARFSGSGSGTSYSLTISSMEAEDAATYYCQQRSIYPPWTFGGGTKLEIKLEGQPKANPTVTLFPPSSEELQANKATLVCLISDFYPGAVTVAWKADGSPVKAGVETTKPSKQSNNKYAASSYLSLTPEQWKSHRSYSCQVTHEGSTVEKTVAPTECSGSLGEPQLCYILDAILFLYGIVLTLLYCRLKIQVRKAAITSYEKSDGVYTGLSTRNQETYETLKHEKPPQRAKRSGSGATNFSLLKQAGDVEENPGPTSMDWIWRILFLVGAATGAHSFEEVQLQQSGPELVKPGASVKISCKASGYSFTGYTMNWVKQSHGKNLEWIGLINPYNGGTSYNQKFKAKATLTVDKSSSTAYMQLKSLTSEDSAVYYCARDYGYVLDYWGQGTSVTVSSTRASTKGPSVFPLAPSSKSTSGGTAALGCLVKDYFPEPVTVSWNSGALTSGVHTFPAVLQSSGLYSLSSVVTVPSSSLGTQTYICNVNHKPSNTKVDKRVEPKSCGTLGEPQLCYILDAILFLYGIVLTLLYCRLKIQVRKAAITSYEKSDGVYTGLSTRNQETYETLKHEKPPQ

SEQ ID NO: 44858 - protein, 618 aa, synthetic construct
MALPVTALLLPLALLLHAARPQIVLTQSPAIMSVSPGEKVTMTCSASSSVNYMHWFQQKPGTSPKLWVYSTSNLASGVPARFSGSGSGTSYSLTISSMEAEDAATYYCQQRSIYPPWTFGGGTKLEIKLEDLKNVFPPEVAVFEPSEAEISHTQKATLVCLATGFYPDHVELSWWVNGKEVHSGVCTDPQPLKEQPALNDSRYCLSSRLRVSATFWQNPRNHFRCQVQFYGLSENDEWTQDRAKPVTQIVSAEAWGRADCGFTSESYQQGVLSAYYMYLLLLLKSVVYFAIITCCLLRRTAFCCNGEKSRAKRSGSGATNFSLLKQAGDVEENPGPTSMDWIWRILFLVGAATGAHSFEEVQLQQSGPELVKPGASVKISCKASGYSFTGYTMNWVKQSHGKNLEWIGLINPYNGGTSYNQKFKAKATLTVDKSSSTAYMQLKSLTSEDSAVYYCARDYGYVLDYWGQGTSVTVSSTRIQNPDPAVYQLRDSKSSDKSVCLFTDFDSQTNVSQSKDSDVYITDKCVLDMRSMDFKSNSAVAWSNKSDFACANAFNNSIIPEDTFFPSPESSCDVKLVEKSFETDTNLNFQNLSVIGFRILLLKVAGFNLLMTLRLWSS

SEQ ID NO: 44859 - protein, 624 aa, synthetic construct
MALPVTALLLPLALLLHAARPQIVLTQSPAIMSVSPGEKVTMTCSASSSVNYMHWFQQKPGTSPKLWVYSTSNLASGVPARFSGSGSGTSYSLTISSMEAEDAATYYCQQRSIYPPWTFGGGTKLEIKLEDKQLDADVSPKPTIFLPSIAETKLQKAGTYLCLLEKFFPDVIKIHWQEKKSNTILGSQEGNTMKTNDTYMKFSWLTVPEKSLDKEHRCIVRHENNKNGVDQEIIFPPIKTDVITMDPKDNCSKDANDTLLLQLTNTSAYYMYEILLGKATLYAVLVSALVLMAMVKRKDSRGRAKRSGSGATNFSLLKQAGDVEENPGPTSMDWIWRILFLVGAATGAHSFEEVQLQQSGPELVKPGASVKISCKASGYSFTGYTMNWVKQSHGKNLEWIGLINPYNGGTSYNQKFKAKATLTVDKSSSTAYMQLKSLTSEDSAVYYCARDYGYVLDYWGQGTSVTVSSTRSQPHTKPSVFVMKNGTNVACLVKEFYPKDIRINLVSSKKITEFDPAIVISPSGKYNAVKLGKYEDSNSVTCSVQHDNKTVHSTDFEVKTDSTDHVKPKETENTKQPSKSCHKPKAIVHTEKVNMMSLTVIGFRILLLKVAGFNLLMTLRLWSS

SEQ ID NO: 44860 - protein, 624 aa, synthetic construct
MALPVTALLLPLALLLHAARPQIVLTQSPAIMSVSPGEKVTMTCSASSSVNYMHWFQQKPGTSPKLWVYSTSNLASGVPARFSGSGSGTSYSLTISSMEAEDAATYYCQQRSIYPPWTFGGGTKLEIKLEDKQLDADVSPKPTIFLPSIAETKLQKAGTYLCLLEKFFPDVIKIHWQEKKSNTILGSQEGNTMKTNDTYMKFSWLTVPEKSLDKEHRCIVRHENNKNGVDQEIIFPPIKTDVITMDPKDNCSKDANDTLLLQLTNTSATILYEILLGKATLYAVLVSALVLMAMVKRKDSRGRAKRSGSGATNFSLLKQAGDVEENPGPTSMDWIWRILFLVGAATGAHSFEEVQLQQSGPELVKPGASVKISCKASGYSFTGYTMNWVKQSHGKNLEWIGLINPYNGGTSYNQKFKAKATLTVDKSSSTAYMQLKSLTSEDSAVYYCARDYGYVLDYWGQGTSVTVSSTRSQPHTKPSVFVMKNGTNVACLVKEFYPKDIRINLVSSKKITEFDPAIVISPSGKYNAVKLGKYEDSNSVTCSVQHDNKTVHSTDFEVKTDSTDHVKPKETENTKQPSKSCHKPKAIVHTEKVNMMSLTVIGFRILLLKVAGFNLLMTLRLWSS

SEQ ID NO: 44861 - protein, 624 aa, synthetic construct
MALPVTALLLPLALLLHAARPQIVLTQSPAIMSVSPGEKVTMTCSASSSVNYMHWFQQKPGTSPKLWVYSTSNLASGVPARFSGSGSGTSYSLTISSMEAEDAATYYCQQRSIYPPWTFGGGTKLEIKLEDKQLDADVSPKPTIFLPSIAETKLQKAGTYLCLLEKFFPDVIKIHWQEKKSNTILGSQEGNTMKTNDTYMKFSWLTVPEKSLDKEHRCIVRHENNKNGVDQEIIFPPIKTDVITMDPKDNCSKDANDTLLLQLTNTSAYYMYEILLGKATLYAVLVSALVLMAMVKRKDSRGRAKRSGSGATNFSLLKQAGDVEENPGPTSMDWIWRILFLVGAATGAHSFEEVQLQQSGPELVKPGASVKISCKASGYSFTGYTMNWVKQSHGKNLEWIGLINPYNGGTSYNQKFKAKATLTVDKSSSTAYMQLKSLTSEDSAVYYCARDYGYVLDYWGQGTSVTVSSTRSQPHTKPSVFVMKNGTNVACLVKEFYPKDIRINLVSSKKITEFDPAIVISPSGKYNAVKLGKYEDSNSVTCSVQHDNKTVHSTDFEVKTDSTDHVKPKETENTKQPSKSCHKPKAIVHTEKVNMMSLTVLGFRILLLKVAGFNLLMTLRLWSS

SEQ ID NO: 44862 - protein, 624 aa, synthetic construct
MALPVTALLLPLALLLHAARPQIVLTQSPAIMSVSPGEKVTMTCSASSSVNYMHWFQQKPGTSPKLWVYSTSNLASGVPARFSGSGSGTSYSLTISSMEAEDAATYYCQQRSIYPPWTFGGGTKLEIKLEDKQLDADVSPKPTIFLPSIAETKLQKAGTYLCLLEKFFPDVIKIHWQEKKSNTILGSQEGNTMKTNDTYMKFSWLTVPEKSLDKEHRCIVRHENNKNGVDQEIIFPPIKTDVITMDPKDNCSKDANDTLLLQLTNTSATILYEILLGKATLYAVLVSALVLMAMVKRKDSRGRAKRSGSGATNFSLLKQAGDVEENPGPTSMDWIWRILFLVGAATGAHSFEEVQLQQSGPELVKPGASVKISCKASGYSFTGYTMNWVKQSHGKNLEWIGLINPYNGGTSYNQKFKAKATLTVDKSSSTAYMQLKSLTSEDSAVYYCARDYGYVLDYWGQGTSVTVSSTRSQPHTKPSVFVMKNGTNVACLVKEFYPKDIRINLVSSKKITEFDPAIVISPSGKYNAVKLGKYEDSNSVTCSVQHDNKTVHSTDFEVKTDSTDHVKPKETENTKQPSKSCHKPKAIVHTEKVNMMSLTVLGFRILLLKVAGFNLLMTLRLWSS

SEQ ID NO: 44863 - protein, 618 aa, synthetic construct
MALPVTALLLPLALLLHAARPQIVLTQSPAIMSVSPGEKVTMTCSASSSVNYMHWFQQKPGTSPKLWVYSTSNLASGVPARFSGSGSGTSYSLTISSMEAEDAATYYCQQRSIYPPWTFGGGTKLEIKLEDLKNVFPPEVAVFEPSEAEISHTQKATLVCLATGFYPDHVELSWWVNGKEVHSGVCTDPQPLKEQPALNDSRYCLSSRLRVSATFWQNPRNHFRCQVQFYGLSENDEWTQDRAKPVTQIVSAEAWGRADCGFTSESYQQGVLSATILYLLLLLKSVVYFAIITCCLLRRTAFCCNGEKSRAKRSGSGATNFSLLKQAGDVEENPGPTSMDWIWRILFLVGAATGAHSFEEVQLQQSGPELVKPGASVKISCKASGYSFTGYTMNWVKQSHGKNLEWIGLINPYNGGTSYNQKFKAKATLTVDKSSSTAYMQLKSLTSEDSAVYYCARDYGYVLDYWGQGTSVTVSSTRIQNPDPAVYQLRDSKSSDKSVCLFTDFDSQTNVSQSKDSDVYITDKCVLDMRSMDFKSNSAVAWSNKSDFACANAFNNSIIPEDTFFPSPESSCDVKLVEKSFETDTNLNFQNLSVIGLRMLFAKTVAVNFLLTAKLFFL

SEQ ID NO: 44864 - protein, 647 aa, synthetic construct
MALPVTALLLPLALLLHAARPQIVLTQSPAIMSVSPGEKVTMTCSASSSVNYMHWFQQKPGTSPKLWVYSTSNLASGVPARFSGSGSGTSYSLTISSMEAEDAATYYCQQRSIYPPWTFGGGTKLEIKLEDLKNVFPPEVAVFEPSEAEISHTQKATLVCLATGFYPDHVELSWWVNGKEVHSGVSTDPQPLKEQPALNDSRYCLSSRLRVSATFWQNPRNHFRCQVQFYGLSENDEWTQDRAKPVTQIVSAEAWGRADCGSSKDANDTLLLQLTNTSAYYMYLLLLLKSVVYFAIITCCLLRRTAFCCNGEKSRAKRSGSGATNFSLLKQAGDVEENPGPTSMDWIWRILFLVGAATGAHSFEEVQLQQSGPELVKPGASVKISCKASGYSFTGYTMNWVKQSHGKNLEWIGLINPYNGGTSYNQKFKAKATLTVDKSSSTAYMQLKSLTSEDSAVYYCARDYGYVLDYWGQGTSVTVSSTRIQNPDPAVYQLRDSKSSDKSVCLFTDFDSQTNVSQSKDSDVYITDKTVLDMRSMDFKSNSAVAWSNKSDFACANAFNNSIIPEDTFFPSPESSCGTEVKTDSTDHVKPKETENTKQPSKSCHKPKAIVHTEKVNMMSLTVLGLRMLFAKTVAVNFLLTAKLFFL

SEQ ID NO: 44865 - protein, 617 aa, synthetic construct
MALPVTALLLPLALLLHAARPQIVLTQSPAIMSVSPGEKVTMTCSASSSVNYMHWFQQKPGTSPKLWVYSTSNLASGVPARFSGSGSGTSYSLTISSMEAEDAATYYCQQRSIYPPWTFGGGTKLEIKLEDLKNVFPPEVAVFEPSEAEISHTQKATLVCLATGFYPDHVELSWWVNGKEVHSGVCTDPQPLKEQPALNDSRYCLSSRLRVSATFWQNPRNHFRCQVQFYGLSENDEWTQDRAKPVTQIVSAEAWGRADCDVKLVEKSFETDTNLNFQNLSVIGFRILLLKVAGFNLLMTLRLWSSRAKRSGSGATNFSLLKQAGDVEENPGPTSMDWIWRILFLVGAATGAHSFEEVQLQQSGPELVKPGASVKISCKASGYSFTGYTMNWVKQSHGKNLEWIGLINPYNGGTSYNQKFKAKATLTVDKSSSTAYMQLKSLTSEDSAVYYCARDYGYVLDYWGQGTSVTVSSTRIQNPDPAVYQLRDSKSSDKSVCLFTDFDSQTNVSQSKDSDVYITDKCVLDMRSMDFKSNSAVAWSNKSDFACANAFNNSIIPEDTFFPSPESSCGFTSESYQQGVLSATILYEILLGKATLYAVLVSALVLMAMVKRKDSRG

SEQ ID NO: 44866 - protein, 617 aa, synthetic construct
MALPVTALLLPLALLLHAARPQIVLTQSPAIMSVSPGEKVTMTCSASSSVNYMHWFQQKPGTSPKLWVYSTSNLASGVPARFSGSGSGTSYSLTISSMEAEDAATYYCQQRSIYPPWTFGGGTKLEIKLEDLKNVFPPEVAVFEPSEAEISHTQKATLVCLATGFYPDHVELSWWVNGKEVHSGVCTDPQPLKEQPALNDSRYCLSSRLRVSATFWQNPRNHFRCQVQFYGLSENDEWTQDRAKPVTQIVSAEAWGRADCGFTSESYQQGVLSATNLSVIGFRILLLKVAGFNLLMTLRLWSSRAKRSGSGATNFSLLKQAGDVEENPGPTSMDWIWRILFLVGAATGAHSFEEVQLQQSGPELVKPGASVKISCKASGYSFTGYTMNWVKQSHGKNLEWIGLINPYNGGTSYNQKFKAKATLTVDKSSSTAYMQLKSLTSEDSAVYYCARDYGYVLDYWGQGTSVTVSSTRIQNPDPAVYQLRDSKSSDKSVCLFTDFDSQTNVSQSKDSDVYITDKCVLDMRSMDFKSNSAVAWSNKSDFACANAFNNSIIPEDTFFPSPESSCDVKLVEKSFETDTNLNFQILYEILLGKATLYAVLVSALVLMAMVKRKDSRG

SEQ ID NO: 44867 - protein, 617 aa, synthetic construct; identical to SEQ ID NO: 44865

SEQ ID NO: 44868 - protein, 617 aa, synthetic construct; identical to SEQ ID NO: 44866

SEQ ID NO: 44869 - protein, 617 aa, synthetic construct; identical to SEQ ID NO: 44865

SEQ ID NO: 44870 - protein, 620 aa, synthetic construct
MALPVTALLLPLALLLHAARPQIVLTQSPAIMSVSPGEKVTMTCSASSSVNYMHWFQQKPGTSPKLWVYSTSNLASGVPARFSGSGSGTSYSLTISSMEAEDAATYYCQQRSIYPPWTFGGGTKLEIKLEADVSPKPTIFLPSIAETKLQKAGTYLCLLEKFFPDVIKIHWQEKKSNTILGSQEGNTMKTNDTYMKFSWLTVPEKSLDKEHRCIVRHENNKNGVDQEIIFPPIKTDVITMDPKDNCSKDANDTLLLQLTNTSAYYMYLLLLLKSVVYFAIITCCLLRRTAFCCNGEKSRAKRSGSGATNFSLLKQAGDVEENPGPTSMDWIWRILFLVGAATGAHSFEEVQLQQSGPELVKPGASVKISCKASGYSFTGYTMNWVKQSHGKNLEWIGLINPYNGGTSYNQKFKAKATLTVDKSSSTAYMQLKSLTSEDSAVYYCARDYGYVLDYWGQGTSVTVSSTRSQPHTKPSVFVMKNGTNVACLVKEFYPKDIRINLVSSKKITEFDPAIVISPSGKYNAVKLGKYEDSNSVTCSVQHDNKTVHSTDFEVKTDSTDHVKPKETENTKQPSKSCHKPKAIVHTEKVNMMSLTVIGFRILLLKVAGFNLLMTLRLWSS

SEQ ID NO: 44871 - protein, 620 aa, synthetic construct
MALPVTALLLPLALLLHAARPQIVLTQSPAIMSVSPGEKVTMTCSASSSVNYMHWFQQKPGTSPKLWVYSTSNLASGVPARFSGSGSGTSYSLTISSMEAEDAATYYCQQRSIYPPWTFGGGTKLEIKLEADVSPKPTIFLPSIAETKLQKAGTYLCLLEKFFPDVIKIHWQEKKSNTILGSQEGNTMKTNDTYMKFSWLTVPEKSLDKEHRCIVRHENNKNGVDQEIIFPPIKTDVITMDPKDNCSKDANDTLLLQLTNTSAYYMYLLLLLKSVVYFAIITCCLLRRTAFCCNGEKSRAKRSGSGATNFSLLKQAGDVEENPGPTSMDWIWRILFLVGAATGAHSFEEVQLQQSGPELVKPGASVKISCKASGYSFTGYTMNWVKQSHGKNLEWIGLINPYNGGTSYNQKFKAKATLTVDKSSSTAYMQLKSLTSEDSAVYYCARDYGYVLDYWGQGTSVTVSSTRSQPHTKPSVFVMKNGTNVACLVKEFYPKDIRINLVSSKKITEFDPAIVISPSGKYNAVKLGKYEDSNSVTCSVQHDNKTVHSTDFEVKTDSTDHVKPKETENTKQPSKSCHKPKAIVHTEKVNMMSLTVLGFRILLLKVAGFNLLMTLRLWSS

SEQ ID NO: 44872 - protein, 617 aa, synthetic construct; identical to SEQ ID NO: 44865

SEQ ID NO: 44873 - protein, 621 aa, synthetic construct
MALPVTALLLPLALLLHAARPQIVLTQSPAIMSVSPGEKVTMTCSASSSVNYMHWFQQKPGTSPKLWVYSTSNLASGVPARFSGSGSGTSYSLTISSMEAEDAATYYCQQRSIYPPWTFGGGTKLEIKLEIQNPDPAVYQLRDSKSSDKSVCLFTDFDSQTNVSQSKDSDVYITDKCVLDMRSMDFKSNSAVAWSNKSDFACANAFNNSIIPEDTFFPSPESSCGFTSESYQQGVLSATILYEILLGKATLYAVLVSALVLMAMVKRKDSRGRAKRSGSGVKQTLNFDLLKLAGDVESNPGPTSMDWIWRILFLVGAATGAHSFEEVQLQQSGPELVKPGASVKISCKASGYSFTGYTMNWVKQSHGKNLEWIGLINPYNGGTSYNQKFKAKATLTVDKSSSTAYMQLKSLTSEDSAVYYCARDYGYVLDYWGQGTSVTVSSTREDLKNVFPPEVAVFEPSEAEISHTQKATLVCLATGFYPDHVELSWWVNGKEVHSGVCTDPQPLKEQPALNDSRYCLSSRLRVSATFWQNPRNHFRCQVQFYGLSENDEWTQDRAKPVTQIVSAEAWGRADCDVKLVEKSFETDTNLNFQNLSVIGFRILLLKVAGFNLLMTLRLWSS

SEQ ID NO: 44874 - protein, 752 aa, synthetic construct
MALPVTALLLPLALLLHAARPEVQLVESGGGLVQPGGSLRLSCAASGFSFSDFWMSWVRQAPGKGLEWVATISQAGSEKDYVDSVKGRFTISRDNAKKSLYLQMNSLRAEDTAVYYCASGVYSFDYRGQGTLVTVSSGTGGGGSGGGGSGGGGSEFQIVLTQSPAIMSVSPGEKVTMTCSASSSVNYMHWFQQKPGTSPKLWVYSTSNLASGVPARFSGSGSGTSYSLTISSMEAEDAATYYCQQRSIYPPWTFGGGTKLEIKLEDLKNVFPPEVAVFEPSEAEISHTQKATLVCLATGFYPDHVELSWWVNGKEVHSGVCTDPQPLKEQPALNDSRYCLSSRLRVSATFWQNPRNHFRCQVQFYGLSENDEWTQDRAKPVTQIVSAEAWGRADCDVKLVEKSFETDTNLNFQNLSVIGFRILLLKVAGFNLLMTLRLWSSRAKRSGSGATNFSLLKQAGDVEENPGPTSMDWIWRILFLVGAATGAHSFEEVQLQQSGPELVKPGASVKISCKASGYSFTGYTMNWVKQSHGKNLEWIGLINPYNGGTSYNQKFKAKATLTVDKSSSTAYMQLKSLTSEDSAVYYCARDYGYVLDYWGQGTSVTVSSTRIQNPDPAVYQLRDSKSSDKSVCLFTDFDSQTNVSQSKDSDVYITDKCVLDMRSMDFKSNSAVAWSNKSDFACANAFNNSIIPEDTFFPSPESSCGFTSESYQQGVLSATILYEILLGKATLYAVLVSALVLMAMVKRKDSRG

SEQ ID NO: 44875 - protein, 756 aa, synthetic construct
MALPVTALLLPLALLLHAARPEVQLVESGGGLVQPGGSLRLSCAASGFSFSDFWMSWVRQAPGKGLEWVATISQAGSEKDYVDSVKGRFTISRDNAKKSLYLQMNSLRAEDTAVYYCASGVYSFDYRGQGTLVTVSSGTGGGGSGGGGSGGGGSEFQIVLTQSPAIMSVSPGEKVTMTCSASSSVNYMHWFQQKPGTSPKLWVYSTSNLASGVPARFSGSGSGTSYSLTISSMEAEDAATYYCQQRSIYPPWTFGGGTKLEIKLEIQNPDPAVYQLRDSKSSDKSVCLFTDFDSQTNVSQSKDSDVYITDKCVLDMRSMDFKSNSAVAWSNKSDFACANAFNNSIIPEDTFFPSPESSCGFTSESYQQGVLSATILYEILLGKATLYAVLVSALVLMAMVKRKDSRGRAKRSGSGVKQTLNFDLLKLAGDVESNPGPTSMDWIWRILFLVGAATGAHSFEEVQLQQSGPELVKPGASVKISCKASGYSFTGYTMNWVKQSHGKNLEWIGLINPYNGGTSYNQKFKAKATLTVDKSSSTAYMQLKSLTSEDSAVYYCARDYGYVLDYWGQGTSVTVSSTREDLKNVFPPEVAVFEPSEAEISHTQKATLVCLATGFYPDHVELSWWVNGKEVHSGVCTDPQPLKEQPALNDSRYCLSSRLRVSATFWQNPRNHFRCQVQFYGLSENDEWTQDRAKPVTQIVSAEAWGRADCDVKLVEKSFETDTNLNFQNLSVIGFRILLLKVAGFNLLMTLRLWSS

SEQ ID NO: 44876 - protein, 889 aa, synthetic construct
MALPVTALLLPLALLLHAARPEVQLVESGGGLVQPGGSLRLSCAASGFSFSDFWMSWVRQAPGKGLEWVATISQAGSEKDYVDSVKGRFTISRDNAKKSLYLQMNSLRAEDTAVYYCASGVYSFDYRGQGTLVTVSSGTGGGGSGGGGSGGGGSEFQIVLTQSPAIMSVSPGEKVTMTCSASSSVNYMHWFQQKPGTSPKLWVYSTSNLASGVPARFSGSGSGTSYSLTISSMEAEDAATYYCQQRSIYPPWTFGGGTKLEIKLEDLKNVFPPEVAVFEPSEAEISHTQKATLVCLATGFYPDHVELSWWVNGKEVHSGVCTDPQPLKEQPALNDSRYCLSSRLRVSATFWQNPRNHFRCQVQFYGLSENDEWTQDRAKPVTQIVSAEAWGRADCDVKLVEKSFETDTNLNFQNLSVIGFRILLLKVAGFNLLMTLRLWSSRAKRSGSGATNFSLLKQAGDVEENPGPTSMDWIWRILFLVGAATGAHSGPQLQLQESGPGLVKPSETLSLTCTVSGDSISSGDYYWGWIRQPPGKGLEWIGHIYYSGVTYYNPSLKSRVTISVDTSRNQFSLKLSSVTAADTAVYYCTREDSSNWRSRGQGTLVTVSSGSGGGGSGGGGSGGGGSFEEVQLQQSGPELVKPGASVKISCKASGYSFTGYTMNWVKQSHGKNLEWIGLINPYNGGTSYNQKFKAKATLTVDKSSSTAYMQLKSLTSEDSAVYYCARDYGYVLDYWGQGTSVTVSSTRIQNPDPAVYQLRDSKSSDKSVCLFTDFDSQTNVSQSKDSDVYITDKCVLDMRSMDFKSNSAVAWSNKSDFACANAFNNSIIPEDTFFPSPESSCGFTSESYQQGVLSATILYEILLGKATLYAVLVSALVLMAMVKRKDSRG

SEQ ID NO: 44877 - protein, 893 aa, synthetic construct
MALPVTALLLPLALLLHAARPEVQLVESGGGLVQPGGSLRLSCAASGFSFSDFWMSWVRQAPGKGLEWVATISQAGSEKDYVDSVKGRFTISRDNAKKSLYLQMNSLRAEDTAVYYCASGVYSFDYRGQGTLVTVSSGTGGGGSGGGGSGGGGSEFQIVLTQSPAIMSVSPGEKVTMTCSASSSVNYMHWFQQKPGTSPKLWVYSTSNLASGVPARFSGSGSGTSYSLTISSMEAEDAATYYCQQRSIYPPWTFGGGTKLEIKLEIQNPDPAVYQLRDSKSSDKSVCLFTDFDSQTNVSQSKDSDVYITDKCVLDMRSMDFKSNSAVAWSNKSDFACANAFNNSIIPEDTFFPSPESSCGFTSESYQQGVLSATILYEILLGKATLYAVLVSALVLMAMVKRKDSRGRAKRSGSGVKQTLNFDLLKLAGDVESNPGPTSMDWIWRILFLVGAATGAHSGPQLQLQESGPGLVKPSETLSLTCTVSGDSISSGDYYWGWIRQPPGKGLEWIGHIYYSGVTYYNPSLKSRVTISVDTSRNQFSLKLSSVTAADTAVYYCTREDSSNWRSRGQGTLVTVSSGSGGGGSGGGGSGGGGSFEEVQLQQSGPELVKPGASVKISCKASGYSFTGYTMNWVKQSHGKNLEWIGLINPYNGGTSYNQKFKAKATLTVDKSSSTAYMQLKSLTSEDSAVYYCARDYGYVLDYWGQGTSVTVSSTREDLKNVFPPEVAVFEPSEAEISHTQKATLVCLATGFYPDHVELSWWVNGKEVHSGVCTDPQPLKEQPALNDSRYCLSSRLRVSATFWQNPRNHFRCQVQFYGLSENDEWTQDRAKPVTQIVSAEAWGRADCDVKLVEKSFETDTNLNFQNLSVIGFRILLLKVAGFNLLMTLRLWSS

SEQ ID NO: 44878 - protein, 687 aa, synthetic construct
MALPVTALLLPLALLLHAARPQIVLTQSPAIMSVSPGEKVTMTCSASSSVNYMHWFQQKPGTSPKLWVYSTSNLASGVPARFSGSGSGTSYSLTISSMEAEDAATYYCQQRSIYPPWTFGGGTKLEIKLEDLKNVFPPEVAVFEPSEAEISHTQKATLVCLATGFYPDHVELSWWVNGKEVHSGVCTDPQPLKEQPALNDSRYCLSSRLRVSATFWQNPRNHFRCQVQFYGLSENDEWTQDRAKPVTQIVSAEAWGRADCDVKLVEKSFETDTNLNFQNLSVIGFRILLLKVAGFNLLMTLRLWSSRAKRSGSGATNFSLLKQAGDVEENPGPTSMDWIWRILFLVGAATGAHSGPMDPDLEIRAAFLRQRNTALRTEVAELEQEVQRLENEVSQYETRYGPLGGGKGSGGGGSGGGGSGGGGSFEEVQLQQSGPELVKPGASVKISCKASGYSFTGYTMNWVKQSHGKNLEWIGLINPYNGGTSYNQKFKAKATLTVDKSSSTAYMQLKSLTSEDSAVYYCARDYGYVLDYWGQGTSVTVSSTRIQNPDPAVYQLRDSKSSDKSVCLFTDFDSQTNVSQSKDSDVYITDKCVLDMRSMDFKSNSAVAWSNKSDFACANAFNNSIIPEDTFFPSPESSCGFTSESYQQGVLSATILYEILLGKATLYAVLVSALVLMAMVKRKDSRG

SEQ ID NO: 44879 - protein, 691 aa, synthetic construct
MALPVTALLLPLALLLHAARPQIVLTQSPAIMSVSPGEKVTMTCSASSSVNYMHWFQQKPGTSPKLWVYSTSNLASGVPARFSGSGSGTSYSLTISSMEAEDAATYYCQQRSIYPPWTFGGGTKLEIKLEIQNPDPAVYQLRDSKSSDKSVCLFTDFDSQTNVSQSKDSDVYITDKCVLDMRSMDFKSNSAVAWSNKSDFACANAFNNSIIPEDTFFPSPESSCGFTSESYQQGVLSATILYEILLGKATLYAVLVSALVLMAMVKRKDSRGRAKRSGSGVKQTLNFDLLKLAGDVESNPGPTSMDWIWRILFLVGAATGAHSGPMDPDLEIRAAFLRQRNTALRTEVAELEQEVQRLENEVSQYETRYGPLGGGKGSGGGGSGGGGSGGGGSFEEVQLQQSGPELVKPGASVKISCKASGYSFTGYTMNWVKQSHGKNLEWIGLINPYNGGTSYNQKFKAKATLTVDKSSSTAYMQLKSLTSEDSAVYYCARDYGYVLDYWGQGTSVTVSSTREDLKNVFPPEVAVFEPSEAEISHTQKATLVCLATGFYPDHVELSWWVNGKEVHSGVCTDPQPLKEQPALNDSRYCLSSRLRVSATFWQNPRNHFRCQVQFYGLSENDEWTQDRAKPVTQIVSAEAWGRADCDVKLVEKSFETDTNLNFQNLSVIGFRILLLKVAGFNLLMTLRLWSS

SEQ ID NO: 44880 - protein, 664 aa, synthetic construct
MALPVTALLLPLALLLHAARPQIVLTQSPAIMSVSPGEKVTMTCSASSSVNYMHWFQQKPGTSPKLWVYSTSNLASGVPARFSGSGSGTSYSLTISSMEAEDAATYYCQQRSIYPPWTFGGGTKLEIKLEDLKNVFPPEVAVFEPSEAEISHTQKATLVCLATGFYPDHVELSWWVNGKEVHSGVCTDPQPLKEQPALNDSRYCLSSRLRVSATFWQNPRNHFRCQVQFYGLSENDEWTQDRAKPVTQIVSAEAWGRADCDVKLVEKSFETDTNLNFQNLSVIGFRILLLKVAGFNLLMTLRLWSSRAKRSGSGATNFSLLKQAGDVEENPGPTSMDWIWRILFLVGAATGAHSGPEVAALEKEVAALEKEVAALEKEVAALEKGSGGGGSGGGGSGGGGSFEEVQLQQSGPELVKPGASVKISCKASGYSFTGYTMNWVKQSHGKNLEWIGLINPYNGGTSYNQKFKAKATLTVDKSSSTAYMQLKSLTSEDSAVYYCARDYGYVLDYWGQGTSVTVSSTRIQNPDPAVYQLRDSKSSDKSVCLFTDFDSQTNVSQSKDSDVYITDKCVLDMRSMDFKSNSAVAWSNKSDFACANAFNNSIIPEDTFFPSPESSCGFTSESYQQGVLSATILYEILLGKATLYAVLVSALVLMAMVKRKDSRG

SEQ ID NO: 44881 - protein, 668 aa, synthetic construct
MALPVTALLLPLALLLHAARPQIVLTQSPAIMSVSPGEKVTMTCSASSSVNYMHWFQQKPGTSPKLWVYSTSNLASGVPARFSGSGSGTSYSLTISSMEAEDAATYYCQQRSIYPPWTFGGGTKLEIKLEIQNPDPAVYQLRDSKSSDKSVCLFTDFDSQTNVSQSKDSDVYITDKCVLDMRSMDFKSNSAVAWSNKSDFACANAFNNSIIPEDTFFPSPESSCGFTSESYQQGVLSATILYEILLGKATLYAVLVSALVLMAMVKRKDSRGRAKRSGSGVKQTLNFDLLKLAGDVESNPGPTSMDWIWRILFLVGAATGAHSGPEVAALEKEVAALEKEVAALEKEVAALEKGSGGGGSGGGGSGGGGSFEEVQLQQSGPELVKPGASVKISCKASGYSFTGYTMNWVKQSHGKNLEWIGLINPYNGGTSYNQKFKAKATLTVDKSSSTAYMQLKSLTSEDSAVYYCARDYGYVLDYWGQGTSVTVSSTREDLKNVFPPEVAVFEPSEAEISHTQKATLVCLATGFYPDHVELSWWVNGKEVHSGVCTDPQPLKEQPALNDSRYCLSSRLRVSATFWQNPRNHFRCQVQFYGLSENDEWTQDRAKPVTQIVSAEAWGRADCDVKLVEKSFETDTNLNFQNLSVIGFRILLLKVAGFNLLMTLRLWSS

SEQ ID NO: 44882 - protein, 754 aa, synthetic construct
MALPVTALLLPLALLLHAARPQIVLTQSPAIMSVSPGEKVTMTCSASSSVNYMHWFQQKPGTSPKLWVYSTSNLASGVPARFSGSGSGTSYSLTISSMEAEDAATYYCQQRSIYPPWTFGGGTKLEIKLEDLKNVFPPEVAVFEPSEAEISHTQKATLVCLATGFYPDHVELSWWVNGKEVHSGVCTDPQPLKEQPALNDSRYCLSSRLRVSATFWQNPRNHFRCQVQFYGLSENDEWTQDRAKPVTQIVSAEAWGRADCDVKLVEKSFETDTNLNFQNLSVIGFRILLLKVAGFNLLMTLRLWSSRAKRSGSGATNFSLLKQAGDVEENPGPTSMDWIWRILFLVGAATGAHSGPQVQLQESGGGLAQAGGSLRLSCAASGRTFSMGWFRQAPGKEREFVAAITYSGGSPYYASSVRGRFTISRDNAKNTVYLQMNSLKPEDTAVYYCAANPTYGSDWNAENWGQGTQVTVSSGSGGGGSGGGGSGGGGSFEEVQLQQSGPELVKPGASVKISCKASGYSFTGYTMNWVKQSHGKNLEWIGLINPYNGGTSYNQKFKAKATLTVDKSSSTAYMQLKSLTSEDSAVYYCARDYGYVLDYWGQGTSVTVSSTRIQNPDPAVYQLRDSKSSDKSVCLFTDFDSQTNVSQSKDSDVYITDKCVLDMRSMDFKSNSAVAWSNKSDFACANAFNNSIIPEDTFFPSPESSCGFTSESYQQGVLSATILYEILLGKATLYAVLVSALVLMAMVKRKDSRG

SEQ ID NO: 44883 - protein, 758 aa, synthetic construct
MALPVTALLLPLALLLHAARPQIVLTQSPAIMSVSPGEKVTMTCSASSSVNYMHWFQQKPGTSPKLWVYSTSNLASGVPARFSGSGSGTSYSLTISSMEAEDAATYYCQQRSIYPPWTFGGGTKLEIKLEIQNPDPAVYQLRDSKSSDKSVCLFTDFDSQTNVSQSKDSDVYITDKCVLDMRSMDFKSNSAVAWSNKSDFACANAFNNSIIPEDTFFPSPESSCGFTSESYQQGVLSATILYEILLGKATLYAVLVSALVLMAMVKRKDSRGRAKRSGSGVKQTLNFDLLKLAGDVESNPGPTSMDWIWRILFLVGAATGAHSGPQVQLQESGGGLAQAGGSLRLSCAASGRTFSMGWFRQAPGKEREFVAAITYSGGSPYYASSVRGRFTISRDNAKNTVYLQMNSLKPEDTAVYYCAANPTYGSDWNAENWGQGTQVTVSSGSGGGGSGGGGSGGGGSFEEVQLQQSGPELVKPGASVKISCKASGYSFTGYTMNWVKQSHGKNLEWIGLINPYNGGTSYNQKFKAKATLTVDKSSSTAYMQLKSLTSEDSAVYYCARDYGYVLDYWGQGTSVTVSSTREDLKNVFPPEVAVFEPSEAEISHTQKATLVCLATGFYPDHVELSWWVNGKEVHSGVCTDPQPLKEQPALNDSRYCLSSRLRVSATFWQNPRNHFRCQVQFYGLSENDEWTQDRAKPVTQIVSAEAWGRADCDVKLVEKSFETDTNLNFQNLSVIGFRILLLKVAGFNLLMTLRLWSS

SEQ ID NO: 44884 - protein, 760 aa, synthetic construct
MALPVTALLLPLALLLHAARPEVQLVESGGSLVQPGGSLRLSCAASGFTFDDYAMSWVRQVPGKGLEWVSSINWSGTHTDYADSVKGRFTISRNNANNTLYLQMNSLKSEDTAVYYCAKNWRDAGTTWFEKSGSAGQGTQVTVSSGTGGGGSGGGGSGGGGSEFQIVLTQSPAIMSVSPGEKVTMTCSASSSVNYMHWFQQKPGTSPKLWVYSTSNLASGVPARFSGSGSGTSYSLTISSMEAEDAATYYCQQRSIYPPWTFGGGTKLEIKLEDLKNVFPPEVAVFEPSEAEISHTQKATLVCLATGFYPDHVELSWWVNGKEVHSGVCTDPQPLKEQPALNDSRYCLSSRLRVSATFWQNPRNHFRCQVQFYGLSENDEWTQDRAKPVTQIVSAEAWGRADCDVKLVEKSFETDTNLNFQNLSVIGFRILLLKVAGFNLLMTLRLWSSRAKRSGSGATNFSLLKQAGDVEENPGPTSMDWIWRILFLVGAATGAHSFEEVQLQQSGPELVKPGASVKISCKASGYSFTGYTMNWVKQSHGKNLEWIGLINPYNGGTSYNQKFKAKATLTVDKSSSTAYMQLKSLTSEDSAVYYCARDYGYVLDYWGQGTSVTVSSTRIQNPDPAVYQLRDSKSSDKSVCLFTDFDSQTNVSQSKDSDVYITDKCVLDMRSMDFKSNSAVAWSNKSDFACANAFNNSIIPEDTFFPSPESSCGFTSESYQQGVLSATILYEILLGKATLYAVLVSALVLMAMVKRKDSRG

SEQ ID NO: 44885 - protein, 764 aa, synthetic construct
MALPVTALLLPLALLLHAARPEVQLVESGGSLVQPGGSLRLSCAASGFTFDDYAMSWVRQVPGKGLEWVSSINWSGTHTDYADSVKGRFTISRNNANNTLYLQMNSLKSEDTAVYYCAKNWRDAGTTWFEKSGSAGQGTQVTVSSGTGGGGSGGGGSGGGGSEFQIVLTQSPAIMSVSPGEKVTMTCSASSSVNYMHWFQQKPGTSPKLWVYSTSNLASGVPARFSGSGSGTSYSLTISSMEAEDAATYYCQQRSIYPPWTFGGGTKLEIKLEIQNPDPAVYQLRDSKSSDKSVCLFTDFDSQTNVSQSKDSDVYITDKCVLDMRSMDFKSNSAVAWSNKSDFACANAFNNSIIPEDTFFPSPESSCGFTSESYQQGVLSATILYEILLGKATLYAVLVSALVLMAMVKRKDSRGRAKRSGSGVKQTLNFDLLKLAGDVESNPGPTSMDWIWRILFLVGAATGAHSFEEVQLQQSGPELVKPGASVKISCKASGYSFTGYTMNWVKQSHGKNLEWIGLINPYNGGTSYNQKFKAKATLTVDKSSSTAYMQLKSLTSEDSAVYYCARDYGYVLDYWGQGTSVTVSSTREDLKNVFPPEVAVFEPSEAEISHTQKATLVCLATGFYPDHVELSWWVNGKEVHSGVCTDPQPLKEQPALNDSRYCLSSRLRVSATFWQNPRNHFRCQVQFYGLSENDEWTQDRAKPVTQIVSAEAWGRADCDVKLVEKSFETDTNLNFQNLSVIGFRILLLKVAGFNLLMTLRLWSS

SEQ ID NO: 44886 - protein, 758 aa, synthetic construct
MALPVTALLLPLALLLHAARPEVQLLESGGGLVQPGGSLRLSCAASGFIFSSYAMSWVRQAPGKGQEWVSGVSGTGVNTYYADSVKGRFTISRDNSKNTLYLQMNSLRAEDTAVYYCASGKGWDSGSWYEDYRGQGTLVTVSSGTGGGGSGGGGSGGGGSEFQIVLTQSPAIMSVSPGEKVTMTCSASSSVNYMHWFQQKPGTSPKLWVYSTSNLASGVPARFSGSGSGTSYSLTISSMEAEDAATYYCQQRSIYPPWTFGGGTKLEIKLEDLKNVFPPEVAVFEPSEAEISHTQKATLVCLATGFYPDHVELSWWVNGKEVHSGVCTDPQPLKEQPALNDSRYCLSSRLRVSATFWQNPRNHFRCQVQFYGLSENDEWTQDRAKPVTQIVSAEAWGRADCDVKLVEKSFETDTNLNFQNLSVIGFRILLLKVAGFNLLMTLRLWSSRAKRSGSGATNFSLLKQAGDVEENPGPTSMDWIWRILFLVGAATGAHSFEEVQLQQSGPELVKPGASVKISCKASGYSFTGYTMNWVKQSHGKNLEWIGLINPYNGGTSYNQKFKAKATLTVDKSSSTAYMQLKSLTSEDSAVYYCARDYGYVLDYWGQGTSVTVSSTRIQNPDPAVYQLRDSKSSDKSVCLFTDFDSQTNVSQSKDSDVYITDKCVLDMRSMDFKSNSAVAWSNKSDFACANAFNNSIIPEDTFFPSPESSCGFTSESYQQGVLSATILYEILLGKATLYAVLVSALVLMAMVKRKDSRG

SEQ ID NO: 44887 - protein, 762 aa, synthetic construct
MALPVTALLLPLALLLHAARPEVQLLESGGGLVQPGGSLRLSCAASGFIFSSYAMSWVRQAPGKGQEWVSGVSGTGVNTYYADSVKGRFTISRDNSKNTLYLQMNSLRAEDTAVYYCASGKGWDSGSWYEDYRGQGTLVTVSSGTGGGGSGGGGSGGGGSEFQIVLTQSPAIMSVSPGEKVTMTCSASSSVNYMHWFQQKPGTSPKLWVYSTSNLASGVPARFSGSGSGTSYSLTISSMEAEDAATYYCQQRSIYPPWTFGGGTKLEIKLEIQNPDPAVYQLRDSKSSDKSVCLFTDFDSQTNVSQSKDSDVYITDKCVLDMRSMDFKSNSAVAWSNKSDFACANAFNNSIIPEDTFFPSPESSCGFTSESYQQGVLSATILYEILLGKATLYAVLVSALVLMAMVKRKDSRGRAKRSGSGVKQTLNFDLLKLAGDVESNPGPTSMDWIWRILFLVGAATGAHSFEEVQLQQSGPELVKPGASVKISCKASGYSFTGYTMNWVKQSHGKNLEWIGLINPYNGGTSYNQKFKAKATLTVDKSSSTAYMQLKSLTSEDSAVYYCARDYGYVLDYWGQGTSVTVSSTREDLKNVFPPEVAVFEPSEAEISHTQKATLVCLATGFYPDHVELSWWVNGKEVHSGVCTDPQPLKEQPALNDSRYCLSSRLRVSATFWQNPRNHFRCQVQFYGLSENDEWTQDRAKPVTQIVSAEAWGRADCDVKLVEKSFETDTNLNFQNLSVIGFRILLLKVAGFNLLMTLRLWSS

SEQ ID NO: 44888 - protein, 726 aa, synthetic construct
MALPVTALLLPLALLLHAARPMLPAPKNLVVSRITEDSARLSWTAPDAAFDSFPIRYIETLIWGEAIWLDVPGSERSYDLTGLKPGTEYAVVITGVKGGRFSSPLVASFTTGTGGGGSGGGGSGGGGSEFQIVLTQSPAIMSVSPGEKVTMTCSASSSVNYMHWFQQKPGTSPKLWVYSTSNLASGVPARFSGSGSGTSYSLTISSMEAEDAATYYCQQRSIYPPWTFGGGTKLEIKLEDLKNVFPPEVAVFEPSEAEISHTQKATLVCLATGFYPDHVELSWWVNGKEVHSGVCTDPQPLKEQPALNDSRYCLSSRLRVSATFWQNPRNHFRCQVQFYGLSENDEWTQDRAKPVTQIVSAEAWGRADCDVKLVEKSFETDTNLNFQNLSVIGFRILLLKVAGFNLLMTLRLWSSRAKRSGSGATNFSLLKQAGDVEENPGPTSMDWIWRILFLVGAATGAHSFEEVQLQQSGPELVKPGASVKISCKASGYSFTGYTMNWVKQSHGKNLEWIGLINPYNGGTSYNQKFKAKATLTVDKSSSTAYMQLKSLTSEDSAVYYCARDYGYVLDYWGQGTSVTVSSTRIQNPDPAVYQLRDSKSSDKSVCLFTDFDSQTNVSQSKDSDVYITDKCVLDMRSMDFKSNSAVAWSNKSDFACANAFNNSIIPEDTFFPSPESSCGFTSESYQQGVLSATILYEILLGKATLYAVLVSALVLMAMVKRKDSRG

SEQ ID NO: 44889 - protein, 730 aa, synthetic construct
MALPVTALLLPLALLLHAARPMLPAPKNLVVSRITEDSARLSWTAPDAAFDSFPIRYIETLIWGEAIWLDVPGSERSYDLTGLKPGTEYAVVITGVKGGRFSSPLVASFTTGTGGGGSGGGGSGGGGSEFQIVLTQSPAIMSVSPGEKVTMTCSASSSVNYMHWFQQKPGTSPKLWVYSTSNLASGVPARFSGSGSGTSYSLTISSMEAEDAATYYCQQRSIYPPWTFGGGTKLEIKLEIQNPDPAVYQLRDSKSSDKSVCLFTDFDSQTNVSQSKDSDVYITDKCVLDMRSMDFKSNSAVAWSNKSDFACANAFNNSIIPEDTFFPSPESSCGFTSESYQQGVLSATILYEILLGKATLYAVLVSALVLMAMVKRKDSRGRAKRSGSGVKQTLNFDLLKLAGDVESNPGPTSMDWIWRILFLVGAATGAHSFEEVQLQQSGPELVKPGASVKISCKASGYSFTGYTMNWVKQSHGKNLEWIGLINPYNGGTSYNQKFKAKATLTVDKSSSTAYMQLKSLTSEDSAVYYCARDYGYVLDYWGQGTSVTVSSTREDLKNVFPPEVAVFEPSEAEISHTQKATLVCLATGFYPDHVELSWWVNGKEVHSGVCTDPQPLKEQPALNDSRYCLSSRLRVSATFWQNPRNHFRCQVQFYGLSENDEWTQDRAKPVTQIVSAEAWGRADCDVKLVEKSFETDTNLNFQNLSVIGFRILLLKVAGFNLLMTLRLWSS

SEQ ID NO: 44890 - protein, 755 aa, synthetic construct
MALPVTALLLPLALLLHAARPEVQLVESGGGLVQPGGSLRLSCAASGFNIKDTCIGWVRRAPGKEEELVAKICKYSGHTRYADSVKGRFTISADTSKNTAYLQMNSLRAEDTAVYYCAAVSVRDGHYNYWGQGTTVTVSSGTGGGGSGGGGSGGGGSEFQIVLTQSPAIMSVSPGEKVTMTCSASSSVNYMHWFQQKPGTSPKLWVYSTSNLASGVPARFSGSGSGTSYSLTISSMEAEDAATYYCQQRSIYPPWTFGGGTKLEIKLEDLKNVFPPEVAVFEPSEAEISHTQKATLVCLATGFYPDHVELSWWVNGKEVHSGVCTDPQPLKEQPALNDSRYCLSSRLRVSATFWQNPRNHFRCQVQFYGLSENDEWTQDRAKPVTQIVSAEAWGRADCDVKLVEKSFETDTNLNFQNLSVIGFRILLLKVAGFNLLMTLRLWSSRAKRSGSGATNFSLLKQAGDVEENPGPTSMDWIWRILFLVGAATGAHSFEEVQLQQSGPELVKPGASVKISCKASGYSFTGYTMNWVKQSHGKNLEWIGLINPYNGGTSYNQKFKAKATLTVDKSSSTAYMQLKSLTSEDSAVYYCARDYGYVLDYWGQGTSVTVSSTRIQNPDPAVYQLRDSKSSDKSVCLFTDFDSQTNVSQSKDSDVYITDKCVLDMRSMDFKSNSAVAWSNKSDFACANAFNNSIIPEDTFFPSPESSCGFTSESYQQGVLSATILYEILLGKATLYAVLVSALVLMAMVKRKDSRG

SEQ ID NO: 44891 - protein, 759 aa, synthetic construct
MALPVTALLLPLALLLHAARPEVQLVESGGGLVQPGGSLRLSCAASGFNIKDTCIGWVRRAPGKEEELVAKICKYSGHTRYADSVKGRFTISADTSKNTAYLQMNSLRAEDTAVYYCAAVSVRDGHYNYWGQGTTVTVSSGTGGGGSGGGGSGGGGSEFQIVLTQSPAIMSVSPGEKVTMTCSASSSVNYMHWFQQKPGTSPKLWVYSTSNLASGVPARFSGSGSGTSYSLTISSMEAEDAATYYCQQRSIYPPWTFGGGTKLEIKLEIQNPDPAVYQLRDSKSSDKSVCLFTDFDSQTNVSQSKDSDVYITDKCVLDMRSMDFKSNSAVAWSNKSDFACANAFNNSIIPEDTFFPSPESSCGFTSESYQQGVLSATILYEILLGKATLYAVLVSALVLMAMVKRKDSRGRAKRSGSGVKQTLNFDLLKLAGDVESNPGPTSMDWIWRILFLVGAATGAHSFEEVQLQQSGPELVKPGASVKISCKASGYSFTGYTMNWVKQSHGKNLEWIGLINPYNGGTSYNQKFKAKATLTVDKSSSTAYMQLKSLTSEDSAVYYCARDYGYVLDYWGQGTSVTVSSTREDLKNVFPPEVAVFEPSEAEISHTQKATLVCLATGFYPDHVELSWWVNGKEVHSGVCTDPQPLKEQPALNDSRYCLSSRLRVSATFWQNPRNHFRCQVQFYGLSENDEWTQDRAKPVTQIVSAEAWGRADCDVKLVEKSFETDTNLNFQNLSVIGFRILLLKVAGFNLLMTLRLWSS

SEQ ID NO: 44892 - protein, 1126 aa, synthetic construct
MALPVTALLLPLALLLHAARPEVQLVESGGGLVQAGGSLRLSCAASGRTFSMGWFRQAPGKEREFVAAITYSGGSPYYADSVKGRFTISRDNAKNTVYLQMNSLKPEDTAVYYCAANPTYGSDWNAENWGQGTQVTVSSGTGGGGSGGGGSGGGGSEFQIVLTQSPAIMSVSPGEKVTMTCSASSSVNYMHWFQQKPGTSPKLWVYSTSNLASGVPARFSGSGSGTSYSLTISSMEAEDAATYYCQQRSIYPPWTFGGGTKLEIKLEDLKNVFPPEVAVFEPSEAEISHTQKATLVCLATGFYPDHVELSWWVNGKEVHSGVCTDPQPLKEQPALNDSRYCLSSRLRVSATFWQNPRNHFRCQVQFYGLSENDEWTQDRAKPVTQIVSAEAWGRADCDVKLVEKSFETDTNLNFQNLSVIGFRILLLKVAGFNLLMTLRLWSSRAKRSGSGATNFSLLKQAGDVEENPGPTSATMDWIWRILFLVGAATGAHSGPEVQLVESGGGLVQAGGSLRLSCAASGRTFTMGWFRQAPGKEREFVAAISLSPTLAYYADSVKGRFTISRDNAKNTVVLQMNSLKPEDTALYYCAADRKSVMSIRPDYWGQGTQVTVSSGSGGGGSGGGGSGGGGSFEEVQLQQSGPELVKPGASVKISCKASGYSFTGYTMNWVKQSHGKNLEWIGLINPYNGGTSYNQKFKAKATLTVDKSSSTAYMQLKSLTSEDSAVYYCARDYGYVLDYWGQGTSVTVSSTRIQNPDPAVYQLRDSKSSDKSVCLFTDFDSQTNVSQSKDSDVYITDKCVLDMRSMDFKSNSAVAWSNKSDFACANAFNNSIIPEDTFFPSPESSCGFTSESYQQGVLSATILYEILLGKATLYAVLVSALVLMAMVKRKDSRGRAKRSGSGVKQTLNFDLLKLAGDVESNPGPSRGHMTEYKPTVRLATRDDVPRAVRTLAAAFADYPATRHTVDPDRHIERVTELQELFLTRVGLDIGKVWVADDGAAVAVWTTPESVEAGAVFAEIGPRMAELSGSRLAAQQQMEGLLAPHRPKEPAWFLATVGVSPDHQGKGLGSAVVLPGVEAAERAGVPAFLETSAPRNLPFYERLGFTVTADVEVPEGPRTWCMTRKPGA

SEQ ID NO: 44893 - protein, 764 aa, synthetic construct
MALPVTALLLPLALLLHAARPEVQLVESGGGLVQPGGSLRLSCAASGFASDYYIIGWFRQAPGKEREGVSCISSRYANTNYADSVKGRFTISRDNAKNTVYLQMNSLKPEDTAVYYCAADTRRYTCPDIATMHRNFDSWGQGTLVTVSSGTGGGGSGGGGSGGGGSEFQIVLTQSPAIMSVSPGEKVTMTCSASSSVNYMHWFQQKPGTSPKLWVYSTSNLASGVPARFSGSGSGTSYSLTISSMEAEDAATYYCQQRSIYPPWTFGGGTKLEIKLEDLKNVFPPEVAVFEPSEAEISHTQKATLVCLATGFYPDHVELSWWVNGKEVHSGVCTDPQPLKEQPALNDSRYCLSSRLRVSATFWQNPRNHFRCQVQFYGLSENDEWTQDRAKPVTQIVSAEAWGRADCDVKLVEKSFETDTNLNFQNLSVIGFRILLLKVAGFNLLMTLRLWSSRAKRSGSGATNFSLLKQAGDVEENPGPTSMDWIWRILFLVGAATGAHSFEEVQLQQSGPELVKPGASVKISCKASGYSFTGYTMNWVKQSHGKNLEWIGLINPYNGGTSYNQKFKAKATLTVDKSSSTAYMQLKSLTSEDSAVYYCARDYGYVLDYWGQGTSVTVSSTRIQNPDPAVYQLRDSKSSDKSVCLFTDFDSQTNVSQSKDSDVYITDKCVLDMRSMDFKSNSAVAWSNKSDFACANAFNNSIIPEDTFFPSPESSCGFTSESYQQGVLSATILYEILLGKATLYAVLVSALVLMAMVKRKDSRG

SEQ ID NO: 44894 - protein, 764 aa, synthetic construct
MALPVTALLLPLALLLHAARPEVQLVESGGGLVQPGGSLRLSCEASGFASDDYIIGWFRQAPGKEREGVSCISSKYANTVYTDSVKGRFRLSRGTAKNTVYLQMSALKPEDTAVYYCAMDSRRVTCPEISTMHRNFDSWGQGTLVTVSSGTGGGGSGGGGSGGGGSEFQIVLTQSPAIMSVSPGEKVTMTCSASSSVNYMHWFQQKPGTSPKLWVYSTSNLASGVPARFSGSGSGTSYSLTISSMEAEDAATYYCQQRSIYPPWTFGGGTKLEIKLEDLKNVFPPEVAVFEPSEAEISHTQKATLVCLATGFYPDHVELSWWVNGKEVHSGVCTDPQPLKEQPALNDSRYCLSSRLRVSATFWQNPRNHFRCQVQFYGLSENDEWTQDRAKPVTQIVSAEAWGRADCDVKLVEKSFETDTNLNFQNLSVIGFRILLLKVAGFNLLMTLRLWSSRAKRSGSGATNFSLLKQAGDVEENPGPTSMDWIWRILFLVGAATGAHSFEEVQLQQSGPELVKPGASVKISCKASGYSFTGYTMNWVKQSHGKNLEWIGLINPYNGGTSYNQKFKAKATLTVDKSSSTAYMQLKSLTSEDSAVYYCARDYGYVLDYWGQGTSVTVSSTRIQNPDPAVYQLRDSKSSDKSVCLFTDFDSQTNVSQSKDSDVYITDKCVLDMRSMDFKSNSAVAWSNKSDFACANAFNNSIIPEDTFFPSPESSCGFTSESYQQGVLSATILYEILLGKATLYAVLVSALVLMAMVKRKDSRG

SEQ ID NO: 44895 - protein, 764 aa, synthetic construct
MALPVTALLLPLALLLHAARPEVQLVESGGGLVQPGGSLRLSCAASGFASDYYIIGWFRQAPGKEREGVSCISSRYANTNYADSVKGRFTISRDNAKNTVYLQMNSLKPEDTAVYYCAADTRRYTCPDIATMHRNFDSWGQGTLVTVSSGTGGGGSGGGGSGGGGSEFQIVLTQSPAIMSVSPGEKVTMTCSASSSVNYMHWFQQKPGTSPKLWVYSTSNLASGVPARFSGSGSGTSYSLTISSMEAEDAATYYCQQRSIYPPWTFGGGTKLEIKLEIQNPDPAVYQLRDSKSSDKSVCLFTDFDSQTNVSQSKDSDVYITDKCVLDMRSMDFKSNSAVAWSNKSDFACANAFNNSIIPEDTFFPSPESSCGFTSESYQQGVLSATILYEILLGKATLYAVLVSALVLMAMVKRKDSRGRAKRSGSGATNFSLLKQAGDVEENPGPTSMDWIWRILFLVGAATGAHSFEEVQLQQSGPELVKPGASVKISCKASGYSFTGYTMNWVKQSHGKNLEWIGLINPYNGGTSYNQKFKAKATLTVDKSSSTAYMQLKSLTSEDSAVYYCARDYGYVLDYWGQGTSVTVSSTRDLKNVFPPEVAVFEPSEAEISHTQKATLVCLATGFYPDHVELSWWVNGKEVHSGVCTDPQPLKEQPALNDSRYCLSSRLRVSATFWQNPRNHFRCQVQFYGLSENDEWTQDRAKPVTQIVSAEAWGRADCDVKLVEKSFETDTNLNFQNLSVIGFRILLLKVAGFNLLMTLRLWSS

SEQ ID NO: 44896 - protein, 764 aa, synthetic construct
MALPVTALLLPLALLLHAARPEVQLVESGGGLVQPGGSLRLSCEASGFASDDYIIGWFRQAPGKEREGVSCISSKYANTVYTDSVKGRFRLSRGTAKNTVYLQMSALKPEDTAVYYCAMDSRRVTCPEISTMHRNFDSWGQGTLVTVSSGTGGGGSGGGGSGGGGSEFQIVLTQSPAIMSVSPGEKVTMTCSASSSVNYMHWFQQKPGTSPKLWVYSTSNLASGVPARFSGSGSGTSYSLTISSMEAEDAATYYCQQRSIYPPWTFGGGTKLEIKLEIQNPDPAVYQLRDSKSSDKSVCLFTDFDSQTNVSQSKDSDVYITDKCVLDMRSMDFKSNSAVAWSNKSDFACANAFNNSIIPEDTFFPSPESSCGFTSESYQQGVLSATILYEILLGKATLYAVLVSALVLMAMVKRKDSRGRAKRSGSGATNFSLLKQAGDVEENPGPTSMDWIWRILFLVGAATGAHSFEEVQLQQSGPELVKPGASVKISCKASGYSFTGYTMNWVKQSHGKNLEWIGLINPYNGGTSYNQKFKAKATLTVDKSSSTAYMQLKSLTSEDSAVYYCARDYGYVLDYWGQGTSVTVSSTRDLKNVFPPEVAVFEPSEAEISHTQKATLVCLATGFYPDHVELSWWVNGKEVHSGVCTDPQPLKEQPALNDSRYCLSSRLRVSATFWQNPRNHFRCQVQFYGLSENDEWTQDRAKPVTQIVSAEAWGRADCDVKLVEKSFETDTNLNFQNLSVIGFRILLLKVAGFNLLMTLRLWSS

SEQ ID NO: 44897 - protein, 755 aa, synthetic construct
MALPVTALLLPLALLLHAARPQVKLEESGGGLVQPGESLRLSCSASGSIFKVFRVFAMSWYRQGPGKQRELVASISSGETTTYAESVKGRFTISRDNAKNTAYLQMDSLKPEDTAVYYCNADHTFTGDFWGQGTQVTVSSGTGGGGSGGGGSGGGGSEFQIVLTQSPAIMSVSPGEKVTMTCSASSSVNYMHWFQQKPGTSPKLWVYSTSNLASGVPARFSGSGSGTSYSLTISSMEAEDAATYYCQQRSIYPPWTFGGGTKLEIKLEIQNPDPAVYQLRDSKSSDKSVCLFTDFDSQTNVSQSKDSDVYITDKCVLDMRSMDFKSNSAVAWSNKSDFACANAFNNSIIPEDTFFPSPESSCGFTSESYQQGVLSATILYEILLGKATLYAVLVSALVLMAMVKRKDSRGRAKRSGSGATNFSLLKQAGDVEENPGPTSMDWIWRILFLVGAATGAHSFEEVQLQQSGPELVKPGASVKISCKASGYSFTGYTMNWVKQSHGKNLEWIGLINPYNGGTSYNQKFKAKATLTVDKSSSTAYMQLKSLTSEDSAVYYCARDYGYVLDYWGQGTSVTVSSTRDLKNVFPPEVAVFEPSEAEISHTQKATLVCLATGFYPDHVELSWWVNGKEVHSGVCTDPQPLKEQPALNDSRYCLSSRLRVSATFWQNPRNHFRCQVQFYGLSENDEWTQDRAKPVTQIVSAEAWGRADCDVKLVEKSFETDTNLNFQNLSVIGFRILLLKVAGFNLLMTLRLWSS

SEQ ID NO: 44898 - protein, 756 aa, synthetic construct
MALPVTALLLPLALLLHAARPQIVLTQSPAIMSVSPGEKVTMTCSASSSVNYMHWFQQKPGTSPKLWVYSTSNLASGVPARFSGSGSGTSYSLTISSMEAEDAATYYCQQRSIYPPWTFGGGTKLEIKLEDLKNVFPPEVAVFEPSEAEISHTQKATLVCLATGFYPDHVELSWWVNGKEVHSGVCTDPQPLKEQPALNDSRYCLSSRLRVSATFWQNPRNHFRCQVQFYGLSENDEWTQDRAKPVTQIVSAEAWGRADCDVKLVEKSFETDTNLNFQNLSVIGFRILLLKVAGFNLLMTLRLWSSRAKRSGSGATNFSLLKQAGDVEENPGPTSATMDWIWRILFLVGAATGAHSGPEVQLVESGGGLVQAGGSLRLSCAASGRTFSMGWFRQAPGKEREFVAAITYSGGSPYYADSVKGRFTISRDNAKNTVYLQMNSLKPEDTAVYYCAANPTYGSDWNAENWGQGTQVTVSSGSGGGGSGGGGSGGGGSFEEVQLQQSGPELVKPGASVKISCKASGYSFTGYTMNWVKQSHGKNLEWIGLINPYNGGTSYNQKFKAKATLTVDKSSSTAYMQLKSLTSEDSAVYYCARDYGYVLDYWGQGTSVTVSSTRIQNPDPAVYQLRDSKSSDKSVCLFTDFDSQTNVSQSKDSDVYITDKCVLDMRSMDFKSNSAVAWSNKSDFACANAFNNSIIPEDTFFPSPESSCGFTSESYQQGVLSATILYEILLGKATLYAVLVSALVLMAMVKRKDSRG

SEQ ID NO: 44899 - protein, 757 aa, synthetic construct
MALPVTALLLPLALLLHAARPQIVLTQSPAIMSVSPGEKVTMTCSASSSVNYMHWFQQKPGTSPKLWVYSTSNLASGVPARFSGSGSGTSYSLTISSMEAEDAATYYCQQRSIYPPWTFGGGTKLEIKLEDLKNVFPPEVAVFEPSEAEISHTQKATLVCLATGFYPDHVELSWWVNGKEVHSGVCTDPQPLKEQPALNDSRYCLSSRLRVSATFWQNPRNHFRCQVQFYGLSENDEWTQDRAKPVTQIVSAEAWGRADCDVKLVEKSFETDTNLNFQNLSVIGFRILLLKVAGFNLLMTLRLWSSRAKRSGSGATNFSLLKQAGDVEENPGPTSATMDWIWRILFLVGAATGAHSGPEVQLVESGGGLVQPGGSLRLSCAASGSIFGFNDMAWYRQAPGKQRELVALISRVGVTSSADSVKGRFTISRVNAKDTVYLQMNSLKPEDTAVYYCYMDQRLDGSTLAYWGQGTQVTVSSGSGGGGSGGGGSGGGGSFEEVQLQQSGPELVKPGASVKISCKASGYSFTGYTMNWVKQSHGKNLEWIGLINPYNGGTSYNQKFKAKATLTVDKSSSTAYMQLKSLTSEDSAVYYCARDYGYVLDYWGQGTSVTVSSTRIQNPDPAVYQLRDSKSSDKSVCLFTDFDSQTNVSQSKDSDVYITDKCVLDMRSMDFKSNSAVAWSNKSDFACANAFNNSIIPEDTFFPSPESSCGFTSESYQQGVLSATILYEILLGKATLYAVLVSALVLMAMVKRKDSRG

SEQ ID NO: 44900 - protein, 753 aa, synthetic construct
MALPVTALLLPLALLLHAARPQIVLTQSPAIMSVSPGEKVTMTCSASSSVNYMHWFQQKPGTSPKLWVYSTSNLASGVPARFSGSGSGTSYSLTISSMEAEDAATYYCQQRSIYPPWTFGGGTKLEIKLEDLKNVFPPEVAVFEPSEAEISHTQKATLVCLATGFYPDHVELSWWVNGKEVHSGVCTDPQPLKEQPALNDSRYCLSSRLRVSATFWQNPRNHFRCQVQFYGLSENDEWTQDRAKPVTQIVSAEAWGRADCDVKLVEKSFETDTNLNFQNLSVIGFRILLLKVAGFNLLMTLRLWSSRAKRSGSGATNFSLLKQAGDVEENPGPTSATMDWIWRILFLVGAATGAHSGPEVQLVESGGGLVQAGGSLRLSCAASGSVFSGNVMGWYRQAPGKEREWVAAIASGGSIYYRDSVKGRFTISRDNAKNTVYLQMNSLKPEDTAVYYCNSHPPTLPYWGLGTQVTVSSGSGGGGSGGGGSGGGGSFEEVQLQQSGPELVKPGASVKISCKASGYSFTGYTMNWVKQSHGKNLEWIGLINPYNGGTSYNQKFKAKATLTVDKSSSTAYMQLKSLTSEDSAVYYCARDYGYVLDYWGQGTSVTVSSTRIQNPDPAVYQLRDSKSSDKSVCLFTDFDSQTNVSQSKDSDVYITDKCVLDMRSMDFKSNSAVAWSNKSDFACANAFNNSIIPEDTFFPSPESSCGFTSESYQQGVLSATILYEILLGKATLYAVLVSALVLMAMVKRKDSRG

SEQ ID NO: 44901 - protein, 751 aa, synthetic construct
MALPVTALLLPLALLLHAARPQIVLTQSPAIMSVSPGEKVTMTCSASSSVNYMHWFQQKPGTSPKLWVYSTSNLASGVPARFSGSGSGTSYSLTISSMEAEDAATYYCQQRSIYPPWTFGGGTKLEIKLEDLKNVFPPEVAVFEPSEAEISHTQKATLVCLATGFYPDHVELSWWVNGKEVHSGVCTDPQPLKEQPALNDSRYCLSSRLRVSATFWQNPRNHFRCQVQFYGLSENDEWTQDRAKPVTQIVSAEAWGRADCDVKLVEKSFETDTNLNFQNLSVIGFRILLLKVAGFNLLMTLRLWSSRAKRSGSGATNFSLLKQAGDVEENPGPTSATMDWIWRILFLVGAATGAHSGPEVQLLESGGGLVQPGGSLRLSCAASGFSFSSYALSWVRQAPGKGLEWVSSIGENDGTTDYADAVKGRFTISRDNSKNTLYLQMNSLRVEDTAVYYCVKDGIHWGQGTLVTVSSGSGGGGSGGGGSGGGGSFEEVQLQQSGPELVKPGASVKISCKASGYSFTGYTMNWVKQSHGKNLEWIGLINPYNGGTSYNQKFKAKATLTVDKSSSTAYMQLKSLTSEDSAVYYCARDYGYVLDYWGQGTSVTVSSTRIQNPDPAVYQLRDSKSSDKSVCLFTDFDSQTNVSQSKDSDVYITDKCVLDMRSMDFKSNSAVAWSNKSDFACANAFNNSIIPEDTFFPSPESSCGFTSESYQQGVLSATILYEILLGKATLYAVLVSALVLMAMVKRKDSRG

SEQ ID NO: 44902 - protein, 1120 aa, synthetic construct
MGPRLLFWALLCLLGTGPVEAGVTQSPTHLIKTRGQQATLRCSPISGHTSVYWYQQALGLGLQFLLWYDEGEERNRGNFPPRFSGRQFPNYSSELNVNALELEDSALYLCASSLGGPRGLAGLRGDEQFFGPGTRLTVLEGTGGGGSGGGEFQIVLTQSPAIMSVSPGEKVTMTCSASSSVNYMHWFQQKPGTSPKLWVYSTSNLASGVPARFSGSGSGTSYSLTISSMEAEDAATYYCQQRSIYPPWTFGGGTKLEIKLEDLKNVFPPEVAVFEPSEAEISHTQKATLVCLATGFYPDHVELSWWVNGKEVHSGVCTDPQPLKEQPALNDSRYCLSSRLRVSATFWQNPRNHFRCQVQFYGLSENDEWTQDRAKPVTQIVSAEAWGRADCDVKLVEKSFETDTNLNFQNLSVIGFRILLLKVAGFNLLMTLRLWSSRAKRSGSGATNFSLLKQAGDVEENPGPTSATMDWIWRILFLVGAATGAHSGPEVQLVESGGGLVQAGGSLRLSCAASGRTFSMGWFRQAPGKEREFVAAITYSGGSPYYADSVKGRFTISRDNAKNTVYLQMNSLKPEDTAVYYCAANPTYGSDWNAENWGQGTQVTVSSGSGGGGSGGGGSGGGGSFEEVQLQQSGPELVKPGASVKISCKASGYSFTGYTMNWVKQSHGKNLEWIGLINPYNGGTSYNQKFKAKATLTVDKSSSTAYMQLKSLTSEDSAVYYCARDYGYVLDYWGQGTSVTVSSTRIQNPDPAVYQLRDSKSSDKSVCLFTDFDSQTNVSQSKDSDVYITDKCVLDMRSMDFKSNSAVAWSNKSDFACANAFNNSIIPEDTFFPSPESSCGFTSESYQQGVLSATILYEILLGKATLYAVLVSALVLMAMVKRKDSRGRAKRSGSGVKQTLNFDLLKLAGDVESNPGPSRGHMTEYKPTVRLATRDDVPRAVRTLAAAFADYPATRHTVDPDRHIERVTELQELFLTRVGLDIGKVWVADDGAAVAVWTTPESVEAGAVFAEIGPRMAELSGSRLAAQQQMEGLLAPHRPKEPAWFLATVGVSPDHQGKGLGSAVVLPGVEAAERAGVPAFLETSAPRNLPFYERLGFTVTADVEVPEGPRTWCMTRKPGA

SEQ ID NO: 44903 - protein, 1119 aa, synthetic construct
MGPRLLFWALLCLLGTGPVEAGVTQSPTHLIKTRGQQATLRCSPISGHTSVYWYQQALGLGLQFLLWYDEGEERNRGNFPPRFSGRQFPNYSSELNVNALELEDSALYLCASSLGGDELGADGNEQFFGPGTRLTVLEGTGGGGSGGGSEFQIVLTQSPAIMSVSPGEKVTMTCSASSSVNYMHWFQQKPGTSPKLWVYSTSNLASGVPARFSGSGSGTSYSLTISSMEAEDAATYYCQQRSIYPPWTFGGGTKLEIKLEDLKNVFPPEVAVFEPSEAEISHTQKATLVCLATGFYPDHVELSWWVNGKEVHSGVCTDPQPLKEQPALNDSRYCLSSRLRVSATFWQNPRNHFRCQVQFYGLSENDEWTQDRAKPVTQIVSAEAWGRADCDVKLVEKSFETDTNLNFQNLSVIGFRILLLKVAGFNLLMTLRLWSSRAKRSGSGATNFSLLKQAGDVEENPGPTSATMDWIWRILFLVGAATGAHSGPEVQLVESGGGLVQAGGSLRLSCAASGRTFSMGWFRQAPGKEREFVAAITYSGGSPYYADSVKGRFTISRDNAKNTVYLQMNSLKPEDTAVYYCAANPTYGSDWNAENWGQGTQVTVSSGSGGGGSGGGGSGGGGSFEEVQLQQSGPELVKPGASVKISCKASGYSFTGYTMNWVKQSHGKNLEWIGLINPYNGGTSYNQKFKAKATLTVDKSSSTAYMQLKSLTSEDSAVYYCARDYGYVLDYWGQGTSVTVSSTRIQNPDPAVYQLRDSKSSDKSVCLFTDFDSQTNVSQSKDSDVYITDKCVLDMRSMDFKSNSAVAWSNKSDFACANAFNNSIIPEDTFFPSPESSCGFTSESYQQGVLSATILYEILLGKATLYAVLVSALVLMAMVKRKDSRGRAKRSGSGVKQTLNFDLLKLAGDVESNPGPSRGHMTEYKPTVRLATRDDVPRAVRTLAAAFADYPATRHTVDPDRHIERVTELQELFLTRVGLDIGKVWVADDGAAVAVWTTPESVEAGAVFAEIGPRMAELSGSRLAAQQQMEGLLAPHRPKEPAWFLATVGVSPDHQGKGLGSAVVLPGVEAAERAGVPAFLETSAPRNLPFYERLGFTVTADVEVPEGPRTWCMTRKPGA

SEQ ID NO: 44904 - protein, 944 aa, synthetic construct
MALPVTALLLPLALLLHAARPQIVLTQSPAIMSVSPGEKVTMTCSASSSVNYMHWFQQKPGTSPKLWVYSTSNLASGVPARFSGSGSGTSYSLTISSMEAEDAATYYCQQRSIYPPWTFGGGTKLEIKLEDLKNVFPPEVAVFEPSEAEISHTQKATLVCLATGFYPDHVELSWWVNGKEVHSGVCTDPQPLKEQPALNDSRYCLSSRLRVSATFWQNPRNHFRCQVQFYGLSENDEWTQDRAKPVTQIVSAEAWGRADCDVKLVEKSFETDTNLNFQNLSVIGFRILLLKVAGFNLLMTLRLWSSRAKRSGSGATNFSLLKQAGDVEENPGPTSATMDWIWRILFLVGAATGAHSGPMGSWLEFYHRLNAIDSRLWALGGSEAELAAFEKEIAAFESELQAYKGKGNPEVESLRDHAAHIREWLQAYRHNGSGGGGSGGGGSGGGGSFEEVQLQQSGPELVKPGASVKISCKASGYSFTGYTMNWVKQSHGKNLEWIGLINPYNGGTSYNQKFKAKATLTVDKSSSTAYMQLKSLTSEDSAVYYCARDYGYVLDYWGQGTSVTVSSTRIQNPDPAVYQLRDSKSSDKSVCLFTDFDSQTNVSQSKDSDVYITDKCVLDMRSMDFKSNSAVAWSNKSDFACANAFNNSIIPEDTFFPSPESSCGFTSESYQQGVLSATILYEILLGKATLYAVLVSALVLMAMVKRKDSRGRAKRSGSGVKQTLNFDLLKLAGDVESNPGPSRGHMTEYKPTVRLATRDDVPRAVRTLAAAFADYPATRHTVDPDRHIERVTELQELFLTRVGLDIGKVWVADDGAAVAVWTTPESVEAGAVFAEIGPRMAELSGSRLAAQQQMEGLLAPHRPKEPAWFLATVGVSPDHQGKGLGSAVVLPGVEAAERAGVPAFLETSAPRNLPFYERLGFTVTADVEVPEGPRTWCMTRKPGA

SEQ ID NO: 44905 - protein, 944 aa, synthetic construct
MALPVTALLLPLALLLHAARPACMGSWFEFYDRLNAIDARLWALGGSEAELAAFEKEIAAFESELQAYKGKGNPEVENLRVHAAAIREWLQAYRHNGTGGGGSGGGGSGGGGSEFQIVLTQSPAIMSVSPGEKVTMTCSASSSVNYMHWFQQKPGTSPKLWVYSTSNLASGVPARFSGSGSGTSYSLTISSMEAEDAATYYCQQRSIYPPWTFGGGTKLEIKLEDLKNVFPPEVAVFEPSEAEISHTQKATLVCLATGFYPDHVELSWWVNGKEVHSGVCTDPQPLKEQPALNDSRYCLSSRLRVSATFWQNPRNHFRCQVQFYGLSENDEWTQDRAKPVTQIVSAEAWGRADCDVKLVEKSFETDTNLNFQNLSVIGFRILLLKVAGFNLLMTLRLWSSRAKRSGSGATNFSLLKQAGDVEENPGPTSMDWIWRILFLVGAATGAHSFEEVQLQQSGPELVKPGASVKISCKASGYSFTGYTMNWVKQSHGKNLEWIGLINPYNGGTSYNQKFKAKATLTVDKSSSTAYMQLKSLTSEDSAVYYCARDYGYVLDYWGQGTSVTVSSTRIQNPDPAVYQLRDSKSSDKSVCLFTDFDSQTNVSQSKDSDVYITDKCVLDMRSMDFKSNSAVAWSNKSDFACANAFNNSIIPEDTFFPSPESSCGFTSESYQQGVLSATILYEILLGKATLYAVLVSALVLMAMVKRKDSRGRAKRSGSGVKQTLNFDLLKLAGDVESNPGPSRGHMTEYKPTVRLATRDDVPRAVRTLAAAFADYPATRHTVDPDRHIERVTELQELFLTRVGLDIGKVWVADDGAAVAVWTTPESVEAGAVFAEIGPRMAELSGSRLAAQQQMEGLLAPHRPKEPAWFLATVGVSPDHQGKGLGSAVVLPGVEAAERAGVPAFLETSAPRNLPFYERLGFTVTADVEVPEGPRTWCMTRKPGA

SEQ ID NO: 44906 - protein, 1061 aa, synthetic construct
MALPVTALLLPLALLLHAARPACMDPDLEIRAAFLRQRNTALRTEVAELEQEVQRLENEVSQYETRYGPLGGGKGTGGGGSGGGGSGGGGSEFQIVLTQSPAIMSVSPGEKVTMTCSASSSVNYMHWFQQKPGTSPKLWVYSTSNLASGVPARFSGSGSGTSYSLTISSMEAEDAATYYCQQRSIYPPWTFGGGTKLEIKLEDLKNVFPPEVAVFEPSEAEISHTQKATLVCLATGFYPDHVELSWWVNGKEVHSGVCTDPQPLKEQPALNDSRYCLSSRLRVSATFWQNPRNHFRCQVQFYGLSENDEWTQDRAKPVTQIVSAEAWGRADCDVKLVEKSFETDTNLNFQNLSVIGFRILLLKVAGFNLLMTLRLWSSRAKRSGSGATNFSLLKQAGDVEENPGPTSATMDWIWRILFLVGAATGAHSGPEVQLVESGGGLVQAGGSLRLSCAASGRTFSMGWFRQAPGKEREFVAAITYSGGSPYYADSVKGRFTISRDNAKNTVYLQMNSLKPEDTAVYYCAANPTYGSDWNAENWGQGTQVTVSSGSGGGGSGGGGSGGGGSFEEVQLQQSGPELVKPGASVKISCKASGYSFTGYTMNWVKQSHGKNLEWIGLINPYNGGTSYNQKFKAKATLTVDKSSSTAYMQLKSLTSEDSAVYYCARDYGYVLDYWGQGTSVTVSSTRIQNPDPAVYQLRDSKSSDKSVCLFTDFDSQTNVSQSKDSDVYITDKCVLDMRSMDFKSNSAVAWSNKSDFACANAFNNSIIPEDTFFPSPESSCGFTSESYQQGVLSATILYEILLGKATLYAVLVSALVLMAMVKRKDSRGRAKRSGSGVKQTLNFDLLKLAGDVESNPGPSRGHMTEYKPTVRLATRDDVPRAVRTLAAAFADYPATRHTVDPDRHIERVTELQELFLTRVGLDIGKVWVADDGAAVAVWTTPESVEAGAVFAEIGPRMAELSGSRLAAQQQMEGLLAPHRPKEPAWFLATVGVSPDHQGKGLGSAVVLPGVEAAERAGVPAFLETSAPRNLPFYERLGFTVTADVEVPEGPRTWCMTRKPGA

SEQ ID NO: 44907 - protein, 944 aa, synthetic construct
MALPVTALLLPLALLLHAARPQIVLTQSPAIMSVSPGEKVTMTCSASSSVNYMHWFQQKPGTSPKLWVYSTSNLASGVPARFSGSGSGTSYSLTISSMEAEDAATYYCQQRSIYPPWTFGGGTKLEIKLEDLKNVFPPEVAVFEPSEAEISHTQKATLVCLATGFYPDHVELSWWVNGKEVHSGVCTDPQPLKEQPALNDSRYCLSSRLRVSATFWQNPRNHFRCQVQFYGLSENDEWTQDRAKPVTQIVSAEAWGRADCDVKLVEKSFETDTNLNFQNLSVIGFRILLLKVAGFNLLMTLRLWSSRAKRSGSGATNFSLLKQAGDVEENPGPTSATMDWIWRILFLVGAATGAHSGPMGSWSEFYDRLHAIHHRLYALGGSEAELAAFEKEIAAFESELQAYKGKGNPEVEALRDTAAFIRTRLQAYRHNGSGGGGSGGGGSGGGGSFEEVQLQQSGPELVKPGASVKISCKASGYSFTGYTMNWVKQSHGKNLEWIGLINPYNGGTSYNQKFKAKATLTVDKSSSTAYMQLKSLTSEDSAVYYCARDYGYVLDYWGQGTSVTVSSTRIQNPDPAVYQLRDSKSSDKSVCLFTDFDSQTNVSQSKDSDVYITDKCVLDMRSMDFKSNSAVAWSNKSDFACANAFNNSIIPEDTFFPSPESSCGFTSESYQQGVLSATILYEILLGKATLYAVLVSALVLMAMVKRKDSRGRAKRSGSGVKQTLNFDLLKLAGDVESNPGPSRGHMTEYKPTVRLATRDDVPRAVRTLAAAFADYPATRHTVDPDRHIERVTELQELFLTRVGLDIGKVWVADDGAAVAVWTTPESVEAGAVFAEIGPRMAELSGSRLAAQQQMEGLLAPHRPKEPAWFLATVGVSPDHQGKGLGSAVVLPGVEAAERAGVPAFLETSAPRNLPFYERLGFTVTADVEVPEGPRTWCMTRKPGA

SEQ ID NO: 44908 - protein, 1154 aa, synthetic construct
MALPVTALLLPLALLLHAARPQIVLTQSPAIMSVSPGEKVTMTCSASSSVNYMHWFQQKPGTSPKLWVYSTSNLASGVPARFSGSGSGTSYSLTISSMEAEDAATYYCQQRSIYPPWTFGGGTKLEIKLEDLKNVFPPEVAVFEPSEAEISHTQKATLVCLATGFYPDHVELSWWVNGKEVHSGVCTDPQPLKEQPALNDSRYCLSSRLRVSATFWQNPRNHFRCQVQFYGLSENDEWTQDRAKPVTQIVSAEAWGRADCDVKLVEKSFETDTNLNFQNLSVIGFRILLLKVAGFNLLMTLRLWSSRAKRSGSGATNFSLLKQAGDVEENPGPTSTMDWIWRILFLVGAATGAHSLFNQEVQIPLTESYCGPCPKNWICYKNNCYQFFDESKNWYESQASCMSQNASLLKVYSKEDQDLLKLVKSAHWMGLVHIPTNGSWQWEDGSILSPNLLTIIEMQKGDCALYASSFKGYIENCSTPNTYICMQRTVSGGGGSGGGGSGGGGDLFNQEVQIPLTESYCGPCPKNWICYKNNCYQFFDESKNWYESQASCMSQNASLLKVYSKEDQDLLKLVKSAHWMGLVHIPTNGSWQWEDGSILSPNLLTIIEMQKGDCALYASSFKGYIENCSTPNTYICMQRTVGSGGGGSGGGGSGGGGSFEEVQLQQSGPELVKPGASVKISCKASGYSFTGYTMNWVKQSHGKNLEWIGLINPYNGGTSYNQKFKAKATLTVDKSSSTAYMQLKSLTSEDSAVYYCARDYGYVLDYWGQGTSVTVSSTRIQNPDPAVYQLRDSKSSDKSVCLFTDFDSQTNVSQSKDSDVYITDKCVLDMRSMDFKSNSAVAWSNKSDFACANAFNNSIIPEDTFFPSPESSCGFTSESYQQGVLSATILYEILLGKATLYAVLVSALVLMAMVKRKDSRGRAKRSGSGVKQTLNFDLLKLAGDVESNPGPSRGHMTEYKPTVRLATRDDVPRAVRTLAAAFADYPATRHTVDPDRHIERVTELQELFLTRVGLDIGKVWVADDGAAVAVWTTPESVEAGAVFAEIGPRMAELSGSRLAAQQQMEGLLAPHRPKEPAWFLATVGVSPDHQGKGLGSAVVLPGVEAAERAGVPAFLETSAPRNLPFYERLGFTVTADVEVPEGPRTWCMTRKPGA

SEQ ID NO: 44909 - protein, 617 aa, synthetic construct; identical to SEQ ID NO: 44866

SEQ ID NO: 44910 - protein, 621 aa, synthetic construct
MALPVTALLLPLALLLHAARPQIVLTQSPAIMSVSPGEKVTMTCSASSSVNYMHWFQQKPGTSPKLWVYSTSNLASGVPARFSGSGSGTSYSLTISSMEAEDAATYYCQQRSIYPPWTFGGGTKLEIKLEIQNPDPAVYQLRDSKSSDKSVCLFTDFDSQTNVSQSKDSDVYITDKCVLDMRSMDFKSNSAVAWSNKSDFACANAFNNSIIPEDTFFPSPESSCDVKLVEKSFETDTNLNFQILYEILLGKATLYAVLVSALVLMAMVKRKDSRGRAKRSGSGVKQTLNFDLLKLAGDVESNPGPTSMDWIWRILFLVGAATGAHSFEEVQLQQSGPELVKPGASVKISCKASGYSFTGYTMNWVKQSHGKNLEWIGLINPYNGGTSYNQKFKAKATLTVDKSSSTAYMQLKSLTSEDSAVYYCARDYGYVLDYWGQGTSVTVSSTREDLKNVFPPEVAVFEPSEAEISHTQKATLVCLATGFYPDHVELSWWVNGKEVHSGVCTDPQPLKEQPALNDSRYCLSSRLRVSATFWQNPRNHFRCQVQFYGLSENDEWTQDRAKPVTQIVSAEAWGRADCGFTSESYQQGVLSATNLSVIGFRILLLKVAGFNLLMTLRLWSS

SEQ ID NO: 44911 - protein, 752 aa, synthetic construct
MALPVTALLLPLALLLHAARPEVQLVESGGGLVQPGGSLRLSCAASGFSFSDFWMSWVRQAPGKGLEWVATISQAGSEKDYVDSVKGRFTISRDNAKKSLYLQMNSLRAEDTAVYYCASGVYSFDYRGQGTLVTVSSGTGGGGSGGGGSGGGGSEFQIVLTQSPAIMSVSPGEKVTMTCSASSSVNYMHWFQQKPGTSPKLWVYSTSNLASGVPARFSGSGSGTSYSLTISSMEAEDAATYYCQQRSIYPPWTFGGGTKLEIKLEDLKNVFPPEVAVFEPSEAEISHTQKATLVCLATGFYPDHVELSWWVNGKEVHSGVCTDPQPLKEQPALNDSRYCLSSRLRVSATFWQNPRNHFRCQVQFYGLSENDEWTQDRAKPVTQIVSAEAWGRADCGFTSESYQQGVLSATNLSVIGFRILLLKVAGFNLLMTLRLWSSRAKRSGSGATNFSLLKQAGDVEENPGPTSMDWIWRILFLVGAATGAHSFEEVQLQQSGPELVKPGASVKISCKASGYSFTGYTMNWVKQSHGKNLEWIGLINPYNGGTSYNQKFKAKATLTVDKSSSTAYMQLKSLTSEDSAVYYCARDYGYVLDYWGQGTSVTVSSTRIQNPDPAVYQLRDSKSSDKSVCLFTDFDSQTNVSQSKDSDVYITDKCVLDMRSMDFKSNSAVAWSNKSDFACANAFNNSIIPEDTFFPSPESSCDVKLVEKSFETDTNLNFQILYEILLGKATLYAVLVSALVLMAMVKRKDSRG

SEQ ID NO: 44912 - protein, 756 aa, synthetic construct
MALPVTALLLPLALLLHAARPEVQLVESGGGLVQPGGSLRLSCAASGFSFSDFWMSWVRQAPGKGLEWVATISQAGSEKDYVDSVKGRFTISRDNAKKSLYLQMNSLRAEDTAVYYCASGVYSFDYRGQGTLVTVSSGTGGGGSGGGGSGGGGSEFQIVLTQSPAIMSVSPGEKVTMTCSASSSVNYMHWFQQKPGTSPKLWVYSTSNLASGVPARFSGSGSGTSYSLTISSMEAEDAATYYCQQRSIYPPWTFGGGTKLEIKLEIQNPDPAVYQLRDSKSSDKSVCLFTDFDSQTNVSQSKDSDVYITDKCVLDMRSMDFKSNSAVAWSNKSDFACANAFNNSIIPEDTFFPSPESSCDVKLVEKSFETDTNLNFQILYEILLGKATLYAVLVSALVLMAMVKRKDSRGRAKRSGSGVKQTLNFDLLKLAGDVESNPGPTSMDWIWRILFLVGAATGAHSFEEVQLQQSGPELVKPGASVKISCKASGYSFTGYTMNWVKQSHGKNLEWIGLINPYNGGTSYNQKFKAKATLTVDKSSSTAYMQLKSLTSEDSAVYYCARDYGYVLDYWGQGTSVTVSSTREDLKNVFPPEVAVFEPSEAEISHTQKATLVCLATGFYPDHVELSWWVNGKEVHSGVCTDPQPLKEQPALNDSRYCLSSRLRVSATFWQNPRNHFRCQVQFYGLSENDEWTQDRAKPVTQIVSAEAWGRADCGFTSESYQQGVLSATNLSVIGFRILLLKVAGFNLLMTLRLWSS

SEQ ID NO: 44913 - protein, 889 aa, synthetic construct
MALPVTALLLPLALLLHAARPEVQLVESGGGLVQPGGSLRLSCAASGFSFSDFWMSWVRQAPGKGLEWVATISQAGSEKDYVDSVKGRFTISRDNAKKSLYLQMNSLRAEDTAVYYCASGVYSFDYRGQGTLVTVSSGTGGGGSGGGGSGGGGSEFQIVLTQSPAIMSVSPGEKVTMTCSASSSVNYMHWFQQKPGTSPKLWVYSTSNLASGVPARFSGSGSGTSYSLTISSMEAEDAATYYCQQRSIYPPWTFGGGTKLEIKLEDLKNVFPPEVAVFEPSEAEISHTQKATLVCLATGFYPDHVELSWWVNGKEVHSGVCTDPQPLKEQPALNDSRYCLSSRLRVSATFWQNPRNHFRCQVQFYGLSENDEWTQDRAKPVTQIVSAEAWGRADCGFTSESYQQGVLSATNLSVIGFRILLLKVAGFNLLMTLRLWSSRAKRSGSGATNFSLLKQAGDVEENPGPTSMDWIWRILFLVGAATGAHSGPQLQLQESGPGLVKPSETLSLTCTVSGDSISSGDYYWGWIRQPPGKGLEWIGHIYYSGVTYYNPSLKSRVTISVDTSRNQFSLKLSSVTAADTAVYYCTREDSSNWRSRGQGTLVTVSSGSGGGGSGGGGSGGGGSFEEVQLQQSGPELVKPGASVKISCKASGYSFTGYTMNWVKQSHGKNLEWIGLINPYNGGTSYNQKFKAKATLTVDKSSSTAYMQLKSLTSEDSAVYYCARDYGYVLDYWGQGTSVTVSSTRIQNPDPAVYQLRDSKSSDKSVCLFTDFDSQTNVSQSKDSDVYITDKCVLDMRSMDFKSNSAVAWSNKSDFACANAFNNSIIPEDTFFPSPESSCDVKLVEKSFETDTNLNFQILYEILLGKATLYAVLVSALVLMAMVKRKDSRG

SEQ ID NO: 44914 - protein, 893 aa, synthetic construct
MALPVTALLLPLALLLHAARPEVQLVESGGGLVQPGGSLRLSCAASGFSFSDFWMSWVRQAPGKGLEWVATISQAGSEKDYVDSVKGRFTISRDNAKKSLYLQMNSLRAEDTAVYYCASGVYSFDYRGQGTLVTVSSGTGGGGSGGGGSGGGGSEFQIVLTQSPAIMSVSPGEKVTMTCSASSSVNYMHWFQQKPGTSPKLWVYSTSNLASGVPARFSGSGSGTSYSLTISSMEAEDAATYYCQQRSIYPPWTFGGGTKLEIKLEIQNPDPAVYQLRDSKSSDKSVCLFTDFDSQTNVSQSKDSDVYITDKCVLDMRSMDFKSNSAVAWSNKSDFACANAFNNSIIPEDTFFPSPESSCDVKLVEKSFETDTNLNFQILYEILLGKATLYAVLVSALVLMAMVKRKDSRGRAKRSGSGVKQTLNFDLLKLAGDVESNPGPTSMDWIWRILFLVGAATGAHSGPQLQLQESGPGLVKPSETLSLTCTVSGDSISSGDYYWGWIRQPPGKGLEWIGHIYYSGVTYYNPSLKSRVTISVDTSRNQFSLKLSSVTAADTAVYYCTREDSSNWRSRGQGTLVTVSSGSGGGGSGGGGSGGGGSFEEVQLQQSGPELVKPGASVKISCKASGYSFTGYTMNWVKQSHGKNLEWIGLINPYNGGTSYNQKFKAKATLTVDKSSSTAYMQLKSLTSEDSAVYYCARDYGYVLDYWGQGTSVTVSSTREDLKNVFPPEVAVFEPSEAEISHTQKATLVCLATGFYPDHVELSWWVNGKEVHSGVCTDPQPLKEQPALNDSRYCLSSRLRVSATFWQNPRNHFRCQVQFYGLSENDEWTQDRAKPVTQIVSAEAWGRADCGFTSESYQQGVLSATNLSVIGFRILLLKVAGFNLLMTLRLWSS

SEQ ID NO: 44915 - protein, 721 aa, synthetic construct
MALPVTALLLPLALLLHAARPQIVLTQSPAIMSVSPGEKVTMTCSASSSVNYMHWFQQKPGTSPKLWVYSTSNLASGVPARFSGSGSGTSYSLTISSMEAEDAATYYCQQRSIYPPWTFGGGTKLEIKLEDLKNVFPPEVAVFEPSEAEISHTQKATLVCLATGFYPDHVELSWWVNGKEVHSGVCTDPQPLKEQPALNDSRYCLSSRLRVSATFWQNPRNHFRCQVQFYGLSENDEWTQDRAKPVTQIVSAEAWGRADDVIKIHWQEKKSNTILGSQEGNTMKTNDTYMKFSWLTVPEKSLDKEHRCIVRHENNKNGVDQEIIFPPIKTDVITMDPKDNCSKDANDTLLLQLTNTSAYYMYLLLLLKSVVYFAIITCCLLMAMVKRKDSRGRAKRSGSGATNFSLLKQAGDVEENPGPTSMDWIWRILFLVGAATGAHSFEEVQLQQSGPELVKPGASVKISCKASGYSFTGYTMNWVKQSHGKNLEWIGLINPYNGGTSYNQKFKAKATLTVDKSSSTAYMQLKSLTSEDSAVYYCARDYGYVLDYWGQGTSVTVSSTRIQNPDPAVYQLRDSKSSDKSVCLFTDFDSQTNVSQSKDSDVYITDKCVLDMRSMDFKSNSAVAWSNKSDFACANAFNNSIIPEDTFFPSPESSDSTDHVKPKETENTKQPSKSCHKPKAIVHTEKVNMMSLTVLGLRMLFAKTVAVNFLLTAKLFFLLTA

SEQ ID NO: 44916 - protein, 725 aa, synthetic construct
MALPVTALLLPLALLLHAARPQIVLTQSPAIMSVSPGEKVTMTCSASSSVNYMHWFQQKPGTSPKLWVYSTSNLASGVPARFSGSGSGTSYSLTISSMEAEDAATYYCQQRSIYPPWTFGGGTKLEIKLEIQNPDPAVYQLRDSKSSDKSVCLFTDFDSQTNVSQSKDSDVYITDKCVLDMRSMDFKSNSAVAWSNKSDFACANAFNNSIIPEDTFFPSPESSDSTDHVKPKETENTKQPSKSCHKPKAIVHTEKVNMMSLTVLGLRMLFAKTVAVNFLLTAKLFFLLTARAKRSGSGVKQTLNFDLLKLAGDVESNPGPTSMDWIWRILFLVGAATGAHSFEEVQLQQSGPELVKPGASVKISCKASGYSFTGYTMNWVKQSHGKNLEWIGLINPYNGGTSYNQKFKAKATLTVDKSSSTAYMQLKSLTSEDSAVYYCARDYGYVLDYWGQGTSVTVSSTREDLKNVFPPEVAVFEPSEAEISHTQKATLVCLATGFYPDHVELSWWVNGKEVHSGVCTDPQPLKEQPALNDSRYCLSSRLRVSATFWQNPRNHFRCQVQFYGLSENDEWTQDRAKPVTQIVSAEAWGRADDVIKIHWQEKKSNTILGSQEGNTMKTNDTYMKFSWLTVPEKSLDKEHRCIVRHENNKNGVDQEIIFPPIKTDVITMDPKDNCSKDANDTLLLQLTNTSAYYMYLLLLLKSVVYFAIITCCLLMAMVKRKDSRG

SEQ ID NO: 44917 - protein, 856 aa, synthetic construct
MALPVTALLLPLALLLHAARPEVQLVESGGGLVQPGGSLRLSCAASGFSFSDFWMSWVRQAPGKGLEWVATISQAGSEKDYVDSVKGRFTISRDNAKKSLYLQMNSLRAEDTAVYYCASGVYSFDYRGQGTLVTVSSGTGGGGSGGGGSGGGGSEFQIVLTQSPAIMSVSPGEKVTMTCSASSSVNYMHWFQQKPGTSPKLWVYSTSNLASGVPARFSGSGSGTSYSLTISSMEAEDAATYYCQQRSIYPPWTFGGGTKLEIKLEDLKNVFPPEVAVFEPSEAEISHTQKATLVCLATGFYPDHVELSWWVNGKEVHSGVCTDPQPLKEQPALNDSRYCLSSRLRVSATFWQNPRNHFRCQVQFYGLSENDEWTQDRAKPVTQIVSAEAWGRADDVIKIHWQEKKSNTILGSQEGNTMKTNDTYMKFSWLTVPEKSLDKEHRCIVRHENNKNGVDQEIIFPPIKTDVITMDPKDNCSKDANDTLLLQLTNTSAYYMYLLLLLKSVVYFAIITCCLLMAMVKRKDSRGRAKRSGSGATNFSLLKQAGDVEENPGPTSMDWIWRILFLVGAATGAHSFEEVQLQQSGPELVKPGASVKISCKASGYSFTGYTMNWVKQSHGKNLEWIGLINPYNGGTSYNQKFKAKATLTVDKSSSTAYMQLKSLTSEDSAVYYCARDYGYVLDYWGQGTSVTVSSTRIQNPDPAVYQLRDSKSSDKSVCLFTDFDSQTNVSQSKDSDVYITDKCVLDMRSMDFKSNSAVAWSNKSDFACANAFNNSIIPEDTFFPSPESSDSTDHVKPKETENTKQPSKSCHKPKAIVHTEKVNMMSLTVLGLRMLFAKTVAVNFLLTAKLFFLLTA

SEQ ID NO: 44918 - protein, 860 aa, synthetic construct
MALPVTALLLPLALLLHAARPEVQLVESGGGLVQPGGSLRLSCAASGFSFSDFWMSWVRQAPGKGLEWVATISQAGSEKDYVDSVKGRFTISRDNAKKSLYLQMNSLRAEDTAVYYCASGVYSFDYRGQGTLVTVSSGTGGGGSGGGGSGGGGSEFQIVLTQSPAIMSVSPGEKVTMTCSASSSVNYMHWFQQKPGTSPKLWVYSTSNLASGVPARFSGSGSGTSYSLTISSMEAEDAATYYCQQRSIYPPWTFGGGTKLEIKLEIQNPDPAVYQLRDSKSSDKSVCLFTDFDSQTNVSQSKDSDVYITDKCVLDMRSMDFKSNSAVAWSNKSDFACANAFNNSIIPEDTFFPSPESSDSTDHVKPKETENTKQPSKSCHKPKAIVHTEKVNMMSLTVLGLRMLFAKTVAVNFLLTAKLFFLLTARAKRSGSGVKQTLNFDLLKLAGDVESNPGPTSMDWIWRILFLVGAATGAHSFEEVQLQQSGPELVKPGASVKISCKASGYSFTGYTMNWVKQSHGKNLEWIGLINPYNGGTSYNQKFKAKATLTVDKSSSTAYMQLKSLTSEDSAVYYCARDYGYVLDYWGQGTSVTVSSTREDLKNVFPPEVAVFEPSEAEISHTQKATLVCLATGFYPDHVELSWWVNGKEVHSGVCTDPQPLKEQPALNDSRYCLSSRLRVSATFWQNPRNHFRCQVQFYGLSENDEWTQDRAKPVTQIVSAEAWGRADDVIKIHWQEKKSNTILGSQEGNTMKTNDTYMKFSWLTVPEKSLDKEHRCIVRHENNKNGVDQEIIFPPIKTDVITMDPKDNCSKDANDTLLLQLTNTSAYYMYLLLLLKSVVYFAIITCCLLMAMVKRKDSRG

SEQ ID NO: 44919 - protein, 993 aa, synthetic construct
MALPVTALLLPLALLLHAARPEVQLVESGGGLVQPGGSLRLSCAASGFSFSDFWMSWVRQAPGKGLEWVATISQAGSEKDYVDSVKGRFTISRDNAKKSLYLQMNSLRAEDTAVYYCASGVYSFDYRGQGTLVTVSSGTGGGGSGGGGSGGGGSEFQIVLTQSPAIMSVSPGEKVTMTCSASSSVNYMHWFQQKPGTSPKLWVYSTSNLASGVPARFSGSGSGTSYSLTISSMEAEDAATYYCQQRSIYPPWTFGGGTKLEIKLEDLKNVFPPEVAVFEPSEAEISHTQKATLVCLATGFYPDHVELSWWVNGKEVHSGVCTDPQPLKEQPALNDSRYCLSSRLRVSATFWQNPRNHFRCQVQFYGLSENDEWTQDRAKPVTQIVSAEAWGRADDVIKIHWQEKKSNTILGSQEGNTMKTNDTYMKFSWLTVPEKSLDKEHRCIVRHENNKNGVDQEIIFPPIKTDVITMDPKDNCSKDANDTLLLQLTNTSAYYMYLLLLLKSVVYFAIITCCLLMAMVKRKDSRGRAKRSGSGATNFSLLKQAGDVEENPGPTSMDWIWRILFLVGAATGAHSGPQLQLQESGPGLVKPSETLSLTCTVSGDSISSGDYYWGWIRQPPGKGLEWIGHIYYSGVTYYNPSLKSRVTISVDTSRNQFSLKLSSVTAADTAVYYCTREDSSNWRSRGQGTLVTVSSGSGGGGSGGGGSGGGGSFEEVQLQQSGPELVKPGASVKISCKASGYSFTGYTMNWVKQSHGKNLEWIGLINPYNGGTSYNQKFKAKATLTVDKSSSTAYMQLKSLTSEDSAVYYCARDYGYVLDYWGQGTSVTVSSTRIQNPDPAVYQLRDSKSSDKSVCLFTDFDSQTNVSQSKDSDVYITDKCVLDMRSMDFKSNSAVAWSNKSDFACANAFNNSIIPEDTFFPSPESSDSTDHVKPKETENTKQPSKSCHKPKAIVHTEKVNMMSLTVLGLRMLFAKTVAVNFLLTAKLFFLLTA

SEQ ID NO: 44920 - protein, 997 aa, synthetic construct
MALPVTALLLPLALLLHAARPEVQLVESGGGLVQPGGSLRLSCAASGFSFSDFWMSWVRQAPGKGLEWVATISQAGSEKDYVDSVKGRFTISRDNAKKSLYLQMNSLRAEDTAVYYCASGVYSFDYRGQGTLVTVSSGTGGGGSGGGGSGGGGSEFQIVLTQSPAIMSVSPGEKVTMTCSASSSVNYMHWFQQKPGTSPKLWVYSTSNLASGVPARFSGSGSGTSYSLTISSMEAEDAATYYCQQRSIYPPWTFGGGTKLEIKLEIQNPDPAVYQLRDSKSSDKSVCLFTDFDSQTNVSQSKDSDVYITDKCVLDMRSMDFKSNSAVAWSNKSDFACANAFNNSIIPEDTFFPSPESSDSTDHVKPKETENTKQPSKSCHKPKAIVHTEKVNMMSLTVLGLRMLFAKTVAVNFLLTAKLFFLLTARAKRSGSGVKQTLNFDLLKLAGDVESNPGPTSMDWIWRILFLVGAATGAHSGPQLQLQESGPGLVKPSETLSLTCTVSGDSISSGDYYWGWIRQPPGKGLEWIGHIYYSGVTYYNPSLKSRVTISVDTSRNQFSLKLSSVTAADTAVYYCTREDSSNWRSRGQGTLVTVSSGSGGGGSGGGGSGGGGSFEEVQLQQSGPELVKPGASVKISCKASGYSFTGYTMNWVKQSHGKNLEWIGLINPYNGGTSYNQKFKAKATLTVDKSSSTAYMQLKSLTSEDSAVYYCARDYGYVLDYWGQGTSVTVSSTREDLKNVFPPEVAVFEPSEAEISHTQKATLVCLATGFYPDHVELSWWVNGKEVHSGVCTDPQPLKEQPALNDSRYCLSSRLRVSATFWQNPRNHFRCQVQFYGLSENDEWTQDRAKPVTQIVSAEAWGRADDVIKIHWQEKKSNTILGSQEGNTMKTNDTYMKFSWLTVPEKSLDKEHRCIVRHENNKNGVDQEIIFPPIKTDVITMDPKDNCSKDANDTLLLQLTNTSAYYMYLLLLLKSVVYFAIITCCLLMAMVKRKDSRG

SEQ ID NO: 44921 - protein, 719 aa, synthetic construct
MALPVTALLLPLALLLHAARPQIVLTQSPAIMSVSPGEKVTMTCSASSSVNYMHWFQQKPGTSPKLWVYSTSNLASGVPARFSGSGSGTSYSLTISSMEAEDAATYYCQQRSIYPPWTFGGGTKLEIKLEDLKNVFPPEVAVFEPSEAEISHTQKATLVCLATGFYPDHVELSWWVNGKEVHSGVCTDPQPLKEQPALNDSRYCLSSRLRVSATFWQNPRNHFRCQVQFYGLSENDEWTQDRAKPVTQIVSAEAWGRADDVIKIHWQEKKSNTILGSQEGNTMKTNDTYMKFSWLTVPEKSLDKEHRCIVRHENNKNGVDQEIIFPPIKTDVITMDPKDNCSKDANDTLLLQLTNTSAYYMYLLLLLKSVVYFAIITCCLLRRTAFCCNGEKSRAKRSGSGATNFSLLKQAGDVEENPGPTSMDWIWRILFLVGAATGAHSFEEVQLQQSGPELVKPGASVKISCKASGYSFTGYTMNWVKQSHGKNLEWIGLINPYNGGTSYNQKFKAKATLTVDKSSSTAYMQLKSLTSEDSAVYYCARDYGYVLDYWGQGTSVTVSSTRIQNPDPAVYQLRDSKSSDKSVCLFTDFDSQTNVSQSKDSDVYITDKCVLDMRSMDFKSNSAVAWSNKSDFACANAFNNSIIPEDTFFPSPESSDSTDHVKPKETENTKQPSKSCHKPKAIVHTEKVNMMSLTVLGLRMLFAKTVAVNFLLTAKLFFL

SEQ ID NO: 44922 - protein, 723 aa, synthetic construct
MALPVTALLLPLALLLHAARPQIVLTQSPAIMSVSPGEKVTMTCSASSSVNYMHWFQQKPGTSPKLWVYSTSNLASGVPARFSGSGSGTSYSLTISSMEAEDAATYYCQQRSIYPPWTFGGGTKLEIKLEIQNPDPAVYQLRDSKSSDKSVCLFTDFDSQTNVSQSKDSDVYITDKCVLDMRSMDFKSNSAVAWSNKSDFACANAFNNSIIPEDTFFPSPESSDSTDHVKPKETENTKQPSKSCHKPKAIVHTEKVNMMSLTVLGLRMLFAKTVAVNFLLTAKLFFLRAKRSGSGVKQTLNFDLLKLAGDVESNPGPTSMDWIWRILFLVGAATGAHSFEEVQLQQSGPELVKPGASVKISCKASGYSFTGYTMNWVKQSHGKNLEWIGLINPYNGGTSYNQKFKAKATLTVDKSSSTAYMQLKSLTSEDSAVYYCARDYGYVLDYWGQGTSVTVSSTREDLKNVFPPEVAVFEPSEAEISHTQKATLVCLATGFYPDHVELSWWVNGKEVHSGVCTDPQPLKEQPALNDSRYCLSSRLRVSATFWQNPRNHFRCQVQFYGLSENDEWTQDRAKPVTQIVSAEAWGRADDVIKIHWQEKKSNTILGSQEGNTMKTNDTYMKFSWLTVPEKSLDKEHRCIVRHENNKNGVDQEIIFPPIKTDVITMDPKDNCSKDANDTLLLQLTNTSAYYMYLLLLLKSVVYFAIITCCLLRRTAFCCNGEKS

SEQ ID NO: 44923 - protein, 854 aa, synthetic construct
MALPVTALLLPLALLLHAARPEVQLVESGGGLVQPGGSLRLSCAASGFSFSDFWMSWVRQAPGKGLEWVATISQAGSEKDYVDSVKGRFTISRDNAKKSLYLQMNSLRAEDTAVYYCASGVYSFDYRGQGTLVTVSSGTGGGGSGGGGSGGGGSEFQIVLTQSPAIMSVSPGEKVTMTCSASSSVNYMHWFQQKPGTSPKLWVYSTSNLASGVPARFSGSGSGTSYSLTISSMEAEDAATYYCQQRSIYPPWTFGGGTKLEIKLEDLKNVFPPEVAVFEPSEAEISHTQKATLVCLATGFYPDHVELSWWVNGKEVHSGVCTDPQPLKEQPALNDSRYCLSSRLRVSATFWQNPRNHFRCQVQFYGLSENDEWTQDRAKPVTQIVSAEAWGRADDVIKIHWQEKKSNTILGSQEGNTMKTNDTYMKFSWLTVPEKSLDKEHRCIVRHENNKNGVDQEIIFPPIKTDVITMDPKDNCSKDANDTLLLQLTNTSAYYMYLLLLLKSVVYFAIITCCLLRRTAFCCNGEKSRAKRSGSGATNFSLLKQAGDVEENPGPTSMDWIWRILFLVGAATGAHSFEEVQLQQSGPELVKPGASVKISCKASGYSFTGYTMNWVKQSHGKNLEWIGLINPYNGGTSYNQKFKAKATLTVDKSSSTAYMQLKSLTSEDSAVYYCARDYGYVLDYWGQGTSVTVSSTRIQNPDPAVYQLRDSKSSDKSVCLFTDFDSQTNVSQSKDSDVYITDKCVLDMRSMDFKSNSAVAWSNKSDFACANAFNNSIIPEDTFFPSPESSDSTDHVKPKETENTKQPSKSCHKPKAIVHTEKVNMMSLTVLGLRMLFAKTVAVNFLLTAKLFFL

SEQ ID NO: 44924 - protein, 991 aa, synthetic construct
MALPVTALLLPLALLLHAARPEVQLVESGGGLVQPGGSLRLSCAASGFSFSDFWMSWVRQAPGKGLEWVATISQAGSEKDYVDSVKGRFTISRDNAKKSLYLQMNSLRAEDTAVYYCASGVYSFDYRGQGTLVTVSSGTGGGGSGGGGSGGGGSEFQIVLTQSPAIMSVSPGEKVTMTCSASSSVNYMHWFQQKPGTSPKLWVYSTSNLASGVPARFSGSGSGTSYSLTISSMEAEDAATYYCQQRSIYPPWTFGGGTKLEIKLEDLKNVFPPEVAVFEPSEAEISHTQKATLVCLATGFYPDHVELSWWVNGKEVHSGVCTDPQPLKEQPALNDSRYCLSSRLRVSATFWQNPRNHFRCQVQFYGLSENDEWTQDRAKPVTQIVSAEAWGRADDVIKIHWQEKKSNTILGSQEGNTMKTNDTYMKFSWLTVPEKSLDKEHRCIVRHENNKNGVDQEIIFPPIKTDVITMDPKDNCSKDANDTLLLQLTNTSAYYMYLLLLLKSVVYFAIITCCLLRRTAFCCNGEKSRAKRSGSGATNFSLLKQAGDVEENPGPTSMDWIWRILFLVGAATGAHSGPQLQLQESGPGLVKPSETLSLTCTVSGDSISSGDYYWGWIRQPPGKGLEWIGHIYYSGVTYYNPSLKSRVTISVDTSRNQFSLKLSSVTAADTAVYYCTREDSSNWRSRGQGTLVTVSSGSGGGGSGGGGSGGGGSFEEVQLQQSGPELVKPGASVKISCKASGYSFTGYTMNWVKQSHGKNLEWIGLINPYNGGTSYNQKFKAKATLTVDKSSSTAYMQLKSLTSEDSAVYYCARDYGYVLDYWGQGTSVTVSSTRIQNPDPAVYQLRDSKSSDKSVCLFTDFDSQTNVSQSKDSDVYITDKCVLDMRSMDFKSNSAVAWSNKSDFACANAFNNSIIPEDTFFPSPESSDSTDHVKPKETENTKQPSKSCHKPKAIVHTEKVNMMSLTVLGLRMLFAKTVAVNFLLTAKLFFL

SEQ ID NO: 44925 - protein, 617 aa, synthetic construct
MALPVTALLLPLALLLHAARPQIVLTQSPAIMSVSPGEKVTMTCSASSSVNYMHWFQQKPGTSPKLWVYSTSNLASGVPARFSGSGSGTSYSLTISSMEAEDAATYYCQQRSIYPPWTFGGGTKLEIKLEDLKNVFPPEVAVFEPSEAEISHTQKATLVCLATGFYPDHVELSWWVNGKEVHSGVSTDPQPLKEQPALNDSRYCLSSRLRVSATFWQNPRNHFRCQVQFYGLSENDEWTQDRAKPVTQIVSAEAWGRADCDVKLVEKSFETDTNLNFQNLSVIGFRILLLKVAGFNLLMTLRLWSSRAKRSGSGATNFSLLKQAGDVEENPGPTSMDWIWRILFLVGAATGAHSFEEVQLQQSGPELVKPGASVKISCKASGYSFTGYTMNWVKQSHGKNLEWIGLINPYNGGTSYNQKFKAKATLTVDKSSSTAYMQLKSLTSEDSAVYYCARDYGYVLDYWGQGTSVTVSSTRIQNPDPAVYQLRDSKSSDKSVCLFTDFDSQTNVSQSKDSDVYITDKTVLDMRSMDFKSNSAVAWSNKSDFACANAFNNSIIPEDTFFPSPESSCGFTSESYQQGVLSATILYEILLGKATLYAVLVSALVLMAMVKRKDSRG

SEQ ID NO: 44926 - protein, 617 aa, synthetic construct
MALPVTALLLPLALLLHAARPQIVLTQSPAIMSVSPGEKVTMTCSASSSVNYMHWFQQKPGTSPKLWVYSTSNLASGVPARFSGSGSGTSYSLTISSMEAEDAATYYCQQRSIYPPWTFGGGTKLEIKLEDLKNVFPPEVAVFEPSEAEISHTQKATLVCLATGFYPDHVELSWWVNGKEVHSGVSTDPQPLKEQPALNDSRYCLSSRLRVSATFWQNPRNHFRCQVQFYGLSENDEWTQDRAKPVTQIVSAEAWGRADCGFTSESYQQGVLSATNLSVIGFRILLLKVAGFNLLMTLRLWSSRAKRSGSGATNFSLLKQAGDVEENPGPTSMDWIWRILFLVGAATGAHSFEEVQLQQSGPELVKPGASVKISCKASGYSFTGYTMNWVKQSHGKNLEWIGLINPYNGGTSYNQKFKAKATLTVDKSSSTAYMQLKSLTSEDSAVYYCARDYGYVLDYWGQGTSVTVSSTRIQNPDPAVYQLRDSKSSDKSVCLFTDFDSQTNVSQSKDSDVYITDKTVLDMRSMDFKSNSAVAWSNKSDFACANAFNNSIIPEDTFFPSPESSCDVKLVEKSFETDTNLNFQILYEILLGKATLYAVLVSALVLMAMVKRKDSRG

SEQ ID NO: 44927 - protein, 721 aa, synthetic construct
MALPVTALLLPLALLLHAARPQIVLTQSPAIMSVSPGEKVTMTCSASSSVNYMHWFQQKPGTSPKLWVYSTSNLASGVPARFSGSGSGTSYSLTISSMEAEDAATYYCQQRSIYPPWTFGGGTKLEIKLEDLKNVFPPEVAVFEPSEAEISHTQKATLVCLATGFYPDHVELSWWVNGKEVHSGVSTDPQPLKEQPALNDSRYCLSSRLRVSATFWQNPRNHFRCQVQFYGLSENDEWTQDRAKPVTQIVSAEAWGRADDVIKIHWQEKKSNTILGSQEGNTMKTNDTYMKFSWLTVPEKSLDKEHRCIVRHENNKNGVDQEIIFPPIKTDVITMDPKDNCSKDANDTLLLQLTNTSAYYMYLLLLLKSVVYFAIITCCLLMAMVKRKDSRGRAKRSGSGATNFSLLKQAGDVEENPGPTSMDWIWRILFLVGAATGAHSFEEVQLQQSGPELVKPGASVKISCKASGYSFTGYTMNWVKQSHGKNLEWIGLINPYNGGTSYNQKFKAKATLTVDKSSSTAYMQLKSLTSEDSAVYYCARDYGYVLDYWGQGTSVTVSSTRIQNPDPAVYQLRDSKSSDKSVCLFTDFDSQTNVSQSKDSDVYITDKTVLDMRSMDFKSNSAVAWSNKSDFACANAFNNSIIPEDTFFPSPESSDSTDHVKPKETENTKQPSKSCHKPKAIVHTEKVNMMSLTVLGLRMLFAKTVAVNFLLTAKLFFLLTA

SEQ ID NO: 44928 - protein, 719 aa, synthetic construct
MALPVTALLLPLALLLHAARPQIVLTQSPAIMSVSPGEKVTMTCSASSSVNYMHWFQQKPGTSPKLWVYSTSNLASGVPARFSGSGSGTSYSLTISSMEAEDAATYYCQQRSIYPPWTFGGGTKLEIKLEDLKNVFPPEVAVFEPSEAEISHTQKATLVCLATGFYPDHVELSWWVNGKEVHSGVSTDPQPLKEQPALNDSRYCLSSRLRVSATFWQNPRNHFRCQVQFYGLSENDEWTQDRAKPVTQIVSAEAWGRADDVIKIHWQEKKSNTILGSQEGNTMKTNDTYMKFSWLTVPEKSLDKEHRCIVRHENNKNGVDQEIIFPPIKTDVITMDPKDNCSKDANDTLLLQLTNTSAYYMYLLLLLKSVVYFAIITCCLLRRTAFCCNGEKSRAKRSGSGATNFSLLKQAGDVEENPGPTSMDWIWRILFLVGAATGAHSFEEVQLQQSGPELVKPGASVKISCKASGYSFTGYTMNWVKQSHGKNLEWIGLINPYNGGTSYNQKFKAKATLTVDKSSSTAYMQLKSLTSEDSAVYYCARDYGYVLDYWGQGTSVTVSSTRIQNPDPAVYQLRDSKSSDKSVCLFTDFDSQTNVSQSKDSDVYITDKTVLDMRSMDFKSNSAVAWSNKSDFACANAFNNSIIPEDTFFPSPESSDSTDHVKPKETENTKQPSKSCHKPKAIVHTEKVNMMSLTVLGLRMLFAKTVAVNFLLTAKLFFL

SEQ ID NO: 44929 - protein, 862 aa, synthetic construct
MALPVTALLLPLALLLHAARPLEEDLKNVFPPEVAVFEPSEAEISHTQKATLVCLATGFYPDHVELSWWVNGKEVHSGVCTDPQPLKEQPALNDSRYCLSSRLRVSATFWQNPRNHFRCQVQFYGLSENDEWTQDRAKPVTQIVSAEAWGRADCGFTSESYQQGVLSATNLSVIGFRILLLKVAGFNLLMTLRLWSSRAKRSGSGATNFSLLKQAGDVEENPGPTSMALPVTALLLPLALLLHAARPQIVLTQSPAIMSVSPGEKVTMTCSASSSVNYMHWFQQKPGTSPKLWVYSTSNLASGVPARFSGSGSGTSYSLTISSMEAEDAATYYCQQRSIYPPWTFGGGTKLEIKGGGGSGGGGSGGGGSEVQLQQSGPELVKPGASVKISCKASGYSFTGYTMNWVKQSHGKNLEWIGLINPYNGGTSYNQKFKAKATLTVDKSSSTAYMQLKSLTSEDSAVYYCARDYGYVLDYWGQGTSVTVSSTRIQNPDPAVYQLRDSKSSDKSVCLFTDFDSQTNVSQSKDSDVYITDKCVLDMRSMDFKSNSAVAWSNKSDFACANAFNNSIIPEDTFFPSPESSCDVKLVEKSFETDTNLNFQILYEVIGFRILLLKVAGFNLLMTLRLWSSRAKRSGSGVKQTLNFDLLKLAGDVESNPGPSRGHMTEYKPTVRLATRDDVPRAVRTLAAAFADYPATRHTVDPDRHIERVTELQELFLTRVGLDIGKVWVADDGAAVAVWTTPESVEAGAVFAEIGPRMAELSGSRLAAQQQMEGLLAPHRPKEPAWFLATVGVSPDHQGKGLGSAVVLPGVEAAERAGVPAFLETSAPRNLPFYERLGFTVTADVEVPEGPRTWCMTRKPGA

SEQ ID NO: 44930 - protein, 862 aa, synthetic construct
MALPVTALLLPLALLLHAARPLEIQNPDPAVYQLRDSKSSDKSVCLFTDFDSQTNVSQSKDSDVYITDKCVLDMRSMDFKSNSAVAWSNKSDFACANAFNNSIIPEDTFFPSPESSCDVKLVEKSFETDTNLNFQILYEVIGFRILLLKVAGFNLLMTLRLWSSRAKRSGSGATNFSLLKQAGDVEENPGPTSMALPVTALLLPLALLLHAARPQIVLTQSPAIMSVSPGEKVTMTCSASSSVNYMHWFQQKPGTSPKLWVYSTSNLASGVPARFSGSGSGTSYSLTISSMEAEDAATYYCQQRSIYPPWTFGGGTKLEIKGGGGSGGGGSGGGGSEVQLQQSGPELVKPGASVKISCKASGYSFTGYTMNWVKQSHGKNLEWIGLINPYNGGTSYNQKFKAKATLTVDKSSSTAYMQLKSLTSEDSAVYYCARDYGYVLDYWGQGTSVTVSSTREDLKNVFPPEVAVFEPSEAEISHTQKATLVCLATGFYPDHVELSWWVNGKEVHSGVCTDPQPLKEQPALNDSRYCLSSRLRVSATFWQNPRNHFRCQVQFYGLSENDEWTQDRAKPVTQIVSAEAWGRADCGFTSESYQQGVLSATNLSVIGFRILLLKVAGFNLLMTLRLWSSRAKRSGSGVKQTLNFDLLKLAGDVESNPGPSRGHMTEYKPTVRLATRDDVPRAVRTLAAAFADYPATRHTVDPDRHIERVTELQELFLTRVGLDIGKVWVADDGAAVAVWTTPESVEAGAVFAEIGPRMAELSGSRLAAQQQMEGLLAPHRPKEPAWFLATVGVSPDHQGKGLGSAVVLPGVEAAERAGVPAFLETSAPRNLPFYERLGFTVTADVEVPEGPRTWCMTRKPGA

SEQ ID NO: 44931 - protein, 862 aa, synthetic construct; identical to SEQ ID NO: 44929

SEQ ID NO: 44932 - protein, 970 aa, synthetic construct
MALPVTALLLPLALLLHAARPLEEDLKNVFPPEVAVFEPSEAEISHTQKATLVCLATGFYPDHVELSWWVNGKEVHSGVSTDPQPLKEQPALNDSRYCLSSRLRVSATFWQNPRNHFRCQVQFYGLSENDEWTQDRAKPVTQIVSAEAWGRADDVIKIHWQEKKSNTILGSQEGNTMKTNDTYMKFSWLTVPEKSLDKEHRCIVRHENNKNGVDQEIIFPPIKTDVITMDPKDNCSKDANDTLLLQLTNTSAYYMYLLLLLKSVVYFAIITCCLLMAMVKRKDSRGRAKRSGSGATNFSLLKQAGDVEENPGPTSMALPVTALLLPLALLLHAARPQIVLTQSPAIMSVSPGEKVTMTCSASSSVNYMHWFQQKPGTSPKLWVYSTSNLASGVPARFSGSGSGTSYSLTISSMEAEDAATYYCQQRSIYPPWTFGGGTKLEIKGGGGSGGGGSGGGGSEVQLQQSGPELVKPGASVKISCKASGYSFTGYTMNWVKQSHGKNLEWIGLINPYNGGTSYNQKFKAKATLTVDKSSSTAYMQLKSLTSEDSAVYYCARDYGYVLDYWGQGTSVTVSSTRIQNPDPAVYQLRDSKSSDKSVCLFTDFDSQTNVSQSKDSDVYITDKTVLDMRSMDFKSNSAVAWSNKSDFACANAFNNSIIPEDTFFPSPESSDSTDHVKPKETENTKQPSKSCHKPKAIVHTEKVNMMSLTVLGLRMLFAKTVAVNFLLTAKLFFLLTARAKRSGSGVKQTLNFDLLKLAGDVESNPGPSRGHMTEYKPTVRLATRDDVPRAVRTLAAAFADYPATRHTVDPDRHIERVTELQELFLTRVGLDIGKVWVADDGAAVAVWTTPESVEAGAVFAEIGPRMAELSGSRLAAQQQMEGLLAPHRPKEPAWFLATVGVSPDHQGKGLGSAVVLPGVEAAERAGVPAFLETSAPRNLPFYERLGFTVTADVEVPEGPRTWCMTRKPGA

SEQ ID NO: 44933 - protein, 970 aa, synthetic construct
MALPVTALLLPLALLLHAARPLEIQNPDPAVYQLRDSKSSDKSVCLFTDFDSQTNVSQSKDSDVYITDKTVLDMRSMDFKSNSAVAWSNKSDFACANAFNNSIIPEDTFFPSPESSDSTDHVKPKETENTKQPSKSCHKPKAIVHTEKVNMMSLTVLGLRMLFAKTVAVNFLLTAKLFFLLTARAKRSGSGATNFSLLKQAGDVEENPGPTSMALPVTALLLPLALLLHAARPQIVLTQSPAIMSVSPGEKVTMTCSASSSVNYMHWFQQKPGTSPKLWVYSTSNLASGVPARFSGSGSGTSYSLTISSMEAEDAATYYCQQRSIYPPWTFGGGTKLEIKGGGGSGGGGSGGGGSEVQLQQSGPELVKPGASVKISCKASGYSFTGYTMNWVKQSHGKNLEWIGLINPYNGGTSYNQKFKAKATLTVDKSSSTAYMQLKSLTSEDSAVYYCARDYGYVLDYWGQGTSVTVSSTREDLKNVFPPEVAVFEPSEAEISHTQKATLVCLATGFYPDHVELSWWVNGKEVHSGVSTDPQPLKEQPALNDSRYCLSSRLRVSATFWQNPRNHFRCQVQFYGLSENDEWTQDRAKPVTQIVSAEAWGRADDVIKIHWQEKKSNTILGSQEGNTMKTNDTYMKFSWLTVPEKSLDKEHRCIVRHENNKNGVDQEIIFPPIKTDVITMDPKDNCSKDANDTLLLQLTNTSAYYMYLLLLLKSVVYFAIITCCLLMAMVKRKDSRGRAKRSGSGVKQTLNFDLLKLAGDVESNPGPSRGHMTEYKPTVRLATRDDVPRAVRTLAAAFADYPATRHTVDPDRHIERVTELQELFLTRVGLDIGKVWVADDGAAVAVWTTPESVEAGAVFAEIGPRMAELSGSRLAAQQQMEGLLAPHRPKEPAWFLATVGVSPDHQGKGLGSAVVLPGVEAAERAGVPAFLETSAPRNLPFYERLGFTVTADVEVPEGPRTWCMTRKPGA

SEQ ID NO: 44934 - protein, 968 aa, synthetic construct
MALPVTALLLPLALLLHAARPLEEDLKNVFPPEVAVFEPSEAEISHTQKATLVCLATGFYPDHVELSWWVNGKEVHSGVCTDPQPLKEQPALNDSRYCLSSRLRVSATFWQNPRNHFRCQVQFYGLSENDEWTQDRAKPVTQIVSAEAWGRADDVIKIHWQEKKSNTILGSQEGNTMKTNDTYMKFSWLTVPEKSLDKEHRCIVRHENNKNGVDQEIIFPPIKTDVITMDPKDNCSKDANDTLLLQLTNTSAYYMYLLLLLKSVVYFAIITCCLLRRTAFCCNGEKSRAKRSGSGATNFSLLKQAGDVEENPGPTSMALPVTALLLPLALLLHAARPQIVLTQSPAIMSVSPGEKVTMTCSASSSVNYMHWFQQKPGTSPKLWVYSTSNLASGVPARFSGSGSGTSYSLTISSMEAEDAATYYCQQRSIYPPWTFGGGTKLEIKGGGGSGGGGSGGGGSEVQLQQSGPELVKPGASVKISCKASGYSFTGYTMNWVKQSHGKNLEWIGLINPYNGGTSYNQKFKAKATLTVDKSSSTAYMQLKSLTSEDSAVYYCARDYGYVLDYWGQGTSVTVSSTRIQNPDPAVYQLRDSKSSDKSVCLFTDFDSQTNVSQSKDSDVYITDKCVLDMRSMDFKSNSAVAWSNKSDFACANAFNNSIIPEDTFFPSPESSDSTDHVKPKETENTKQPSKSCHKPKAIVHTEKVNMMSLTVLGLRMLFAKTVAVNFLLTAKLFFLRAKRSGSGVKQTLNFDLLKLAGDVESNPGPSRGHMTEYKPTVRLATRDDVPRAVRTLAAAFADYPATRHTVDPDRHIERVTELQELFLTRVGLDIGKVWVADDGAAVAVWTTPESVEAGAVFAEIGPRMAELSGSRLAAQQQMEGLLAPHRPKEPAWFLATVGVSPDHQGKGLGSAVVLPGVEAAERAGVPAFLETSAPRNLPFYERLGFTVTADVEVPEGPRTWCMTRKPGA

SEQ ID NO: 44935 - protein, 968 aa, synthetic construct
MALPVTALLLPLALLLHAARPLEIQNPDPAVYQLRDSKSSDKSVCLFTDFDSQTNVSQSKDSDVYITDKCVLDMRSMDFKSNSAVAWSNKSDFACANAFNNSIIPEDTFFPSPESSDSTDHVKPKETENTKQPSKSCHKPKAIVHTEKVNMMSLTVLGLRMLFAKTVAVNFLLTAKLFFLRAKRSGSGATNFSLLKQAGDVEENPGPTSMALPVTALLLPLALLLHAARPQIVLTQSPAIMSVSPGEKVTMTCSASSSVNYMHWFQQKPGTSPKLWVYSTSNLASGVPARFSGSGSGTSYSLTISSMEAEDAATYYCQQRSIYPPWTFGGGTKLEIKGGGGSGGGGSGGGGSEVQLQQSGPELVKPGASVKISCKASGYSFTGYTMNWVKQSHGKNLEWIGLINPYNGGTSYNQKFKAKATLTVDKSSSTAYMQLKSLTSEDSAVYYCARDYGYVLDYWGQGTSVTVSSTREDLKNVFPPEVAVFEPSEAEISHTQKATLVCLATGFYPDHVELSWWVNGKEVHSGVCTDPQPLKEQPALNDSRYCLSSRLRVSATFWQNPRNHFRCQVQFYGLSENDEWTQDRAKPVTQIVSAEAWGRADDVIKIHWQEKKSNTILGSQEGNTMKTNDTYMKFSWLTVPEKSLDKEHRCIVRHENNKNGVDQEIIFPPIKTDVITMDPKDNCSKDANDTLLLQLTNTSAYYMYLLLLLKSVVYFAIITCCLLRRTAFCCNGEKSRAKRSGSGVKQTLNFDLLKLAGDVESNPGPSRGHMTEYKPTVRLATRDDVPRAVRTLAAAFADYPATRHTVDPDRHIERVTELQELFLTRVGLDIGKVWVADDGAAVAVWTTPESVEAGAVFAEIGPRMAELSGSRLAAQQQMEGLLAPHRPKEPAWFLATVGVSPDHQGKGLGSAVVLPGVEAAERAGVPAFLETSAPRNLPFYERLGFTVTADVEVPEGPRTWCMTRKPGA

SEQ ID NO: 44936 - protein, 968 aa, synthetic construct
MALPVTALLLPLALLLHAARPLEEDLKNVFPPEVAVFEPSEAEISHTQKATLVCLATGFYPDHVELSWWVNGKEVHSGVSTDPQPLKEQPALNDSRYCLSSRLRVSATFWQNPRNHFRCQVQFYGLSENDEWTQDRAKPVTQIVSAEAWGRADDVIKIHWQEKKSNTILGSQEGNTMKTNDTYMKFSWLTVPEKSLDKEHRCIVRHENNKNGVDQEIIFPPIKTDVITMDPKDNCSKDANDTLLLQLTNTSAYYMYLLLLLKSVVYFAIITCCLLRRTAFCCNGEKSRAKRSGSGATNFSLLKQAGDVEENPGPTSMALPVTALLLPLALLLHAARPQIVLTQSPAIMSVSPGEKVTMTCSASSSVNYMHWFQQKPGTSPKLWVYSTSNLASGVPARFSGSGSGTSYSLTISSMEAEDAATYYCQQRSIYPPWTFGGGTKLEIKGGGGSGGGGSGGGGSEVQLQQSGPELVKPGASVKISCKASGYSFTGYTMNWVKQSHGKNLEWIGLINPYNGGTSYNQKFKAKATLTVDKSSSTAYMQLKSLTSEDSAVYYCARDYGYVLDYWGQGTSVTVSSTRIQNPDPAVYQLRDSKSSDKSVCLFTDFDSQTNVSQSKDSDVYITDKTVLDMRSMDFKSNSAVAWSNKSDFACANAFNNSIIPEDTFFPSPESSDSTDHVKPKETENTKQPSKSCHKPKAIVHTEKVNMMSLTVLGLRMLFAKTVAVNFLLTAKLFFLRAKRSGSGVKQTLNFDLLKLAGDVESNPGPSRGHMTEYKPTVRLATRDDVPRAVRTLAAAFADYPATRHTVDPDRHIERVTELQELFLTRVGLDIGKVWVADDGAAVAVWTTPESVEAGAVFAEIGPRMAELSGSRLAAQQQMEGLLAPHRPKEPAWFLATVGVSPDHQGKGLGSAVVLPGVEAAERAGVPAFLETSAPRNLPFYERLGFTVTADVEVPEGPRTWCMTRKPGA

SEQ ID NO: 44937 - protein, 968 aa, synthetic construct
MALPVTALLLPLALLLHAARPLEIQNPDPAVYQLRDSKSSDKSVCLFTDFDSQTNVSQSKDSDVYITDKTVLDMRSMDFKSNSAVAWSNKSDFACANAFNNSIIPEDTFFPSPESSDSTDHVKPKETENTKQPSKSCHKPKAIVHTEKVNMMSLTVLGLRMLFAKTVAVNFLLTAKLFFLRAKRSGSGATNFSLLKQAGDVEENPGPTSMALPVTALLLPLALLLHAARPQIVLTQSPAIMSVSPGEKVTMTCSASSSVNYMHWFQQKPGTSPKLWVYSTSNLASGVPARFSGSGSGTSYSLTISSMEAEDAATYYCQQRSIYPPWTFGGGTKLEIKGGGGSGGGGSGGGGSEVQLQQSGPELVKPGASVKISCKASGYSFTGYTMNWVKQSHGKNLEWIGLINPYNGGTSYNQKFKAKATLTVDKSSSTAYMQLKSLTSEDSAVYYCARDYGYVLDYWGQGTSVTVSSTREDLKNVFPPEVAVFEPSEAEISHTQKATLVCLATGFYPDHVELSWWVNGKEVHSGVSTDPQPLKEQPALNDSRYCLSSRLRVSATFWQNPRNHFRCQVQFYGLSENDEWTQDRAKPVTQIVSAEAWGRADDVIKIHWQEKKSNTILGSQEGNTMKTNDTYMKFSWLTVPEKSLDKEHRCIVRHENNKNGVDQEIIFPPIKTDVITMDPKDNCSKDANDTLLLQLTNTSAYYMYLLLLLKSVVYFAIITCCLLRRTAFCCNGEKSRAKRSGSGVKQTLNFDLLKLAGDVESNPGPSRGHMTEYKPTVRLATRDDVPRAVRTLAAAFADYPATRHTVDPDRHIERVTELQELFLTRVGLDIGKVWVADDGAAVAVWTTPESVEAGAVFAEIGPRMAELSGSRLAAQQQMEGLLAPHRPKEPAWFLATVGVSPDHQGKGLGSAVVLPGVEAAERAGVPAFLETSAPRNLPFYERLGFTVTADVEVPEGPRTWCMTRKPGA

SEQ ID NO: 44938 - protein, 866 aa, synthetic construct
MALPVTALLLPLALLLHAARPLEEDLKNVFPPEVAVFEPSKAEIAHTQKATLVCLATGFYPDHVELSWWVNGKEVHSGVCTDPQPLKEQPALNDSRYCLSSRLRVSATFWQNPRNHFRCQVQFYGLSENDEWTQDRAKPVTQIVSAEAWGRADCGITSASYHQGVLSATILYEILLGKATLYAVLVSALVLMAMVKRKDSRGRAKRSGSGATNFSLLKQAGDVEENPGPTSMALPVTALLLPLALLLHAARPQIVLTQSPAIMSVSPGEKVTMTCSASSSVNYMHWFQQKPGTSPKLWVYSTSNLASGVPARFSGSGSGTSYSLTISSMEAEDAATYYCQQRSIYPPWTFGGGTKLEIKGGGGSGGGGSGGGGSEVQLQQSGPELVKPGASVKISCKASGYSFTGYTMNWVKQSHGKNLEWIGLINPYNGGTSYNQKFKAKATLTVDKSSSTAYMQLKSLTSEDSAVYYCARDYGYVLDYWGQGTSVTVSSTRIQNPDPAVYQLRDSKSSDKSVCLFTDFDSQTNVSQSKDSDVYITDKCVLDMRSMDFKSNSAVAWSNKSDFACANAFNNSIIPEDTFFPSSDVPCDVKLVEKSFETDTNLNFQNLSVIGFRILLLKVAGFNLLMTLRLWSSRAKRSGSGVKQTLNFDLLKLAGDVESNPGPSRGHMTEYKPTVRLATRDDVPRAVRTLAAAFADYPATRHTVDPDRHIERVTELQELFLTRVGLDIGKVWVADDGAAVAVWTTPESVEAGAVFAEIGPRMAELSGSRLAAQQQMEGLLAPHRPKEPAWFLATVGVSPDHQGKGLGSAVVLPGVEAAERAGVPAFLETSAPRNLPFYERLGFTVTADVEVPEGPRTWCMTRKPGA

SEQ ID NO: 44939 - protein, 866 aa, synthetic construct
MALPVTALLLPLALLLHAARPLEIQNPDPAVYQLRDSKSSDKSVCLFTDFDSQTNVSQSKDSDVYITDKCVLDMRSMDFKSNSAVAWSNKSDFACANAFNNSIIPEDTFFPSSDVPCDVKLVEKSFETDTNLNFQNLSVIGFRILLLKVAGFNLLMTLRLWSSRAKRSGSGATNFSLLKQAGDVEENPGPTSMALPVTALLLPLALLLHAARPQIVLTQSPAIMSVSPGEKVTMTCSASSSVNYMHWFQQKPGTSPKLWVYSTSNLASGVPARFSGSGSGTSYSLTISSMEAEDAATYYCQQRSIYPPWTFGGGTKLEIKGGGGSGGGGSGGGGSEVQLQQSGPELVKPGASVKISCKASGYSFTGYTMNWVKQSHGKNLEWIGLINPYNGGTSYNQKFKAKATLTVDKSSSTAYMQLKSLTSEDSAVYYCARDYGYVLDYWGQGTSVTVSSTREDLKNVFPPEVAVFEPSKAEIAHTQKATLVCLATGFYPDHVELSWWVNGKEVHSGVCTDPQPLKEQPALNDSRYCLSSRLRVSATFWQNPRNHFRCQVQFYGLSENDEWTQDRAKPVTQIVSAEAWGRADCGITSASYHQGVLSATILYEILLGKATLYAVLVSALVLMAMVKRKDSRGRAKRSGSGVKQTLNFDLLKLAGDVESNPGPSRGHMTEYKPTVRLATRDDVPRAVRTLAAAFADYPATRHTVDPDRHIERVTELQELFLTRVGLDIGKVWVADDGAAVAVWTTPESVEAGAVFAEIGPRMAELSGSRLAAQQQMEGLLAPHRPKEPAWFLATVGVSPDHQGKGLGSAVVLPGVEAAERAGVPAFLETSAPRNLPFYERLGFTVTADVEVPEGPRTWCMTRKPGA

SEQ ID NO: 44940 - protein, 759 aa, synthetic construct
MALPVTALLLPLALLLHAARPLEQSFGLLDPKLCYLLDGILFIYGVILTALFLRVKFSRSADAPAYQQGQNQLYNELNLGRREEYDVLDKRRGRDPEMGGKPQRRKNPQEGLYNELQKDKMAEAYSEIGMKGERRRGKGHDGLYQGLSTATKDTYDALHMQALPPRRAKRSGSGATNFSLLKQAGDVEENPGPTSMALPVTALLLPLALLLHAARPQIVLTQSPAIMSVSPGEKVTMTCSASSSVNYMHWFQQKPGTSPKLWVYSTSNLASGVPARFSGSGSGTSYSLTISSMEAEDAATYYCQQRSIYPPWTFGGGTKLEIKGGGGSGGGGSGGGGSEVQLQQSGPELVKPGASVKISCKASGYSFTGYTMNWVKQSHGKNLEWIGLINPYNGGTSYNQKFKAKATLTVDKSSSTAYMQLKSLTSEDSAVYYCARDYGYVLDYWGQGTSVTVSSTRELGEPQLCYILDAILFLYGIVLTLLYCRLKIQVRKAAITSYEKSDGVYTGLSTRNQETYETLKHEKPPQRAKRSGSGVKQTLNFDLLKLAGDVESNPGPSRGHMTEYKPTVRLATRDDVPRAVRTLAAAFADYPATRHTVDPDRHIERVTELQELFLTRVGLDIGKVWVADDGAAVAVWTTPESVEAGAVFAEIGPRMAELSGSRLAAQQQMEGLLAPHRPKEPAWFLATVGVSPDHQGKGLGSAVVLPGVEAAERAGVPAFLETSAPRNLPFYERLGFTVTADVEVPEGPRTWCMTRKPGA

SEQ ID NO: 44941 - protein, 970 aa, synthetic construct; identical to SEQ ID NO: 44932

SEQ ID NO: 44942 - protein, 970 aa, synthetic construct; identical to SEQ ID NO: 44933

SEQ ID NO: 44943 - protein, 969 aa, synthetic construct
MALPVTALLLPLALLLHAARPLEEEDLKNVFPPEVAVFEPSEAEISHTQKATLVCLATGFYPDHVELSWWVNGKEVHSGVCTDPQPLKEQPALNDSRYCLSSRLRVSATFWQNPRNHFRCQVQFYGLSENDEWTQDRAKPVTQIVSAEAWGRADDVIKIHWQEKKSNTILGSQEGNTMKTNDTYMKFSWLTVPEKSLDKEHRCIVRHENNKNGVDQEIIFPPIKTDVITMDPKDNCSKDANDTLLLQLTNTSAYYMYLLLLLKSVVYFAIITCCLLRRTAFCCNGEKSRAKRSGSGATNFSLLKQAGDVEENPGPTSMALPVTALLLPLALLLHAARPQIVLTQSPAIMSVSPGEKVTMTCSASSSVNYMHWFQQKPGTSPKLWVYSTSNLASGVPARFSGSGSGTSYSLTISSMEAEDAATYYCQQRSIYPPWTFGGGTKLEIKGGGGSGGGGSGGGGSEVQLQQSGPELVKPGASVKISCKASGYSFTGYTMNWVKQSHGKNLEWIGLINPYNGGTSYNQKFKAKATLTVDKSSSTAYMQLKSLTSEDSAVYYCARDYGYVLDYWGQGTSVTVSSTRIQNPDPAVYQLRDSKSSDKSVCLFTDFDSQTNVSQSKDSDVYITDKCVLDMRSMDFKSNSAVAWSNKSDFACANAFNNSIIPEDTFFPSPESSDSTDHVKPKETENTKQPSKSCHKPKAIVHTEKVNMMSLTVLGLRMLFAKTVAVNFLLTAKLFFLRAKRSGSGVKQTLNFDLLKLAGDVESNPGPSRGHMTEYKPTVRLATRDDVPRAVRTLAAAFADYPATRHTVDPDRHIERVTELQELFLTRVGLDIGKVWVADDGAAVAVWTTPESVEAGAVFAEIGPRMAELSGSRLAAQQQMEGLLAPHRPKEPAWFLATVGVSPDHQGKGLGSAVVLPGVEAAERAGVPAFLETSAPRNLPFYERLGFTVTADVEVPEGPRTWCMTRKPGA

SEQ ID NO: 44944 - protein, 969 aa, synthetic construct
MALPVTALLLPLALLLHAARPLEIQNPDPAVYQLRDSKSSDKSVCLFTDFDSQTNVSQSKDSDVYITDKCVLDMRSMDFKSNSAVAWSNKSDFACANAFNNSIIPEDTFFPSPESSDSTDHVKPKETENTKQPSKSCHKPKAIVHTEKVNMMSLTVLGLRMLFAKTVAVNFLLTAKLFFLRAKRSGSGATNFSLLKQAGDVEENPGPTSMALPVTALLLPLALLLHAARPQIVLTQSPAIMSVSPGEKVTMTCSASSSVNYMHWFQQKPGTSPKLWVYSTSNLASGVPARFSGSGSGTSYSLTISSMEAEDAATYYCQQRSIYPPWTFGGGTKLEIKGGGGSGGGGSGGGGSEVQLQQSGPELVKPGASVKISCKASGYSFTGYTMNWVKQSHGKNLEWIGLINPYNGGTSYNQKFKAKATLTVDKSSSTAYMQLKSLTSEDSAVYYCARDYGYVLDYWGQGTSVTVSSTREEDLKNVFPPEVAVFEPSEAEISHTQKATLVCLATGFYPDHVELSWWVNGKEVHSGVCTDPQPLKEQPALNDSRYCLSSRLRVSATFWQNPRNHFRCQVQFYGLSENDEWTQDRAKPVTQIVSAEAWGRADDVIKIHWQEKKSNTILGSQEGNTMKTNDTYMKFSWLTVPEKSLDKEHRCIVRHENNKNGVDQEIIFPPIKTDVITMDPKDNCSKDANDTLLLQLTNTSAYYMYLLLLLKSVVYFAIITCCLLRRTAFCCNGEKSRAKRSGSGVKQTLNFDLLKLAGDVESNPGPSRGHMTEYKPTVRLATRDDVPRAVRTLAAAFADYPATRHTVDPDRHIERVTELQELFLTRVGLDIGKVWVADDGAAVAVWTTPESVEAGAVFAEIGPRMAELSGSRLAAQQQMEGLLAPHRPKEPAWFLATVGVSPDHQGKGLGSAVVLPGVEAAERAGVPAFLETSAPRNLPFYERLGFTVTADVEVPEGPRTWCMTRKPGA

SEQ ID NO: 44945 - protein, 866 aa, synthetic construct
MALPVTALLLPLALLLHAARPLEEDLKNVFPPEVAVFEPSEAEISHTQKATLVCLATGFYPDHVELSWWVNGKEVHSGVSTDPQPLKEQPALNDSRYCLSSRLRVSATFWQNPRNHFRCQVQFYGLSENDEWTQDRAKPVTQIVSAEAWGRADCGFTSESYQQGVLSATNLSVIGFRILLLKVAGFNLLMTLRLWSSRAKRSGSGATNFSLLKQAGDVEENPGPTSMALPVTALLLPLALLLHAARPQIVLTQSPAIMSVSPGEKVTMTCSASSSVNYMHWFQQKPGTSPKLWVYSTSNLASGVPARFSGSGSGTSYSLTISSMEAEDAATYYCQQRSIYPPWTFGGGTKLEIKGGGGSGGGGSGGGGSEVQLQQSGPELVKPGASVKISCKASGYSFTGYTMNWVKQSHGKNLEWIGLINPYNGGTSYNQKFKAKATLTVDKSSSTAYMQLKSLTSEDSAVYYCARDYGYVLDYWGQGTSVTVSSTRIQNPDPAVYQLRDSKSSDKSVCLFTDFDSQTNVSQSKDSDVYITDKTVLDMRSMDFKSNSAVAWSNKSDFACANAFNNSIIPEDTFFPSPESSCDVKLVEKSFETDTNLNFQILYEILLGKATLYAVLVSALVLMAMVKRKDSRGRAKRSGSGVKQTLNFDLLKLAGDVESNPGPSRGHMTEYKPTVRLATRDDVPRAVRTLAAAFADYPATRHTVDPDRHIERVTELQELFLTRVGLDIGKVWVADDGAAVAVWTTPESVEAGAVFAEIGPRMAELSGSRLAAQQQMEGLLAPHRPKEPAWFLATVGVSPDHQGKGLGSAVVLPGVEAAERAGVPAFLETSAPRNLPFYERLGFTVTADVEVPEGPRTWCMTRKPGA

SEQ ID NO: 44946 - protein, 866 aa, synthetic construct
MALPVTALLLPLALLLHAARPLEIQNPDPAVYQLRDSKSSDKSVCLFTDFDSQTNVSQSKDSDVYITDKTVLDMRSMDFKSNSAVAWSNKSDFACANAFNNSIIPEDTFFPSPESSCDVKLVEKSFETDTNLNFQILYEILLGKATLYAVLVSALVLMAMVKRKDSRGRAKRSGSGATNFSLLKQAGDVEENPGPTSMALPVTALLLPLALLLHAARPQIVLTQSPAIMSVSPGEKVTMTCSASSSVNYMHWFQQKPGTSPKLWVYSTSNLASGVPARFSGSGSGTSYSLTISSMEAEDAATYYCQQRSIYPPWTFGGGTKLEIKGGGGSGGGGSGGGGSEVQLQQSGPELVKPGASVKISCKASGYSFTGYTMNWVKQSHGKNLEWIGLINPYNGGTSYNQKFKAKATLTVDKSSSTAYMQLKSLTSEDSAVYYCARDYGYVLDYWGQGTSVTVSSTREDLKNVFPPEVAVFEPSEAEISHTQKATLVCLATGFYPDHVELSWWVNGKEVHSGVSTDPQPLKEQPALNDSRYCLSSRLRVSATFWQNPRNHFRCQVQFYGLSENDEWTQDRAKPVTQIVSAEAWGRADCGFTSESYQQGVLSATNLSVIGFRILLLKVAGFNLLMTLRLWSSRAKRSGSGVKQTLNFDLLKLAGDVESNPGPSRGHMTEYKPTVRLATRDDVPRAVRTLAAAFADYPATRHTVDPDRHIERVTELQELFLTRVGLDIGKVWVADDGAAVAVWTTPESVEAGAVFAEIGPRMAELSGSRLAAQQQMEGLLAPHRPKEPAWFLATVGVSPDHQGKGLGSAVVLPGVEAAERAGVPAFLETSAPRNLPFYERLGFTVTADVEVPEGPRTWCMTRKPGA

SEQ ID NO: 44947 - protein, 866 aa, synthetic construct
MALPVTALLLPLALLLHAARPLEEDLKNVFPPEVAVFEPSEAEISHTQKATLVCLATGFYPDHVELSWWVNGKEVHSGVCTDPQPLKEQPALNDSRYCLSSRLRVSATFWQNPRNHFRCQVQFYGLSENDEWTQDRAKPVTQIVSAEAWGRADCDVKLVEKSFETDTNLNFQNLSVIGFRILLLKVAGFNLLMTLRLWSSRAKRSGSGATNFSLLKQAGDVEENPGPTSMALPVTALLLPLALLLHAARPQIVLTQSPAIMSVSPGEKVTMTCSASSSVNYMHWFQQKPGTSPKLWVYSTSNLASGVPARFSGSGSGTSYSLTISSMEAEDAATYYCQQRSIYPPWTFGGGTKLEIKGGGGSGGGGSGGGGSEVQLQQSGPELVKPGASVKISCKASGYSFTGYTMNWVKQSHGKNLEWIGLINPYNGGTSYNQKFKAKATLTVDKSSSTAYMQLKSLTSEDSAVYYCARDYGYVLDYWGQGTSVTVSSTRIQNPDPAVYQLRDSKSSDKSVCLFTDFDSQTNVSQSKDSDVYITDKCVLDMRSMDFKSNSAVAWSNKSDFACANAFNNSIIPEDTFFPSPESSCGFTSESYQQGVLSATILYEILLGKATLYAVLVSALVLMAMVKRKDSRGRAKRSGSGVKQTLNFDLLKLAGDVESNPGPSRGHMTEYKPTVRLATRDDVPRAVRTLAAAFADYPATRHTVDPDRHIERVTELQELFLTRVGLDIGKVWVADDGAAVAVWTTPESVEAGAVFAEIGPRMAELSGSRLAAQQQMEGLLAPHRPKEPAWFLATVGVSPDHQGKGLGSAVVLPGVEAAERAGVPAFLETSAPRNLPFYERLGFTVTADVEVPEGPRTWCMTRKPGA

SEQ ID NO: 44948 - protein, 866 aa, synthetic construct
MALPVTALLLPLALLLHAARPLEEDLKNVFPPEVAVFEPSEAEISHTQKATLVCLATGFYPDHVELSWWVNGKEVHSGVSTDPQPLKEQPALNDSRYCLSSRLRVSATFWQNPRNHFRCQVQFYGLSENDEWTQDRAKPVTQIVSAEAWGRADCDVKLVEKSFETDTNLNFQNLSVIGFRILLLKVAGFNLLMTLRLWSSRAKRSGSGATNFSLLKQAGDVEENPGPTSMALPVTALLLPLALLLHAARPQIVLTQSPAIMSVSPGEKVTMTCSASSSVNYMHWFQQKPGTSPKLWVYSTSNLASGVPARFSGSGSGTSYSLTISSMEAEDAATYYCQQRSIYPPWTFGGGTKLEIKGGGGSGGGGSGGGGSEVQLQQSGPELVKPGASVKISCKASGYSFTGYTMNWVKQSHGKNLEWIGLINPYNGGTSYNQKFKAKATLTVDKSSSTAYMQLKSLTSEDSAVYYCARDYGYVLDYWGQGTSVTVSSTRIQNPDPAVYQLRDSKSSDKSVCLFTDFDSQTNVSQSKDSDVYITDKTVLDMRSMDFKSNSAVAWSNKSDFACANAFNNSIIPEDTFFPSPESSCGFTSESYQQGVLSATILYEILLGKATLYAVLVSALVLMAMVKRKDSRGRAKRSGSGVKQTLNFDLLKLAGDVESNPGPSRGHMTEYKPTVRLATRDDVPRAVRTLAAAFADYPATRHTVDPDRHIERVTELQELFLTRVGLDIGKVWVADDGAAVAVWTTPESVEAGAVFAEIGPRMAELSGSRLAAQQQMEGLLAPHRPKEPAWFLATVGVSPDHQGKGLGSAVVLPGVEAAERAGVPAFLETSAPRNLPFYERLGFTVTADVEVPEGPRTWCMTRKPGA

SEQ ID NO: 44949 - protein, 969 aa, synthetic construct
MALPVTALLLPLALLLHAARPLEEEDLKNVFPPEVAVFEPSEAEISHTQKATLVCLATGFYPDHVELSWWVNGKEVHSGVSTDPQPLKEQPALNDSRYCLSSRLRVSATFWQNPRNHFRCQVQFYGLSENDEWTQDRAKPVTQIVSAEAWGRADDVIKIHWQEKKSNTILGSQEGNTMKTNDTYMKFSWLTVPEKSLDKEHRCIVRHENNKNGVDQEIIFPPIKTDVITMDPKDNCSKDANDTLLLQLTNTSAYYMYLLLLLKSVVYFAIITCCLLRRTAFCCNGEKSRAKRSGSGATNFSLLKQAGDVEENPGPTSMALPVTALLLPLALLLHAARPQIVLTQSPAIMSVSPGEKVTMTCSASSSVNYMHWFQQKPGTSPKLWVYSTSNLASGVPARFSGSGSGTSYSLTISSMEAEDAATYYCQQRSIYPPWTFGGGTKLEIKGGGGSGGGGSGGGGSEVQLQQSGPELVKPGASVKISCKASGYSFTGYTMNWVKQSHGKNLEWIGLINPYNGGTSYNQKFKAKATLTVDKSSSTAYMQLKSLTSEDSAVYYCARDYGYVLDYWGQGTSVTVSSTRIQNPDPAVYQLRDSKSSDKSVCLFTDFDSQTNVSQSKDSDVYITDKTVLDMRSMDFKSNSAVAWSNKSDFACANAFNNSIIPEDTFFPSPESSDSTDHVKPKETENTKQPSKSCHKPKAIVHTEKVNMMSLTVLGLRMLFAKTVAVNFLLTAKLFFLRAKRSGSGVKQTLNFDLLKLAGDVESNPGPSRGHMTEYKPTVRLATRDDVPRAVRTLAAAFADYPATRHTVDPDRHIERVTELQELFLTRVGLDIGKVWVADDGAAVAVWTTPESVEAGAVFAEIGPRMAELSGSRLAAQQQMEGLLAPHRPKEPAWFLATVGVSPDHQGKGLGSAVVLPGVEAAERAGVPAFLETSAPRNLPFYERLGFTVTADVEVPEGPRTWCMTRKPGA

SEQ ID NO: 44950 - protein, 866 aa, synthetic construct
MALPVTALLLPLALLLHAARPLEEDLKNVFPPEVAVFEPSEAEISHTQKATLVCLATGFYPDHVELSWWVNGKEVHSGVCTDPQPLKEQPALNDSRYCLSSRLRVSATFWQNPRNHFRCQVQFYGLSENDEWTQDRAKPVTQIVSAEAWGRADCGFTSESYQQGVLSATNLSVIGFRILLLKVAGFNLLMTLRLWSSRAKRSGSGATNFSLLKQAGDVEENPGPTSMALPVTALLLPLALLLHAARPQIVLTQSPAIMSVSPGEKVTMTCSASSSVNYMHWFQQKPGTSPKLWVYSTSNLASGVPARFSGSGSGTSYSLTISSMEAEDAATYYCQQRSIYPPWTFGGGTKLEIKGGGGSGGGGSGGGGSEVQLQQSGPELVKPGASVKISCKASGYSFTGYTMNWVKQSHGKNLEWIGLINPYNGGTSYNQKFKAKATLTVDKSSSTAYMQLKSLTSEDSAVYYCARDYGYVLDYWGQGTSVTVSSTRIQNPDPAVYQLRDSKSSDKSVCLFTDFDSQTNVSQSKDSDVYITDKCVLDMRSMDFKSNSAVAWSNKSDFACANAFNNSIIPEDTFFPSPESSCDVKLVEKSFETDTNLNFQILYEILLGKATLYAVLVSALVLMAMVKRKDSRGRAKRSGSGVKQTLNFDLLKLAGDVESNPGPSRGHMTEYKPTVRLATRDDVPRAVRTLAAAFADYPATRHTVDPDRHIERVTELQELFLTRVGLDIGKVWVADDGAAVAVWTTPESVEAGAVFAEIGPRMAELSGSRLAAQQQMEGLLAPHRPKEPAWFLATVGVSPDHQGKGLGSAVVLPGVEAAERAGVPAFLETSAPRNLPFYERLGFTVTADVEVPEGPRTWCMTRKPGA

SEQ ID NO: 44951 - protein, 895 aa, synthetic construct
MALPVTALLLPLALLLHAARPLEEEDLKNVFPPEVAVFEPSEAEISHTQKATLVCLATGFYPDHVELSWWVNGKEVHSGVCTDPQPLKEQPALNDSRYCLSSRLRVSATFWQNPRNHFRCQVQFYGLSENDEWTQDRAKPVTQIVSAEAWGRADCGFTSESYQQGVLSATNLSVIGFRILLLKVAGFNLLMTLRLWSSRAKRSGSGATNFSLLKQAGDVEENPGPTSMALPVTALLLPLALLLHAARPQIVLTQSPAIMSVSPGEKVTMTCSASSSVNYMHWFQQKPGTSPKLWVYSTSNLASGVPARFSGSGSGTSYSLTISSMEAEDAATYYCQQRSIYPPWTFGGGTKLEIKGGGGSGGGGSGGGGSEVQLQQSGPELVKPGASVKISCKASGYSFTGYTMNWVKQSHGKNLEWIGLINPYNGGTSYNQKFKAKATLTVDKSSSTAYMQLKSLTSEDSAVYYCARDYGYVLDYWGQGTSVTVSSTRGQPKANPTVTLFPPSSEELQANKATLVCLISDFYPGAVTVAWKADGSPVKAGVETTKPSKQSNNKYAASSYLSLTPEQWKSHRSYSCQVTHEGSTVEKTVAPTECSPIKTDVITMDPKDNCSKDANDTLLLQLTNTSAYYMYLLLLLKSVVYFAIITCCLLRRTAFCCNGEKSRAKRSGSGVKQTLNFDLLKLAGDVESNPGPSRGHMTEYKPTVRLATRDDVPRAVRTLAAAFADYPATRHTVDPDRHIERVTELQELFLTRVGLDIGKVWVADDGAAVAVWTTPESVEAGAVFAEIGPRMAELSGSRLAAQQQMEGLLAPHRPKEPAWFLATVGVSPDHQGKGLGSAVVLPGVEAAERAGVPAFLETSAPRNLPFYERLGFTVTADVEVPEGPRTWCMTRKPGA

SEQ ID NO: 44952 - protein, 895 aa, synthetic construct
MALPVTALLLPLALLLHAARPLEGQPKANPTVTLFPPSSEELQANKATLVCLISDFYPGAVTVAWKADGSPVKAGVETTKPSKQSNNKYAASSYLSLTPEQWKSHRSYSCQVTHEGSTVEKTVAPTECSPIKTDVITMDPKDNCSKDANDTLLLQLTNTSAYYMYLLLLLKSVVYFAIITCCLLRRTAFCCNGEKSRAKRSGSGATNFSLLKQAGDVEENPGPTSMALPVTALLLPLALLLHAARPQIVLTQSPAIMSVSPGEKVTMTCSASSSVNYMHWFQQKPGTSPKLWVYSTSNLASGVPARFSGSGSGTSYSLTISSMEAEDAATYYCQQRSIYPPWTFGGGTKLEIKGGGGSGGGGSGGGGSEVQLQQSGPELVKPGASVKISCKASGYSFTGYTMNWVKQSHGKNLEWIGLINPYNGGTSYNQKFKAKATLTVDKSSSTAYMQLKSLTSEDSAVYYCARDYGYVLDYWGQGTSVTVSSTREEDLKNVFPPEVAVFEPSEAEISHTQKATLVCLATGFYPDHVELSWWVNGKEVHSGVCTDPQPLKEQPALNDSRYCLSSRLRVSATFWQNPRNHFRCQVQFYGLSENDEWTQDRAKPVTQIVSAEAWGRADCGFTSESYQQGVLSATNLSVIGFRILLLKVAGFNLLMTLRLWSSRAKRSGSGVKQTLNFDLLKLAGDVESNPGPSRGHMTEYKPTVRLATRDDVPRAVRTLAAAFADYPATRHTVDPDRHIERVTELQELFLTRVGLDIGKVWVADDGAAVAVWTTPESVEAGAVFAEIGPRMAELSGSRLAAQQQMEGLLAPHRPKEPAWFLATVGVSPDHQGKGLGSAVVLPGVEAAERAGVPAFLETSAPRNLPFYERLGFTVTADVEVPEGPRTWCMTRKPGA

SEQ ID NO: 44953 - protein, 892 aa, synthetic construct
MALPVTALLLPLALLLHAARPLEEASTKGPSVFPLAPSSKSTSGGTAALGCLVKDYFPEPVTVSWNSGALTSGVHTFPAVLQSSGLYSLSSVVTVPSSSLGTQTYICNVNHKPSNTKVDKRVEPKSCPIKTDVITMDPKDNCSKDANDTLLLQLTNTSAYYMYLLLLLKSVVYFAIITCCLLRRTAFCCNGEKSRAKRSGSGATNFSLLKQAGDVEENPGPTSMALPVTALLLPLALLLHAARPQIVLTQSPAIMSVSPGEKVTMTCSASSSVNYMHWFQQKPGTSPKLWVYSTSNLASGVPARFSGSGSGTSYSLTISSMEAEDAATYYCQQRSIYPPWTFGGGTKLEIKGGGGSGGGGSGGGGSEVQLQQSGPELVKPGASVKISCKASGYSFTGYTMNWVKQSHGKNLEWIGLINPYNGGTSYNQKFKAKATLTVDKSSSTAYMQLKSLTSEDSAVYYCARDYGYVLDYWGQGTSVTVSSTRGQPKANPTVTLFPPSSEELQANKATLVCLISDFYPGAVTVAWKADGSPVKAGVETTKPSKQSNNKYAASSYLSLTPEQWKSHRSYSCQVTHEGSTVEKTVAPTECSEVKTDSTDHVKPKETENTKQPSKSCHKPKAIVHTEKVNMMSLTVLGLRMLFAKTVAVNFLLTAKLFFLRAKRSGSGVKQTLNFDLLKLAGDVESNPGPSRGHMTEYKPTVRLATRDDVPRAVRTLAAAFADYPATRHTVDPDRHIERVTELQELFLTRVGLDIGKVWVADDGAAVAVWTTPESVEAGAVFAEIGPRMAELSGSRLAAQQQMEGLLAPHRPKEPAWFLATVGVSPDHQGKGLGSAVVLPGVEAAERAGVPAFLETSAPRNLPFYERLGFTVTADVEVPEGPRTWCMTRKPGA

SEQ ID NO: 44954 - protein, 870 aa, synthetic construct
MALPVTALLLPLALLLHAARPLEEASTKGPSVFPLAPSSKSTSGGTAALGCLVKDYFPEPVTVSWNSGALTSGVHTFPAVLQSSGLYSLSSVVTVPSSSLGTQTYICNVNHKPSNTKVDKRVEPKSCGRADCGFTSESYQQGVLSATILYEILLGKATLYAVLVSALVLMAMVKRKDSRGRAKRSGSGATNFSLLKQAGDVEENPGPTSMALPVTALLLPLALLLHAARPQIVLTQSPAIMSVSPGEKVTMTCSASSSVNYMHWFQQKPGTSPKLWVYSTSNLASGVPARFSGSGSGTSYSLTISSMEAEDAATYYCQQRSIYPPWTFGGGTKLEIKGGGGSGGGGSGGGGSEVQLQQSGPELVKPGASVKISCKASGYSFTGYTMNWVKQSHGKNLEWIGLINPYNGGTSYNQKFKAKATLTVDKSSSTAYMQLKSLTSEDSAVYYCARDYGYVLDYWGQGTSVTVSSTRGQPKANPTVTLFPPSSEELQANKATLVCLISDFYPGAVTVAWKADGSPVKAGVETTKPSKQSNNKYAASSYLSLTPEQWKSHRSYSCQVTHEGSTVEKTVAPTECSIPEDTFFPSPESSCDVKLVEKSFETDTNLNFQNLSVIGFRILLLKVAGFNLLMTLRLWSSRAKRSGSGVKQTLNFDLLKLAGDVESNPGPSRGHMTEYKPTVRLATRDDVPRAVRTLAAAFADYPATRHTVDPDRHIERVTELQELFLTRVGLDIGKVWVADDGAAVAVWTTPESVEAGAVFAEIGPRMAELSGSRLAAQQQMEGLLAPHRPKEPAWFLATVGVSPDHQGKGLGSAVVLPGVEAAERAGVPAFLETSAPRNLPFYERLGFTVTADVEVPEGPRTWCMTRKPGA

SEQ ID NO: 44955 - protein, 870 aa, synthetic construct
MALPVTALLLPLALLLHAARPLEEASTKGPSVFPLAPSSKSTSGGTAALGCLVKDYFPEPVTVSWNSGALTSGVHTFPAVLQSSGLYSLSSVVTVPSSSLGTQTYICNVNHKPSNTKVDKRVEPKSCIPEDTFFPSPESSCDVKLVEKSFETDTNLNFQNLSVIGFRILLLKVAGFNLLMTLRLWSSRAKRSGSGATNFSLLKQAGDVEENPGPTSMALPVTALLLPLALLLHAARPQIVLTQSPAIMSVSPGEKVTMTCSASSSVNYMHWFQQKPGTSPKLWVYSTSNLASGVPARFSGSGSGTSYSLTISSMEAEDAATYYCQQRSIYPPWTFGGGTKLEIKGGGGSGGGGSGGGGSEVQLQQSGPELVKPGASVKISCKASGYSFTGYTMNWVKQSHGKNLEWIGLINPYNGGTSYNQKFKAKATLTVDKSSSTAYMQLKSLTSEDSAVYYCARDYGYVLDYWGQGTSVTVSSTRGQPKANPTVTLFPPSSEELQANKATLVCLISDFYPGAVTVAWKADGSPVKAGVETTKPSKQSNNKYAASSYLSLTPEQWKSHRSYSCQVTHEGSTVEKTVAPTECSGRADCGFTSESYQQGVLSATILYEILLGKATLYAVLVSALVLMAMVKRKDSRGRAKRSGSGVKQTLNFDLLKLAGDVESNPGPSRGHMTEYKPTVRLATRDDVPRAVRTLAAAFADYPATRHTVDPDRHIERVTELQELFLTRVGLDIGKVWVADDGAAVAVWTTPESVEAGAVFAEIGPRMAELSGSRLAAQQQMEGLLAPHRPKEPAWFLATVGVSPDHQGKGLGSAVVLPGVEAAERAGVPAFLETSAPRNLPFYERLGFTVTADVEVPEGPRTWCMTRKPGA

SEQ ID NO: 44956 - protein, 617 aa, synthetic construct
MALPVTALLLPLALLLHAARPQIVLTQSPAIMSVSPGEKVTMTCSASSSVNYMHWFQQKPGTSPKLWVYSTSNLASGVPARFSGSGSGTSYSLTISSMEAEDAATYYCQQRSIYPPWTFGGGTKLEIKLEDLKNVFPPEVAVFEPSEAEISHTQKATLVCLATGFYPDHVELSWWVNGKEVHSGVCTDPQPLKEQPALNDSRYCLSSRLRVSATFWQNPRNHFRCQVQFYGLSENDEWTQDRAKPVTQIVSAEAWGRADSGFTSESYQQGVLSATILYEILLGKATLYAVLVSALVLMAMVKRKDSRGRAKRSGSGATNFSLLKQAGDVEENPGPTSMDWIWRILFLVGAATGAHSFEEVQLQQSGPELVKPGASVKISCKASGYSFTGYTMNWVKQSHGKNLEWIGLINPYNGGTSYNQKFKAKATLTVDKSSSTAYMQLKSLTSEDSAVYYCARDYGYVLDYWGQGTSVTVSSTRIQNPDPAVYQLRDSKSSDKSVCLFTDFDSQTNVSQSKDSDVYITDKCVLDMRSMDFKSNSAVAWSNKSDFACANAFNNSIIPEDTFFPSPESSSDVKLVEKSFETDTNLNFQNLSVIGFRILLLKVAGFNLLMTLRLWSS

SEQ ID NO: 44957 - protein, 896 aa, synthetic construct
MALPVTALLLPLALLLHAARPEVQLLESGGGLVQPGGSLRLSCAASGRTFSMGWYRQAPGKGLEFVSAITYSGGSPYYADSVKGRFTISRDNSKNTVYLQMNSLRAEDTAVYYCAANPTYGSDWNAENWGQGTLVTVSSGTGGGGSGGGGSGGGGSEFQIVLTQSPAIMSVSPGEKVTMTCSASSSVNYMHWFQQKPGTSPKLWVYSTSNLASGVPARFSGSGSGTSYSLTISSMEAEDAATYYCQQRSIYPPWTFGGGTKLEIKLEIQNPDPAVYQLRDSKSSDKSVCLFTDFDSQTNVSQSKDSDVYITDKCVLDMRSMDFKSNSAVAWSNKSDFACANAFNNSIIPEDTFFPSSDVPCDVKLVEKSFETDTNLNFQNLSVIGFRILLLKVAGFNLLMTLRLWSSRAKRSGSGVKQTLNFDLLKLAGDVESNPGPTSTMDWIWRILFLVGAATGTHSGPEVQLVESGGGLVQPGGSLRLSCAASGRTFTMGWYRQAPGKEREFVAAISLSPTLAYYADSVKGRFTISRDNSKNTVVLQMNSLRAEDTALYYCAADRKSVMSIRPDYWGQGTLVTVSSGSGGGGSGGGGSGGGGSFEEVQLQQSGPELVKPGASVKISCKASGYSFTGYTMNWVKQSHGKNLEWIGLINPYNGGTSYNQKFKAKATLTVDKSSSTAYMQLKSLTSEDSAVYYCARDYGYVLDYWGQGTSVTVSSTREDLKNVFPPEVAVFEPSKAEIAHTQKATLVCLATGFYPDHVELSWWVNGKEVHSGVCTDPQPLKEQPALNDSRYCLSSRLRVSATFWQNPRNHFRCQVQFYGLSENDEWTQDRAKPVTQIVSAEAWGRADCGITSASYHQGVLSATILYEILLGKATLYAVLVSALVLMAMVKRKDSRG

SEQ ID NO: 44958 - protein, 896 aa, synthetic construct
MALPVTALLLPLALLLHAARPEVQLVESGGGLVQAGGSLRLSCAASGRTFSMGWFRQAPGKEREFVAAITYSGGSPYYADSVKGRFTISRDNAKNTVYLQMNSLKPEDTAVYYCAANPTYGSDWNAENWGQGTQVTVSSGTGGGGSGGGGSGGGGSEFQIVLTQSPAIMSVSPGEKVTMTCSASSSVNYMHWFQQKPGTSPKLWVYSTSNLASGVPARFSGSGSGTSYSLTISSMEAEDAATYYCQQRSIYPPWTFGGGTKLEIKLEIQNPDPAVYQLRDSKSSDKSVCLFTDFDSQTNVSQSKDSDVYITDKCVLDMRSMDFKSNSAVAWSNKSDFACANAFNNSIIPEDTFFPSSDVPCDVKLVEKSFETDTNLNFQNLSVIGFRILLLKVAGFNLLMTLRLWSSRAKRSGSGVKQTLNFDLLKLAGDVESNPGPTSTMDWIWRILFLVGAATGAHSGPEVQLVESGGGLVQPGGSLRLSCAASGRTFTMGWYRQAPGKEREFVAAISLSPTLAYYADSVKGRFTISRDNSKNTVVLQMNSLRAEDTALYYCAADRKSVMSIRPDYWGQGTLVTVSSGSGGGGSGGGGSGGGGSFEEVQLQQSGPELVKPGASVKISCKASGYSFTGYTMNWVKQSHGKNLEWIGLINPYNGGTSYNQKFKAKATLTVDKSSSTAYMQLKSLTSEDSAVYYCARDYGYVLDYWGQGTSVTVSSTREDLKNVFPPEVAVFEPSKAEIAHTQKATLVCLATGFYPDHVELSWWVNGKEVHSGVCTDPQPLKEQPALNDSRYCLSSRLRVSATFWQNPRNHFRCQVQFYGLSENDEWTQDRAKPVTQIVSAEAWGRADCGITSASYHQGVLSATILYEILLGKATLYAVLVSALVLMAMVKRKDSRG

SEQ ID NO: 44959 - protein, 893 aa, synthetic construct
MALPVTALLLPLALLLHAARPEVQLVESGGGLVQAGGSLRLSCAASGRTFSMGWFRQAPGKEREFVAAITYSGGSPYYADSVKGRFTISRDNAKNTVYLQMNSLKPEDTAVYYCAANPTYGSDWNAENWGQGTQVTVSSGTGGGGSGGGGSGGGGSEFQIVLTQSPAIMSVSPGEKVTMTCSASSSVNYMHWFQQKPGTSPKLWVYSTSNLASGVPARFSGSGSGTSYSLTISSMEAEDAATYYCQQRSIYPPWTFGGGTKLEIKLEDLKNVFPPEVAVFEPSEAEISHTQKATLVCLATGFYPDHVELSWWVNGKEVHSGVCTDPQPLKEQPALNDSRYCLSSRLRVSATFWQNPRNHFRCQVQFYGLSENDEWTQDRAKPVTQIVSAEAWGRADCGFTSESYQQGVLSATILYEILLGKATLYAVLVSALVLMAMVKRKDSRGRAKRSGSGATNFSLLKQAGDVEENPGPTSATMDWIWRILFLVGAATGAHSGPEVQLVESGGGLVQAGGSLRLSCAASGRTFTMGWFRQAPGKEREFVAAISLSPTLAYYADSVKGRFTISRDNAKNTVVLQMNSLKPEDTALYYCAADRKSVMSIRPDYWGQGTQVTVSSGSGGGGSGGGGSGGGGSFEEVQLQQSGPELVKPGASVKISCKASGYSFTGYTMNWVKQSHGKNLEWIGLINPYNGGTSYNQKFKAKATLTVDKSSSTAYMQLKSLTSEDSAVYYCARDYGYVLDYWGQGTSVTVSSTRIQNPDPAVYQLRDSKSSDKSVCLFTDFDSQTNVSQSKDSDVYITDKCVLDMRSMDFKSNSAVAWSNKSDFACANAFNNSIIPEDTFFPSPESSCDVKLVEKSFETDTNLNFQNLSVIGFRILLLKVAGFNLLMTLRLWSS

SEQ ID NO: 44960 - protein, 764 aa, synthetic construct
MALPVTALLLPLALLLHAARPEVQLVESGGGLVQPGGSLRLSCEASGFASDDYIIGWFRQAPGKEREGVSCISSKYANTVYTDSVKGRFRLSRGTAKNTVYLQMSALKPEDTAVYYCAMDSRRVTCPEISTMHRNFDSWGQGTLVTVSSGTGGGGSGGGGSGGGGSEFQIVLTQSPAIMSVSPGEKVTMTCSASSSVNYMHWFQQKPGTSPKLWVYSTSNLASGVPARFSGSGSGTSYSLTISSMEAEDAATYYCQQRSIYPPWTFGGGTKLEIKLEDLKNVFPPEVAVFEPSKAEIAHTQKATLVCLATGFYPDHVELSWWVNGKEVHSGVCTDPQPLKEQPALNDSRYCLSSRLRVSATFWQNPRNHFRCQVQFYGLSENDEWTQDRAKPVTQIVSAEAWGRADCGITSASYHQGVLSATILYEILLGKATLYAVLVSALVLMAMVKRKDSRGRAKRSGSGATNFSLLKQAGDVEENPGPTSMDWIWRILFLVGAATGAHSFEEVQLQQSGPELVKPGASVKISCKASGYSFTGYTMNWVKQSHGKNLEWIGLINPYNGGTSYNQKFKAKATLTVDKSSSTAYMQLKSLTSEDSAVYYCARDYGYVLDYWGQGTSVTVSSTRIQNPDPAVYQLRDSKSSDKSVCLFTDFDSQTNVSQSKDSDVYITDKCVLDMRSMDFKSNSAVAWSNKSDFACANAFNNSIIPEDTFFPSSDVPCDVKLVEKSFETDTNLNFQNLSVIGFRILLLKVAGFNLLMTLRLWSS

SEQ ID NO: 44961 - protein, 755 aa, synthetic construct
MALPVTALLLPLALLLHAARPQIVLTQSPAIMSVSPGEKVTMTCSASSSVNYMHWFQQKPGTSPKLWVYSTSNLASGVPARFSGSGSGTSYSLTISSMEAEDAATYYCQQRSIYPPWTFGGGTKLEIKLEDLKNVFPPEVAVFEPSEAEISHTQKATLVCLATGFYPDHVELSWWVNGKEVHSGVCTDPQPLKEQPALNDSRYCLSSRLRVSATFWQNPRNHFRCQVQFYGLSENDEWTQDRAKPVTQIVSAEAWGRADCGFTSESYQQGVLSATILYEILLGKATLYAVLVSALVLMAMVKRKDSRGRAKRSGSGATNFSLLKQAGDVEENPGPTSTMDWIWRILFLVGAATGAHSGPEVQLVESGGGLVQPGGSLRLSCAASGRTFTMGWYRQAPGKEREFVAAISLSPTLAYYADSVKGRFTISRDNSKNTVVLQMNSLRAEDTALYYCAADRKSVMSIRPDYWGQGTLVTVSSGSGGGGSGGGGSGGGGSFEEVQLQQSGPELVKPGASVKISCKASGYSFTGYTMNWVKQSHGKNLEWIGLINPYNGGTSYNQKFKAKATLTVDKSSSTAYMQLKSLTSEDSAVYYCARDYGYVLDYWGQGTSVTVSSTRIQNPDPAVYQLRDSKSSDKSVCLFTDFDSQTNVSQSKDSDVYITDKCVLDMRSMDFKSNSAVAWSNKSDFACANAFNNSIIPEDTFFPSPESSCDVKLVEKSFETDTNLNFQNLSVIGFRILLLKVAGFNLLMTLRLWSS

SEQ ID NO: 44962 - protein, 762 aa, synthetic construct
MALPVTALLLPLALLLHAARPQIVLTQSPAIMSVSPGEKVTMTCSASSSVNYMHWFQQKPGTSPKLWVYSTSNLASGVPARFSGSGSGTSYSLTISSMEAEDAATYYCQQRSIYPPWTFGGGTKLEIKLEDLKNVFPPEVAVFEPSEAEISHTQKATLVCLATGFYPDHVELSWWVNGKEVHSGVCTDPQPLKEQPALNDSRYCLSSRLRVSATFWQNPRNHFRCQVQFYGLSENDEWTQDRAKPVTQIVSAEAWGRADCGFTSESYQQGVLSATILYEILLGKATLYAVLVSALVLMAMVKRKDSRGRAKRSGSGATNFSLLKQAGDVEENPGPTSTMDWIWRILFLVGAATGAHSGPQVQLVESGGGLVQPGGSLRLSCAASGNINSRNCMGWFRQAPGKGREGVAAIGQVTGRTYYVDSVKGRFTISLDNSKNTLYLQMNSLRAEDTAVYYCAAAPGCLLSALRSADYRNWGQGTLVTVSSGSGGGGSGGGGSGGGGSFEEVQLQQSGPELVKPGASVKISCKASGYSFTGYTMNWVKQSHGKNLEWIGLINPYNGGTSYNQKFKAKATLTVDKSSSTAYMQLKSLTSEDSAVYYCARDYGYVLDYWGQGTSVTVSSTRIQNPDPAVYQLRDSKSSDKSVCLFTDFDSQTNVSQSKDSDVYITDKCVLDMRSMDFKSNSAVAWSNKSDFACANAFNNSIIPEDTFFPSPESSCDVKLVEKSFETDTNLNFQNLSVIGFRILLLKVAGFNLLMTLRLWSS

SEQ ID NO: 44963 - protein, 762 aa, synthetic construct
MALPVTALLLPLALLLHAARPQIVLTQSPAIMSVSPGEKVTMTCSASSSVNYMHWFQQKPGTSPKLWVYSTSNLASGVPARFSGSGSGTSYSLTISSMEAEDAATYYCQQRSIYPPWTFGGGTKLEIKLEDLKNVFPPEVAVFEPSEAEISHTQKATLVCLATGFYPDHVELSWWVNGKEVHSGVCTDPQPLKEQPALNDSRYCLSSRLRVSATFWQNPRNHFRCQVQFYGLSENDEWTQDRAKPVTQIVSAEAWGRADCGFTSESYQQGVLSATILYEILLGKATLYAVLVSALVLMAMVKRKDSRGRAKRSGSGATNFSLLKQAGDVEENPGPTSTMDWIWRILFLVGAATGAHSGPQVQLVESGGGSVQAGGSLRLSCGASGNISSRNCMGWFRQAPGKEREGVAAIGQVTGRSYYVDSVKGRFTISLDNAKNTLYLQMNTLKPEDTAMYYCAAAPGCLLSALRSADYRNWGQGTQVTVSSGSGGGGSGGGGSGGGGSFEEVQLQQSGPELVKPGASVKISCKASGYSFTGYTMNWVKQSHGKNLEWIGLINPYNGGTSYNQKFKAKATLTVDKSSSTAYMQLKSLTSEDSAVYYCARDYGYVLDYWGQGTSVTVSSTRIQNPDPAVYQLRDSKSSDKSVCLFTDFDSQTNVSQSKDSDVYITDKCVLDMRSMDFKSNSAVAWSNKSDFACANAFNNSIIPEDTFFPSPESSCDVKLVEKSFETDTNLNFQNLSVIGFRILLLKVAGFNLLMTLRLWSS

SEQ ID NO: 44964 - protein, 903 aa, synthetic construct
MALPVTALLLPLALLLHAARPEVQLVESGGGLVQAGGSLRLSCAASGRTFSMGWFRQAPGKEREFVAAITYSGGSPYYADSVKGRFTISRDNAKNTVYLQMNSLKPEDTAVYYCAANPTYGSDWNAENWGQGTQVTVSSGTGGGGSGGGGSGGGGSEFQIVLTQSPAIMSVSPGEKVTMTCSASSSVNYMHWFQQKPGTSPKLWVYSTSNLASGVPARFSGSGSGTSYSLTISSMEAEDAATYYCQQRSIYPPWTFGGGTKLEIKLEIQNPDPAVYQLRDSKSSDKSVCLFTDFDSQTNVSQSKDSDVYITDKCVLDMRSMDFKSNSAVAWSNKSDFACANAFNNSIIPEDTFFPSSDVPCDVKLVEKSFETDTNLNFQNLSVIGFRILLLKVAGFNLLMTLRLWSSRAKRSGSGVKQTLNFDLLKLAGDVESNPGPTSTMDWIWRILFLVGAATGAHSGPQVQLVESGGGSVQAGGSLRLSCGASGNISSRNCMGWFRQAPGKEREGVAAIGQVTGRSYYVDSVKGRFTISLDNAKNTLYLQMNTLKPEDTAMYYCAAAPGCLLSALRSADYRNWGQGTQVTVSSGSGGGGSGGGGSGGGGSFEEVQLQQSGPELVKPGASVKISCKASGYSFTGYTMNWVKQSHGKNLEWIGLINPYNGGTSYNQKFKAKATLTVDKSSSTAYMQLKSLTSEDSAVYYCARDYGYVLDYWGQGTSVTVSSTREDLKNVFPPEVAVFEPSKAEIAHTQKATLVCLATGFYPDHVELSWWVNGKEVHSGVCTDPQPLKEQPALNDSRYCLSSRLRVSATFWQNPRNHFRCQVQFYGLSENDEWTQDRAKPVTQIVSAEAWGRADCGITSASYHQGVLSATILYEILLGKATLYAVLVSALVLMAMVKRKDSRG

SEQ ID NO: 44965 - protein, 900 aa, synthetic construct
MALPVTALLLPLALLLHAARPQVQLVESGGGSVQAGGSLRLSCGASGNISSRNCMGWFRQAPGKEREGVAAIGQVTGRSYYVDSVKGRFTISLDNAKNTLYLQMNTLKPEDTAMYYCAAAPGCLLSALRSADYRNWGQGTQVTVSSGTGGGGSGGGGSGGGGSEFQIVLTQSPAIMSVSPGEKVTMTCSASSSVNYMHWFQQKPGTSPKLWVYSTSNLASGVPARFSGSGSGTSYSLTISSMEAEDAATYYCQQRSIYPPWTFGGGTKLEIKLEDLKNVFPPEVAVFEPSEAEISHTQKATLVCLATGFYPDHVELSWWVNGKEVHSGVCTDPQPLKEQPALNDSRYCLSSRLRVSATFWQNPRNHFRCQVQFYGLSENDEWTQDRAKPVTQIVSAEAWGRADCGFTSESYQQGVLSATILYEILLGKATLYAVLVSALVLMAMVKRKDSRGRAKRSGSGATNFSLLKQAGDVEENPGPTSATMDWIWRILFLVGAATGAHSGPEVQLVESGGGLVQAGGSLRLSCAASGRTFTMGWFRQAPGKEREFVAAISLSPTLAYYADSVKGRFTISRDNAKNTVVLQMNSLKPEDTALYYCAADRKSVMSIRPDYWGQGTQVTVSSGSGGGGSGGGGSGGGGSFEEVQLQQSGPELVKPGASVKISCKASGYSFTGYTMNWVKQSHGKNLEWIGLINPYNGGTSYNQKFKAKATLTVDKSSSTAYMQLKSLTSEDSAVYYCARDYGYVLDYWGQGTSVTVSSTRIQNPDPAVYQLRDSKSSDKSVCLFTDFDSQTNVSQSKDSDVYITDKCVLDMRSMDFKSNSAVAWSNKSDFACANAFNNSIIPEDTFFPSPESSCDVKLVEKSFETDTNLNFQNLSVIGFRILLLKVAGFNLLMTLRLWSS

SEQ ID NO: 44966 - protein, 763 aa, synthetic construct
MALPVTALLLPLALLLHAARPQVQLVESGGGSVQAGGSLRLSCGASGNISSRNCMGWFRQAPGKEREGVAAIGQVTGRSYYVDSVKGRFTISLDNAKNTLYLQMNTLKPEDTAMYYCAAAPGCLLSALRSADYRNWGQGTQVTVSSGTGGGGSGGGGSGGGGSEFQIVLTQSPAIMSVSPGEKVTMTCSASSSVNYMHWFQQKPGTSPKLWVYSTSNLASGVPARFSGSGSGTSYSLTISSMEAEDAATYYCQQRSIYPPWTFGGGTKLEIKLEDLKNVFPPEVAVFEPSEAEISHTQKATLVCLATGFYPDHVELSWWVNGKEVHSGVCTDPQPLKEQPALNDSRYCLSSRLRVSATFWQNPRNHFRCQVQFYGLSENDEWTQDRAKPVTQIVSAEAWGRADCGFTSESYQQGVLSATILYEILLGKATLYAVLVSALVLMAMVKRKDSRGRAKRSGSGATNFSLLKQAGDVEENPGPTSATMDWIWRILFLVGAATGAHSFEEVQLQQSGPELVKPGASVKISCKASGYSFTGYTMNWVKQSHGKNLEWIGLINPYNGGTSYNQKFKAKATLTVDKSSSTAYMQLKSLTSEDSAVYYCARDYGYVLDYWGQGTSVTVSSTRIQNPDPAVYQLRDSKSSDKSVCLFTDFDSQTNVSQSKDSDVYITDKCVLDMRSMDFKSNSAVAWSNKSDFACANAFNNSIIPEDTFFPSPESSCDVKLVEKSFETDTNLNFQNLSVIGFRILLLKVAGFNLLMTLRLWSS

SEQ ID NO: 44967 - protein, 763 aa, synthetic construct
MALPVTALLLPLALLLHAARPQVQLVESGGGVVQPGGSLRLSCAASGLSFSTYTVAWFRQAPGKGLEGVAAIPYTSQHMVYTDSVRGRFTISRDNSKNTLYLQMNSLRAEDTAVYYCATDRRPGTSMLAINGYNRWGQGTTVTVSSGTGGGGSGGGGSGGGGSEFQIVLTQSPAIMSVSPGEKVTMTCSASSSVNYMHWFQQKPGTSPKLWVYSTSNLASGVPARFSGSGSGTSYSLTISSMEAEDAATYYCQQRSIYPPWTFGGGTKLEIKLEDLKNVFPPEVAVFEPSEAEISHTQKATLVCLATGFYPDHVELSWWVNGKEVHSGVCTDPQPLKEQPALNDSRYCLSSRLRVSATFWQNPRNHFRCQVQFYGLSENDEWTQDRAKPVTQIVSAEAWGRADCGFTSESYQQGVLSATILYEILLGKATLYAVLVSALVLMAMVKRKDSRGRAKRSGSGATNFSLLKQAGDVEENPGPTSATMDWIWRILFLVGAATGAHSFEEVQLQQSGPELVKPGASVKISCKASGYSFTGYTMNWVKQSHGKNLEWIGLINPYNGGTSYNQKFKAKATLTVDKSSSTAYMQLKSLTSEDSAVYYCARDYGYVLDYWGQGTSVTVSSTRIQNPDPAVYQLRDSKSSDKSVCLFTDFDSQTNVSQSKDSDVYITDKCVLDMRSMDFKSNSAVAWSNKSDFACANAFNNSIIPEDTFFPSPESSCDVKLVEKSFETDTNLNFQNLSVIGFRILLLKVAGFNLLMTLRLWSS

SEQ ID NO: 44968 - protein, 762 aa, synthetic construct
MALPVTALLLPLALLLHAARPQIVLTQSPAIMSVSPGEKVTMTCSASSSVNYMHWFQQKPGTSPKLWVYSTSNLASGVPARFSGSGSGTSYSLTISSMEAEDAATYYCQQRSIYPPWTFGGGTKLEIKLEDLKNVFPPEVAVFEPSEAEISHTQKATLVCLATGFYPDHVELSWWVNGKEVHSGVCTDPQPLKEQPALNDSRYCLSSRLRVSATFWQNPRNHFRCQVQFYGLSENDEWTQDRAKPVTQIVSAEAWGRADCGFTSESYQQGVLSATILYEILLGKATLYAVLVSALVLMAMVKRKDSRGRAKRSGSGATNFSLLKQAGDVEENPGPTSTMDWIWRILFLVGAATGAHSGPQVQLVESGGGVVQPGGSLRLSCAASGLSFSTYTVAWFRQAPGKGLEGVAAIPYTSQHMVYTDSVRGRFTISRDNSKNTLYLQMNSLRAEDTAVYYCATDRRPGTSMLAINGYNRWGQGTTVTVSSGSGGGGSGGGGSGGGGSFEEVQLQQSGPELVKPGASVKISCKASGYSFTGYTMNWVKQSHGKNLEWIGLINPYNGGTSYNQKFKAKATLTVDKSSSTAYMQLKSLTSEDSAVYYCARDYGYVLDYWGQGTSVTVSSTRIQNPDPAVYQLRDSKSSDKSVCLFTDFDSQTNVSQSKDSDVYITDKCVLDMRSMDFKSNSAVAWSNKSDFACANAFNNSIIPEDTFFPSPESSCDVKLVEKSFETDTNLNFQNLSVIGFRILLLKVAGFNLLMTLRLWSS

SEQ ID NO: 44969 - protein, 764 aa, synthetic construct
MALPVTALLLPLALLLHAARPQIVLTQSPAIMSVSPGEKVTMTCSASSSVNYMHWFQQKPGTSPKLWVYSTSNLASGVPARFSGSGSGTSYSLTISSMEAEDAATYYCQQRSIYPPWTFGGGTKLEIKLEDLKNVFPPEVAVFEPSEAEISHTQKATLVCLATGFYPDHVELSWWVNGKEVHSGVCTDPQPLKEQPALNDSRYCLSSRLRVSATFWQNPRNHFRCQVQFYGLSENDEWTQDRAKPVTQIVSAEAWGRADCGFTSESYQQGVLSATILYEILLGKATLYAVLVSALVLMAMVKRKDSRGRAKRSGSGATNFSLLKQAGDVEENPGPTSTMDWIWRILFLVGAATGAHSGPEVQLVESGGGSVQAGGSLRLSCAASGYTYSINCMGWFRQAPGKEREGVAAISTGGGRTDYRDSVKGRFTISQDNAKNTVYLQMNSLKPEDTAMYYCAGKTTYPGYGCGLGRSAYNYWGQGTQVTVSSGSGGGGSGGGGSGGGGSFEEVQLQQSGPELVKPGASVKISCKASGYSFTGYTMNWVKQSHGKNLEWIGLINPYNGGTSYNQKFKAKATLTVDKSSSTAYMQLKSLTSEDSAVYYCARDYGYVLDYWGQGTSVTVSSTRIQNPDPAVYQLRDSKSSDKSVCLFTDFDSQTNVSQSKDSDVYITDKCVLDMRSMDFKSNSAVAWSNKSDFACANAFNNSIIPEDTFFPSPESSCDVKLVEKSFETDTNLNFQNLSVIGFRILLLKVAGFNLLMTLRLWSS

SEQ ID NO: 44970 - protein, 617 aa, synthetic construct
MALPVTALLLPLALLLHAARPQIVLTQSPAIMSVSPGEKVTMTCSASSSVNYMHWFQQKPGTSPKLWVYSTSNLASGVPARFSGSGSGTSYSLTISSMEAEDAATYYCQQRSIYPPWTFGGGTKLEIKLEDLKHVFPPEVAVFEPSDAEIWHTQKATLVCLATGFYPDHVELSWWVNGKEVHSGVSTDPQPLKEQPALNDSRYCLSSRLRVSATFWQNPRNHFRCQVQFYGLSENDEWTQDRAKPVTQIVSAEAWGRADCGFTSESYQQGVLSATILYEILLGKATLYAVLVSALVLMAMVKRKDSRGRAKRSGSGATNFSLLKQAGDVEENPGPTSMDWIWRILFLVGAATGAHSFEEVQLQQSGPELVKPGASVKISCKASGYSFTGYTMNWVKQSHGKNLEWIGLINPYNGGTSYNQKFKAKATLTVDKSSSTAYMQLKSLTSEDSAVYYCARDYGYVLDYWGQGTSVTVSSTRIQNPDPAVYQLRDSKSSDKSVCLFTDFDSQTNVSQSKDSDVYITDKTVLDMRSMDFKSNSAVAWSSKSDFACANAFNNSIIPEDTFFPSPEMACDVKLVEKSFETDTNLNFQNLLVIWLRILLLKVAGFNLLMTLRLWSS

SEQ ID NO: 44971 - protein, 617 aa, synthetic construct
MALPVTALLLPLALLLHAARPQIVLTQSPAIMSVSPGEKVTMTCSASSSVNYMHWFQQKPGTSPKLWVYSTSNLASGVPARFSGSGSGTSYSLTISSMEAEDAATYYCQQRSIYPPWTFGGGTKLEIKLEDLKHVFPPEVAVFEPSDAEIWHTQKATLVCLATGFYPDHVELSWWVNGKEVHSGVSTDPQPLKEQPALNDSRYCLSSRLRVSATFWQNPRNHFRCQVQFYGLSENDEWTQDRAKPVTQIVSAEAWGRADCGFTSESYQQGVLSATILYEILLGKATLYAVLVSALVLMAMVKRKDSRGRAKRSGSGATNFSLLKQAGDVEENPGPTSMDWIWRILFLVGAATGAHSFEEVQLQQSGPELVKPGASVKISCKASGYSFTGYTMNWVKQSHGKNLEWIGLINPYNGGTSYNQKFKAKATLTVDKSSSTAYMQLKSLTSEDSAVYYCARDYGYVLDYWGQGTSVTVSSTRIQNPDPAVYQLRDSKSSDKSVCLFTDFDSQTNVSQSKDSDVYITDKTVLDMRSMDFKSNSAVAWSTKSDFACANAFNNSIIPEDTFFPSPEVVCDVKLVEKSFETDTNLNFQNLVVIGARILLLKVAGFNLLMTLRLWSS

SEQ ID NO: 44972 - protein, 617 aa, synthetic construct
MALPVTALLLPLALLLHAARPQIVLTQSPAIMSVSPGEKVTMTCSASSSVNYMHWFQQKPGTSPKLWVYSTSNLASGVPARFSGSGSGTSYSLTISSMEAEDAATYYCQQRSIYPPWTFGGGTKLEIKLEDLKNVFPPEVAVFEPSKAEISRTQKATLVCLATGFYPPHVELSWWVNGKEVHDGVCTDPQPLKEQPALNDSRYCLSSRLRVSATFWQNPRNHFRCQVQFYGLSENDEWTQDRAKPVTQIVSAEAWGRADCGFTSESYQQGVLSATILYEILLGKATLYAVLVSALVLMAMVKRKDSRGRAKRSGSGATNFSLLKQAGDVEENPGPTSMDWIWRILFLVGAATGAHSFEEVQLQQSGPELVKPGASVKISCKASGYSFTGYTMNWVKQSHGKNLEWIGLINPYNGGTSYNQKFKAKATLTVDKSSSTAYMQLKSLTSEDSAVYYCARDYGYVLDYWGQGTSVTVSSTRIQNPDPAVYQLRDSKSSDKFVCLFTDFDSQINVSQSKDSDVYITDKCVLDMRSMDFKSNSAVAWSNKSDFTCANAFNNSIIPEDTFFPSPESSCDVKLVEKSFETDTNLNFQNLSVIGFRILLLKVAGFNLLMTLRLWSS

SEQ ID NO: 44973 - protein, 759 aa, synthetic construct
MALPVTALLLPLALLLHAARPQIVLTQSPAIMSVSPGEKVTMTCSASSSVNYMHWFQQKPGTSPKLWVYSTSNLASGVPARFSGSGSGTSYSLTISSMEAEDAATYYCQQRSIYPPWTFGGGTKLEIKLEDLKNVFPPEVAVFEPSEAEISHTQKATLVCLATGFYPDHVELSWWVNGKEVHSGVCTDPQPLKEQPALNDSRYCLSSRLRVSATFWQNPRNHFRCQVQFYGLSENDEWTQDRAKPVTQIVSAEAWGRADCGFTSESYQQGVLSATILYEILLGKATLYAVLVSALVLMAMVKRKDSRGRAKRSGSGATNFSLLKQAGDVEENPGPTSTMDWIWRILFLVGAATGAHSGPQVQLQESGPGLVKPSQTLSLTCTVSGASITTGEYYWNWFRQPPGKGLEWMGAIAASGSTTYSPSFESRTSISRDTSKNQFSLKLSSVTAADTAVYYCGRSFGVAAVTTGQNRGQGTLVTVSSGSGGGGSGGGGSGGGGSFEEVQLQQSGPELVKPGASVKISCKASGYSFTGYTMNWVKQSHGKNLEWIGLINPYNGGTSYNQKFKAKATLTVDKSSSTAYMQLKSLTSEDSAVYYCARDYGYVLDYWGQGTSVTVSSTRIQNPDPAVYQLRDSKSSDKSVCLFTDFDSQTNVSQSKDSDVYITDKCVLDMRSMDFKSNSAVAWSNKSDFACANAFNNSIIPEDTFFPSPESSCDVKLVEKSFETDTNLNFQNLSVIGFRILLLKVAGFNLLMTLRLWSS

SEQ ID NO: 44974 - protein, 900 aa, synthetic construct
MALPVTALLLPLALLLHAARPQVQLQESGPGLVKPSQTLSLTCTVSGGSITTGEFYWNWFRQPPGKGLEWMGAIAASGSTTYSPSFESRTSISRDTSKNQFSLKLSSVTAADTAVYYCGRSFGVAAVTTGQNRGQGTLVTVSSGTGGGGSGGGGSGGGGSEFQIVLTQSPAIMSVSPGEKVTMTCSASSSVNYMHWFQQKPGTSPKLWVYSTSNLASGVPARFSGSGSGTSYSLTISSMEAEDAATYYCQQRSIYPPWTFGGGTKLEIKLEIQNPDPAVYQLRDSKSSDKSVCLFTDFDSQTNVSQSKDSDVYITDKCVLDMRSMDFKSNSAVAWSNKSDFACANAFNNSIIPEDTFFPSSDVPCDVKLVEKSFETDTNLNFQNLSVIGFRILLLKVAGFNLLMTLRLWSSRAKRSGSGVKQTLNFDLLKLAGDVESNPGPTSTMDWIWRILFLVGAATGAHSGPEVQLVESGGGLVQPGGSLRLSCAASGRTFTMGWYRQAPGKEREFVAAISLSPTLAYYADSVKGRFTISRDNSKNTVVLQMNSLRAEDTALYYCAADRKSVMSIRPDYWGQGTLVTVSSGSGGGGSGGGGSGGGGSFEEVQLQQSGPELVKPGASVKISCKASGYSFTGYTMNWVKQSHGKNLEWIGLINPYNGGTSYNQKFKAKATLTVDKSSSTAYMQLKSLTSEDSAVYYCARDYGYVLDYWGQGTSVTVSSTREDLKNVFPPEVAVFEPSKAEIAHTQKATLVCLATGFYPDHVELSWWVNGKEVHSGVCTDPQPLKEQPALNDSRYCLSSRLRVSATFWQNPRNHFRCQVQFYGLSENDEWTQDRAKPVTQIVSAEAWGRADCGITSASYHQGVLSATILYEILLGKATLYAVLVSALVLMAMVKRKDSRG

SEQ ID NO: 44975 - protein, 763 aa, synthetic construct
MALPVTALLLPLALLLHAARPQVQLQESGPGLVKPSQTLSLTCTVSGGSITTGEFYWNWFRQPPGKGLEWMGAIAASGSTTYSPSFESRTSISRDTSKNQFSLKLSSVTAADTAVYYCGRSFGVAAVTTGQNRGQGTLVTVSSGTGGGGSGGGGSGGGGSEFQIVLTQSPAIMSVSPGEKVTMTCSASSSVNYMHWFQQKPGTSPKLWVYSTSNLASGVPARFSGSGSGTSYSLTISSMEAEDAATYYCQQRSIYPPWTFGGGTKLEIKLEIQNPDPAVYQLRDSKSSDKSVCLFTDFDSQTNVSQSKDSDVYITDKCVLDMRSMDFKSNSAVAWSNKSDFACANAFNNSIIPEDTFFPSSDVPCDVKLVEKSFETDTNLNFQNLSVIGFRILLLKVAGFNLLMTLRLWSSRAKRSGSGVKQTLNFDLLKLAGDVESNPGPTSTMDWIWRILFLVGAATGAHSFEEVQLQQSGPELVKPGASVKISCKASGYSFTGYTMNWVKQSHGKNLEWIGLINPYNGGTSYNQKFKAKATLTVDKSSSTAYMQLKSLTSEDSAVYYCARDYGYVLDYWGQGTSVTVSSTREDLKNVFPPEVAVFEPSKAEIAHTQKATLVCLATGFYPDHVELSWWVNGKEVHSGVCTDPQPLKEQPALNDSRYCLSSRLRVSATFWQNPRNHFRCQVQFYGLSENDEWTQDRAKPVTQIVSAEAWGRADCGITSASYHQGVLSATILYEILLGKATLYAVLVSALVLMAMVKRKDSRG

SEQ ID NO: 44976 - protein, 896 aa, synthetic construct
MALPVTALLLPLALLLHAARPEVQLVESGGGLVQAGGSLRLSCAASGRTFSMGWFRQAPGKEREFVAAITYSGGSPYYADSVKGRFTISRDNAKNTVYLQMNSLKPEDTAVYYCAANPTYGSDWNAENWGQGTQVTVSSGTGGGGSGGGGSGGGGSEFQIVLTQSPAIMSVSPGEKVTMTCSASSSVNYMHWFQQKPGTSPKLWVYSTSNLASGVPARFSGSGSGTSYSLTISSMEAEDAATYYCQQRSIYPPWTFGGGTKLEIKLEDLKNVFPPEVAVFEPSEAEISHTQKATLVCLATGFYPDHVELSWWVNGKEVHSGVCTDPQPLKEQPALNDSRYCLSSRLRVSATFWQNPRNHFRCQVQFYGLSENDEWTQDRAKPVTQIVSAEAWGRADCGFTSESYQQGVLSATILYEILLGKATLYAVLVSALVLMAMVKRKDSRGRAKRSGSGATNFSLLKQAGDVEENPGPTSTMDWIWRILFLVGAATGAHSGPQVQLQESGPGLVKPSQTLSLTCTVSGASITTGEYYWNWFRQPPGKGLEWMGAIAASGSTTYSPSFESRTSISRDTSKNQFSLKLSSVTAADTAVYYCGRSFGVAAVTTGQNRGQGTLVTVSSGSGGGGSGGGGSGGGGSFEEVQLQQSGPELVKPGASVKISCKASGYSFTGYTMNWVKQSHGKNLEWIGLINPYNGGTSYNQKFKAKATLTVDKSSSTAYMQLKSLTSEDSAVYYCARDYGYVLDYWGQGTSVTVSSTRIQNPDPAVYQLRDSKSSDKSVCLFTDFDSQTNVSQSKDSDVYITDKCVLDMRSMDFKSNSAVAWSNKSDFACANAFNNSIIPEDTFFPSPESSCDVKLVEKSFETDTNLNFQNLSVIGFRILLLKVAGFNLLMTLRLWSS

SEQ ID NO: 44977 - protein, 903 aa, synthetic construct
MALPVTALLLPLALLLHAARPEVQLVESGGGLVQAGGSLRLSCAASGRTFSMGWFRQAPGKEREFVAAITYSGGSPYYADSVKGRFTISRDNAKNTVYLQMNSLKPEDTAVYYCAANPTYGSDWNAENWGQGTQVTVSSGTGGGGSGGGGSGGGGSEFQIVLTQSPAIMSVSPGEKVTMTCSASSSVNYMHWFQQKPGTSPKLWVYSTSNLASGVPARFSGSGSGTSYSLTISSMEAEDAATYYCQQRSIYPPWTFGGGTKLEIKLEIQNPDPAVYQLRDSKSSDKSVCLFTDFDSQTNVSQSKDSDVYITDKCVLDMRSMDFKSNSAVAWSNKSDFACANAFNNSIIPEDTFFPSSDVPCDVKLVEKSFETDTNLNFQNLSVIGFRILLLKVAGFNLLMTLRLWSSRAKRSGSGVKQTLNFDLLKLAGDVESNPGPTSTMDWIWRILFLVGAATGAHSGPQVQLVESGGGLVQPGGSLRLSCAASGNINSRNCMGWFRQAPGKGREGVAAIGQVTGRTYYVDSVKGRFTISLDNSKNTLYLQMNSLRAEDTAVYYCAAAPGCLLSALRSADYRNWGQGTLVTVSSGSGGGGSGGGGSGGGGSFEEVQLQQSGPELVKPGASVKISCKASGYSFTGYTMNWVKQSHGKNLEWIGLINPYNGGTSYNQKFKAKATLTVDKSSSTAYMQLKSLTSEDSAVYYCARDYGYVLDYWGQGTSVTVSSTREDLKNVFPPEVAVFEPSKAEIAHTQKATLVCLATGFYPDHVELSWWVNGKEVHSGVCTDPQPLKEQPALNDSRYCLSSRLRVSATFWQNPRNHFRCQVQFYGLSENDEWTQDRAKPVTQIVSAEAWGRADCGITSASYHQGVLSATILYEILLGKATLYAVLVSALVLMAMVKRKDSRG

SEQ ID NO: 44978 - protein, 899 aa, synthetic construct
MALPVTALLLPLALLLHAARPEVQLVESGGGLVQAGGSLRLSCAASGRTFSMGWFRQAPGKEREFVAAITYSGGSPYYADSVKGRFTISRDNAKNTVYLQMNSLKPEDTAVYYCAANPTYGSDWNAENWGQGTQVTVSSGTGGGGSGGGGSGGGGSEFQIVLTQSPAIMSVSPGEKVTMTCSASSSVNYMHWFQQKPGTSPKLWVYSTSNLASGVPARFSGSGSGTSYSLTISSMEAEDAATYYCQQRSIYPPWTFGGGTKLEIKLEDLKNVFPPEVAVFEPSEAEISHTQKATLVCLATGFYPDHVELSWWVNGKEVHSGVCTDPQPLKEQPALNDSRYCLSSRLRVSATFWQNPRNHFRCQVQFYGLSENDEWTQDRAKPVTQIVSAEAWGRADCGFTSESYQQGVLSATILYEILLGKATLYAVLVSALVLMAMVKRKDSRGRAKRSGSGATNFSLLKQAGDVEENPGPTSTMDWIWRILFLVGAATGAHSGPQVQLVESGGGLVQPGGSLRLSCAASGNINSRNCMGWFRQAPGKGREGVAAIGQVTGRTYYVDSVKGRFTISLDNSKNTLYLQMNSLRAEDTAVYYCAAAPGCLLSALRSADYRNWGQGTLVTVSSGSGGGGSGGGGSGGGGSFEEVQLQQSGPELVKPGASVKISCKASGYSFTGYTMNWVKQSHGKNLEWIGLINPYNGGTSYNQKFKAKATLTVDKSSSTAYMQLKSLTSEDSAVYYCARDYGYVLDYWGQGTSVTVSSTRIQNPDPAVYQLRDSKSSDKSVCLFTDFDSQTNVSQSKDSDVYITDKCVLDMRSMDFKSNSAVAWSNKSDFACANAFNNSIIPEDTFFPSPESSCDVKLVEKSFETDTNLNFQNLSVIGFRILLLKVAGFNLLMTLRLWSS

SEQ ID NO: 44979 - protein, 899 aa, synthetic construct
MALPVTALLLPLALLLHAARPEVQLVESGGGLVQAGGSLRLSCAASGRTFTMGWFRQAPGKEREFVAAISLSPTLAYYADSVKGRFTISRDNAKNTVVLQMNSLKPEDTALYYCAADRKSVMSIRPDYWGQGTQVTVSSGTGGGGSGGGGSGGGGSEFQIVLTQSPAIMSVSPGEKVTMTCSASSSVNYMHWFQQKPGTSPKLWVYSTSNLASGVPARFSGSGSGTSYSLTISSMEAEDAATYYCQQRSIYPPWTFGGGTKLEIKLEDLKNVFPPEVAVFEPSEAEISHTQKATLVCLATGFYPDHVELSWWVNGKEVHSGVCTDPQPLKEQPALNDSRYCLSSRLRVSATFWQNPRNHFRCQVQFYGLSENDEWTQDRAKPVTQIVSAEAWGRADCGFTSESYQQGVLSATILYEILLGKATLYAVLVSALVLMAMVKRKDSRGRAKRSGSGATNFSLLKQAGDVEENPGPTSTMDWIWRILFLVGAATGAHSGPQVQLVESGGGLVQPGGSLRLSCAASGNINSRNCMGWFRQAPGKGREGVAAIGQVTGRTYYVDSVKGRFTISLDNSKNTLYLQMNSLRAEDTAVYYCAAAPGCLLSALRSADYRNWGQGTLVTVSSGSGGGGSGGGGSGGGGSFEEVQLQQSGPELVKPGASVKISCKASGYSFTGYTMNWVKQSHGKNLEWIGLINPYNGGTSYNQKFKAKATLTVDKSSSTAYMQLKSLTSEDSAVYYCARDYGYVLDYWGQGTSVTVSSTRIQNPDPAVYQLRDSKSSDKSVCLFTDFDSQTNVSQSKDSDVYITDKCVLDMRSMDFKSNSAVAWSNKSDFACANAFNNSIIPEDTFFPSPESSCDVKLVEKSFETDTNLNFQNLSVIGFRILLLKVAGFNLLMTLRLWSS

SEQ ID NO: 44980 - protein, 903 aa, synthetic construct
MALPVTALLLPLALLLHAARPQVQLQESGPGLVKPSQTLSLTCTVSGGSITTGEFYWNWFRQPPGKGLEWMGAIAASGSTTYSPSFESRTSISRDTSKNQFSLKLSSVTAADTAVYYCGRSFGVAAVTTGQNRGQGTLVTVSSGTGGGGSGGGGSGGGGSEFQIVLTQSPAIMSVSPGEKVTMTCSASSSVNYMHWFQQKPGTSPKLWVYSTSNLASGVPARFSGSGSGTSYSLTISSMEAEDAATYYCQQRSIYPPWTFGGGTKLEIKLEDLKNVFPPEVAVFEPSEAEISHTQKATLVCLATGFYPDHVELSWWVNGKEVHSGVCTDPQPLKEQPALNDSRYCLSSRLRVSATFWQNPRNHFRCQVQFYGLSENDEWTQDRAKPVTQIVSAEAWGRADCGFTSESYQQGVLSATILYEILLGKATLYAVLVSALVLMAMVKRKDSRGRAKRSGSGATNFSLLKQAGDVEENPGPTSTMDWIWRILFLVGAATGAHSGPQVQLVESGGGLVQPGGSLRLSCAASGNINSRNCMGWFRQAPGKGREGVAAIGQVTGRTYYVDSVKGRFTISLDNSKNTLYLQMNSLRAEDTAVYYCAAAPGCLLSALRSADYRNWGQGTLVTVSSGSGGGGSGGGGSGGGGSFEEVQLQQSGPELVKPGASVKISCKASGYSFTGYTMNWVKQSHGKNLEWIGLINPYNGGTSYNQKFKAKATLTVDKSSSTAYMQLKSLTSEDSAVYYCARDYGYVLDYWGQGTSVTVSSTRIQNPDPAVYQLRDSKSSDKSVCLFTDFDSQTNVSQSKDSDVYITDKCVLDMRSMDFKSNSAVAWSNKSDFACANAFNNSIIPEDTFFPSPESSCDVKLVEKSFETDTNLNFQNLSVIGFRILLLKVAGFNLLMTLRLWSS

SEQ ID NO: 44981 - protein, 484 aa, synthetic construct
MALPVTALLLPLALLLHAARPDIVMTQSPATLSVSPGERATLSCRASQSVSNDVVWYQQKPGQAPRLLIYYASNRYTGIPARFSGSGSGTEFTLTISSLQSEDFAVYYCQQDYTSPWTFGQGTKLEIKRGGGGSGGGGSGGGGSEVQLVQSGAEVKKPGASVRVSCKASGYTFTNYGMNWVRQAPGQGLEWMGWINTYTGEPTYADDFKGRVTMTTDTSTSTAYMELRSLRSDDTAVYYCARIGDSSPSDYWGQGTLVTVSSTRKIEVMYPPPYLDNEKSNGTIIHVKGKHLCPSPLFPGPSKPFWVLVVVGGVLACYSLLVTVAFIIFWVRSKRSRLLHSDYMNMTPRRPGPTRKHYQPYAPPRDFAAYRSRVKFSRSADAPAYQQGQNQLYNELNLGRREEYDVLDKRRGRDPEMGGKPRRKNPQEGLYNELQKDKMAEAYSEIGMKGERRRGKGHDGLYQGLSTATKDTYDALHMQALPPR

SEQ ID NO: 44982 - protein, 490 aa, synthetic construct
MALPVTALLLPLALLLHAARPDIVMTQSPATLSVSPGERATLSCRASQSVSNDVVWYQQKPGQAPRLLIYYASNRYTGIPARFSGSGSGTEFTLTISSLQSEDFAVYYCQQDYTSPWTFGQGTKLEIKRGGGGSGGGGSGGGGSEVQLVQSGAEVKKPGASVRVSCKASGYTFTNYGMNWVRQAPGQGLEWMGWINTYTGEPTYADDFKGRVTMTTDTSTSTAYMELRSLRSDDTAVYYCARIGDSSPSDYWGQGTLVTVSSTRAKPTTTPAPRPPTPAPTIASQPLSLRPEACRPAAGGAVHTRGLDFACDIYIWAPLAGTCGVLLLSLVITLYCKRGRKKLLYIFKQPFMRPVQTTQEEDGCSCRFPEEEEGGCELRVKFSRSADAPAYQQGQNQLYNELNLGRREEYDVLDKRRGRDPEMGGKPRRKNPQEGLYNELQKDKMAEAYSEIGMKGERRRGKGHDGLYQGLSTATKDTYDALHMQALPPR

SEQ ID NO: 44983 - protein, 490 aa, synthetic construct
MALPVTALLLPLALLLHAARPEVQLVQSGAEVKKPGASVRVSCKASGYTFTNYGMNWVRQAPGQGLEWMGWINTYTGEPTYADDFKGRVTMTTDTSTSTAYMELRSLRSDDTAVYYCARIGDSSPSDYWGQGTLVTVSSGGGGSGGGGSGGGGSDIVMTQSPATLSVSPGERATLSCRASQSVSNDVVWYQQKPGQAPRLLIYYASNRYTGIPARFSGSGSGTEFTLTISSLQSEDFAVYYCQQDYTSPWTFGQGTKLEIKRTRAKPTTTPAPRPPTPAPTIASQPLSLRPEACRPAAGGAVHTRGLDFACDIYIWAPLAGTCGVLLLSLVITLYCKRGRKKLLYIFKQPFMRPVQTTQEEDGCSCRFPEEEEGGCELRVKFSRSADAPAYQQGQNQLYNELNLGRREEYDVLDKRRGRDPEMGGKPRRKNPQEGLYNELQKDKMAEAYSEIGMKGERRRGKGHDGLYQGLSTATKDTYDALHMQALPPR

SEQ ID NO: 44984 - protein, 623 aa, synthetic construct
MALPVTALLLPLALLLHAARPDIVMTQSPATLSVSPGERATLSCRASQSVSNDVVWYQQKPGQAPRLLIYYASNRYTGIPARFSGSGSGTEFTLTISSLQSEDFAVYYCQQDYTSPWTFGQGTKLEIKRLEIQNPDPAVYQLRDSKSSDKSVCLFTDFDSQTNVSQSKDSDVYITDKCVLDMRSMDFKSNSAVAWSNKSDFACANAFNNSIIPEDTFFPSSDVPCDVKLVEKSFETDTNLNFQNLSVIGFRILLLKVAGFNLLMTLRLWSSRAKRSGSGVKQTLNFDLLKLAGDVESNPGPTSMDWIWRILFLVGAATGAHSFEEVQLVQSGAEVKKPGASVRVSCKASGYTFTNYGMNWVRQAPGQGLEWMGWINTYTGEPTYADDFKGRVTMTTDTSTSTAYMELRSLRSDDTAVYYCARIGDSSPSDYWGQGTLVTVSSTREDLKNVFPPEVAVFEPSKAEIAHTQKATLVCLATGFYPDHVELSWWVNGKEVHSGVCTDPQPLKEQPALNDSRYCLSSRLRVSATFWQNPRNHFRCQVQFYGLSENDEWTQDRAKPVTQIVSAEAWGRADCGITSASYHQGVLSATILYEILLGKATLYAVLVSALVLMAMVKRKDSRG

SEQ ID NO: 44985 - protein, 619 aa, synthetic construct
MALPVTALLLPLALLLHAARPDIVMTQSPATLSVSPGERATLSCRASQSVSNDVVWYQQKPGQAPRLLIYYASNRYTGIPARFSGSGSGTEFTLTISSLQSEDFAVYYCQQDYTSPWTFGQGTKLEIKRLEDLKNVFPPEVAVFEPSKAEIAHTQKATLVCLATGFYPDHVELSWWVNGKEVHSGVCTDPQPLKEQPALNDSRYCLSSRLRVSATFWQNPRNHFRCQVQFYGLSENDEWTQDRAKPVTQIVSAEAWGRADCGITSASYHQGVLSATILYEILLGKATLYAVLVSALVLMAMVKRKDSRGRAKRSGSGATNFSLLKQAGDVEENPGPTSMDWIWRILFLVGAATGAHSFEEVQLVQSGAEVKKPGASVRVSCKASGYTFTNYGMNWVRQAPGQGLEWMGWINTYTGEPTYADDFKGRVTMTTDTSTSTAYMELRSLRSDDTAVYYCARIGDSSPSDYWGQGTLVTVSSTRIQNPDPAVYQLRDSKSSDKSVCLFTDFDSQTNVSQSKDSDVYITDKCVLDMRSMDFKSNSAVAWSNKSDFACANAFNNSIIPEDTFFPSSDVPCDVKLVEKSFETDTNLNFQNLSVIGFRILLLKVAGFNLLMTLRLWSS

SEQ ID NO: 44986 - protein, 619 aa, synthetic construct; identical to SEQ ID NO: 12145

SEQ ID NO: 44987 - protein, 623 aa, synthetic construct; identical to SEQ ID NO: 12147

SEQ ID NO: 44988 - protein, 635 aa, synthetic construct
MALPVTALLLPLALLLHAARPLEEDLKNVFPPEVAVFEPSKAEIAHTQKATLVCLATGFYPDHVELSWWVNGKEVHSGVCTDPQPLKEQPALNDSRYCLSSRLRVSATFWQNPRNHFRCQVQFYGLSENDEWTQDRAKPVTQIVSAEAWGRADCGITSASYHQGVLSATILYEILLGKATLYAVLVSALVLMAMVKRKDSRGRAKRSGSGATNFSLLKQAGDVEENPGPTSMALPVTALLLPLALLLHAARPDIVMTQSPATLSVSPGERATLSCRASQSVSNDVVWYQQKPGQAPRLLIYYASNRYTGIPARFSGSGSGTEFTLTISSLQSEDFAVYYCQQDYTSPWTFGQGTKLEIKRGGGGSGGGGSGGGGSEVQLVQSGAEVKKPGASVRVSCKASGYTFTNYGMNWVRQAPGQGLEWMGWINTYTGEPTYADDFKGRVTMTTDTSTSTAYMELRSLRSDDTAVYYCARIGDSSPSDYWGQGTLVTVSSTRIQNPDPAVYQLRDSKSSDKSVCLFTDFDSQTNVSQSKDSDVYITDKCVLDMRSMDFKSNSAVAWSNKSDFACANAFNNSIIPEDTFFPSSDVPCDVKLVEKSFETDTNLNFQNLSVIGFRILLLKVAGFNLLMTLRLWSS

SEQ ID NO: 44989 - protein, 642 aa, synthetic construct
MALPVTALLLPLALLLHAARPLEGSGDRPDPAVYQLRDSKSSDKSVCLFTDFDSQTNVSQSKDSDVYITDKCVLDMRSMDFKSNSAVAWSNKSDFACANAFNNSIIPEDTFFPSPESSCDVKLVEKSFETDTNLNFQNLSVIGFRILLLKVAGFNLLMTLRLWSSSSRAKRSGSGVKQTLNFDLLKLAGDVESNPGPTSMALPVTALLLPLALLLHAARPDIVMTQSPATLSVSPGERATLSCRASQSVSNDVVWYQQKPGQAPRLLIYYASNRYTGIPARFSGSGSGTEFTLTISSLQSEDFAVYYCQQDYTSPWTFGQGTKLEIKRGGGGSGGGGSGGGGSEVQLVQSGAEVKKPGASVRVSCKASGYTFTNYGMNWVRQAPGQGLEWMGWINTYTGEPTYADDFKGRVTMTTDTSTSTAYMELRSLRSDDTAVYYCARIGDSSPSDYWGQGTLVTVSSTREDLKNVFPPEVAVFEPSEAEISHTQKATLVCLATGFYPDHVELSWWVNGKEVHSGVCTDPQPLKEQPALNDSRYCLSSRLRVSATFWQNPRNHFRCQVQFYGLSENDEWTQDRAKPVTQIVSAEAWGRADCGFTSESYQQGVLSATILYEILLGKATLYAVLVSALVLMAMVKRKDSRG

SEQ ID NO: 44990 - protein, 619 aa, synthetic construct
MALPVTALLLPLALLLHAARPDIVMTQSPATLSVSPGERATLSCRASQSVSNDVVWYQQKPGQAPRLLIYYASNRYTGIPARFSGSGSGTEFTLTISSLQSEDFAVYYCQQDYTSPWTFGQGTKLEIKRLEDLKNVFPPEVAVFEPSEAEISHTQKATLVCLATGFYPDHVELSWWVNGKEVHSGVSTDPQPLKEQPALNDSRYCLSSRLRVSATFWQNPRNHFRCQVQFYGLSENDEWTQDRAKPVTQIVSAEAWGRADCGFTSESYQQGVLSATILYEILLGKATLYAVLVSALVLMAMVKRKDSRGRAKRSGSGATNFSLLKQAGDVEENPGPTSMDWIWRILFLVGAATGAHSFEEVQLVQSGAEVKKPGASVRVSCKASGYTFTNYGMNWVRQAPGQGLEWMGWINTYTGEPTYADDFKGRVTMTTDTSTSTAYMELRSLRSDDTAVYYCARIGDSSPSDYWGQGTLVTVSSTRIQNPDPAVYQLRDSKSSDKSVCLFTDFDSQTNVSQSKDSDVYITDKTVLDMRSMDFKSNSAVAWSNKSDFACANAFNNSIIPEDTFFPSPESSCDVKLVEKSFETDTNLNFQNLSVIGFRILLLKVAGFNLLMTLRLWSS

SEQ ID NO: 44991 - protein, 627 aa, synthetic construct
MALPVTALLLPLALLLHAARPDIVMTQSPATLSVSPGERATLSCRASQSVSNDVVWYQQKPGQAPRLLIYYASNRYTGIPARFSGSGSGTEFTLTISSLQSEDFAVYYCQQDYTSPWTFGQGTKLEIKRLEDKQLDADVSPKPTIFLPSIAETKLQKAGTYLCLLEKFFPDVIKIHWQEKKSNTILGSQEGNTMKTNDTYMKFSWLTVPEKSLDKEHRCIVRHENNKNGVDQEIIFPPIKTDVITMDPKDNCSKDANDTLLLQLTNTSAYYMYLLLLLKSVVYFAIITCCLLRRTAFCCNGEKSRAKRSGSGATNFSLLKQAGDVEENPGPTSMDWIWRILFLVGAATGAHSFEEVQLVQSGAEVKKPGASVRVSCKASGYTFTNYGMNWVRQAPGQGLEWMGWINTYTGEPTYADDFKGRVTMTTDTSTSTAYMELRSLRSDDTAVYYCARIGDSSPSDYWGQGTLVTVSSTRSQPHTKPSVFVMKNGTNVACLVKEFYPKDIRINLVSSKKITEFDPAIVISPSGKYNAVKLGKYEDSNSVTCSVQHDNKTVHSTDFEVKTDSTDHVKPKETENTKQPSKSCHKPKAIVHTEKVNMMSLTVLGLRMLFAKTVAVNFLLTAKLFFL

SEQ ID NO: 44992 - protein, 627 aa, synthetic construct; identical to SEQ ID NO: 12155

SEQ ID NO: 44993 - protein, 642 aa, synthetic construct
MALPVTALLLPLALLLHAARPLEDKQLDADVSPKPTIFLPSIAETKLQKAGTYLCLLEKFFPDVIKIHWQEKKSNTILGSQEGNTMKTNDTYMKFSWLTVPEKSLDKEHRCIVRHENNKNGVDQEIIFPPIKTDVITMDPKDNCSKDANDTLLLQLTNTSAYYMYLLLLLKSVVYFAIITCCLLRRTAFCCNGEKSRAKRSGSGATNFSLLKQAGDVEENPGPTSMALPVTALLLPLALLLHAARPDIVMTQSPATLSVSPGERATLSCRASQSVSNDVVWYQQKPGQAPRLLIYYASNRYTGIPARFSGSGSGTEFTLTISSLQSEDFAVYYCQQDYTSPWTFGQGTKLEIKRGGGGSGGGGSGGGGSEVQLVQSGAEVKKPGASVRVSCKASGYTFTNYGMNWVRQAPGQGLEWMGWINTYTGEPTYADDFKGRVTMTTDTSTSTAYMELRSLRSDDTAVYYCARIGDSSPSDYWGQGTLVTVSSTRSQPHTKPSVFVMKNGTNVACLVKEFYPKDIRINLVSSKKITEFDPAIVISPSGKYNAVKLGKYEDSNSVTCSVQHDNKTVHSTDFEVKTDSTDHVKPKETENTKQPSKSCHKPKAIVHTEKVNMMSLTVLGLRMLFAKTVAVNFLLTAKLFFL

SEQ ID NO: 44994 - protein, 796 aa, synthetic construct
MALPVTALLLPLALLLHAARPDIVMTQSPATLSVSPGERATLSCRASQSVSNDVVWYQQKPGQAPRLLIYYASNRYTGIPARFSGSGSGTEFTLTISSLQSEDFAVYYCQQDYTSPWTFGQGTKLEIKRGQPKANPTVTLFPPSSEELQANKATLVCLISDFYPGAVTVAWKADGSPVKAGVETTKPSKQSNNKYAASSYLSLTPEQWKSHRSYSCQVTHEGSTVEKTVAPTECSGSQSFGLLDPKLCYLLDGILFIYGVILTALFLRVKFSRSADAPAYQQGQNQLYNELNLGRREEYDVLDKRRGRDPEMGGKPQRRKNPQEGLYNELQKDKMAEAYSEIGMKGERRRGKGHDGLYQGLSTATKDTYDALHMQALPPRRAKRSGSGATNFSLLKQAGDVEENPGPTSMDWIWRILFLVGAATGAHSFEEVQLVQSGAEVKKPGASVRVSCKASGYTFTNYGMNWVRQAPGQGLEWMGWINTYTGEPTYADDFKGRVTMTTDTSTSTAYMELRSLRSDDTAVYYCARIGDSSPSDYWGQGTLVTVSSASTKGPSVFPLAPSSKSTSGGTAALGCLVKDYFPEPVTVSWNSGALTSGVHTFPAVLQSSGLYSLSSVVTVPSSSLGTQTYICNVNHKPSNTKVDKRVEPKSCGTQSFGLLDPKLCYLLDGILFIYGVILTALFLRVKFSRSADAPAYQQGQNQLYNELNLGRREEYDVLDKRRGRDPEMGGKPQRRKNPQEGLYNELQKDKMAEAYSEIGMKGERRRGKGHDGLYQGLSTATKDTYDALHMQALPPR

SEQ ID NO: 44995 - protein, 815 aa, synthetic construct; identical to SEQ ID NO: 12158

SEQ ID NO: 44996 - protein, 857 aa, synthetic construct
MALPVTALLLPLALLLHAARPDIVMTQSPATLSVSPGERATLSCRASQSVSNDVVWYQQKPGQAPRLLIYYASNRYTGIPARFSGSGSGTEFTLTISSLQSEDFAVYYCQQDYTSPWTFGQGTKLEIKRLEEDLKNVFPPEVAVFEPSEAEISHTQKATLVCLATGFYPDHVELSWWVNGKEVHSGVSTDPQPLKEQPALNDSRYCLSSRLRVSATFWQNPRNHFRCQVQFYGLSENDEWTQDRAKPVTQIVSAEAWGRADCGSQSFGLLDPKLCYLLDGILFIYGVILTALFLRVKFSRSADAPAYQQGQNQLYNELNLGRREEYDVLDKRRGRDPEMGGKPQRRKNPQEGLYNELQKDKMAEAYSEIGMKGERRRGKGHDGLYQGLSTATKDTYDALHMQALPPRRAKRSGSGATNFSLLKQAGDVEENPGPTSMDWIWRILFLVGAATGAHSFEEVQLVQSGAEVKKPGASVRVSCKASGYTFTNYGMNWVRQAPGQGLEWMGWINTYTGEPTYADDFKGRVTMTTDTSTSTAYMELRSLRSDDTAVYYCARIGDSSPSDYWGQGTLVTVSSTRIQNPDPAVYQLRDSKSSDKSVCLFTDFDSQTNVSQSKDSDVYITDKTVLDMRSMDFKSNSAVAWSNKSDFACANAFNNSIIPEDTFFPSPESSCGTQSFGLLDPKLCYLLDGILFIYGVILTALFLRSKRSRLLHSDYMNMTPRRPGPTRKHYQPYAPPRDFAAYRSRVKFSRSADAPAYQQGQNQLYNELNLGRREEYDVLDKRRGRDPEMGGKPQRRKNPQEGLYNELQKDKMAEAYSEIGMKGERRRGKGHDGLYQGLSTATKDTYDALHMQALPPR

SEQ ID NO: 44997 - protein, 900 aa, synthetic construct
MALPVTALLLPLALLLHAARPDIVMTQSPATLSVSPGERATLSCRASQSVSNDVVWYQQKPGQAPRLLIYYASNRYTGIPARFSGSGSGTEFTLTISSLQSEDFAVYYCQQDYTSPWTFGQGTKLEIKRLEEDLKNVFPPEVAVFEPSEAEISHTQKATLVCLATGFYPDHVELSWWVNGKEVHSGVSTDPQPLKEQPALNDSRYCLSSRLRVSATFWQNPRNHFRCQVQFYGLSENDEWTQDRAKPVTQIVSAEAWGRADCGSQSFGLLDPKLCYLLDGILFIYGVILTALFLKRGRKKLLYIFKQPFMRPVQTTQEEDGCSCRFPEEEEGGCELRVKFSRSADAPAYQQGQNQLYNELNLGRREEYDVLDKRRGRDPEMGGKPQRRKNPQEGLYNELQKDKMAEAYSEIGMKGERRRGKGHDGLYQGLSTATKDTYDALHMQALPPRRAKRSGSGATNFSLLKQAGDVEENPGPTSMDWIWRILFLVGAATGAHSFEEVQLVQSGAEVKKPGASVRVSCKASGYTFTNYGMNWVRQAPGQGLEWMGWINTYTGEPTYADDFKGRVTMTTDTSTSTAYMELRSLRSDDTAVYYCARIGDSSPSDYWGQGTLVTVSSTRIQNPDPAVYQLRDSKSSDKSVCLFTDFDSQTNVSQSKDSDVYITDKTVLDMRSMDFKSNSAVAWSNKSDFACANAFNNSIIPEDTFFPSPESSCGTQSFGLLDPKLCYLLDGILFIYGVILTALFLKRGRKKLLYIFKQPFMRPVQTTQEEDGCSCRFPEEEEGGCELRVKFSRSADAPAYQQGQNQLYNELNLGRREEYDVLDKRRGRDPEMGGKPQRRKNPQEGLYNELQKDKMAEAYSEIGMKGERRRGKGHDGLYQGLSTATKDTYDALHMQALPPR

SEQ ID NO: 44998 - protein, 587 aa, synthetic construct
MALPVTALLLPLALLLHAARPDIVMTQSPATLSVSPGERATLSCRASQSVSNDVVWYQQKPGQAPRLLIYYASNRYTGIPARFSGSGSGTEFTLTISSLQSEDFAVYYCQQDYTSPWTFGQGTKLEIKRLEQSFGLLDPKLCYLLDGILFIYGVILTALFLRVKFSRSADAPAYQQGQNQLYNELNLGRREEYDVLDKRRGRDPEMGGKPQRRKNPQEGLYNELQKDKMAEAYSEIGMKGERRRGKGHDGLYQGLSTATKDTYDALHMQALPPRRAKRSGSGATNFSLLKQAGDVEENPGPTSMDWIWRILFLVGAATGAHSFEEVQLVQSGAEVKKPGASVRVSCKASGYTFTNYGMNWVRQAPGQGLEWMGWINTYTGEPTYADDFKGRVTMTTDTSTSTAYMELRSLRSDDTAVYYCARIGDSSPSDYWGQGTLVTVSSTRQSFGLLDPKLCYLLDGILFIYGVILTALFLRVKFSRSADAPAYQQGQNQLYNELNLGRREEYDVLDKRRGRDPEMGGKPQRRKNPQEGLYNELQKDKMAEAYSEIGMKGERRRGKGHDGLYQGLSTATKDTYDALHMQALPPR

SEQ ID NO: 44999 - protein, 645 aa, synthetic construct; identical to SEQ ID NO: 12165

SEQ ID NO: 45000 - protein, 623 aa, synthetic construct; identical to SEQ ID NO: 12166

SEQ ID NO: 45001 - protein, 623 aa, synthetic construct; identical to SEQ ID NO: 12167

SEQ ID NO: 45002 - protein, 449 aa, synthetic construct; identical to SEQ ID NO: 12168

SEQ ID NO: 45003 - protein, 414 aa, synthetic construct; identical to SEQ ID NO: 12169

SEQ ID NO: 45004 - protein, 424 aa, synthetic construct; identical to SEQ ID NO: 12170

SEQ ID NO: 45005 - protein, 407 aa, synthetic construct; identical to SEQ ID NO: 12171

SEQ ID NO: 45006 - protein, 502 aa, synthetic construct; identical to SEQ ID NO: 12176

SEQ ID NO: 45007 - protein, 477 aa, synthetic construct
MALPVTALLLPLALLLHAARPDIVMTQSPATLSVSPGERATLSCRASQSVSNDVVWYQQKPGQAPRLLIYYASNRYTGIPARFSGSGSGTEFTLTISSLQSEDFAVYYCQQDYTSPWTFGQGTKLEIKRGGGGSGGGGSGGGGSEVQLVQSGAEVKKPGASVRVSCKASGYTFTNYGMNWVRQAPGQGLEWMGWINTYTGEPTYADDFKGRVTMTTDTSTSTAYMELRSLRSDDTAVYYCARIGDSSPSDYWGQGTLVTVSSTRGMRTEDLPKAVVFLEPQWYRVLEKDSVTLKCQGAYSPEDNSTQWFHNESLISSQASSYFIDAATVDDSGEYRCQTNLSTLSDPVQLEVHIGWLLLQAPRWVFKEEDPIHLRCHSWKNTALHKVTYLQNGKGRKYFHHNSDFYIPKATLKDSGSYFCRGLVGSKNVSSETVNITITQGLAVPTISSFFPPGYQVSFCLVMVLLFAVDTGLYFSV

SEQ ID NO: 45008 - protein, 478 aa, synthetic construct
MALPVTALLLPLALLLHAARPDIVMTQSPATLSVSPGERATLSCRASQSVSNDVVWYQQKPGQAPRLLIYYASNRYTGIPARFSGSGSGTEFTLTISSLQSEDFAVYYCQQDYTSPWTFGQGTKLEIKRGGGGSGGGGSGGGGSEVQLVQSGAEVKKPGASVRVSCKASGYTFTNYGMNWVRQAPGQGLEWMGWINTYTGEPTYADDFKGRVTMTTDTSTSTAYMELRSLRSDDTAVYYCARIGDSSPSDYWGQGTLVTVSSTRGMRTEDLPKAVVFLEPQWYRVLEKDSVTLKCQGAYSPEDNSTQWFHNESLISSQASSYFIDAATVDDSGEYRCQTNLSTLSDPVQLEVHIGWLLLQAPRWVFKEEDPIHLRCHSWKNTALHKVTYLQNGKGRKYFHHNSDFYIPKATLKDSGSYFCRGLVGSKNVSSETVNITITQGLAVPTISSFFPPGYQVSFCLVMVLLFAVDTGLYFSVK

SEQ ID NO: 45009 - protein, 722 aa, synthetic construct
MALPVTALLLPLALLLHAARPDIVMTQSPATLSVSPGERATLSCRASQSVSNDVVWYQQKPGQAPRLLIYYASNRYTGIPARFSGSGSGTEFTLTISSLQSEDFAVYYCQQDYTSPWTFGQGTKLEIKRLEGQPKANPTVTLFPPSSEELQANKATLVCLISDFYPGAVTVAWKADGSPVKAGVETTKPSKQSNNKYAASSYLSLTPEQWKSHRSYSCQVTHEGSTVEKTVAPTECSGSQSFGLLDPKLCYLLDGILFIYGVILTALFLRVKFSRSADAPAYQQGQNQLYNELNLGRREEYDVLDKRRGRDPEMGGKPQRRKNPQEGLYNELQKDKMAEAYSEIGMKGERRRGKGHDGLYQGLSTATKDTYDALHMQALPPRRAKRSGSGATNFSLLKQAGDVEENPGPTSMDWIWRILFLVGAATGAHSFEEVQLVQSGAEVKKPGASVRVSCKASGYTFTNYGMNWVRQAPGQGLEWMGWINTYTGEPTYADDFKGRVTMTTDTSTSTAYMELRSLRSDDTAVYYCARIGDSSPSDYWGQGTLVTVSSTRASTKGPSVFPLAPSSKSTSGGTAALGCLVKDYFPEPVTVSWNSGALTSGVHTFPAVLQSSGLYSLSSVVTVPSSSLGTQTYICNVNHKPSNTKVDKRVEPKSCGTITQGLAVSTISSFFPPGYQVSFCLVMVLLFAVDTGLYFSVKTNIRSSTRDWKDHKFKWRKDPQDK

SEQ ID NO: 45010 - protein, 737 aa, synthetic construct
MALPVTALLLPLALLLHAARPDIVMTQSPATLSVSPGERATLSCRASQSVSNDVVWYQQKPGQAPRLLIYYASNRYTGIPARFSGSGSGTEFTLTISSLQSEDFAVYYCQQDYTSPWTFGQGTKLEIKRLEDLKNVFPPEVAVFEPSEAEISHTQKATLVCLATGFYPDHVELSWWVNGKEVHSGVSTDPQPLKEQPALNDSRYCLSSRLRVSATFWQNPRNHFRCQVQFYGLSENDEWTQDRAKPVTQIVSAEAWGRADCGSQSFGLLDPKLCYLLDGILFIYGVILTALFLRVKFSRSADAPAYQQGQNQLYNELNLGRREEYDVLDKRRGRDPEMGGKPQRRKNPQEGLYNELQKDKMAEAYSEIGMKGERRRGKGHDGLYQGLSTATKDTYDALHMQALPPRRAKRSGSGATNFSLLKQAGDVEENPGPTSMDWIWRILFLVGAATGAHSFEEVQLVQSGAEVKKPGASVRVSCKASGYTFTNYGMNWVRQAPGQGLEWMGWINTYTGEPTYADDFKGRVTMTTDTSTSTAYMELRSLRSDDTAVYYCARIGDSSPSDYWGQGTLVTVSSTRIQNPDPAVYQLRDSKSSDKSVCLFTDFDSQTNVSQSKDSDVYITDKTVLDMRSMDFKSNSAVAWSNKSDFACANAFNNSIIPEDTFFPSPESSCGTITQGLAVSTISSFFPPGYQVSFCLVMVLLFAVDTGLYFSVKTNIRSSTRDWKDHKFKWRKDPQDK

SEQ ID NO: 45011 - protein, 712 aa, synthetic construct
MALPVTALLLPLALLLHAARPDIVMTQSPATLSVSPGERATLSCRASQSVSNDVVWYQQKPGQAPRLLIYYASNRYTGIPARFSGSGSGTEFTLTISSLQSEDFAVYYCQQDYTSPWTFGQGTKLEIKRLEDLKNVFPPEVAVFEPSEAEISHTQKATLVCLATGFYPDHVELSWWVNGKEVHSGVSTDPQPLKEQPALNDSRYCLSSRLRVSATFWQNPRNHFRCQVQFYGLSENDEWTQDRAKPVTQIVSAEAWGRADCGSQSFGLLDPKLCYLLDGILFIYGVILTALFLRVKFSRSADAPAYQQGQNQLYNELNLGRREEYDVLDKRRGRDPEMGGKPQRRKNPQEGLYNELQKDKMAEAYSEIGMKGERRRGKGHDGLYQGLSTATKDTYDALHMQALPPRRAKRSGSGATNFSLLKQAGDVEENPGPTSMDWIWRILFLVGAATGAHSFEEVQLVQSGAEVKKPGASVRVSCKASGYTFTNYGMNWVRQAPGQGLEWMGWINTYTGEPTYADDFKGRVTMTTDTSTSTAYMELRSLRSDDTAVYYCARIGDSSPSDYWGQGTLVTVSSTRIQNPDPAVYQLRDSKSSDKSVCLFTDFDSQTNVSQSKDSDVYITDKTVLDMRSMDFKSNSAVAWSNKSDFACANAFNNSIIPEDTFFPSPESSCGTITQGLAVSTISSFFPPGYQVSFCLVMVLLFAVDTGLYFSV

SEQ ID NO: 45012 - protein, 713 aa, synthetic construct
MALPVTALLLPLALLLHAARPDIVMTQSPATLSVSPGERATLSCRASQSVSNDVVWYQQKPGQAPRLLIYYASNRYTGIPARFSGSGSGTEFTLTISSLQSEDFAVYYCQQDYTSPWTFGQGTKLEIKRLEDLKNVFPPEVAVFEPSEAEISHTQKATLVCLATGFYPDHVELSWWVNGKEVHSGVSTDPQPLKEQPALNDSRYCLSSRLRVSATFWQNPRNHFRCQVQFYGLSENDEWTQDRAKPVTQIVSAEAWGRADCGSQSFGLLDPKLCYLLDGILFIYGVILTALFLRVKFSRSADAPAYQQGQNQLYNELNLGRREEYDVLDKRRGRDPEMGGKPQRRKNPQEGLYNELQKDKMAEAYSEIGMKGERRRGKGHDGLYQGLSTATKDTYDALHMQALPPRRAKRSGSGATNFSLLKQAGDVEENPGPTSMDWIWRILFLVGAATGAHSFEEVQLVQSGAEVKKPGASVRVSCKASGYTFTNYGMNWVRQAPGQGLEWMGWINTYTGEPTYADDFKGRVTMTTDTSTSTAYMELRSLRSDDTAVYYCARIGDSSPSDYWGQGTLVTVSSTRIQNPDPAVYQLRDSKSSDKSVCLFTDFDSQTNVSQSKDSDVYITDKTVLDMRSMDFKSNSAVAWSNKSDFACANAFNNSIIPEDTFFPSPESSCGTITQGLAVSTISSFFPPGYQVSFCLVMVLLFAVDTGLYFSVK

SEQ ID NO: 45013 - protein, 714 aa, synthetic construct
MALPVTALLLPLALLLHAARPDIVMTQSPATLSVSPGERATLSCRASQSVSNDVVWYQQKPGQAPRLLIYYASNRYTGIPARFSGSGSGTEFTLTISSLQSEDFAVYYCQQDYTSPWTFGQGTKLEIKRLEDLKNVFPPEVAVFEPSEAEISHTQKATLVCLATGFYPDHVELSWWVNGKEVHSGVSTDPQPLKEQPALNDSRYCLSSRLRVSATFWQNPRNHFRCQVQFYGLSENDEWTQDRAKPVTQIVSAEAWGRADCGSQSFGLLDPKLCYLLDGILFIYGVILTALFLRVKFSRSADAPAYQQGQNQLYNELNLGRREEYDVLDKRRGRDPEMGGKPQRRKNPQEGLYNELQKDKMAEAYSEIGMKGERRRGKGHDGLYQGLSTATKDTYDALHMQALPPRRAKRSGSGATNFSLLKQAGDVEENPGPTSMDWIWRILFLVGAATGAHSFEEVQLVQSGAEVKKPGASVRVSCKASGYTFTNYGMNWVRQAPGQGLEWMGWINTYTGEPTYADDFKGRVTMTTDTSTSTAYMELRSLRSDDTAVYYCARIGDSSPSDYWGQGTLVTVSSTRIQNPDPAVYQLRDSKSSDKSVCLFTDFDSQTNVSQSKDSDVYITDKTVLDMRSMDFKSNSAVAWSNKSDFACANAFNNSIIPEDTFFPSPESSCGTITQGLAVSTISSFFPPGYQVSFCLVMVLLFAVDTGLYFSVKT

SEQ ID NO: 45014 - protein, 650 aa, synthetic construct; identical to SEQ ID NO: 12195

SEQ ID NO: 45015 - protein, 620 aa, synthetic construct
MALPVTALLLPLALLLHAARPDIVMTQSPATLSVSPGERATLSCRASQSVSNDVVWYQQKPGQAPRLLIYYASNRYTGIPARFSGSGSGTEFTLTISSLQSEDFAVYYCQQDYTSPWTFGQGTKLEIKRLEDLKNVFPPEVAVFEPSEAEISHTQKATLVCLATGFYPDHVELSWWVNGKEVHSGVCTDPQPLKEQPALNDSRYCLSSRLRVSATFWQNPRNHFRCQVQFYGLSENDEWTQDRAKPVTQIVSAEAWGRADCGFTSESYQQGVLSAYYMYLLLLLKSVVYFAIITCCLLRRTAFCCNGEKSRAKRSGSGATNFSLLKQAGDVEENPGPTSMDWIWRILFLVGAATGAHSFEEVQLVQSGAEVKKPGASVRVSCKASGYTFTNYGMNWVRQAPGQGLEWMGWINTYTGEPTYADDFKGRVTMTTDTSTSTAYMELRSLRSDDTAVYYCARIGDSSPSDYWGQGTLVTVSSTRIQNPDPAVYQLRDSKSSDKSVCLFTDFDSQTNVSQSKDSDVYITDKCVLDMRSMDFKSNSAVAWSNKSDFACANAFNNSIIPEDTFFPSPESSCDVKLVEKSFETDTNLNFQNLSVIGFRILLLKVAGFNLLMTLRLWSS

SEQ ID NO: 45016 - protein, 626 aa, synthetic construct
MALPVTALLLPLALLLHAARPDIVMTQSPATLSVSPGERATLSCRASQSVSNDVVWYQQKPGQAPRLLIYYASNRYTGIPARFSGSGSGTEFTLTISSLQSEDFAVYYCQQDYTSPWTFGQGTKLEIKRLEDKQLDADVSPKPTIFLPSIAETKLQKAGTYLCLLEKFFPDVIKIHWQEKKSNTILGSQEGNTMKTNDTYMKFSWLTVPEKSLDKEHRCIVRHENNKNGVDQEIIFPPIKTDVITMDPKDNCSKDANDTLLLQLTNTSAYYMYEILLGKATLYAVLVSALVLMAMVKRKDSRGRAKRSGSGATNFSLLKQAGDVEENPGPTSMDWIWRILFLVGAATGAHSFEEVQLVQSGAEVKKPGASVRVSCKASGYTFTNYGMNWVRQAPGQGLEWMGWINTYTGEPTYADDFKGRVTMTTDTSTSTAYMELRSLRSDDTAVYYCARIGDSSPSDYWGQGTLVTVSSTRSQPHTKPSVFVMKNGTNVACLVKEFYPKDIRINLVSSKKITEFDPAIVISPSGKYNAVKLGKYEDSNSVTCSVQHDNKTVHSTDFEVKTDSTDHVKPKETENTKQPSKSCHKPKAIVHTEKVNMMSLTVIGFRILLLKVAGFNLLMTLRLWSS

SEQ ID NO: 45017 - protein, 626 aa, synthetic construct
MALPVTALLLPLALLLHAARPDIVMTQSPATLSVSPGERATLSCRASQSVSNDVVWYQQKPGQAPRLLIYYASNRYTGIPARFSGSGSGTEFTLTISSLQSEDFAVYYCQQDYTSPWTFGQGTKLEIKRLEDKQLDADVSPKPTIFLPSIAETKLQKAGTYLCLLEKFFPDVIKIHWQEKKSNTILGSQEGNTMKTNDTYMKFSWLTVPEKSLDKEHRCIVRHENNKNGVDQEIIFPPIKTDVITMDPKDNCSKDANDTLLLQLTNTSATILYEILLGKATLYAVLVSALVLMAMVKRKDSRGRAKRSGSGATNFSLLKQAGDVEENPGPTSMDWIWRILFLVGAATGAHSFEEVQLVQSGAEVKKPGASVRVSCKASGYTFTNYGMNWVRQAPGQGLEWMGWINTYTGEPTYADDFKGRVTMTTDTSTSTAYMELRSLRSDDTAVYYCARIGDSSPSDYWGQGTLVTVSSTRSQPHTKPSVFVMKNGTNVACLVKEFYPKDIRINLVSSKKITEFDPAIVISPSGKYNAVKLGKYEDSNSVTCSVQHDNKTVHSTDFEVKTDSTDHVKPKETENTKQPSKSCHKPKAIVHTEKVNMMSLTVIGFRILLLKVAGFNLLMTLRLWSS

SEQ ID NO: 45018 - protein, 626 aa, synthetic construct
MALPVTALLLPLALLLHAARPDIVMTQSPATLSVSPGERATLSCRASQSVSNDVVWYQQKPGQAPRLLIYYASNRYTGIPARFSGSGSGTEFTLTISSLQSEDFAVYYCQQDYTSPWTFGQGTKLEIKRLEDKQLDADVSPKPTIFLPSIAETKLQKAGTYLCLLEKFFPDVIKIHWQEKKSNTILGSQEGNTMKTNDTYMKFSWLTVPEKSLDKEHRCIVRHENNKNGVDQEIIFPPIKTDVITMDPKDNCSKDANDTLLLQLTNTSAYYMYEILLGKATLYAVLVSALVLMAMVKRKDSRGRAKRSGSGATNFSLLKQAGDVEENPGPTSMDWIWRILFLVGAATGAHSFEEVQLVQSGAEVKKPGASVRVSCKASGYTFTNYGMNWVRQAPGQGLEWMGWINTYTGEPTYADDFKGRVTMTTDTSTSTAYMELRSLRSDDTAVYYCARIGDSSPSDYWGQGTLVTVSSTRSQPHTKPSVFVMKNGTNVACLVKEFYPKDIRINLVSSKKITEFDPAIVISPSGKYNAVKLGKYEDSNSVTCSVQHDNKTVHSTDFEVKTDSTDHVKPKETENTKQPSKSCHKPKAIVHTEKVNMMSLTVLGFRILLLKVAGFNLLMTLRLWSS

SEQ ID NO: 45019 - protein, 626 aa, synthetic construct
MALPVTALLLPLALLLHAARPDIVMTQSPATLSVSPGERATLSCRASQSVSNDVVWYQQKPGQAPRLLIYYASNRYTGIPARFSGSGSGTEFTLTISSLQSEDFAVYYCQQDYTSPWTFGQGTKLEIKRLEDKQLDADVSPKPTIFLPSIAETKLQKAGTYLCLLEKFFPDVIKIHWQEKKSNTILGSQEGNTMKTNDTYMKFSWLTVPEKSLDKEHRCIVRHENNKNGVDQEIIFPPIKTDVITMDPKDNCSKDANDTLLLQLTNTSATILYEILLGKATLYAVLVSALVLMAMVKRKDSRGRAKRSGSGATNFSLLKQAGDVEENPGPTSMDWIWRILFLVGAATGAHSFEEVQLVQSGAEVKKPGASVRVSCKASGYTFTNYGMNWVRQAPGQGLEWMGWINTYTGEPTYADDFKGRVTMTTDTSTSTAYMELRSLRSDDTAVYYCARIGDSSPSDYWGQGTLVTVSSTRSQPHTKPSVFVMKNGTNVACLVKEFYPKDIRINLVSSKKITEFDPAIVISPSGKYNAVKLGKYEDSNSVTCSVQHDNKTVHSTDFEVKTDSTDHVKPKETENTKQPSKSCHKPKAIVHTEKVNMMSLTVLGFRILLLKVAGFNLLMTLRLWSS

SEQ ID NO: 45020 - protein, 620 aa, synthetic construct
MALPVTALLLPLALLLHAARPDIVMTQSPATLSVSPGERATLSCRASQSVSNDVVWYQQKPGQAPRLLIYYASNRYTGIPARFSGSGSGTEFTLTISSLQSEDFAVYYCQQDYTSPWTFGQGTKLEIKRLEDLKNVFPPEVAVFEPSEAEISHTQKATLVCLATGFYPDHVELSWWVNGKEVHSGVCTDPQPLKEQPALNDSRYCLSSRLRVSATFWQNPRNHFRCQVQFYGLSENDEWTQDRAKPVTQIVSAEAWGRADCGFTSESYQQGVLSATILYLLLLLKSVVYFAIITCCLLRRTAFCCNGEKSRAKRSGSGATNFSLLKQAGDVEENPGPTSMDWIWRILFLVGAATGAHSFEEVQLVQSGAEVKKPGASVRVSCKASGYTFTNYGMNWVRQAPGQGLEWMGWINTYTGEPTYADDFKGRVTMTTDTSTSTAYMELRSLRSDDTAVYYCARIGDSSPSDYWGQGTLVTVSSTRIQNPDPAVYQLRDSKSSDKSVCLFTDFDSQTNVSQSKDSDVYITDKCVLDMRSMDFKSNSAVAWSNKSDFACANAFNNSIIPEDTFFPSPESSCDVKLVEKSFETDTNLNFQNLSVIGLRMLFAKTVAVNFLLTAKLFFL

SEQ ID NO: 45021 - protein, 649 aa, synthetic construct
MALPVTALLLPLALLLHAARPDIVMTQSPATLSVSPGERATLSCRASQSVSNDVVWYQQKPGQAPRLLIYYASNRYTGIPARFSGSGSGTEFTLTISSLQSEDFAVYYCQQDYTSPWTFGQGTKLEIKRLEDLKNVFPPEVAVFEPSEAEISHTQKATLVCLATGFYPDHVELSWWVNGKEVHSGVSTDPQPLKEQPALNDSRYCLSSRLRVSATFWQNPRNHFRCQVQFYGLSENDEWTQDRAKPVTQIVSAEAWGRADCGSSKDANDTLLLQLTNTSAYYMYLLLLLKSVVYFAIITCCLLRRTAFCCNGEKSRAKRSGSGATNFSLLKQAGDVEENPGPTSMDWIWRILFLVGAATGAHSFEEVQLVQSGAEVKKPGASVRVSCKASGYTFTNYGMNWVRQAPGQGLEWMGWINTYTGEPTYADDFKGRVTMTTDTSTSTAYMELRSLRSDDTAVYYCARIGDSSPSDYWGQGTLVTVSSTRIQNPDPAVYQLRDSKSSDKSVCLFTDFDSQTNVSQSKDSDVYITDKTVLDMRSMDFKSNSAVAWSNKSDFACANAFNNSIIPEDTFFPSPESSCGTEVKTDSTDHVKPKETENTKQPSKSCHKPKAIVHTEKVNMMSLTVLGLRMLFAKTVAVNFLLTAKLFFL

SEQ ID NO: 45022 - protein, 619 aa, synthetic construct
MALPVTALLLPLALLLHAARPDIVMTQSPATLSVSPGERATLSCRASQSVSNDVVWYQQKPGQAPRLLIYYASNRYTGIPARFSGSGSGTEFTLTISSLQSEDFAVYYCQQDYTSPWTFGQGTKLEIKRLEDLKNVFPPEVAVFEPSEAEISHTQKATLVCLATGFYPDHVELSWWVNGKEVHSGVCTDPQPLKEQPALNDSRYCLSSRLRVSATFWQNPRNHFRCQVQFYGLSENDEWTQDRAKPVTQIVSAEAWGRADCDVKLVEKSFETDTNLNFQNLSVIGFRILLLKVAGFNLLMTLRLWSSRAKRSGSGATNFSLLKQAGDVEENPGPTSMDWIWRILFLVGAATGAHSFEEVQLVQSGAEVKKPGASVRVSCKASGYTFTNYGMNWVRQAPGQGLEWMGWINTYTGEPTYADDFKGRVTMTTDTSTSTAYMELRSLRSDDTAVYYCARIGDSSPSDYWGQGTLVTVSSTRIQNPDPAVYQLRDSKSSDKSVCLFTDFDSQTNVSQSKDSDVYITDKCVLDMRSMDFKSNSAVAWSNKSDFACANAFNNSIIPEDTFFPSPESSCGFTSESYQQGVLSATILYEILLGKATLYAVLVSALVLMAMVKRKDSRG

SEQ ID NO: 45023 - protein, 619 aa, synthetic construct
MALPVTALLLPLALLLHAARPDIVMTQSPATLSVSPGERATLSCRASQSVSNDVVWYQQKPGQAPRLLIYYASNRYTGIPARFSGSGSGTEFTLTISSLQSEDFAVYYCQQDYTSPWTFGQGTKLEIKRLEDLKNVFPPEVAVFEPSEAEISHTQKATLVCLATGFYPDHVELSWWVNGKEVHSGVCTDPQPLKEQPALNDSRYCLSSRLRVSATFWQNPRNHFRCQVQFYGLSENDEWTQDRAKPVTQIVSAEAWGRADCGFTSESYQQGVLSATNLSVIGFRILLLKVAGFNLLMTLRLWSSRAKRSGSGATNFSLLKQAGDVEENPGPTSMDWIWRILFLVGAATGAHSFEEVQLVQSGAEVKKPGASVRVSCKASGYTFTNYGMNWVRQAPGQGLEWMGWINTYTGEPTYADDFKGRVTMTTDTSTSTAYMELRSLRSDDTAVYYCARIGDSSPSDYWGQGTLVTVSSTRIQNPDPAVYQLRDSKSSDKSVCLFTDFDSQTNVSQSKDSDVYITDKCVLDMRSMDFKSNSAVAWSNKSDFACANAFNNSIIPEDTFFPSPESSCDVKLVEKSFETDTNLNFQILYEILLGKATLYAVLVSALVLMAMVKRKDSRG

SEQ ID NO: 45024 - protein, 619 aa, synthetic construct; identical to SEQ ID NO: 45022

SEQ ID NO: 45025 - protein, 619 aa, synthetic construct; identical to SEQ ID NO: 45023

SEQ ID NO: 45026 - protein, 619 aa, synthetic construct; identical to SEQ ID NO: 45022

SEQ ID NO: 45027 - protein, 622 aa, synthetic construct
MALPVTALLLPLALLLHAARPDIVMTQSPATLSVSPGERATLSCRASQSVSNDVVWYQQKPGQAPRLLIYYASNRYTGIPARFSGSGSGTEFTLTISSLQSEDFAVYYCQQDYTSPWTFGQGTKLEIKRLEADVSPKPTIFLPSIAETKLQKAGTYLCLLEKFFPDVIKIHWQEKKSNTILGSQEGNTMKTNDTYMKFSWLTVPEKSLDKEHRCIVRHENNKNGVDQEIIFPPIKTDVITMDPKDNCSKDANDTLLLQLTNTSAYYMYLLLLLKSVVYFAIITCCLLRRTAFCCNGEKSRAKRSGSGATNFSLLKQAGDVEENPGPTSMDWIWRILFLVGAATGAHSFEEVQLVQSGAEVKKPGASVRVSCKASGYTFTNYGMNWVRQAPGQGLEWMGWINTYTGEPTYADDFKGRVTMTTDTSTSTAYMELRSLRSDDTAVYYCARIGDSSPSDYWGQGTLVTVSSTRSQPHTKPSVFVMKNGTNVACLVKEFYPKDIRINLVSSKKITEFDPAIVISPSGKYNAVKLGKYEDSNSVTCSVQHDNKTVHSTDFEVKTDSTDHVKPKETENTKQPSKSCHKPKAIVHTEKVNMMSLTVIGFRILLLKVAGFNLLMTLRLWSS

SEQ ID NO: 45028 - protein, 622 aa, synthetic construct
MALPVTALLLPLALLLHAARPDIVMTQSPATLSVSPGERATLSCRASQSVSNDVVWYQQKPGQAPRLLIYYASNRYTGIPARFSGSGSGTEFTLTISSLQSEDFAVYYCQQDYTSPWTFGQGTKLEIKRLEADVSPKPTIFLPSIAETKLQKAGTYLCLLEKFFPDVIKIHWQEKKSNTILGSQEGNTMKTNDTYMKFSWLTVPEKSLDKEHRCIVRHENNKNGVDQEIIFPPIKTDVITMDPKDNCSKDANDTLLLQLTNTSAYYMYLLLLLKSVVYFAIITCCLLRRTAFCCNGEKSRAKRSGSGATNFSLLKQAGDVEENPGPTSMDWIWRILFLVGAATGAHSFEEVQLVQSGAEVKKPGASVRVSCKASGYTFTNYGMNWVRQAPGQGLEWMGWINTYTGEPTYADDFKGRVTMTTDTSTSTAYMELRSLRSDDTAVYYCARIGDSSPSDYWGQGTLVTVSSTRSQPHTKPSVFVMKNGTNVACLVKEFYPKDIRINLVSSKKITEFDPAIVISPSGKYNAVKLGKYEDSNSVTCSVQHDNKTVHSTDFEVKTDSTDHVKPKETENTKQPSKSCHKPKAIVHTEKVNMMSLTVLGFRILLLKVAGFNLLMTLRLWSS

SEQ ID NO: 45029 - protein, 619 aa, synthetic construct; identical to SEQ ID NO: 45022

SEQ ID NO: 45030 - protein, 623 aa, synthetic construct
MALPVTALLLPLALLLHAARPDIVMTQSPATLSVSPGERATLSCRASQSVSNDVVWYQQKPGQAPRLLIYYASNRYTGIPARFSGSGSGTEFTLTISSLQSEDFAVYYCQQDYTSPWTFGQGTKLEIKRLEIQNPDPAVYQLRDSKSSDKSVCLFTDFDSQTNVSQSKDSDVYITDKCVLDMRSMDFKSNSAVAWSNKSDFACANAFNNSIIPEDTFFPSPESSCGFTSESYQQGVLSATILYEILLGKATLYAVLVSALVLMAMVKRKDSRGRAKRSGSGVKQTLNFDLLKLAGDVESNPGPTSMDWIWRILFLVGAATGAHSFEEVQLVQSGAEVKKPGASVRVSCKASGYTFTNYGMNWVRQAPGQGLEWMGWINTYTGEPTYADDFKGRVTMTTDTSTSTAYMELRSLRSDDTAVYYCARIGDSSPSDYWGQGTLVTVSSTREDLKNVFPPEVAVFEPSEAEISHTQKATLVCLATGFYPDHVELSWWVNGKEVHSGVCTDPQPLKEQPALNDSRYCLSSRLRVSATFWQNPRNHFRCQVQFYGLSENDEWTQDRAKPVTQIVSAEAWGRADCDVKLVEKSFETDTNLNFQNLSVIGFRILLLKVAGFNLLMTLRLWSS

SEQ ID NO: 45031 - protein, 754 aa, synthetic construct
MALPVTALLLPLALLLHAARPEVQLVESGGGLVQPGGSLRLSCAASGFSFSDFWMSWVRQAPGKGLEWVATISQAGSEKDYVDSVKGRFTISRDNAKKSLYLQMNSLRAEDTAVYYCASGVYSFDYRGQGTLVTVSSGTGGGGSGGGGSGGGGSEFDIVMTQSPATLSVSPGERATLSCRASQSVSNDVVWYQQKPGQAPRLLIYYASNRYTGIPARFSGSGSGTEFTLTISSLQSEDFAVYYCQQDYTSPWTFGQGTKLEIKRLEDLKNVFPPEVAVFEPSEAEISHTQKATLVCLATGFYPDHVELSWWVNGKEVHSGVCTDPQPLKEQPALNDSRYCLSSRLRVSATFWQNPRNHFRCQVQFYGLSENDEWTQDRAKPVTQIVSAEAWGRADCDVKLVEKSFETDTNLNFQNLSVIGFRILLLKVAGFNLLMTLRLWSSRAKRSGSGATNFSLLKQAGDVEENPGPTSMDWIWRILFLVGAATGAHSFEEVQLVQSGAEVKKPGASVRVSCKASGYTFTNYGMNWVRQAPGQGLEWMGWINTYTGEPTYADDFKGRVTMTTDTSTSTAYMELRSLRSDDTAVYYCARIGDSSPSDYWGQGTLVTVSSTRIQNPDPAVYQLRDSKSSDKSVCLFTDFDSQTNVSQSKDSDVYITDKCVLDMRSMDFKSNSAVAWSNKSDFACANAFNNSIIPEDTFFPSPESSCGFTSESYQQGVLSATILYEILLGKATLYAVLVSALVLMAMVKRKDSRG

SEQ ID NO: 45032 - protein, 758 aa, synthetic construct
MALPVTALLLPLALLLHAARPEVQLVESGGGLVQPGGSLRLSCAASGFSFSDFWMSWVRQAPGKGLEWVATISQAGSEKDYVDSVKGRFTISRDNAKKSLYLQMNSLRAEDTAVYYCASGVYSFDYRGQGTLVTVSSGTGGGGSGGGGSGGGGSEFDIVMTQSPATLSVSPGERATLSCRASQSVSNDVVWYQQKPGQAPRLLIYYASNRYTGIPARFSGSGSGTEFTLTISSLQSEDFAVYYCQQDYTSPWTFGQGTKLEIKRLEIQNPDPAVYQLRDSKSSDKSVCLFTDFDSQTNVSQSKDSDVYITDKCVLDMRSMDFKSNSAVAWSNKSDFACANAFNNSIIPEDTFFPSPESSCGFTSESYQQGVLSATILYEILLGKATLYAVLVSALVLMAMVKRKDSRGRAKRSGSGVKQTLNFDLLKLAGDVESNPGPTSMDWIWRILFLVGAATGAHSFEEVQLVQSGAEVKKPGASVRVSCKASGYTFTNYGMNWVRQAPGQGLEWMGWINTYTGEPTYADDFKGRVTMTTDTSTSTAYMELRSLRSDDTAVYYCARIGDSSPSDYWGQGTLVTVSSTREDLKNVFPPEVAVFEPSEAEISHTQKATLVCLATGFYPDHVELSWWVNGKEVHSGVCTDPQPLKEQPALNDSRYCLSSRLRVSATFWQNPRNHFRCQVQFYGLSENDEWTQDRAKPVTQIVSAEAWGRADCDVKLVEKSFETDTNLNFQNLSVIGFRILLLKVAGFNLLMTLRLWSS

SEQ ID NO: 45033 - protein, 891 aa, synthetic construct
MALPVTALLLPLALLLHAARPEVQLVESGGGLVQPGGSLRLSCAASGFSFSDFWMSWVRQAPGKGLEWVATISQAGSEKDYVDSVKGRFTISRDNAKKSLYLQMNSLRAEDTAVYYCASGVYSFDYRGQGTLVTVSSGTGGGGSGGGGSGGGGSEFDIVMTQSPATLSVSPGERATLSCRASQSVSNDVVWYQQKPGQAPRLLIYYASNRYTGIPARFSGSGSGTEFTLTISSLQSEDFAVYYCQQDYTSPWTFGQGTKLEIKRLEDLKNVFPPEVAVFEPSEAEISHTQKATLVCLATGFYPDHVELSWWVNGKEVHSGVCTDPQPLKEQPALNDSRYCLSSRLRVSATFWQNPRNHFRCQVQFYGLSENDEWTQDRAKPVTQIVSAEAWGRADCDVKLVEKSFETDTNLNFQNLSVIGFRILLLKVAGFNLLMTLRLWSSRAKRSGSGATNFSLLKQAGDVEENPGPTSMDWIWRILFLVGAATGAHSGPQLQLQESGPGLVKPSETLSLTCTVSGDSISSGDYYWGWIRQPPGKGLEWIGHIYYSGVTYYNPSLKSRVTISVDTSRNQFSLKLSSVTAADTAVYYCTREDSSNWRSRGQGTLVTVSSGSGGGGSGGGGSGGGGSFEEVQLVQSGAEVKKPGASVRVSCKASGYTFTNYGMNWVRQAPGQGLEWMGWINTYTGEPTYADDFKGRVTMTTDTSTSTAYMELRSLRSDDTAVYYCARIGDSSPSDYWGQGTLVTVSSTRIQNPDPAVYQLRDSKSSDKSVCLFTDFDSQTNVSQSKDSDVYITDKCVLDMRSMDFKSNSAVAWSNKSDFACANAFNNSIIPEDTFFPSPESSCGFTSESYQQGVLSATILYEILLGKATLYAVLVSALVLMAMVKRKDSRG

SEQ ID NO: 45034 - protein, 895 aa, synthetic construct
MALPVTALLLPLALLLHAARPEVQLVESGGGLVQPGGSLRLSCAASGFSFSDFWMSWVRQAPGKGLEWVATISQAGSEKDYVDSVKGRFTISRDNAKKSLYLQMNSLRAEDTAVYYCASGVYSFDYRGQGTLVTVSSGTGGGGSGGGGSGGGGSEFDIVMTQSPATLSVSPGERATLSCRASQSVSNDVVWYQQKPGQAPRLLIYYASNRYTGIPARFSGSGSGTEFTLTISSLQSEDFAVYYCQQDYTSPWTFGQGTKLEIKRLEIQNPDPAVYQLRDSKSSDKSVCLFTDFDSQTNVSQSKDSDVYITDKCVLDMRSMDFKSNSAVAWSNKSDFACANAFNNSIIPEDTFFPSPESSCGFTSESYQQGVLSATILYEILLGKATLYAVLVSALVLMAMVKRKDSRGRAKRSGSGVKQTLNFDLLKLAGDVESNPGPTSMDWIWRILFLVGAATGAHSGPQLQLQESGPGLVKPSETLSLTCTVSGDSISSGDYYWGWIRQPPGKGLEWIGHIYYSGVTYYNPSLKSRVTISVDTSRNQFSLKLSSVTAADTAVYYCTREDSSNWRSRGQGTLVTVSSGSGGGGSGGGGSGGGGSFEEVQLVQSGAEVKKPGASVRVSCKASGYTFTNYGMNWVRQAPGQGLEWMGWINTYTGEPTYADDFKGRVTMTTDTSTSTAYMELRSLRSDDTAVYYCARIGDSSPSDYWGQGTLVTVSSTREDLKNVFPPEVAVFEPSEAEISHTQKATLVCLATGFYPDHVELSWWVNGKEVHSGVCTDPQPLKEQPALNDSRYCLSSRLRVSATFWQNPRNHFRCQVQFYGLSENDEWTQDRAKPVTQIVSAEAWGRADCDVKLVEKSFETDTNLNFQNLSVIGFRILLLKVAGFNLLMTLRLWSS

SEQ ID NO: 45035 - protein, 689 aa, synthetic construct
MALPVTALLLPLALLLHAARPDIVMTQSPATLSVSPGERATLSCRASQSVSNDVVWYQQKPGQAPRLLIYYASNRYTGIPARFSGSGSGTEFTLTISSLQSEDFAVYYCQQDYTSPWTFGQGTKLEIKRLEDLKNVFPPEVAVFEPSEAEISHTQKATLVCLATGFYPDHVELSWWVNGKEVHSGVCTDPQPLKEQPALNDSRYCLSSRLRVSATFWQNPRNHFRCQVQFYGLSENDEWTQDRAKPVTQIVSAEAWGRADCDVKLVEKSFETDTNLNFQNLSVIGFRILLLKVAGFNLLMTLRLWSSRAKRSGSGATNFSLLKQAGDVEENPGPTSMDWIWRILFLVGAATGAHSGPMDPDLEIRAAFLRQRNTALRTEVAELEQEVQRLENEVSQYETRYGPLGGGKGSGGGGSGGGGSGGGGSFEEVQLVQSGAEVKKPGASVRVSCKASGYTFTNYGMNWVRQAPGQGLEWMGWINTYTGEPTYADDFKGRVTMTTDTSTSTAYMELRSLRSDDTAVYYCARIGDSSPSDYWGQGTLVTVSSTRIQNPDPAVYQLRDSKSSDKSVCLFTDFDSQTNVSQSKDSDVYITDKCVLDMRSMDFKSNSAVAWSNKSDFACANAFNNSIIPEDTFFPSPESSCGFTSESYQQGVLSATILYEILLGKATLYAVLVSALVLMAMVKRKDSRG

SEQ ID NO: 45036 - protein, 693 aa, synthetic construct
MALPVTALLLPLALLLHAARPDIVMTQSPATLSVSPGERATLSCRASQSVSNDVVWYQQKPGQAPRLLIYYASNRYTGIPARFSGSGSGTEFTLTISSLQSEDFAVYYCQQDYTSPWTFGQGTKLEIKRLEIQNPDPAVYQLRDSKSSDKSVCLFTDFDSQTNVSQSKDSDVYITDKCVLDMRSMDFKSNSAVAWSNKSDFACANAFNNSIIPEDTFFPSPESSCGFTSESYQQGVLSATILYEILLGKATLYAVLVSALVLMAMVKRKDSRGRAKRSGSGVKQTLNFDLLKLAGDVESNPGPTSMDWIWRILFLVGAATGAHSGPMDPDLEIRAAFLRQRNTALRTEVAELEQEVQRLENEVSQYETRYGPLGGGKGSGGGGSGGGGSGGGGSFEEVQLVQSGAEVKKPGASVRVSCKASGYTFTNYGMNWVRQAPGQGLEWMGWINTYTGEPTYADDFKGRVTMTTDTSTSTAYMELRSLRSDDTAVYYCARIGDSSPSDYWGQGTLVTVSSTREDLKNVFPPEVAVFEPSEAEISHTQKATLVCLATGFYPDHVELSWWVNGKEVHSGVCTDPQPLKEQPALNDSRYCLSSRLRVSATFWQNPRNHFRCQVQFYGLSENDEWTQDRAKPVTQIVSAEAWGRADCDVKLVEKSFETDTNLNFQNLSVIGFRILLLKVAGFNLLMTLRLWSS

SEQ ID NO: 45037 - protein, 666 aa, synthetic construct
MALPVTALLLPLALLLHAARPDIVMTQSPATLSVSPGERATLSCRASQSVSNDVVWYQQKPGQAPRLLIYYASNRYTGIPARFSGSGSGTEFTLTISSLQSEDFAVYYCQQDYTSPWTFGQGTKLEIKRLEDLKNVFPPEVAVFEPSEAEISHTQKATLVCLATGFYPDHVELSWWVNGKEVHSGVCTDPQPLKEQPALNDSRYCLSSRLRVSATFWQNPRNHFRCQVQFYGLSENDEWTQDRAKPVTQIVSAEAWGRADCDVKLVEKSFETDTNLNFQNLSVIGFRILLLKVAGFNLLMTLRLWSSRAKRSGSGATNFSLLKQAGDVEENPGPTSMDWIWRILFLVGAATGAHSGPEVAALEKEVAALEKEVAALEKEVAALEKGSGGGGSGGGGSGGGGSFEEVQLVQSGAEVKKPGASVRVSCKASGYTFTNYGMNWVRQAPGQGLEWMGWINTYTGEPTYADDFKGRVTMTTDTSTSTAYMELRSLRSDDTAVYYCARIGDSSPSDYWGQGTLVTVSSTRIQNPDPAVYQLRDSKSSDKSVCLFTDFDSQTNVSQSKDSDVYITDKCVLDMRSMDFKSNSAVAWSNKSDFACANAFNNSIIPEDTFFPSPESSCGFTSESYQQGVLSATILYEILLGKATLYAVLVSALVLMAMVKRKDSRG

SEQ ID NO: 45038 - protein, 670 aa, synthetic construct
MALPVTALLLPLALLLHAARPDIVMTQSPATLSVSPGERATLSCRASQSVSNDVVWYQQKPGQAPRLLIYYASNRYTGIPARFSGSGSGTEFTLTISSLQSEDFAVYYCQQDYTSPWTFGQGTKLEIKRLEIQNPDPAVYQLRDSKSSDKSVCLFTDFDSQTNVSQSKDSDVYITDKCVLDMRSMDFKSNSAVAWSNKSDFACANAFNNSIIPEDTFFPSPESSCGFTSESYQQGVLSATILYEILLGKATLYAVLVSALVLMAMVKRKDSRGRAKRSGSGVKQTLNFDLLKLAGDVESNPGPTSMDWIWRILFLVGAATGAHSGPEVAALEKEVAALEKEVAALEKEVAALEKGSGGGGSGGGGSGGGGSFEEVQLVQSGAEVKKPGASVRVSCKASGYTFTNYGMNWVRQAPGQGLEWMGWINTYTGEPTYADDFKGRVTMTTDTSTSTAYMELRSLRSDDTAVYYCARIGDSSPSDYWGQGTLVTVSSTREDLKNVFPPEVAVFEPSEAEISHTQKATLVCLATGFYPDHVELSWWVNGKEVHSGVCTDPQPLKEQPALNDSRYCLSSRLRVSATFWQNPRNHFRCQVQFYGLSENDEWTQDRAKPVTQIVSAEAWGRADCDVKLVEKSFETDTNLNFQNLSVIGFRILLLKVAGFNLLMTLRLWSS

SEQ ID NO: 45039 - protein, 756 aa, synthetic construct
MALPVTALLLPLALLLHAARPDIVMTQSPATLSVSPGERATLSCRASQSVSNDVVWYQQKPGQAPRLLIYYASNRYTGIPARFSGSGSGTEFTLTISSLQSEDFAVYYCQQDYTSPWTFGQGTKLEIKRLEDLKNVFPPEVAVFEPSEAEISHTQKATLVCLATGFYPDHVELSWWVNGKEVHSGVCTDPQPLKEQPALNDSRYCLSSRLRVSATFWQNPRNHFRCQVQFYGLSENDEWTQDRAKPVTQIVSAEAWGRADCDVKLVEKSFETDTNLNFQNLSVIGFRILLLKVAGFNLLMTLRLWSSRAKRSGSGATNFSLLKQAGDVEENPGPTSMDWIWRILFLVGAATGAHSGPQVQLQESGGGLAQAGGSLRLSCAASGRTFSMGWFRQAPGKEREFVAAITYSGGSPYYASSVRGRFTISRDNAKNTVYLQMNSLKPEDTAVYYCAANPTYGSDWNAENWGQGTQVTVSSGSGGGGSGGGGSGGGGSFEEVQLVQSGAEVKKPGASVRVSCKASGYTFTNYGMNWVRQAPGQGLEWMGWINTYTGEPTYADDFKGRVTMTTDTSTSTAYMELRSLRSDDTAVYYCARIGDSSPSDYWGQGTLVTVSSTRIQNPDPAVYQLRDSKSSDKSVCLFTDFDSQTNVSQSKDSDVYITDKCVLDMRSMDFKSNSAVAWSNKSDFACANAFNNSIIPEDTFFPSPESSCGFTSESYQQGVLSATILYEILLGKATLYAVLVSALVLMAMVKRKDSRG

SEQ ID NO: 45040 - protein, 760 aa, synthetic construct
MALPVTALLLPLALLLHAARPDIVMTQSPATLSVSPGERATLSCRASQSVSNDVVWYQQKPGQAPRLLIYYASNRYTGIPARFSGSGSGTEFTLTISSLQSEDFAVYYCQQDYTSPWTFGQGTKLEIKRLEIQNPDPAVYQLRDSKSSDKSVCLFTDFDSQTNVSQSKDSDVYITDKCVLDMRSMDFKSNSAVAWSNKSDFACANAFNNSIIPEDTFFPSPESSCGFTSESYQQGVLSATILYEILLGKATLYAVLVSALVLMAMVKRKDSRGRAKRSGSGVKQTLNFDLLKLAGDVESNPGPTSMDWIWRILFLVGAATGAHSGPQVQLQESGGGLAQAGGSLRLSCAASGRTFSMGWFRQAPGKEREFVAAITYSGGSPYYASSVRGRFTISRDNAKNTVYLQMNSLKPEDTAVYYCAANPTYGSDWNAENWGQGTQVTVSSGSGGGGSGGGGSGGGGSFEEVQLVQSGAEVKKPGASVRVSCKASGYTFTNYGMNWVRQAPGQGLEWMGWINTYTGEPTYADDFKGRVTMTTDTSTSTAYMELRSLRSDDTAVYYCARIGDSSPSDYWGQGTLVTVSSTREDLKNVFPPEVAVFEPSEAEISHTQKATLVCLATGFYPDHVELSWWVNGKEVHSGVCTDPQPLKEQPALNDSRYCLSSRLRVSATFWQNPRNHFRCQVQFYGLSENDEWTQDRAKPVTQIVSAEAWGRADCDVKLVEKSFETDTNLNFQNLSVIGFRILLLKVAGFNLLMTLRLWSS

SEQ ID NO: 45041 - protein, 762 aa, synthetic construct
MALPVTALLLPLALLLHAARPEVQLVESGGSLVQPGGSLRLSCAASGFTFDDYAMSWVRQVPGKGLEWVSSINWSGTHTDYADSVKGRFTISRNNANNTLYLQMNSLKSEDTAVYYCAKNWRDAGTTWFEKSGSAGQGTQVTVSSGTGGGGSGGGGSGGGGSEFDIVMTQSPATLSVSPGERATLSCRASQSVSNDVVWYQQKPGQAPRLLIYYASNRYTGIPARFSGSGSGTEFTLTISSLQSEDFAVYYCQQDYTSPWTFGQGTKLEIKRLEDLKNVFPPEVAVFEPSEAEISHTQKATLVCLATGFYPDHVELSWWVNGKEVHSGVCTDPQPLKEQPALNDSRYCLSSRLRVSATFWQNPRNHFRCQVQFYGLSENDEWTQDRAKPVTQIVSAEAWGRADCDVKLVEKSFETDTNLNFQNLSVIGFRILLLKVAGFNLLMTLRLWSSRAKRSGSGATNFSLLKQAGDVEENPGPTSMDWIWRILFLVGAATGAHSFEEVQLVQSGAEVKKPGASVRVSCKASGYTFTNYGMNWVRQAPGQGLEWMGWINTYTGEPTYADDFKGRVTMTTDTSTSTAYMELRSLRSDDTAVYYCARIGDSSPSDYWGQGTLVTVSSTRIQNPDPAVYQLRDSKSSDKSVCLFTDFDSQTNVSQSKDSDVYITDKCVLDMRSMDFKSNSAVAWSNKSDFACANAFNNSIIPEDTFFPSPESSCGFTSESYQQGVLSATILYEILLGKATLYAVLVSALVLMAMVKRKDSRG

SEQ ID NO: 45042 - protein, 766 aa, synthetic construct
MALPVTALLLPLALLLHAARPEVQLVESGGSLVQPGGSLRLSCAASGFTFDDYAMSWVRQVPGKGLEWVSSINWSGTHTDYADSVKGRFTISRNNANNTLYLQMNSLKSEDTAVYYCAKNWRDAGTTWFEKSGSAGQGTQVTVSSGTGGGGSGGGGSGGGGSEFDIVMTQSPATLSVSPGERATLSCRASQSVSNDVVWYQQKPGQAPRLLIYYASNRYTGIPARFSGSGSGTEFTLTISSLQSEDFAVYYCQQDYTSPWTFGQGTKLEIKRLEIQNPDPAVYQLRDSKSSDKSVCLFTDFDSQTNVSQSKDSDVYITDKCVLDMRSMDFKSNSAVAWSNKSDFACANAFNNSIIPEDTFFPSPESSCGFTSESYQQGVLSATILYEILLGKATLYAVLVSALVLMAMVKRKDSRGRAKRSGSGVKQTLNFDLLKLAGDVESNPGPTSMDWIWRILFLVGAATGAHSFEEVQLVQSGAEVKKPGASVRVSCKASGYTFTNYGMNWVRQAPGQGLEWMGWINTYTGEPTYADDFKGRVTMTTDTSTSTAYMELRSLRSDDTAVYYCARIGDSSPSDYWGQGTLVTVSSTREDLKNVFPPEVAVFEPSEAEISHTQKATLVCLATGFYPDHVELSWWVNGKEVHSGVCTDPQPLKEQPALNDSRYCLSSRLRVSATFWQNPRNHFRCQVQFYGLSENDEWTQDRAKPVTQIVSAEAWGRADCDVKLVEKSFETDTNLNFQNLSVIGFRILLLKVAGFNLLMTLRLWSS

SEQ ID NO: 45043 - protein, 760 aa, synthetic construct
MALPVTALLLPLALLLHAARPEVQLLESGGGLVQPGGSLRLSCAASGFIFSSYAMSWVRQAPGKGQEWVSGVSGTGVNTYYADSVKGRFTISRDNSKNTLYLQMNSLRAEDTAVYYCASGKGWDSGSWYEDYRGQGTLVTVSSGTGGGGSGGGGSGGGGSEFDIVMTQSPATLSVSPGERATLSCRASQSVSNDVVWYQQKPGQAPRLLIYYASNRYTGIPARFSGSGSGTEFTLTISSLQSEDFAVYYCQQDYTSPWTFGQGTKLEIKRLEDLKNVFPPEVAVFEPSEAEISHTQKATLVCLATGFYPDHVELSWWVNGKEVHSGVCTDPQPLKEQPALNDSRYCLSSRLRVSATFWQNPRNHFRCQVQFYGLSENDEWTQDRAKPVTQIVSAEAWGRADCDVKLVEKSFETDTNLNFQNLSVIGFRILLLKVAGFNLLMTLRLWSSRAKRSGSGATNFSLLKQAGDVEENPGPTSMDWIWRILFLVGAATGAHSFEEVQLVQSGAEVKKPGASVRVSCKASGYTFTNYGMNWVRQAPGQGLEWMGWINTYTGEPTYADDFKGRVTMTTDTSTSTAYMELRSLRSDDTAVYYCARIGDSSPSDYWGQGTLVTVSSTRIQNPDPAVYQLRDSKSSDKSVCLFTDFDSQTNVSQSKDSDVYITDKCVLDMRSMDFKSNSAVAWSNKSDFACANAFNNSIIPEDTFFPSPESSCGFTSESYQQGVLSATILYEILLGKATLYAVLVSALVLMAMVKRKDSRG

SEQ ID NO: 45044 - protein, 764 aa, synthetic construct
MALPVTALLLPLALLLHAARPEVQLLESGGGLVQPGGSLRLSCAASGFIFSSYAMSWVRQAPGKGQEWVSGVSGTGVNTYYADSVKGRFTISRDNSKNTLYLQMNSLRAEDTAVYYCASGKGWDSGSWYEDYRGQGTLVTVSSGTGGGGSGGGGSGGGGSEFDIVMTQSPATLSVSPGERATLSCRASQSVSNDVVWYQQKPGQAPRLLIYYASNRYTGIPARFSGSGSGTEFTLTISSLQSEDFAVYYCQQDYTSPWTFGQGTKLEIKRLEIQNPDPAVYQLRDSKSSDKSVCLFTDFDSQTNVSQSKDSDVYITDKCVLDMRSMDFKSNSAVAWSNKSDFACANAFNNSIIPEDTFFPSPESSCGFTSESYQQGVLSATILYEILLGKATLYAVLVSALVLMAMVKRKDSRGRAKRSGSGVKQTLNFDLLKLAGDVESNPGPTSMDWIWRILFLVGAATGAHSFEEVQLVQSGAEVKKPGASVRVSCKASGYTFTNYGMNWVRQAPGQGLEWMGWINTYTGEPTYADDFKGRVTMTTDTSTSTAYMELRSLRSDDTAVYYCARIGDSSPSDYWGQGTLVTVSSTREDLKNVFPPEVAVFEPSEAEISHTQKATLVCLATGFYPDHVELSWWVNGKEVHSGVCTDPQPLKEQPALNDSRYCLSSRLRVSATFWQNPRNHFRCQVQFYGLSENDEWTQDRAKPVTQIVSAEAWGRADCDVKLVEKSFETDTNLNFQNLSVIGFRILLLKVAGFNLLMTLRLWSS

SEQ ID NO: 45045 - protein, 728 aa, synthetic construct
MALPVTALLLPLALLLHAARPMLPAPKNLVVSRITEDSARLSWTAPDAAFDSFPIRYIETLIWGEAIWLDVPGSERSYDLTGLKPGTEYAVVITGVKGGRFSSPLVASFTTGTGGGGSGGGGSGGGGSEFDIVMTQSPATLSVSPGERATLSCRASQSVSNDVVWYQQKPGQAPRLLIYYASNRYTGIPARFSGSGSGTEFTLTISSLQSEDFAVYYCQQDYTSPWTFGQGTKLEIKRLEDLKNVFPPEVAVFEPSEAEISHTQKATLVCLATGFYPDHVELSWWVNGKEVHSGVCTDPQPLKEQPALNDSRYCLSSRLRVSATFWQNPRNHFRCQVQFYGLSENDEWTQDRAKPVTQIVSAEAWGRADCDVKLVEKSFETDTNLNFQNLSVIGFRILLLKVAGFNLLMTLRLWSSRAKRSGSGATNFSLLKQAGDVEENPGPTSMDWIWRILFLVGAATGAHSFEEVQLVQSGAEVKKPGASVRVSCKASGYTFTNYGMNWVRQAPGQGLEWMGWINTYTGEPTYADDFKGRVTMTTDTSTSTAYMELRSLRSDDTAVYYCARIGDSSPSDYWGQGTLVTVSSTRIQNPDPAVYQLRDSKSSDKSVCLFTDFDSQTNVSQSKDSDVYITDKCVLDMRSMDFKSNSAVAWSNKSDFACANAFNNSIIPEDTFFPSPESSCGFTSESYQQGVLSATILYEILLGKATLYAVLVSALVLMAMVKRKDSRG

SEQ ID NO: 45046 - protein, 732 aa, synthetic construct
MALPVTALLLPLALLLHAARPMLPAPKNLVVSRITEDSARLSWTAPDAAFDSFPIRYIETLIWGEAIWLDVPGSERSYDLTGLKPGTEYAVVITGVKGGRFSSPLVASFTTGTGGGGSGGGGSGGGGSEFDIVMTQSPATLSVSPGERATLSCRASQSVSNDVVWYQQKPGQAPRLLIYYASNRYTGIPARFSGSGSGTEFTLTISSLQSEDFAVYYCQQDYTSPWTFGQGTKLEIKRLEIQNPDPAVYQLRDSKSSDKSVCLFTDFDSQTNVSQSKDSDVYITDKCVLDMRSMDFKSNSAVAWSNKSDFACANAFNNSIIPEDTFFPSPESSCGFTSESYQQGVLSATILYEILLGKATLYAVLVSALVLMAMVKRKDSRGRAKRSGSGVKQTLNFDLLKLAGDVESNPGPTSMDWIWRILFLVGAATGAHSFEEVQLVQSGAEVKKPGASVRVSCKASGYTFTNYGMNWVRQAPGQGLEWMGWINTYTGEPTYADDFKGRVTMTTDTSTSTAYMELRSLRSDDTAVYYCARIGDSSPSDYWGQGTLVTVSSTREDLKNVFPPEVAVFEPSEAEISHTQKATLVCLATGFYPDHVELSWWVNGKEVHSGVCTDPQPLKEQPALNDSRYCLSSRLRVSATFWQNPRNHFRCQVQFYGLSENDEWTQDRAKPVTQIVSAEAWGRADCDVKLVEKSFETDTNLNFQNLSVIGFRILLLKVAGFNLLMTLRLWSS

SEQ ID NO: 45047 - protein, 757 aa, synthetic construct
MALPVTALLLPLALLLHAARPEVQLVESGGGLVQPGGSLRLSCAASGFNIKDTCIGWVRRAPGKEEELVAKICKYSGHTRYADSVKGRFTISADTSKNTAYLQMNSLRAEDTAVYYCAAVSVRDGHYNYWGQGTTVTVSSGTGGGGSGGGGSGGGGSEFDIVMTQSPATLSVSPGERATLSCRASQSVSNDVVWYQQKPGQAPRLLIYYASNRYTGIPARFSGSGSGTEFTLTISSLQSEDFAVYYCQQDYTSPWTFGQGTKLEIKRLEDLKNVFPPEVAVFEPSEAEISHTQKATLVCLATGFYPDHVELSWWVNGKEVHSGVCTDPQPLKEQPALNDSRYCLSSRLRVSATFWQNPRNHFRCQVQFYGLSENDEWTQDRAKPVTQIVSAEAWGRADCDVKLVEKSFETDTNLNFQNLSVIGFRILLLKVAGFNLLMTLRLWSSRAKRSGSGATNFSLLKQAGDVEENPGPTSMDWIWRILFLVGAATGAHSFEEVQLVQSGAEVKKPGASVRVSCKASGYTFTNYGMNWVRQAPGQGLEWMGWINTYTGEPTYADDFKGRVTMTTDTSTSTAYMELRSLRSDDTAVYYCARIGDSSPSDYWGQGTLVTVSSTRIQNPDPAVYQLRDSKSSDKSVCLFTDFDSQTNVSQSKDSDVYITDKCVLDMRSMDFKSNSAVAWSNKSDFACANAFNNSIIPEDTFFPSPESSCGFTSESYQQGVLSATILYEILLGKATLYAVLVSALVLMAMVKRKDSRG

SEQ ID NO: 45048 - protein, 761 aa, synthetic construct
MALPVTALLLPLALLLHAARPEVQLVESGGGLVQPGGSLRLSCAASGFNIKDTCIGWVRRAPGKEEELVAKICKYSGHTRYADSVKGRFTISADTSKNTAYLQMNSLRAEDTAVYYCAAVSVRDGHYNYWGQGTTVTVSSGTGGGGSGGGGSGGGGSEFDIVMTQSPATLSVSPGERATLSCRASQSVSNDVVWYQQKPGQAPRLLIYYASNRYTGIPARFSGSGSGTEFTLTISSLQSEDFAVYYCQQDYTSPWTFGQGTKLEIKRLEIQNPDPAVYQLRDSKSSDKSVCLFTDFDSQTNVSQSKDSDVYITDKCVLDMRSMDFKSNSAVAWSNKSDFACANAFNNSIIPEDTFFPSPESSCGFTSESYQQGVLSATILYEILLGKATLYAVLVSALVLMAMVKRKDSRGRAKRSGSGVKQTLNFDLLKLAGDVESNPGPTSMDWIWRILFLVGAATGAHSFEEVQLVQSGAEVKKPGASVRVSCKASGYTFTNYGMNWVRQAPGQGLEWMGWINTYTGEPTYADDFKGRVTMTTDTSTSTAYMELRSLRSDDTAVYYCARIGDSSPSDYWGQGTLVTVSSTREDLKNVFPPEVAVFEPSEAEISHTQKATLVCLATGFYPDHVELSWWVNGKEVHSGVCTDPQPLKEQPALNDSRYCLSSRLRVSATFWQNPRNHFRCQVQFYGLSENDEWTQDRAKPVTQIVSAEAWGRADCDVKLVEKSFETDTNLNFQNLSVIGFRILLLKVAGFNLLMTLRLWSS

SEQ ID NO: 45049 - protein, 1128 aa, synthetic construct
MALPVTALLLPLALLLHAARPEVQLVESGGGLVQAGGSLRLSCAASGRTFSMGWFRQAPGKEREFVAAITYSGGSPYYADSVKGRFTISRDNAKNTVYLQMNSLKPEDTAVYYCAANPTYGSDWNAENWGQGTQVTVSSGTGGGGSGGGGSGGGGSEFDIVMTQSPATLSVSPGERATLSCRASQSVSNDVVWYQQKPGQAPRLLIYYASNRYTGIPARFSGSGSGTEFTLTISSLQSEDFAVYYCQQDYTSPWTFGQGTKLEIKRLEDLKNVFPPEVAVFEPSEAEISHTQKATLVCLATGFYPDHVELSWWVNGKEVHSGVCTDPQPLKEQPALNDSRYCLSSRLRVSATFWQNPRNHFRCQVQFYGLSENDEWTQDRAKPVTQIVSAEAWGRADCDVKLVEKSFETDTNLNFQNLSVIGFRILLLKVAGFNLLMTLRLWSSRAKRSGSGATNFSLLKQAGDVEENPGPTSATMDWIWRILFLVGAATGAHSGPEVQLVESGGGLVQAGGSLRLSCAASGRTFTMGWFRQAPGKEREFVAAISLSPTLAYYADSVKGRFTISRDNAKNTVVLQMNSLKPEDTALYYCAADRKSVMSIRPDYWGQGTQVTVSSGSGGGGSGGGGSGGGGSFEEVQLVQSGAEVKKPGASVRVSCKASGYTFTNYGMNWVRQAPGQGLEWMGWINTYTGEPTYADDFKGRVTMTTDTSTSTAYMELRSLRSDDTAVYYCARIGDSSPSDYWGQGTLVTVSSTRIQNPDPAVYQLRDSKSSDKSVCLFTDFDSQTNVSQSKDSDVYITDKCVLDMRSMDFKSNSAVAWSNKSDFACANAFNNSIIPEDTFFPSPESSCGFTSESYQQGVLSATILYEILLGKATLYAVLVSALVLMAMVKRKDSRGRAKRSGSGVKQTLNFDLLKLAGDVESNPGPSRGHMTEYKPTVRLATRDDVPRAVRTLAAAFADYPATRHTVDPDRHIERVTELQELFLTRVGLDIGKVWVADDGAAVAVWTTPESVEAGAVFAEIGPRMAELSGSRLAAQQQMEGLLAPHRPKEPAWFLATVGVSPDHQGKGLGSAVVLPGVEAAERAGVPAFLETSAPRNLPFYERLGFTVTADVEVPEGPRTWCMTRKPGA

SEQ ID NO: 45050 - protein, 766 aa, synthetic construct
MALPVTALLLPLALLLHAARPEVQLVESGGGLVQPGGSLRLSCAASGFASDYYIIGWFRQAPGKEREGVSCISSRYANTNYADSVKGRFTISRDNAKNTVYLQMNSLKPEDTAVYYCAADTRRYTCPDIATMHRNFDSWGQGTLVTVSSGTGGGGSGGGGSGGGGSEFDIVMTQSPATLSVSPGERATLSCRASQSVSNDVVWYQQKPGQAPRLLIYYASNRYTGIPARFSGSGSGTEFTLTISSLQSEDFAVYYCQQDYTSPWTFGQGTKLEIKRLEDLKNVFPPEVAVFEPSEAEISHTQKATLVCLATGFYPDHVELSWWVNGKEVHSGVCTDPQPLKEQPALNDSRYCLSSRLRVSATFWQNPRNHFRCQVQFYGLSENDEWTQDRAKPVTQIVSAEAWGRADCDVKLVEKSFETDTNLNFQNLSVIGFRILLLKVAGFNLLMTLRLWSSRAKRSGSGATNFSLLKQAGDVEENPGPTSMDWIWRILFLVGAATGAHSFEEVQLVQSGAEVKKPGASVRVSCKASGYTFTNYGMNWVRQAPGQGLEWMGWINTYTGEPTYADDFKGRVTMTTDTSTSTAYMELRSLRSDDTAVYYCARIGDSSPSDYWGQGTLVTVSSTRIQNPDPAVYQLRDSKSSDKSVCLFTDFDSQTNVSQSKDSDVYITDKCVLDMRSMDFKSNSAVAWSNKSDFACANAFNNSIIPEDTFFPSPESSCGFTSESYQQGVLSATILYEILLGKATLYAVLVSALVLMAMVKRKDSRG

SEQ ID NO: 45051 - protein, 766 aa, synthetic construct
MALPVTALLLPLALLLHAARPEVQLVESGGGLVQPGGSLRLSCEASGFASDDYIIGWFRQAPGKEREGVSCISSKYANTVYTDSVKGRFRLSRGTAKNTVYLQMSALKPEDTAVYYCAMDSRRVTCPEISTMHRNFDSWGQGTLVTVSSGTGGGGSGGGGSGGGGSEFDIVMTQSPATLSVSPGERATLSCRASQSVSNDVVWYQQKPGQAPRLLIYYASNRYTGIPARFSGSGSGTEFTLTISSLQSEDFAVYYCQQDYTSPWTFGQGTKLEIKRLEDLKNVFPPEVAVFEPSEAEISHTQKATLVCLATGFYPDHVELSWWVNGKEVHSGVCTDPQPLKEQPALNDSRYCLSSRLRVSATFWQNPRNHFRCQVQFYGLSENDEWTQDRAKPVTQIVSAEAWGRADCDVKLVEKSFETDTNLNFQNLSVIGFRILLLKVAGFNLLMTLRLWSSRAKRSGSGATNFSLLKQAGDVEENPGPTSMDWIWRILFLVGAATGAHSFEEVQLVQSGAEVKKPGASVRVSCKASGYTFTNYGMNWVRQAPGQGLEWMGWINTYTGEPTYADDFKGRVTMTTDTSTSTAYMELRSLRSDDTAVYYCARIGDSSPSDYWGQGTLVTVSSTRIQNPDPAVYQLRDSKSSDKSVCLFTDFDSQTNVSQSKDSDVYITDKCVLDMRSMDFKSNSAVAWSNKSDFACANAFNNSIIPEDTFFPSPESSCGFTSESYQQGVLSATILYEILLGKATLYAVLVSALVLMAMVKRKDSRG

SEQ ID NO: 45052 - protein, 766 aa, synthetic construct
MALPVTALLLPLALLLHAARPEVQLVESGGGLVQPGGSLRLSCAASGFASDYYIIGWFRQAPGKEREGVSCISSRYANTNYADSVKGRFTISRDNAKNTVYLQMNSLKPEDTAVYYCAADTRRYTCPDIATMHRNFDSWGQGTLVTVSSGTGGGGSGGGGSGGGGSEFDIVMTQSPATLSVSPGERATLSCRASQSVSNDVVWYQQKPGQAPRLLIYYASNRYTGIPARFSGSGSGTEFTLTISSLQSEDFAVYYCQQDYTSPWTFGQGTKLEIKRLEIQNPDPAVYQLRDSKSSDKSVCLFTDFDSQTNVSQSKDSDVYITDKCVLDMRSMDFKSNSAVAWSNKSDFACANAFNNSIIPEDTFFPSPESSCGFTSESYQQGVLSATILYEILLGKATLYAVLVSALVLMAMVKRKDSRGRAKRSGSGATNFSLLKQAGDVEENPGPTSMDWIWRILFLVGAATGAHSFEEVQLVQSGAEVKKPGASVRVSCKASGYTFTNYGMNWVRQAPGQGLEWMGWINTYTGEPTYADDFKGRVTMTTDTSTSTAYMELRSLRSDDTAVYYCARIGDSSPSDYWGQGTLVTVSSTRDLKNVFPPEVAVFEPSEAEISHTQKATLVCLATGFYPDHVELSWWVNGKEVHSGVCTDPQPLKEQPALNDSRYCLSSRLRVSATFWQNPRNHFRCQVQFYGLSENDEWTQDRAKPVTQIVSAEAWGRADCDVKLVEKSFETDTNLNFQNLSVIGFRILLLKVAGFNLLMTLRLWSS

SEQ ID NO: 45053 - protein, 766 aa, synthetic construct
MALPVTALLLPLALLLHAARPEVQLVESGGGLVQPGGSLRLSCEASGFASDDYIIGWFRQAPGKEREGVSCISSKYANTVYTDSVKGRFRLSRGTAKNTVYLQMSALKPEDTAVYYCAMDSRRVTCPEISTMHRNFDSWGQGTLVTVSSGTGGGGSGGGGSGGGGSEFDIVMTQSPATLSVSPGERATLSCRASQSVSNDVVWYQQKPGQAPRLLIYYASNRYTGIPARFSGSGSGTEFTLTISSLQSEDFAVYYCQQDYTSPWTFGQGTKLEIKRLEIQNPDPAVYQLRDSKSSDKSVCLFTDFDSQTNVSQSKDSDVYITDKCVLDMRSMDFKSNSAVAWSNKSDFACANAFNNSIIPEDTFFPSPESSCGFTSESYQQGVLSATILYEILLGKATLYAVLVSALVLMAMVKRKDSRGRAKRSGSGATNFSLLKQAGDVEENPGPTSMDWIWRILFLVGAATGAHSFEEVQLVQSGAEVKKPGASVRVSCKASGYTFTNYGMNWVRQAPGQGLEWMGWINTYTGEPTYADDFKGRVTMTTDTSTSTAYMELRSLRSDDTAVYYCARIGDSSPSDYWGQGTLVTVSSTRDLKNVFPPEVAVFEPSEAEISHTQKATLVCLATGFYPDHVELSWWVNGKEVHSGVCTDPQPLKEQPALNDSRYCLSSRLRVSATFWQNPRNHFRCQVQFYGLSENDEWTQDRAKPVTQIVSAEAWGRADCDVKLVEKSFETDTNLNFQNLSVIGFRILLLKVAGFNLLMTLRLWSS

SEQ ID NO: 45054 - protein, 757 aa, synthetic construct
MALPVTALLLPLALLLHAARPQVKLEESGGGLVQPGESLRLSCSASGSIFKVFRVFAMSWYRQGPGKQRELVASISSGETTTYAESVKGRFTISRDNAKNTAYLQMDSLKPEDTAVYYCNADHTFTGDFWGQGTQVTVSSGTGGGGSGGGGSGGGGSEFDIVMTQSPATLSVSPGERATLSCRASQSVSNDVVWYQQKPGQAPRLLIYYASNRYTGIPARFSGSGSGTEFTLTISSLQSEDFAVYYCQQDYTSPWTFGQGTKLEIKRLEIQNPDPAVYQLRDSKSSDKSVCLFTDFDSQTNVSQSKDSDVYITDKCVLDMRSMDFKSNSAVAWSNKSDFACANAFNNSIIPEDTFFPSPESSCGFTSESYQQGVLSATILYEILLGKATLYAVLVSALVLMAMVKRKDSRGRAKRSGSGATNFSLLKQAGDVEENPGPTSMDWIWRILFLVGAATGAHSFEEVQLVQSGAEVKKPGASVRVSCKASGYTFTNYGMNWVRQAPGQGLEWMGWINTYTGEPTYADDFKGRVTMTTDTSTSTAYMELRSLRSDDTAVYYCARIGDSSPSDYWGQGTLVTVSSTRDLKNVFPPEVAVFEPSEAEISHTQKATLVCLATGFYPDHVELSWWVNGKEVHSGVCTDPQPLKEQPALNDSRYCLSSRLRVSATFWQNPRNHFRCQVQFYGLSENDEWTQDRAKPVTQIVSAEAWGRADCDVKLVEKSFETDTNLNFQNLSVIGFRILLLKVAGFNLLMTLRLWSS

SEQ ID NO: 45055 - protein, 758 aa, synthetic construct
MALPVTALLLPLALLLHAARPDIVMTQSPATLSVSPGERATLSCRASQSVSNDVVWYQQKPGQAPRLLIYYASNRYTGIPARFSGSGSGTEFTLTISSLQSEDFAVYYCQQDYTSPWTFGQGTKLEIKRLEDLKNVFPPEVAVFEPSEAEISHTQKATLVCLATGFYPDHVELSWWVNGKEVHSGVCTDPQPLKEQPALNDSRYCLSSRLRVSATFWQNPRNHFRCQVQFYGLSENDEWTQDRAKPVTQIVSAEAWGRADCDVKLVEKSFETDTNLNFQNLSVIGFRILLLKVAGFNLLMTLRLWSSRAKRSGSGATNFSLLKQAGDVEENPGPTSATMDWIWRILFLVGAATGAHSGPEVQLVESGGGLVQAGGSLRLSCAASGRTFSMGWFRQAPGKEREFVAAITYSGGSPYYADSVKGRFTISRDNAKNTVYLQMNSLKPEDTAVYYCAANPTYGSDWNAENWGQGTQVTVSSGSGGGGSGGGGSGGGGSFEEVQLVQSGAEVKKPGASVRVSCKASGYTFTNYGMNWVRQAPGQGLEWMGWINTYTGEPTYADDFKGRVTMTTDTSTSTAYMELRSLRSDDTAVYYCARIGDSSPSDYWGQGTLVTVSSTRIQNPDPAVYQLRDSKSSDKSVCLFTDFDSQTNVSQSKDSDVYITDKCVLDMRSMDFKSNSAVAWSNKSDFACANAFNNSIIPEDTFFPSPESSCGFTSESYQQGVLSATILYEILLGKATLYAVLVSALVLMAMVKRKDSRG

SEQ ID NO: 45056 - protein, 759 aa, synthetic construct
MALPVTALLLPLALLLHAARPDIVMTQSPATLSVSPGERATLSCRASQSVSNDVVWYQQKPGQAPRLLIYYASNRYTGIPARFSGSGSGTEFTLTISSLQSEDFAVYYCQQDYTSPWTFGQGTKLEIKRLEDLKNVFPPEVAVFEPSEAEISHTQKATLVCLATGFYPDHVELSWWVNGKEVHSGVCTDPQPLKEQPALNDSRYCLSSRLRVSATFWQNPRNHFRCQVQFYGLSENDEWTQDRAKPVTQIVSAEAWGRADCDVKLVEKSFETDTNLNFQNLSVIGFRILLLKVAGFNLLMTLRLWSSRAKRSGSGATNFSLLKQAGDVEENPGPTSATMDWIWRILFLVGAATGAHSGPEVQLVESGGGLVQPGGSLRLSCAASGSIFGFNDMAWYRQAPGKQRELVALISRVGVTSSADSVKGRFTISRVNAKDTVYLQMNSLKPEDTAVYYCYMDQRLDGSTLAYWGQGTQVTVSSGSGGGGSGGGGSGGGGSFEEVQLVQSGAEVKKPGASVRVSCKASGYTFTNYGMNWVRQAPGQGLEWMGWINTYTGEPTYADDFKGRVTMTTDTSTSTAYMELRSLRSDDTAVYYCARIGDSSPSDYWGQGTLVTVSSTRIQNPDPAVYQLRDSKSSDKSVCLFTDFDSQTNVSQSKDSDVYITDKCVLDMRSMDFKSNSAVAWSNKSDFACANAFNNSIIPEDTFFPSPESSCGFTSESYQQGVLSATILYEILLGKATLYAVLVSALVLMAMVKRKDSRG

SEQ ID NO: 45057 - protein, 755 aa, synthetic construct
MALPVTALLLPLALLLHAARPDIVMTQSPATLSVSPGERATLSCRASQSVSNDVVWYQQKPGQAPRLLIYYASNRYTGIPARFSGSGSGTEFTLTISSLQSEDFAVYYCQQDYTSPWTFGQGTKLEIKRLEDLKNVFPPEVAVFEPSEAEISHTQKATLVCLATGFYPDHVELSWWVNGKEVHSGVCTDPQPLKEQPALNDSRYCLSSRLRVSATFWQNPRNHFRCQVQFYGLSENDEWTQDRAKPVTQIVSAEAWGRADCDVKLVEKSFETDTNLNFQNLSVIGFRILLLKVAGFNLLMTLRLWSSRAKRSGSGATNFSLLKQAGDVEENPGPTSATMDWIWRILFLVGAATGAHSGPEVQLVESGGGLVQAGGSLRLSCAASGSVFSGNVMGWYRQAPGKEREWVAAIASGGSIYYRDSVKGRFTISRDNAKNTVYLQMNSLKPEDTAVYYCNSHPPTLPYWGLGTQVTVSSGSGGGGSGGGGSGGGGSFEEVQLVQSGAEVKKPGASVRVSCKASGYTFTNYGMNWVRQAPGQGLEWMGWINTYTGEPTYADDFKGRVTMTTDTSTSTAYMELRSLRSDDTAVYYCARIGDSSPSDYWGQGTLVTVSSTRIQNPDPAVYQLRDSKSSDKSVCLFTDFDSQTNVSQSKDSDVYITDKCVLDMRSMDFKSNSAVAWSNKSDFACANAFNNSIIPEDTFFPSPESSCGFTSESYQQGVLSATILYEILLGKATLYAVLVSALVLMAMVKRKDSRG

SEQ ID NO: 45058 - protein, 753 aa, synthetic construct
MALPVTALLLPLALLLHAARPDIVMTQSPATLSVSPGERATLSCRASQSVSNDVVWYQQKPGQAPRLLIYYASNRYTGIPARFSGSGSGTEFTLTISSLQSEDFAVYYCQQDYTSPWTFGQGTKLEIKRLEDLKNVFPPEVAVFEPSEAEISHTQKATLVCLATGFYPDHVELSWWVNGKEVHSGVCTDPQPLKEQPALNDSRYCLSSRLRVSATFWQNPRNHFRCQVQFYGLSENDEWTQDRAKPVTQIVSAEAWGRADCDVKLVEKSFETDTNLNFQNLSVIGFRILLLKVAGFNLLMTLRLWSSRAKRSGSGATNFSLLKQAGDVEENPGPTSATMDWIWRILFLVGAATGAHSGPEVQLLESGGGLVQPGGSLRLSCAASGFSFSSYALSWVRQAPGKGLEWVSSIGENDGTTDYADAVKGRFTISRDNSKNTLYLQMNSLRVEDTAVYYCVKDGIHWGQGTLVTVSSGSGGGGSGGGGSGGGGSFEEVQLVQSGAEVKKPGASVRVSCKASGYTFTNYGMNWVRQAPGQGLEWMGWINTYTGEPTYADDFKGRVTMTTDTSTSTAYMELRSLRSDDTAVYYCARIGDSSPSDYWGQGTLVTVSSTRIQNPDPAVYQLRDSKSSDKSVCLFTDFDSQTNVSQSKDSDVYITDKCVLDMRSMDFKSNSAVAWSNKSDFACANAFNNSIIPEDTFFPSPESSCGFTSESYQQGVLSATILYEILLGKATLYAVLVSALVLMAMVKRKDSRG

SEQ ID NO: 45059 - protein, 1122 aa, synthetic construct
MGPRLLFWALLCLLGTGPVEAGVTQSPTHLIKTRGQQATLRCSPISGHTSVYWYQQALGLGLQFLLWYDEGEERNRGNFPPRFSGRQFPNYSSELNVNALELEDSALYLCASSLGGPRGLAGLRGDEQFFGPGTRLTVLEGTGGGGSGGGEFDIVMTQSPATLSVSPGERATLSCRASQSVSNDVVWYQQKPGQAPRLLIYYASNRYTGIPARFSGSGSGTEFTLTISSLQSEDFAVYYCQQDYTSPWTFGQGTKLEIKRLEDLKNVFPPEVAVFEPSEAEISHTQKATLVCLATGFYPDHVELSWWVNGKEVHSGVCTDPQPLKEQPALNDSRYCLSSRLRVSATFWQNPRNHFRCQVQFYGLSENDEWTQDRAKPVTQIVSAEAWGRADCDVKLVEKSFETDTNLNFQNLSVIGFRILLLKVAGFNLLMTLRLWSSRAKRSGSGATNFSLLKQAGDVEENPGPTSATMDWIWRILFLVGAATGAHSGPEVQLVESGGGLVQAGGSLRLSCAASGRTFSMGWFRQAPGKEREFVAAITYSGGSPYYADSVKGRFTISRDNAKNTVYLQMNSLKPEDTAVYYCAANPTYGSDWNAENWGQGTQVTVSSGSGGGGSGGGGSGGGGSFEEVQLVQSGAEVKKPGASVRVSCKASGYTFTNYGMNWVRQAPGQGLEWMGWINTYTGEPTYADDFKGRVTMTTDTSTSTAYMELRSLRSDDTAVYYCARIGDSSPSDYWGQGTLVTVSSTRIQNPDPAVYQLRDSKSSDKSVCLFTDFDSQTNVSQSKDSDVYITDKCVLDMRSMDFKSNSAVAWSNKSDFACANAFNNSIIPEDTFFPSPESSCGFTSESYQQGVLSATILYEILLGKATLYAVLVSALVLMAMVKRKDSRGRAKRSGSGVKQTLNFDLLKLAGDVESNPGPSRGHMTEYKPTVRLATRDDVPRAVRTLAAAFADYPATRHTVDPDRHIERVTELQELFLTRVGLDIGKVWVADDGAAVAVWTTPESVEAGAVFAEIGPRMAELSGSRLAAQQQMEGLLAPHRPKEPAWFLATVGVSPDHQGKGLGSAVVLPGVEAAERAGVPAFLETSAPRNLPFYERLGFTVTADVEVPEGPRTWCMTRKPGA

SEQ ID NO: 45060 - protein, 1121 aa, synthetic construct
MGPRLLFWALLCLLGTGPVEAGVTQSPTHLIKTRGQQATLRCSPISGHTSVYWYQQALGLGLQFLLWYDEGEERNRGNFPPRFSGRQFPNYSSELNVNALELEDSALYLCASSLGGDELGADGNEQFFGPGTRLTVLEGTGGGGSGGGSEFDIVMTQSPATLSVSPGERATLSCRASQSVSNDVVWYQQKPGQAPRLLIYYASNRYTGIPARFSGSGSGTEFTLTISSLQSEDFAVYYCQQDYTSPWTFGQGTKLEIKRLEDLKNVFPPEVAVFEPSEAEISHTQKATLVCLATGFYPDHVELSWWVNGKEVHSGVCTDPQPLKEQPALNDSRYCLSSRLRVSATFWQNPRNHFRCQVQFYGLSENDEWTQDRAKPVTQIVSAEAWGRADCDVKLVEKSFETDTNLNFQNLSVIGFRILLLKVAGFNLLMTLRLWSSRAKRSGSGATNFSLLKQAGDVEENPGPTSATMDWIWRILFLVGAATGAHSGPEVQLVESGGGLVQAGGSLRLSCAASGRTFSMGWFRQAPGKEREFVAAITYSGGSPYYADSVKGRFTISRDNAKNTVYLQMNSLKPEDTAVYYCAANPTYGSDWNAENWGQGTQVTVSSGSGGGGSGGGGSGGGGSFEEVQLVQSGAEVKKPGASVRVSCKASGYTFTNYGMNWVRQAPGQGLEWMGWINTYTGEPTYADDFKGRVTMTTDTSTSTAYMELRSLRSDDTAVYYCARIGDSSPSDYWGQGTLVTVSSTRIQNPDPAVYQLRDSKSSDKSVCLFTDFDSQTNVSQSKDSDVYITDKCVLDMRSMDFKSNSAVAWSNKSDFACANAFNNSIIPEDTFFPSPESSCGFTSESYQQGVLSATILYEILLGKATLYAVLVSALVLMAMVKRKDSRGRAKRSGSGVKQTLNFDLLKLAGDVESNPGPSRGHMTEYKPTVRLATRDDVPRAVRTLAAAFADYPATRHTVDPDRHIERVTELQELFLTRVGLDIGKVWVADDGAAVAVWTTPESVEAGAVFAEIGPRMAELSGSRLAAQQQMEGLLAPHRPKEPAWFLATVGVSPDHQGKGLGSAVVLPGVEAAERAGVPAFLETSAPRNLPFYERLGFTVTADVEVPEGPRTWCMTRKPGA

SEQ ID NO: 45061 - protein, 946 aa, synthetic construct
MALPVTALLLPLALLLHAARPDIVMTQSPATLSVSPGERATLSCRASQSVSNDVVWYQQKPGQAPRLLIYYASNRYTGIPARFSGSGSGTEFTLTISSLQSEDFAVYYCQQDYTSPWTFGQGTKLEIKRLEDLKNVFPPEVAVFEPSEAEISHTQKATLVCLATGFYPDHVELSWWVNGKEVHSGVCTDPQPLKEQPALNDSRYCLSSRLRVSATFWQNPRNHFRCQVQFYGLSENDEWTQDRAKPVTQIVSAEAWGRADCDVKLVEKSFETDTNLNFQNLSVIGFRILLLKVAGFNLLMTLRLWSSRAKRSGSGATNFSLLKQAGDVEENPGPTSATMDWIWRILFLVGAATGAHSGPMGSWLEFYHRLNAIDSRLWALGGSEAELAAFEKEIAAFESELQAYKGKGNPEVESLRDHAAHIREWLQAYRHNGSGGGGSGGGGSGGGGSFEEVQLVQSGAEVKKPGASVRVSCKASGYTFTNYGMNWVRQAPGQGLEWMGWINTYTGEPTYADDFKGRVTMTTDTSTSTAYMELRSLRSDDTAVYYCARIGDSSPSDYWGQGTLVTVSSTRIQNPDPAVYQLRDSKSSDKSVCLFTDFDSQTNVSQSKDSDVYITDKCVLDMRSMDFKSNSAVAWSNKSDFACANAFNNSIIPEDTFFPSPESSCGFTSESYQQGVLSATILYEILLGKATLYAVLVSALVLMAMVKRKDSRGRAKRSGSGVKQTLNFDLLKLAGDVESNPGPSRGHMTEYKPTVRLATRDDVPRAVRTLAAAFADYPATRHTVDPDRHIERVTELQELFLTRVGLDIGKVWVADDGAAVAVWTTPESVEAGAVFAEIGPRMAELSGSRLAAQQQMEGLLAPHRPKEPAWFLATVGVSPDHQGKGLGSAVVLPGVEAAERAGVPAFLETSAPRNLPFYERLGFTVTADVEVPEGPRTWCMTRKPGA

SEQ ID NO: 45062 - protein, 946 aa, synthetic construct
MALPVTALLLPLALLLHAARPACMGSWFEFYDRLNAIDARLWALGGSEAELAAFEKEIAAFESELQAYKGKGNPEVENLRVHAAAIREWLQAYRHNGTGGGGSGGGGSGGGGSEFDIVMTQSPATLSVSPGERATLSCRASQSVSNDVVWYQQKPGQAPRLLIYYASNRYTGIPARFSGSGSGTEFTLTISSLQSEDFAVYYCQQDYTSPWTFGQGTKLEIKRLEDLKNVFPPEVAVFEPSEAEISHTQKATLVCLATGFYPDHVELSWWVNGKEVHSGVCTDPQPLKEQPALNDSRYCLSSRLRVSATFWQNPRNHFRCQVQFYGLSENDEWTQDRAKPVTQIVSAEAWGRADCDVKLVEKSFETDTNLNFQNLSVIGFRILLLKVAGFNLLMTLRLWSSRAKRSGSGATNFSLLKQAGDVEENPGPTSMDWIWRILFLVGAATGAHSFEEVQLVQSGAEVKKPGASVRVSCKASGYTFTNYGMNWVRQAPGQGLEWMGWINTYTGEPTYADDFKGRVTMTTDTSTSTAYMELRSLRSDDTAVYYCARIGDSSPSDYWGQGTLVTVSSTRIQNPDPAVYQLRDSKSSDKSVCLFTDFDSQTNVSQSKDSDVYITDKCVLDMRSMDFKSNSAVAWSNKSDFACANAFNNSIIPEDTFFPSPESSCGFTSESYQQGVLSATILYEILLGKATLYAVLVSALVLMAMVKRKDSRGRAKRSGSGVKQTLNFDLLKLAGDVESNPGPSRGHMTEYKPTVRLATRDDVPRAVRTLAAAFADYPATRHTVDPDRHIERVTELQELFLTRVGLDIGKVWVADDGAAVAVWTTPESVEAGAVFAEIGPRMAELSGSRLAAQQQMEGLLAPHRPKEPAWFLATVGVSPDHQGKGLGSAVVLPGVEAAERAGVPAFLETSAPRNLPFYERLGFTVTADVEVPEGPRTWCMTRKPGA

SEQ ID NO: 45063 - protein, 1063 aa, synthetic construct
MALPVTALLLPLALLLHAARPACMDPDLEIRAAFLRQRNTALRTEVAELEQEVQRLENEVSQYETRYGPLGGGKGTGGGGSGGGGSGGGGSEFDIVMTQSPATLSVSPGERATLSCRASQSVSNDVVWYQQKPGQAPRLLIYYASNRYTGIPARFSGSGSGTEFTLTISSLQSEDFAVYYCQQDYTSPWTFGQGTKLEIKRLEDLKNVFPPEVAVFEPSEAEISHTQKATLVCLATGFYPDHVELSWWVNGKEVHSGVCTDPQPLKEQPALNDSRYCLSSRLRVSATFWQNPRNHFRCQVQFYGLSENDEWTQDRAKPVTQIVSAEAWGRADCDVKLVEKSFETDTNLNFQNLSVIGFRILLLKVAGFNLLMTLRLWSSRAKRSGSGATNFSLLKQAGDVEENPGPTSATMDWIWRILFLVGAATGAHSGPEVQLVESGGGLVQAGGSLRLSCAASGRTFSMGWFRQAPGKEREFVAAITYSGGSPYYADSVKGRFTISRDNAKNTVYLQMNSLKPEDTAVYYCAANPTYGSDWNAENWGQGTQVTVSSGSGGGGSGGGGSGGGGSFEEVQLVQSGAEVKKPGASVRVSCKASGYTFTNYGMNWVRQAPGQGLEWMGWINTYTGEPTYADDFKGRVTMTTDTSTSTAYMELRSLRSDDTAVYYCARIGDSSPSDYWGQGTLVTVSSTRIQNPDPAVYQLRDSKSSDKSVCLFTDFDSQTNVSQSKDSDVYITDKCVLDMRSMDFKSNSAVAWSNKSDFACANAFNNSIIPEDTFFPSPESSCGFTSESYQQGVLSATILYEILLGKATLYAVLVSALVLMAMVKRKDSRGRAKRSGSGVKQTLNFDLLKLAGDVESNPGPSRGHMTEYKPTVRLATRDDVPRAVRTLAAAFADYPATRHTVDPDRHIERVTELQELFLTRVGLDIGKVWVADDGAAVAVWTTPESVEAGAVFAEIGPRMAELSGSRLAAQQQMEGLLAPHRPKEPAWFLATVGVSPDHQGKGLGSAVVLPGVEAAERAGVPAFLETSAPRNLPFYERLGFTVTADVEVPEGPRTWCMTRKPGA

SEQ ID NO: 45064 - protein, 946 aa, synthetic construct
MALPVTALLLPLALLLHAARPDIVMTQSPATLSVSPGERATLSCRASQSVSNDVVWYQQKPGQAPRLLIYYASNRYTGIPARFSGSGSGTEFTLTISSLQSEDFAVYYCQQDYTSPWTFGQGTKLEIKRLEDLKNVFPPEVAVFEPSEAEISHTQKATLVCLATGFYPDHVELSWWVNGKEVHSGVCTDPQPLKEQPALNDSRYCLSSRLRVSATFWQNPRNHFRCQVQFYGLSENDEWTQDRAKPVTQIVSAEAWGRADCDVKLVEKSFETDTNLNFQNLSVIGFRILLLKVAGFNLLMTLRLWSSRAKRSGSGATNFSLLKQAGDVEENPGPTSATMDWIWRILFLVGAATGAHSGPMGSWSEFYDRLHAIHHRLYALGGSEAELAAFEKEIAAFESELQAYKGKGNPEVEALRDTAAFIRTRLQAYRHNGSGGGGSGGGGSGGGGSFEEVQLVQSGAEVKKPGASVRVSCKASGYTFTNYGMNWVRQAPGQGLEWMGWINTYTGEPTYADDFKGRVTMTTDTSTSTAYMELRSLRSDDTAVYYCARIGDSSPSDYWGQGTLVTVSSTRIQNPDPAVYQLRDSKSSDKSVCLFTDFDSQTNVSQSKDSDVYITDKCVLDMRSMDFKSNSAVAWSNKSDFACANAFNNSIIPEDTFFPSPESSCGFTSESYQQGVLSATILYEILLGKATLYAVLVSALVLMAMVKRKDSRGRAKRSGSGVKQTLNFDLLKLAGDVESNPGPSRGHMTEYKPTVRLATRDDVPRAVRTLAAAFADYPATRHTVDPDRHIERVTELQELFLTRVGLDIGKVWVADDGAAVAVWTTPESVEAGAVFAEIGPRMAELSGSRLAAQQQMEGLLAPHRPKEPAWFLATVGVSPDHQGKGLGSAVVLPGVEAAERAGVPAFLETSAPRNLPFYERLGFTVTADVEVPEGPRTWCMTRKPGA

SEQ ID NO: 45065 - protein, 1156 aa, synthetic construct
MALPVTALLLPLALLLHAARPDIVMTQSPATLSVSPGERATLSCRASQSVSNDVVWYQQKPGQAPRLLIYYASNRYTGIPARFSGSGSGTEFTLTISSLQSEDFAVYYCQQDYTSPWTFGQGTKLEIKRLEDLKNVFPPEVAVFEPSEAEISHTQKATLVCLATGFYPDHVELSWWVNGKEVHSGVCTDPQPLKEQPALNDSRYCLSSRLRVSATFWQNPRNHFRCQVQFYGLSENDEWTQDRAKPVTQIVSAEAWGRADCDVKLVEKSFETDTNLNFQNLSVIGFRILLLKVAGFNLLMTLRLWSSRAKRSGSGATNFSLLKQAGDVEENPGPTSTMDWIWRILFLVGAATGAHSLFNQEVQIPLTESYCGPCPKNWICYKNNCYQFFDESKNWYESQASCMSQNASLLKVYSKEDQDLLKLVKSAHWMGLVHIPTNGSWQWEDGSILSPNLLTIIEMQKGDCALYASSFKGYIENCSTPNTYICMQRTVSGGGGSGGGGSGGGGDLFNQEVQIPLTESYCGPCPKNWICYKNNCYQFFDESKNWYESQASCMSQNASLLKVYSKEDQDLLKLVKSAHWMGLVHIPTNGSWQWEDGSILSPNLLTIIEMQKGDCALYASSFKGYIENCSTPNTYICMQRTVGSGGGGSGGGGSGGGGSFEEVQLVQSGAEVKKPGASVRVSCKASGYTFTNYGMNWVRQAPGQGLEWMGWINTYTGEPTYADDFKGRVTMTTDTSTSTAYMELRSLRSDDTAVYYCARIGDSSPSDYWGQGTLVTVSSTRIQNPDPAVYQLRDSKSSDKSVCLFTDFDSQTNVSQSKDSDVYITDKCVLDMRSMDFKSNSAVAWSNKSDFACANAFNNSIIPEDTFFPSPESSCGFTSESYQQGVLSATILYEILLGKATLYAVLVSALVLMAMVKRKDSRGRAKRSGSGVKQTLNFDLLKLAGDVESNPGPSRGHMTEYKPTVRLATRDDVPRAVRTLAAAFADYPATRHTVDPDRHIERVTELQELFLTRVGLDIGKVWVADDGAAVAVWTTPESVEAGAVFAEIGPRMAELSGSRLAAQQQMEGLLAPHRPKEPAWFLATVGVSPDHQGKGLGSAVVLPGVEAAERAGVPAFLETSAPRNLPFYERLGFTVTADVEVPEGPRTWCMTRKPGA

SEQ ID NO: 45066 - protein, 619 aa, synthetic construct; identical to SEQ ID NO: 45023

SEQ ID NO: 45067 - protein, 623 aa, synthetic construct
MALPVTALLLPLALLLHAARPDIVMTQSPATLSVSPGERATLSCRASQSVSNDVVWYQQKPGQAPRLLIYYASNRYTGIPARFSGSGSGTEFTLTISSLQSEDFAVYYCQQDYTSPWTFGQGTKLEIKRLEIQNPDPAVYQLRDSKSSDKSVCLFTDFDSQTNVSQSKDSDVYITDKCVLDMRSMDFKSNSAVAWSNKSDFACANAFNNSIIPEDTFFPSPESSCDVKLVEKSFETDTNLNFQILYEILLGKATLYAVLVSALVLMAMVKRKDSRGRAKRSGSGVKQTLNFDLLKLAGDVESNPGPTSMDWIWRILFLVGAATGAHSFEEVQLVQSGAEVKKPGASVRVSCKASGYTFTNYGMNWVRQAPGQGLEWMGWINTYTGEPTYADDFKGRVTMTTDTSTSTAYMELRSLRSDDTAVYYCARIGDSSPSDYWGQGTLVTVSSTREDLKNVFPPEVAVFEPSEAEISHTQKATLVCLATGFYPDHVELSWWVNGKEVHSGVCTDPQPLKEQPALNDSRYCLSSRLRVSATFWQNPRNHFRCQVQFYGLSENDEWTQDRAKPVTQIVSAEAWGRADCGFTSESYQQGVLSATNLSVIGFRILLLKVAGFNLLMTLRLWSS

SEQ ID NO: 45068 - protein, 754 aa, synthetic construct
MALPVTALLLPLALLLHAARPEVQLVESGGGLVQPGGSLRLSCAASGFSFSDFWMSWVRQAPGKGLEWVATISQAGSEKDYVDSVKGRFTISRDNAKKSLYLQMNSLRAEDTAVYYCASGVYSFDYRGQGTLVTVSSGTGGGGSGGGGSGGGGSEFDIVMTQSPATLSVSPGERATLSCRASQSVSNDVVWYQQKPGQAPRLLIYYASNRYTGIPARFSGSGSGTEFTLTISSLQSEDFAVYYCQQDYTSPWTFGQGTKLEIKRLEDLKNVFPPEVAVFEPSEAEISHTQKATLVCLATGFYPDHVELSWWVNGKEVHSGVCTDPQPLKEQPALNDSRYCLSSRLRVSATFWQNPRNHFRCQVQFYGLSENDEWTQDRAKPVTQIVSAEAWGRADCGFTSESYQQGVLSATNLSVIGFRILLLKVAGFNLLMTLRLWSSRAKRSGSGATNFSLLKQAGDVEENPGPTSMDWIWRILFLVGAATGAHSFEEVQLVQSGAEVKKPGASVRVSCKASGYTFTNYGMNWVRQAPGQGLEWMGWINTYTGEPTYADDFKGRVTMTTDTSTSTAYMELRSLRSDDTAVYYCARIGDSSPSDYWGQGTLVTVSSTRIQNPDPAVYQLRDSKSSDKSVCLFTDFDSQTNVSQSKDSDVYITDKCVLDMRSMDFKSNSAVAWSNKSDFACANAFNNSIIPEDTFFPSPESSCDVKLVEKSFETDTNLNFQILYEILLGKATLYAVLVSALVLMAMVKRKDSRG

SEQ ID NO: 45069 - protein, 758 aa, synthetic construct
MALPVTALLLPLALLLHAARPEVQLVESGGGLVQPGGSLRLSCAASGFSFSDFWMSWVRQAPGKGLEWVATISQAGSEKDYVDSVKGRFTISRDNAKKSLYLQMNSLRAEDTAVYYCASGVYSFDYRGQGTLVTVSSGTGGGGSGGGGSGGGGSEFDIVMTQSPATLSVSPGERATLSCRASQSVSNDVVWYQQKPGQAPRLLIYYASNRYTGIPARFSGSGSGTEFTLTISSLQSEDFAVYYCQQDYTSPWTFGQGTKLEIKRLEIQNPDPAVYQLRDSKSSDKSVCLFTDFDSQTNVSQSKDSDVYITDKCVLDMRSMDFKSNSAVAWSNKSDFACANAFNNSIIPEDTFFPSPESSCDVKLVEKSFETDTNLNFQILYEILLGKATLYAVLVSALVLMAMVKRKDSRGRAKRSGSGVKQTLNFDLLKLAGDVESNPGPTSMDWIWRILFLVGAATGAHSFEEVQLVQSGAEVKKPGASVRVSCKASGYTFTNYGMNWVRQAPGQGLEWMGWINTYTGEPTYADDFKGRVTMTTDTSTSTAYMELRSLRSDDTAVYYCARIGDSSPSDYWGQGTLVTVSSTREDLKNVFPPEVAVFEPSEAEISHTQKATLVCLATGFYPDHVELSWWVNGKEVHSGVCTDPQPLKEQPALNDSRYCLSSRLRVSATFWQNPRNHFRCQVQFYGLSENDEWTQDRAKPVTQIVSAEAWGRADCGFTSESYQQGVLSATNLSVIGFRILLLKVAGFNLLMTLRLWSS

SEQ ID NO: 45070 - protein, 891 aa, synthetic construct
MALPVTALLLPLALLLHAARPEVQLVESGGGLVQPGGSLRLSCAASGFSFSDFWMSWVRQAPGKGLEWVATISQAGSEKDYVDSVKGRFTISRDNAKKSLYLQMNSLRAEDTAVYYCASGVYSFDYRGQGTLVTVSSGTGGGGSGGGGSGGGGSEFDIVMTQSPATLSVSPGERATLSCRASQSVSNDVVWYQQKPGQAPRLLIYYASNRYTGIPARFSGSGSGTEFTLTISSLQSEDFAVYYCQQDYTSPWTFGQGTKLEIKRLEDLKNVFPPEVAVFEPSEAEISHTQKATLVCLATGFYPDHVELSWWVNGKEVHSGVCTDPQPLKEQPALNDSRYCLSSRLRVSATFWQNPRNHFRCQVQFYGLSENDEWTQDRAKPVTQIVSAEAWGRADCGFTSESYQQGVLSATNLSVIGFRILLLKVAGFNLLMTLRLWSSRAKRSGSGATNFSLLKQAGDVEENPGPTSMDWIWRILFLVGAATGAHSGPQLQLQESGPGLVKPSETLSLTCTVSGDSISSGDYYWGWIRQPPGKGLEWIGHIYYSGVTYYNPSLKSRVTISVDTSRNQFSLKLSSVTAADTAVYYCTREDSSNWRSRGQGTLVTVSSGSGGGGSGGGGSGGGGSFEEVQLVQSGAEVKKPGASVRVSCKASGYTFTNYGMNWVRQAPGQGLEWMGWINTYTGEPTYADDFKGRVTMTTDTSTSTAYMELRSLRSDDTAVYYCARIGDSSPSDYWGQGTLVTVSSTRIQNPDPAVYQLRDSKSSDKSVCLFTDFDSQTNVSQSKDSDVYITDKCVLDMRSMDFKSNSAVAWSNKSDFACANAFNNSIIPEDTFFPSPESSCDVKLVEKSFETDTNLNFQILYEILLGKATLYAVLVSALVLMAMVKRKDSRG

SEQ ID NO: 45071 - protein, 895 aa, synthetic construct
MALPVTALLLPLALLLHAARPEVQLVESGGGLVQPGGSLRLSCAASGFSFSDFWMSWVRQAPGKGLEWVATISQAGSEKDYVDSVKGRFTISRDNAKKSLYLQMNSLRAEDTAVYYCASGVYSFDYRGQGTLVTVSSGTGGGGSGGGGSGGGGSEFDIVMTQSPATLSVSPGERATLSCRASQSVSNDVVWYQQKPGQAPRLLIYYASNRYTGIPARFSGSGSGTEFTLTISSLQSEDFAVYYCQQDYTSPWTFGQGTKLEIKRLEIQNPDPAVYQLRDSKSSDKSVCLFTDFDSQTNVSQSKDSDVYITDKCVLDMRSMDFKSNSAVAWSNKSDFACANAFNNSIIPEDTFFPSPESSCDVKLVEKSFETDTNLNFQILYEILLGKATLYAVLVSALVLMAMVKRKDSRGRAKRSGSGVKQTLNFDLLKLAGDVESNPGPTSMDWIWRILFLVGAATGAHSGPQLQLQESGPGLVKPSETLSLTCTVSGDSISSGDYYWGWIRQPPGKGLEWIGHIYYSGVTYYNPSLKSRVTISVDTSRNQFSLKLSSVTAADTAVYYCTREDSSNWRSRGQGTLVTVSSGSGGGGSGGGGSGGGGSFEEVQLVQSGAEVKKPGASVRVSCKASGYTFTNYGMNWVRQAPGQGLEWMGWINTYTGEPTYADDFKGRVTMTTDTSTSTAYMELRSLRSDDTAVYYCARIGDSSPSDYWGQGTLVTVSSTREDLKNVFPPEVAVFEPSEAEISHTQKATLVCLATGFYPDHVELSWWVNGKEVHSGVCTDPQPLKEQPALNDSRYCLSSRLRVSATFWQNPRNHFRCQVQFYGLSENDEWTQDRAKPVTQIVSAEAWGRADCGFTSESYQQGVLSATNLSVIGFRILLLKVAGFNLLMTLRLWSS

SEQ ID NO: 45072 - protein, 723 aa, synthetic construct
MALPVTALLLPLALLLHAARPDIVMTQSPATLSVSPGERATLSCRASQSVSNDVVWYQQKPGQAPRLLIYYASNRYTGIPARFSGSGSGTEFTLTISSLQSEDFAVYYCQQDYTSPWTFGQGTKLEIKRLEDLKNVFPPEVAVFEPSEAEISHTQKATLVCLATGFYPDHVELSWWVNGKEVHSGVCTDPQPLKEQPALNDSRYCLSSRLRVSATFWQNPRNHFRCQVQFYGLSENDEWTQDRAKPVTQIVSAEAWGRADDVIKIHWQEKKSNTILGSQEGNTMKTNDTYMKFSWLTVPEKSLDKEHRCIVRHENNKNGVDQEIIFPPIKTDVITMDPKDNCSKDANDTLLLQLTNTSAYYMYLLLLLKSVVYFAIITCCLLMAMVKRKDSRGRAKRSGSGATNFSLLKQAGDVEENPGPTSMDWIWRILFLVGAATGAHSFEEVQLVQSGAEVKKPGASVRVSCKASGYTFTNYGMNWVRQAPGQGLEWMGWINTYTGEPTYADDFKGRVTMTTDTSTSTAYMELRSLRSDDTAVYYCARIGDSSPSDYWGQGTLVTVSSTRIQNPDPAVYQLRDSKSSDKSVCLFTDFDSQTNVSQSKDSDVYITDKCVLDMRSMDFKSNSAVAWSNKSDFACANAFNNSIIPEDTFFPSPESSDSTDHVKPKETENTKQPSKSCHKPKAIVHTEKVNMMSLTVLGLRMLFAKTVAVNFLLTAKLFFLLTA

SEQ ID NO: 45073 - protein, 727 aa, synthetic construct
MALPVTALLLPLALLLHAARPDIVMTQSPATLSVSPGERATLSCRASQSVSNDVVWYQQKPGQAPRLLIYYASNRYTGIPARFSGSGSGTEFTLTISSLQSEDFAVYYCQQDYTSPWTFGQGTKLEIKRLEIQNPDPAVYQLRDSKSSDKSVCLFTDFDSQTNVSQSKDSDVYITDKCVLDMRSMDFKSNSAVAWSNKSDFACANAFNNSIIPEDTFFPSPESSDSTDHVKPKETENTKQPSKSCHKPKAIVHTEKVNMMSLTVLGLRMLFAKTVAVNFLLTAKLFFLLTARAKRSGSGVKQTLNFDLLKLAGDVESNPGPTSMDWIWRILFLVGAATGAHSFEEVQLVQSGAEVKKPGASVRVSCKASGYTFTNYGMNWVRQAPGQGLEWMGWINTYTGEPTYADDFKGRVTMTTDTSTSTAYMELRSLRSDDTAVYYCARIGDSSPSDYWGQGTLVTVSSTREDLKNVFPPEVAVFEPSEAEISHTQKATLVCLATGFYPDHVELSWWVNGKEVHSGVCTDPQPLKEQPALNDSRYCLSSRLRVSATFWQNPRNHFRCQVQFYGLSENDEWTQDRAKPVTQIVSAEAWGRADDVIKIHWQEKKSNTILGSQEGNTMKTNDTYMKFSWLTVPEKSLDKEHRCIVRHENNKNGVDQEIIFPPIKTDVITMDPKDNCSKDANDTLLLQLTNTSAYYMYLLLLLKSVVYFAIITCCLLMAMVKRKDSRG

SEQ ID NO: 45074 - protein, 858 aa, synthetic construct
MALPVTALLLPLALLLHAARPEVQLVESGGGLVQPGGSLRLSCAASGFSFSDFWMSWVRQAPGKGLEWVATISQAGSEKDYVDSVKGRFTISRDNAKKSLYLQMNSLRAEDTAVYYCASGVYSFDYRGQGTLVTVSSGTGGGGSGGGGSGGGGSEFDIVMTQSPATLSVSPGERATLSCRASQSVSNDVVWYQQKPGQAPRLLIYYASNRYTGIPARFSGSGSGTEFTLTISSLQSEDFAVYYCQQDYTSPWTFGQGTKLEIKRLEDLKNVFPPEVAVFEPSEAEISHTQKATLVCLATGFYPDHVELSWWVNGKEVHSGVCTDPQPLKEQPALNDSRYCLSSRLRVSATFWQNPRNHFRCQVQFYGLSENDEWTQDRAKPVTQIVSAEAWGRADDVIKIHWQEKKSNTILGSQEGNTMKTNDTYMKFSWLTVPEKSLDKEHRCIVRHENNKNGVDQEIIFPPIKTDVITMDPKDNCSKDANDTLLLQLTNTSAYYMYLLLLLKSVVYFAIITCCLLMAMVKRKDSRGRAKRSGSGATNFSLLKQAGDVEENPGPTSMDWIWRILFLVGAATGAHSFEEVQLVQSGAEVKKPGASVRVSCKASGYTFTNYGMNWVRQAPGQGLEWMGWINTYTGEPTYADDFKGRVTMTTDTSTSTAYMELRSLRSDDTAVYYCARIGDSSPSDYWGQGTLVTVSSTRIQNPDPAVYQLRDSKSSDKSVCLFTDFDSQTNVSQSKDSDVYITDKCVLDMRSMDFKSNSAVAWSNKSDFACANAFNNSIIPEDTFFPSPESSDSTDHVKPKETENTKQPSKSCHKPKAIVHTEKVNMMSLTVLGLRMLFAKTVAVNFLLTAKLFFLLTA

SEQ ID NO: 45075 - protein, 862 aa, synthetic construct
MALPVTALLLPLALLLHAARPEVQLVESGGGLVQPGGSLRLSCAASGFSFSDFWMSWVRQAPGKGLEWVATISQAGSEKDYVDSVKGRFTISRDNAKKSLYLQMNSLRAEDTAVYYCASGVYSFDYRGQGTLVTVSSGTGGGGSGGGGSGGGGSEFDIVMTQSPATLSVSPGERATLSCRASQSVSNDVVWYQQKPGQAPRLLIYYASNRYTGIPARFSGSGSGTEFTLTISSLQSEDFAVYYCQQDYTSPWTFGQGTKLEIKRLEIQNPDPAVYQLRDSKSSDKSVCLFTDFDSQTNVSQSKDSDVYITDKCVLDMRSMDFKSNSAVAWSNKSDFACANAFNNSIIPEDTFFPSPESSDSTDHVKPKETENTKQPSKSCHKPKAIVHTEKVNMMSLTVLGLRMLFAKTVAVNFLLTAKLFFLLTARAKRSGSGVKQTLNFDLLKLAGDVESNPGPTSMDWIWRILFLVGAATGAHSFEEVQLVQSGAEVKKPGASVRVSCKASGYTFTNYGMNWVRQAPGQGLEWMGWINTYTGEPTYADDFKGRVTMTTDTSTSTAYMELRSLRSDDTAVYYCARIGDSSPSDYWGQGTLVTVSSTREDLKNVFPPEVAVFEPSEAEISHTQKATLVCLATGFYPDHVELSWWVNGKEVHSGVCTDPQPLKEQPALNDSRYCLSSRLRVSATFWQNPRNHFRCQVQFYGLSENDEWTQDRAKPVTQIVSAEAWGRADDVIKIHWQEKKSNTILGSQEGNTMKTNDTYMKFSWLTVPEKSLDKEHRCIVRHENNKNGVDQEIIFPPIKTDVITMDPKDNCSKDANDTLLLQLTNTSAYYMYLLLLLKSVVYFAIITCCLLMAMVKRKDSRG

SEQ ID NO: 45076 - protein, 995 aa, synthetic construct
MALPVTALLLPLALLLHAARPEVQLVESGGGLVQPGGSLRLSCAASGFSFSDFWMSWVRQAPGKGLEWVATISQAGSEKDYVDSVKGRFTISRDNAKKSLYLQMNSLRAEDTAVYYCASGVYSFDYRGQGTLVTVSSGTGGGGSGGGGSGGGGSEFDIVMTQSPATLSVSPGERATLSCRASQSVSNDVVWYQQKPGQAPRLLIYYASNRYTGIPARFSGSGSGTEFTLTISSLQSEDFAVYYCQQDYTSPWTFGQGTKLEIKRLEDLKNVFPPEVAVFEPSEAEISHTQKATLVCLATGFYPDHVELSWWVNGKEVHSGVCTDPQPLKEQPALNDSRYCLSSRLRVSATFWQNPRNHFRCQVQFYGLSENDEWTQDRAKPVTQIVSAEAWGRADDVIKIHWQEKKSNTILGSQEGNTMKTNDTYMKFSWLTVPEKSLDKEHRCIVRHENNKNGVDQEIIFPPIKTDVITMDPKDNCSKDANDTLLLQLTNTSAYYMYLLLLLKSVVYFAIITCCLLMAMVKRKDSRGRAKRSGSGATNFSLLKQAGDVEENPGPTSMDWIWRILFLVGAATGAHSGPQLQLQESGPGLVKPSETLSLTCTVSGDSISSGDYYWGWIRQPPGKGLEWIGHIYYSGVTYYNPSLKSRVTISVDTSRNQFSLKLSSVTAADTAVYYCTREDSSNWRSRGQGTLVTVSSGSGGGGSGGGGSGGGGSFEEVQLVQSGAEVKKPGASVRVSCKASGYTFTNYGMNWVRQAPGQGLEWMGWINTYTGEPTYADDFKGRVTMTTDTSTSTAYMELRSLRSDDTAVYYCARIGDSSPSDYWGQGTLVTVSSTRIQNPDPAVYQLRDSKSSDKSVCLFTDFDSQTNVSQSKDSDVYITDKCVLDMRSMDFKSNSAVAWSNKSDFACANAFNNSIIPEDTFFPSPESSDSTDHVKPKETENTKQPSKSCHKPKAIVHTEKVNMMSLTVLGLRMLFAKTVAVNFLLTAKLFFLLTA

SEQ ID NO: 45077 - protein, 999 aa, synthetic construct
MALPVTALLLPLALLLHAARPEVQLVESGGGLVQPGGSLRLSCAASGFSFSDFWMSWVRQAPGKGLEWVATISQAGSEKDYVDSVKGRFTISRDNAKKSLYLQMNSLRAEDTAVYYCASGVYSFDYRGQGTLVTVSSGTGGGGSGGGGSGGGGSEFDIVMTQSPATLSVSPGERATLSCRASQSVSNDVVWYQQKPGQAPRLLIYYASNRYTGIPARFSGSGSGTEFTLTISSLQSEDFAVYYCQQDYTSPWTFGQGTKLEIKRLEIQNPDPAVYQLRDSKSSDKSVCLFTDFDSQTNVSQSKDSDVYITDKCVLDMRSMDFKSNSAVAWSNKSDFACANAFNNSIIPEDTFFPSPESSDSTDHVKPKETENTKQPSKSCHKPKAIVHTEKVNMMSLTVLGLRMLFAKTVAVNFLLTAKLFFLLTARAKRSGSGVKQTLNFDLLKLAGDVESNPGPTSMDWIWRILFLVGAATGAHSGPQLQLQESGPGLVKPSETLSLTCTVSGDSISSGDYYWGWIRQPPGKGLEWIGHIYYSGVTYYNPSLKSRVTISVDTSRNQFSLKLSSVTAADTAVYYCTREDSSNWRSRGQGTLVTVSSGSGGGGSGGGGSGGGGSFEEVQLVQSGAEVKKPGASVRVSCKASGYTFTNYGMNWVRQAPGQGLEWMGWINTYTGEPTYADDFKGRVTMTTDTSTSTAYMELRSLRSDDTAVYYCARIGDSSPSDYWGQGTLVTVSSTREDLKNVFPPEVAVFEPSEAEISHTQKATLVCLATGFYPDHVELSWWVNGKEVHSGVCTDPQPLKEQPALNDSRYCLSSRLRVSATFWQNPRNHFRCQVQFYGLSENDEWTQDRAKPVTQIVSAEAWGRADDVIKIHWQEKKSNTILGSQEGNTMKTNDTYMKFSWLTVPEKSLDKEHRCIVRHENNKNGVDQEIIFPPIKTDVITMDPKDNCSKDANDTLLLQLTNTSAYYMYLLLLLKSVVYFAIITCCLLMAMVKRKDSRG

SEQ ID NO: 45078 - protein, 721 aa, synthetic construct
MALPVTALLLPLALLLHAARPDIVMTQSPATLSVSPGERATLSCRASQSVSNDVVWYQQKPGQAPRLLIYYASNRYTGIPARFSGSGSGTEFTLTISSLQSEDFAVYYCQQDYTSPWTFGQGTKLEIKRLEDLKNVFPPEVAVFEPSEAEISHTQKATLVCLATGFYPDHVELSWWVNGKEVHSGVCTDPQPLKEQPALNDSRYCLSSRLRVSATFWQNPRNHFRCQVQFYGLSENDEWTQDRAKPVTQIVSAEAWGRADDVIKIHWQEKKSNTILGSQEGNTMKTNDTYMKFSWLTVPEKSLDKEHRCIVRHENNKNGVDQEIIFPPIKTDVITMDPKDNCSKDANDTLLLQLTNTSAYYMYLLLLLKSVVYFAIITCCLLRRTAFCCNGEKSRAKRSGSGATNFSLLKQAGDVEENPGPTSMDWIWRILFLVGAATGAHSFEEVQLVQSGAEVKKPGASVRVSCKASGYTFTNYGMNWVRQAPGQGLEWMGWINTYTGEPTYADDFKGRVTMTTDTSTSTAYMELRSLRSDDTAVYYCARIGDSSPSDYWGQGTLVTVSSTRIQNPDPAVYQLRDSKSSDKSVCLFTDFDSQTNVSQSKDSDVYITDKCVLDMRSMDFKSNSAVAWSNKSDFACANAFNNSIIPEDTFFPSPESSDSTDHVKPKETENTKQPSKSCHKPKAIVHTEKVNMMSLTVLGLRMLFAKTVAVNFLLTAKLFFL

SEQ ID NO: 45079 - protein, 725 aa, synthetic construct
MALPVTALLLPLALLLHAARPDIVMTQSPATLSVSPGERATLSCRASQSVSNDVVWYQQKPGQAPRLLIYYASNRYTGIPARFSGSGSGTEFTLTISSLQSEDFAVYYCQQDYTSPWTFGQGTKLEIKRLEIQNPDPAVYQLRDSKSSDKSVCLFTDFDSQTNVSQSKDSDVYITDKCVLDMRSMDFKSNSAVAWSNKSDFACANAFNNSIIPEDTFFPSPESSDSTDHVKPKETENTKQPSKSCHKPKAIVHTEKVNMMSLTVLGLRMLFAKTVAVNFLLTAKLFFLRAKRSGSGVKQTLNFDLLKLAGDVESNPGPTSMDWIWRILFLVGAATGAHSFEEVQLVQSGAEVKKPGASVRVSCKASGYTFTNYGMNWVRQAPGQGLEWMGWINTYTGEPTYADDFKGRVTMTTDTSTSTAYMELRSLRSDDTAVYYCARIGDSSPSDYWGQGTLVTVSSTREDLKNVFPPEVAVFEPSEAEISHTQKATLVCLATGFYPDHVELSWWVNGKEVHSGVCTDPQPLKEQPALNDSRYCLSSRLRVSATFWQNPRNHFRCQVQFYGLSENDEWTQDRAKPVTQIVSAEAWGRADDVIKIHWQEKKSNTILGSQEGNTMKTNDTYMKFSWLTVPEKSLDKEHRCIVRHENNKNGVDQEIIFPPIKTDVITMDPKDNCSKDANDTLLLQLTNTSAYYMYLLLLLKSVVYFAIITCCLLRRTAFCCNGEKS

SEQ ID NO: 45080 - protein, 856 aa, synthetic construct
MALPVTALLLPLALLLHAARPEVQLVESGGGLVQPGGSLRLSCAASGFSFSDFWMSWVRQAPGKGLEWVATISQAGSEKDYVDSVKGRFTISRDNAKKSLYLQMNSLRAEDTAVYYCASGVYSFDYRGQGTLVTVSSGTGGGGSGGGGSGGGGSEFDIVMTQSPATLSVSPGERATLSCRASQSVSNDVVWYQQKPGQAPRLLIYYASNRYTGIPARFSGSGSGTEFTLTISSLQSEDFAVYYCQQDYTSPWTFGQGTKLEIKRLEDLKNVFPPEVAVFEPSEAEISHTQKATLVCLATGFYPDHVELSWWVNGKEVHSGVCTDPQPLKEQPALNDSRYCLSSRLRVSATFWQNPRNHFRCQVQFYGLSENDEWTQDRAKPVTQIVSAEAWGRADDVIKIHWQEKKSNTILGSQEGNTMKTNDTYMKFSWLTVPEKSLDKEHRCIVRHENNKNGVDQEIIFPPIKTDVITMDPKDNCSKDANDTLLLQLTNTSAYYMYLLLLLKSVVYFAIITCCLLRRTAFCCNGEKSRAKRSGSGATNFSLLKQAGDVEENPGPTSMDWIWRILFLVGAATGAHSFEEVQLVQSGAEVKKPGASVRVSCKASGYTFTNYGMNWVRQAPGQGLEWMGWINTYTGEPTYADDFKGRVTMTTDTSTSTAYMELRSLRSDDTAVYYCARIGDSSPSDYWGQGTLVTVSSTRIQNPDPAVYQLRDSKSSDKSVCLFTDFDSQTNVSQSKDSDVYITDKCVLDMRSMDFKSNSAVAWSNKSDFACANAFNNSIIPEDTFFPSPESSDSTDHVKPKETENTKQPSKSCHKPKAIVHTEKVNMMSLTVLGLRMLFAKTVAVNFLLTAKLFFL

SEQ ID NO: 45081 - protein, 993 aa, synthetic construct
MALPVTALLLPLALLLHAARPEVQLVESGGGLVQPGGSLRLSCAASGFSFSDFWMSWVRQAPGKGLEWVATISQAGSEKDYVDSVKGRFTISRDNAKKSLYLQMNSLRAEDTAVYYCASGVYSFDYRGQGTLVTVSSGTGGGGSGGGGSGGGGSEFDIVMTQSPATLSVSPGERATLSCRASQSVSNDVVWYQQKPGQAPRLLIYYASNRYTGIPARFSGSGSGTEFTLTISSLQSEDFAVYYCQQDYTSPWTFGQGTKLEIKRLEDLKNVFPPEVAVFEPSEAEISHTQKATLVCLATGFYPDHVELSWWVNGKEVHSGVCTDPQPLKEQPALNDSRYCLSSRLRVSATFWQNPRNHFRCQVQFYGLSENDEWTQDRAKPVTQIVSAEAWGRADDVIKIHWQEKKSNTILGSQEGNTMKTNDTYMKFSWLTVPEKSLDKEHRCIVRHENNKNGVDQEIIFPPIKTDVITMDPKDNCSKDANDTLLLQLTNTSAYYMYLLLLLKSVVYFAIITCCLLRRTAFCCNGEKSRAKRSGSGATNFSLLKQAGDVEENPGPTSMDWIWRILFLVGAATGAHSGPQLQLQESGPGLVKPSETLSLTCTVSGDSISSGDYYWGWIRQPPGKGLEWIGHIYYSGVTYYNPSLKSRVTISVDTSRNQFSLKLSSVTAADTAVYYCTREDSSNWRSRGQGTLVTVSSGSGGGGSGGGGSGGGGSFEEVQLVQSGAEVKKPGASVRVSCKASGYTFTNYGMNWVRQAPGQGLEWMGWINTYTGEPTYADDFKGRVTMTTDTSTSTAYMELRSLRSDDTAVYYCARIGDSSPSDYWGQGTLVTVSSTRIQNPDPAVYQLRDSKSSDKSVCLFTDFDSQTNVSQSKDSDVYITDKCVLDMRSMDFKSNSAVAWSNKSDFACANAFNNSIIPEDTFFPSPESSDSTDHVKPKETENTKQPSKSCHKPKAIVHTEKVNMMSLTVLGLRMLFAKTVAVNFLLTAKLFFL

SEQ ID NO: 45082 - protein, 619 aa, synthetic construct
MALPVTALLLPLALLLHAARPDIVMTQSPATLSVSPGERATLSCRASQSVSNDVVWYQQKPGQAPRLLIYYASNRYTGIPARFSGSGSGTEFTLTISSLQSEDFAVYYCQQDYTSPWTFGQGTKLEIKRLEDLKNVFPPEVAVFEPSEAEISHTQKATLVCLATGFYPDHVELSWWVNGKEVHSGVSTDPQPLKEQPALNDSRYCLSSRLRVSATFWQNPRNHFRCQVQFYGLSENDEWTQDRAKPVTQIVSAEAWGRADCDVKLVEKSFETDTNLNFQNLSVIGFRILLLKVAGFNLLMTLRLWSSRAKRSGSGATNFSLLKQAGDVEENPGPTSMDWIWRILFLVGAATGAHSFEEVQLVQSGAEVKKPGASVRVSCKASGYTFTNYGMNWVRQAPGQGLEWMGWINTYTGEPTYADDFKGRVTMTTDTSTSTAYMELRSLRSDDTAVYYCARIGDSSPSDYWGQGTLVTVSSTRIQNPDPAVYQLRDSKSSDKSVCLFTDFDSQTNVSQSKDSDVYITDKTVLDMRSMDFKSNSAVAWSNKSDFACANAFNNSIIPEDTFFPSPESSCGFTSESYQQGVLSATILYEILLGKATLYAVLVSALVLMAMVKRKDSRG

SEQ ID NO: 45083 - protein, 619 aa, synthetic construct
MALPVTALLLPLALLLHAARPDIVMTQSPATLSVSPGERATLSCRASQSVSNDVVWYQQKPGQAPRLLIYYASNRYTGIPARFSGSGSGTEFTLTISSLQSEDFAVYYCQQDYTSPWTFGQGTKLEIKRLEDLKNVFPPEVAVFEPSEAEISHTQKATLVCLATGFYPDHVELSWWVNGKEVHSGVSTDPQPLKEQPALNDSRYCLSSRLRVSATFWQNPRNHFRCQVQFYGLSENDEWTQDRAKPVTQIVSAEAWGRADCGFTSESYQQGVLSATNLSVIGFRILLLKVAGFNLLMTLRLWSSRAKRSGSGATNFSLLKQAGDVEENPGPTSMDWIWRILFLVGAATGAHSFEEVQLVQSGAEVKKPGASVRVSCKASGYTFTNYGMNWVRQAPGQGLEWMGWINTYTGEPTYADDFKGRVTMTTDTSTSTAYMELRSLRSDDTAVYYCARIGDSSPSDYWGQGTLVTVSSTRIQNPDPAVYQLRDSKSSDKSVCLFTDFDSQTNVSQSKDSDVYITDKTVLDMRSMDFKSNSAVAWSNKSDFACANAFNNSIIPEDTFFPSPESSCDVKLVEKSFETDTNLNFQILYEILLGKATLYAVLVSALVLMAMVKRKDSRG

SEQ ID NO: 45084 - protein, 723 aa, synthetic construct
MALPVTALLLPLALLLHAARPDIVMTQSPATLSVSPGERATLSCRASQSVSNDVVWYQQKPGQAPRLLIYYASNRYTGIPARFSGSGSGTEFTLTISSLQSEDFAVYYCQQDYTSPWTFGQGTKLEIKRLEDLKNVFPPEVAVFEPSEAEISHTQKATLVCLATGFYPDHVELSWWVNGKEVHSGVSTDPQPLKEQPALNDSRYCLSSRLRVSATFWQNPRNHFRCQVQFYGLSENDEWTQDRAKPVTQIVSAEAWGRADDVIKIHWQEKKSNTILGSQEGNTMKTNDTYMKFSWLTVPEKSLDKEHRCIVRHENNKNGVDQEIIFPPIKTDVITMDPKDNCSKDANDTLLLQLTNTSAYYMYLLLLLKSVVYFAIITCCLLMAMVKRKDSRGRAKRSGSGATNFSLLKQAGDVEENPGPTSMDWIWRILFLVGAATGAHSFEEVQLVQSGAEVKKPGASVRVSCKASGYTFTNYGMNWVRQAPGQGLEWMGWINTYTGEPTYADDFKGRVTMTTDTSTSTAYMELRSLRSDDTAVYYCARIGDSSPSDYWGQGTLVTVSSTRIQNPDPAVYQLRDSKSSDKSVCLFTDFDSQTNVSQSKDSDVYITDKTVLDMRSMDFKSNSAVAWSNKSDFACANAFNNSIIPEDTFFPSPESSDSTDHVKPKETENTKQPSKSCHKPKAIVHTEKVNMMSLTVLGLRMLFAKTVAVNFLLTAKLFFLLTA

SEQ ID NO: 45085 - protein, 721 aa, synthetic construct
MALPVTALLLPLALLLHAARPDIVMTQSPATLSVSPGERATLSCRASQSVSNDVVWYQQKPGQAPRLLIYYASNRYTGIPARFSGSGSGTEFTLTISSLQSEDFAVYYCQQDYTSPWTFGQGTKLEIKRLEDLKNVFPPEVAVFEPSEAEISHTQKATLVCLATGFYPDHVELSWWVNGKEVHSGVSTDPQPLKEQPALNDSRYCLSSRLRVSATFWQNPRNHFRCQVQFYGLSENDEWTQDRAKPVTQIVSAEAWGRADDVIKIHWQEKKSNTILGSQEGNTMKTNDTYMKFSWLTVPEKSLDKEHRCIVRHENNKNGVDQEIIFPPIKTDVITMDPKDNCSKDANDTLLLQLTNTSAYYMYLLLLLKSVVYFAIITCCLLRRTAFCCNGEKSRAKRSGSGATNFSLLKQAGDVEENPGPTSMDWIWRILFLVGAATGAHSFEEVQLVQSGAEVKKPGASVRVSCKASGYTFTNYGMNWVRQAPGQGLEWMGWINTYTGEPTYADDFKGRVTMTTDTSTSTAYMELRSLRSDDTAVYYCARIGDSSPSDYWGQGTLVTVSSTRIQNPDPAVYQLRDSKSSDKSVCLFTDFDSQTNVSQSKDSDVYITDKTVLDMRSMDFKSNSAVAWSNKSDFACANAFNNSIIPEDTFFPSPESSDSTDHVKPKETENTKQPSKSCHKPKAIVHTEKVNMMSLTVLGLRMLFAKTVAVNFLLTAKLFFL

SEQ ID NO: 45086 - protein, 864 aa, synthetic construct
MALPVTALLLPLALLLHAARPLEEDLKNVFPPEVAVFEPSEAEISHTQKATLVCLATGFYPDHVELSWWVNGKEVHSGVCTDPQPLKEQPALNDSRYCLSSRLRVSATFWQNPRNHFRCQVQFYGLSENDEWTQDRAKPVTQIVSAEAWGRADCGFTSESYQQGVLSATNLSVIGFRILLLKVAGFNLLMTLRLWSSRAKRSGSGATNFSLLKQAGDVEENPGPTSMALPVTALLLPLALLLHAARPDIVMTQSPATLSVSPGERATLSCRASQSVSNDVVWYQQKPGQAPRLLIYYASNRYTGIPARFSGSGSGTEFTLTISSLQSEDFAVYYCQQDYTSPWTFGQGTKLEIKRGGGGSGGGGSGGGGSEVQLVQSGAEVKKPGASVRVSCKASGYTFTNYGMNWVRQAPGQGLEWMGWINTYTGEPTYADDFKGRVTMTTDTSTSTAYMELRSLRSDDTAVYYCARIGDSSPSDYWGQGTLVTVSSTRIQNPDPAVYQLRDSKSSDKSVCLFTDFDSQTNVSQSKDSDVYITDKCVLDMRSMDFKSNSAVAWSNKSDFACANAFNNSIIPEDTFFPSPESSCDVKLVEKSFETDTNLNFQILYEVIGFRILLLKVAGFNLLMTLRLWSSRAKRSGSGVKQTLNFDLLKLAGDVESNPGPSRGHMTEYKPTVRLATRDDVPRAVRTLAAAFADYPATRHTVDPDRHIERVTELQELFLTRVGLDIGKVWVADDGAAVAVWTTPESVEAGAVFAEIGPRMAELSGSRLAAQQQMEGLLAPHRPKEPAWFLATVGVSPDHQGKGLGSAVVLPGVEAAERAGVPAFLETSAPRNLPFYERLGFTVTADVEVPEGPRTWCMTRKPGA

SEQ ID NO: 45087 - protein, 864 aa, synthetic construct
MALPVTALLLPLALLLHAARPLEIQNPDPAVYQLRDSKSSDKSVCLFTDFDSQTNVSQSKDSDVYITDKCVLDMRSMDFKSNSAVAWSNKSDFACANAFNNSIIPEDTFFPSPESSCDVKLVEKSFETDTNLNFQILYEVIGFRILLLKVAGFNLLMTLRLWSSRAKRSGSGATNFSLLKQAGDVEENPGPTSMALPVTALLLPLALLLHAARPDIVMTQSPATLSVSPGERATLSCRASQSVSNDVVWYQQKPGQAPRLLIYYASNRYTGIPARFSGSGSGTEFTLTISSLQSEDFAVYYCQQDYTSPWTFGQGTKLEIKRGGGGSGGGGSGGGGSEVQLVQSGAEVKKPGASVRVSCKASGYTFTNYGMNWVRQAPGQGLEWMGWINTYTGEPTYADDFKGRVTMTTDTSTSTAYMELRSLRSDDTAVYYCARIGDSSPSDYWGQGTLVTVSSTREDLKNVFPPEVAVFEPSEAEISHTQKATLVCLATGFYPDHVELSWWVNGKEVHSGVCTDPQPLKEQPALNDSRYCLSSRLRVSATFWQNPRNHFRCQVQFYGLSENDEWTQDRAKPVTQIVSAEAWGRADCGFTSESYQQGVLSATNLSVIGFRILLLKVAGFNLLMTLRLWSSRAKRSGSGVKQTLNFDLLKLAGDVESNPGPSRGHMTEYKPTVRLATRDDVPRAVRTLAAAFADYPATRHTVDPDRHIERVTELQELFLTRVGLDIGKVWVADDGAAVAVWTTPESVEAGAVFAEIGPRMAELSGSRLAAQQQMEGLLAPHRPKEPAWFLATVGVSPDHQGKGLGSAVVLPGVEAAERAGVPAFLETSAPRNLPFYERLGFTVTADVEVPEGPRTWCMTRKPGA

SEQ ID NO: 45088 - protein, 864 aa, synthetic construct; identical to SEQ ID NO: 45086

SEQ ID NO: 45089 - protein, 972 aa, synthetic construct
MALPVTALLLPLALLLHAARPLEEDLKNVFPPEVAVFEPSEAEISHTQKATLVCLATGFYPDHVELSWWVNGKEVHSGVSTDPQPLKEQPALNDSRYCLSSRLRVSATFWQNPRNHFRCQVQFYGLSENDEWTQDRAKPVTQIVSAEAWGRADDVIKIHWQEKKSNTILGSQEGNTMKTNDTYMKFSWLTVPEKSLDKEHRCIVRHENNKNGVDQEIIFPPIKTDVITMDPKDNCSKDANDTLLLQLTNTSAYYMYLLLLLKSVVYFAIITCCLLMAMVKRKDSRGRAKRSGSGATNFSLLKQAGDVEENPGPTSMALPVTALLLPLALLLHAARPDIVMTQSPATLSVSPGERATLSCRASQSVSNDVVWYQQKPGQAPRLLIYYASNRYTGIPARFSGSGSGTEFTLTISSLQSEDFAVYYCQQDYTSPWTFGQGTKLEIKRGGGGSGGGGSGGGGSEVQLVQSGAEVKKPGASVRVSCKASGYTFTNYGMNWVRQAPGQGLEWMGWINTYTGEPTYADDFKGRVTMTTDTSTSTAYMELRSLRSDDTAVYYCARIGDSSPSDYWGQGTLVTVSSTRIQNPDPAVYQLRDSKSSDKSVCLFTDFDSQTNVSQSKDSDVYITDKTVLDMRSMDFKSNSAVAWSNKSDFACANAFNNSIIPEDTFFPSPESSDSTDHVKPKETENTKQPSKSCHKPKAIVHTEKVNMMSLTVLGLRMLFAKTVAVNFLLTAKLFFLLTARAKRSGSGVKQTLNFDLLKLAGDVESNPGPSRGHMTEYKPTVRLATRDDVPRAVRTLAAAFADYPATRHTVDPDRHIERVTELQELFLTRVGLDIGKVWVADDGAAVAVWTTPESVEAGAVFAEIGPRMAELSGSRLAAQQQMEGLLAPHRPKEPAWFLATVGVSPDHQGKGLGSAVVLPGVEAAERAGVPAFLETSAPRNLPFYERLGFTVTADVEVPEGPRTWCMTRKPGA

SEQ ID NO: 45090 - protein, 972 aa, synthetic construct
MALPVTALLLPLALLLHAARPLEIQNPDPAVYQLRDSKSSDKSVCLFTDFDSQTNVSQSKDSDVYITDKTVLDMRSMDFKSNSAVAWSNKSDFACANAFNNSIIPEDTFFPSPESSDSTDHVKPKETENTKQPSKSCHKPKAIVHTEKVNMMSLTVLGLRMLFAKTVAVNFLLTAKLFFLLTARAKRSGSGATNFSLLKQAGDVEENPGPTSMALPVTALLLPLALLLHAARPDIVMTQSPATLSVSPGERATLSCRASQSVSNDVVWYQQKPGQAPRLLIYYASNRYTGIPARFSGSGSGTEFTLTISSLQSEDFAVYYCQQDYTSPWTFGQGTKLEIKRGGGGSGGGGSGGGGSEVQLVQSGAEVKKPGASVRVSCKASGYTFTNYGMNWVRQAPGQGLEWMGWINTYTGEPTYADDFKGRVTMTTDTSTSTAYMELRSLRSDDTAVYYCARIGDSSPSDYWGQGTLVTVSSTREDLKNVFPPEVAVFEPSEAEISHTQKATLVCLATGFYPDHVELSWWVNGKEVHSGVSTDPQPLKEQPALNDSRYCLSSRLRVSATFWQNPRNHFRCQVQFYGLSENDEWTQDRAKPVTQIVSAEAWGRADDVIKIHWQEKKSNTILGSQEGNTMKTNDTYMKFSWLTVPEKSLDKEHRCIVRHENNKNGVDQEIIFPPIKTDVITMDPKDNCSKDANDTLLLQLTNTSAYYMYLLLLLKSVVYFAIITCCLLMAMVKRKDSRGRAKRSGSGVKQTLNFDLLKLAGDVESNPGPSRGHMTEYKPTVRLATRDDVPRAVRTLAAAFADYPATRHTVDPDRHIERVTELQELFLTRVGLDIGKVWVADDGAAVAVWTTPESVEAGAVFAEIGPRMAELSGSRLAAQQQMEGLLAPHRPKEPAWFLATVGVSPDHQGKGLGSAVVLPGVEAAERAGVPAFLETSAPRNLPFYERLGFTVTADVEVPEGPRTWCMTRKPGA

SEQ ID NO: 45091 - protein, 970 aa, synthetic construct
MALPVTALLLPLALLLHAARPLEEDLKNVFPPEVAVFEPSEAEISHTQKATLVCLATGFYPDHVELSWWVNGKEVHSGVCTDPQPLKEQPALNDSRYCLSSRLRVSATFWQNPRNHFRCQVQFYGLSENDEWTQDRAKPVTQIVSAEAWGRADDVIKIHWQEKKSNTILGSQEGNTMKTNDTYMKFSWLTVPEKSLDKEHRCIVRHENNKNGVDQEIIFPPIKTDVITMDPKDNCSKDANDTLLLQLTNTSAYYMYLLLLLKSVVYFAIITCCLLRRTAFCCNGEKSRAKRSGSGATNFSLLKQAGDVEENPGPTSMALPVTALLLPLALLLHAARPDIVMTQSPATLSVSPGERATLSCRASQSVSNDVVWYQQKPGQAPRLLIYYASNRYTGIPARFSGSGSGTEFTLTISSLQSEDFAVYYCQQDYTSPWTFGQGTKLEIKRGGGGSGGGGSGGGGSEVQLVQSGAEVKKPGASVRVSCKASGYTFTNYGMNWVRQAPGQGLEWMGWINTYTGEPTYADDFKGRVTMTTDTSTSTAYMELRSLRSDDTAVYYCARIGDSSPSDYWGQGTLVTVSSTRIQNPDPAVYQLRDSKSSDKSVCLFTDFDSQTNVSQSKDSDVYITDKCVLDMRSMDFKSNSAVAWSNKSDFACANAFNNSIIPEDTFFPSPESSDSTDHVKPKETENTKQPSKSCHKPKAIVHTEKVNMMSLTVLGLRMLFAKTVAVNFLLTAKLFFLRAKRSGSGVKQTLNFDLLKLAGDVESNPGPSRGHMTEYKPTVRLATRDDVPRAVRTLAAAFADYPATRHTVDPDRHIERVTELQELFLTRVGLDIGKVWVADDGAAVAVWTTPESVEAGAVFAEIGPRMAELSGSRLAAQQQMEGLLAPHRPKEPAWFLATVGVSPDHQGKGLGSAVVLPGVEAAERAGVPAFLETSAPRNLPFYERLGFTVTADVEVPEGPRTWCMTRKPGA

SEQ ID NO: 45092 - protein, 970 aa, synthetic construct
MALPVTALLLPLALLLHAARPLEIQNPDPAVYQLRDSKSSDKSVCLFTDFDSQTNVSQSKDSDVYITDKCVLDMRSMDFKSNSAVAWSNKSDFACANAFNNSIIPEDTFFPSPESSDSTDHVKPKETENTKQPSKSCHKPKAIVHTEKVNMMSLTVLGLRMLFAKTVAVNFLLTAKLFFLRAKRSGSGATNFSLLKQAGDVEENPGPTSMALPVTALLLPLALLLHAARPDIVMTQSPATLSVSPGERATLSCRASQSVSNDVVWYQQKPGQAPRLLIYYASNRYTGIPARFSGSGSGTEFTLTISSLQSEDFAVYYCQQDYTSPWTFGQGTKLEIKRGGGGSGGGGSGGGGSEVQLVQSGAEVKKPGASVRVSCKASGYTFTNYGMNWVRQAPGQGLEWMGWINTYTGEPTYADDFKGRVTMTTDTSTSTAYMELRSLRSDDTAVYYCARIGDSSPSDYWGQGTLVTVSSTREDLKNVFPPEVAVFEPSEAEISHTQKATLVCLATGFYPDHVELSWWVNGKEVHSGVCTDPQPLKEQPALNDSRYCLSSRLRVSATFWQNPRNHFRCQVQFYGLSENDEWTQDRAKPVTQIVSAEAWGRADDVIKIHWQEKKSNTILGSQEGNTMKTNDTYMKFSWLTVPEKSLDKEHRCIVRHENNKNGVDQEIIFPPIKTDVITMDPKDNCSKDANDTLLLQLTNTSAYYMYLLLLLKSVVYFAIITCCLLRRTAFCCNGEKSRAKRSGSGVKQTLNFDLLKLAGDVESNPGPSRGHMTEYKPTVRLATRDDVPRAVRTLAAAFADYPATRHTVDPDRHIERVTELQELFLTRVGLDIGKVWVADDGAAVAVWTTPESVEAGAVFAEIGPRMAELSGSRLAAQQQMEGLLAPHRPKEPAWFLATVGVSPDHQGKGLGSAVVLPGVEAAERAGVPAFLETSAPRNLPFYERLGFTVTADVEVPEGPRTWCMTRKPGA

SEQ ID NO: 45093 - protein, 970 aa, synthetic construct
MALPVTALLLPLALLLHAARPLEEDLKNVFPPEVAVFEPSEAEISHTQKATLVCLATGFYPDHVELSWWVNGKEVHSGVSTDPQPLKEQPALNDSRYCLSSRLRVSATFWQNPRNHFRCQVQFYGLSENDEWTQDRAKPVTQIVSAEAWGRADDVIKIHWQEKKSNTILGSQEGNTMKTNDTYMKFSWLTVPEKSLDKEHRCIVRHENNKNGVDQEIIFPPIKTDVITMDPKDNCSKDANDTLLLQLTNTSAYYMYLLLLLKSVVYFAIITCCLLRRTAFCCNGEKSRAKRSGSGATNFSLLKQAGDVEENPGPTSMALPVTALLLPLALLLHAARPDIVMTQSPATLSVSPGERATLSCRASQSVSNDVVWYQQKPGQAPRLLIYYASNRYTGIPARFSGSGSGTEFTLTISSLQSEDFAVYYCQQDYTSPWTFGQGTKLEIKRGGGGSGGGGSGGGGSEVQLVQSGAEVKKPGASVRVSCKASGYTFTNYGMNWVRQAPGQGLEWMGWINTYTGEPTYADDFKGRVTMTTDTSTSTAYMELRSLRSDDTAVYYCARIGDSSPSDYWGQGTLVTVSSTRIQNPDPAVYQLRDSKSSDKSVCLFTDFDSQTNVSQSKDSDVYITDKTVLDMRSMDFKSNSAVAWSNKSDFACANAFNNSIIPEDTFFPSPESSDSTDHVKPKETENTKQPSKSCHKPKAIVHTEKVNMMSLTVLGLRMLFAKTVAVNFLLTAKLFFLRAKRSGSGVKQTLNFDLLKLAGDVESNPGPSRGHMTEYKPTVRLATRDDVPRAVRTLAAAFADYPATRHTVDPDRHIERVTELQELFLTRVGLDIGKVWVADDGAAVAVWTTPESVEAGAVFAEIGPRMAELSGSRLAAQQQMEGLLAPHRPKEPAWFLATVGVSPDHQGKGLGSAVVLPGVEAAERAGVPAFLETSAPRNLPFYERLGFTVTADVEVPEGPRTWCMTRKPGA

SEQ ID NO: 45094 - protein, 970 aa, synthetic construct
MALPVTALLLPLALLLHAARPLEIQNPDPAVYQLRDSKSSDKSVCLFTDFDSQTNVSQSKDSDVYITDKTVLDMRSMDFKSNSAVAWSNKSDFACANAFNNSIIPEDTFFPSPESSDSTDHVKPKETENTKQPSKSCHKPKAIVHTEKVNMMSLTVLGLRMLFAKTVAVNFLLTAKLFFLRAKRSGSGATNFSLLKQAGDVEENPGPTSMALPVTALLLPLALLLHAARPDIVMTQSPATLSVSPGERATLSCRASQSVSNDVVWYQQKPGQAPRLLIYYASNRYTGIPARFSGSGSGTEFTLTISSLQSEDFAVYYCQQDYTSPWTFGQGTKLEIKRGGGGSGGGGSGGGGSEVQLVQSGAEVKKPGASVRVSCKASGYTFTNYGMNWVRQAPGQGLEWMGWINTYTGEPTYADDFKGRVTMTTDTSTSTAYMELRSLRSDDTAVYYCARIGDSSPSDYWGQGTLVTVSSTREDLKNVFPPEVAVFEPSEAEISHTQKATLVCLATGFYPDHVELSWWVNGKEVHSGVSTDPQPLKEQPALNDSRYCLSSRLRVSATFWQNPRNHFRCQVQFYGLSENDEWTQDRAKPVTQIVSAEAWGRADDVIKIHWQEKKSNTILGSQEGNTMKTNDTYMKFSWLTVPEKSLDKEHRCIVRHENNKNGVDQEIIFPPIKTDVITMDPKDNCSKDANDTLLLQLTNTSAYYMYLLLLLKSVVYFAIITCCLLRRTAFCCNGEKSRAKRSGSGVKQTLNFDLLKLAGDVESNPGPSRGHMTEYKPTVRLATRDDVPRAVRTLAAAFADYPATRHTVDPDRHIERVTELQELFLTRVGLDIGKVWVADDGAAVAVWTTPESVEAGAVFAEIGPRMAELSGSRLAAQQQMEGLLAPHRPKEPAWFLATVGVSPDHQGKGLGSAVVLPGVEAAERAGVPAFLETSAPRNLPFYERLGFTVTADVEVPEGPRTWCMTRKPGA

SEQ ID NO: 45095 - protein, 868 aa, synthetic construct
MALPVTALLLPLALLLHAARPLEEDLKNVFPPEVAVFEPSKAEIAHTQKATLVCLATGFYPDHVELSWWVNGKEVHSGVCTDPQPLKEQPALNDSRYCLSSRLRVSATFWQNPRNHFRCQVQFYGLSENDEWTQDRAKPVTQIVSAEAWGRADCGITSASYHQGVLSATILYEILLGKATLYAVLVSALVLMAMVKRKDSRGRAKRSGSGATNFSLLKQAGDVEENPGPTSMALPVTALLLPLALLLHAARPDIVMTQSPATLSVSPGERATLSCRASQSVSNDVVWYQQKPGQAPRLLIYYASNRYTGIPARFSGSGSGTEFTLTISSLQSEDFAVYYCQQDYTSPWTFGQGTKLEIKRGGGGSGGGGSGGGGSEVQLVQSGAEVKKPGASVRVSCKASGYTFTNYGMNWVRQAPGQGLEWMGWINTYTGEPTYADDFKGRVTMTTDTSTSTAYMELRSLRSDDTAVYYCARIGDSSPSDYWGQGTLVTVSSTRIQNPDPAVYQLRDSKSSDKSVCLFTDFDSQTNVSQSKDSDVYITDKCVLDMRSMDFKSNSAVAWSNKSDFACANAFNNSIIPEDTFFPSSDVPCDVKLVEKSFETDTNLNFQNLSVIGFRILLLKVAGFNLLMTLRLWSSRAKRSGSGVKQTLNFDLLKLAGDVESNPGPSRGHMTEYKPTVRLATRDDVPRAVRTLAAAFADYPATRHTVDPDRHIERVTELQELFLTRVGLDIGKVWVADDGAAVAVWTTPESVEAGAVFAEIGPRMAELSGSRLAAQQQMEGLLAPHRPKEPAWFLATVGVSPDHQGKGLGSAVVLPGVEAAERAGVPAFLETSAPRNLPFYERLGFTVTADVEVPEGPRTWCMTRKPGA

SEQ ID NO: 45096 - protein, 868 aa, synthetic construct
MALPVTALLLPLALLLHAARPLEIQNPDPAVYQLRDSKSSDKSVCLFTDFDSQTNVSQSKDSDVYITDKCVLDMRSMDFKSNSAVAWSNKSDFACANAFNNSIIPEDTFFPSSDVPCDVKLVEKSFETDTNLNFQNLSVIGFRILLLKVAGFNLLMTLRLWSSRAKRSGSGATNFSLLKQAGDVEENPGPTSMALPVTALLLPLALLLHAARPDIVMTQSPATLSVSPGERATLSCRASQSVSNDVVWYQQKPGQAPRLLIYYASNRYTGIPARFSGSGSGTEFTLTISSLQSEDFAVYYCQQDYTSPWTFGQGTKLEIKRGGGGSGGGGSGGGGSEVQLVQSGAEVKKPGASVRVSCKASGYTFTNYGMNWVRQAPGQGLEWMGWINTYTGEPTYADDFKGRVTMTTDTSTSTAYMELRSLRSDDTAVYYCARIGDSSPSDYWGQGTLVTVSSTREDLKNVFPPEVAVFEPSKAEIAHTQKATLVCLATGFYPDHVELSWWVNGKEVHSGVCTDPQPLKEQPALNDSRYCLSSRLRVSATFWQNPRNHFRCQVQFYGLSENDEWTQDRAKPVTQIVSAEAWGRADCGITSASYHQGVLSATILYEILLGKATLYAVLVSALVLMAMVKRKDSRGRAKRSGSGVKQTLNFDLLKLAGDVESNPGPSRGHMTEYKPTVRLATRDDVPRAVRTLAAAFADYPATRHTVDPDRHIERVTELQELFLTRVGLDIGKVWVADDGAAVAVWTTPESVEAGAVFAEIGPRMAELSGSRLAAQQQMEGLLAPHRPKEPAWFLATVGVSPDHQGKGLGSAVVLPGVEAAERAGVPAFLETSAPRNLPFYERLGFTVTADVEVPEGPRTWCMTRKPGA

SEQ ID NO: 45097 - protein, 761 aa, synthetic construct
MALPVTALLLPLALLLHAARPLEQSFGLLDPKLCYLLDGILFIYGVILTALFLRVKFSRSADAPAYQQGQNQLYNELNLGRREEYDVLDKRRGRDPEMGGKPQRRKNPQEGLYNELQKDKMAEAYSEIGMKGERRRGKGHDGLYQGLSTATKDTYDALHMQALPPRRAKRSGSGATNFSLLKQAGDVEENPGPTSMALPVTALLLPLALLLHAARPDIVMTQSPATLSVSPGERATLSCRASQSVSNDVVWYQQKPGQAPRLLIYYASNRYTGIPARFSGSGSGTEFTLTISSLQSEDFAVYYCQQDYTSPWTFGQGTKLEIKRGGGGSGGGGSGGGGSEVQLVQSGAEVKKPGASVRVSCKASGYTFTNYGMNWVRQAPGQGLEWMGWINTYTGEPTYADDFKGRVTMTTDTSTSTAYMELRSLRSDDTAVYYCARIGDSSPSDYWGQGTLVTVSSTRELGEPQLCYILDAILFLYGIVLTLLYCRLKIQVRKAAITSYEKSDGVYTGLSTRNQETYETLKHEKPPQRAKRSGSGVKQTLNFDLLKLAGDVESNPGPSRGHMTEYKPTVRLATRDDVPRAVRTLAAAFADYPATRHTVDPDRHIERVTELQELFLTRVGLDIGKVWVADDGAAVAVWTTPESVEAGAVFAEIGPRMAELSGSRLAAQQQMEGLLAPHRPKEPAWFLATVGVSPDHQGKGLGSAVVLPGVEAAERAGVPAFLETSAPRNLPFYERLGFTVTADVEVPEGPRTWCMTRKPGA

SEQ ID NO: 45098 - protein, 972 aa, synthetic construct; identical to SEQ ID NO: 45089

SEQ ID NO: 45099 - protein, 972 aa, synthetic construct; identical to SEQ ID NO: 45090

SEQ ID NO: 45100 - protein, 971 aa, synthetic construct
MALPVTALLLPLALLLHAARPLEEEDLKNVFPPEVAVFEPSEAEISHTQKATLVCLATGFYPDHVELSWWVNGKEVHSGVCTDPQPLKEQPALNDSRYCLSSRLRVSATFWQNPRNHFRCQVQFYGLSENDEWTQDRAKPVTQIVSAEAWGRADDVIKIHWQEKKSNTILGSQEGNTMKTNDTYMKFSWLTVPEKSLDKEHRCIVRHENNKNGVDQEIIFPPIKTDVITMDPKDNCSKDANDTLLLQLTNTSAYYMYLLLLLKSVVYFAIITCCLLRRTAFCCNGEKSRAKRSGSGATNFSLLKQAGDVEENPGPTSMALPVTALLLPLALLLHAARPDIVMTQSPATLSVSPGERATLSCRASQSVSNDVVWYQQKPGQAPRLLIYYASNRYTGIPARFSGSGSGTEFTLTISSLQSEDFAVYYCQQDYTSPWTFGQGTKLEIKRGGGGSGGGGSGGGGSEVQLVQSGAEVKKPGASVRVSCKASGYTFTNYGMNWVRQAPGQGLEWMGWINTYTGEPTYADDFKGRVTMTTDTSTSTAYMELRSLRSDDTAVYYCARIGDSSPSDYWGQGTLVTVSSTRIQNPDPAVYQLRDSKSSDKSVCLFTDFDSQTNVSQSKDSDVYITDKCVLDMRSMDFKSNSAVAWSNKSDFACANAFNNSIIPEDTFFPSPESSDSTDHVKPKETENTKQPSKSCHKPKAIVHTEKVNMMSLTVLGLRMLFAKTVAVNFLLTAKLFFLRAKRSGSGVKQTLNFDLLKLAGDVESNPGPSRGHMTEYKPTVRLATRDDVPRAVRTLAAAFADYPATRHTVDPDRHIERVTELQELFLTRVGLDIGKVWVADDGAAVAVWTTPESVEAGAVFAEIGPRMAELSGSRLAAQQQMEGLLAPHRPKEPAWFLATVGVSPDHQGKGLGSAVVLPGVEAAERAGVPAFLETSAPRNLPFYERLGFTVTADVEVPEGPRTWCMTRKPGA

SEQ ID NO: 45101 - protein, 971 aa, synthetic construct
MALPVTALLLPLALLLHAARPLEIQNPDPAVYQLRDSKSSDKSVCLFTDFDSQTNVSQSKDSDVYITDKCVLDMRSMDFKSNSAVAWSNKSDFACANAFNNSIIPEDTFFPSPESSDSTDHVKPKETENTKQPSKSCHKPKAIVHTEKVNMMSLTVLGLRMLFAKTVAVNFLLTAKLFFLRAKRSGSGATNFSLLKQAGDVEENPGPTSMALPVTALLLPLALLLHAARPDIVMTQSPATLSVSPGERATLSCRASQSVSNDVVWYQQKPGQAPRLLIYYASNRYTGIPARFSGSGSGTEFTLTISSLQSEDFAVYYCQQDYTSPWTFGQGTKLEIKRGGGGSGGGGSGGGGSEVQLVQSGAEVKKPGASVRVSCKASGYTFTNYGMNWVRQAPGQGLEWMGWINTYTGEPTYADDFKGRVTMTTDTSTSTAYMELRSLRSDDTAVYYCARIGDSSPSDYWGQGTLVTVSSTREEDLKNVFPPEVAVFEPSEAEISHTQKATLVCLATGFYPDHVELSWWVNGKEVHSGVCTDPQPLKEQPALNDSRYCLSSRLRVSATFWQNPRNHFRCQVQFYGLSENDEWTQDRAKPVTQIVSAEAWGRADDVIKIHWQEKKSNTILGSQEGNTMKTNDTYMKFSWLTVPEKSLDKEHRCIVRHENNKNGVDQEIIFPPIKTDVITMDPKDNCSKDANDTLLLQLTNTSAYYMYLLLLLKSVVYFAIITCCLLRRTAFCCNGEKSRAKRSGSGVKQTLNFDLLKLAGDVESNPGPSRGHMTEYKPTVRLATRDDVPRAVRTLAAAFADYPATRHTVDPDRHIERVTELQELFLTRVGLDIGKVWVADDGAAVAVWTTPESVEAGAVFAEIGPRMAELSGSRLAAQQQMEGLLAPHRPKEPAWFLATVGVSPDHQGKGLGSAVVLPGVEAAERAGVPAFLETSAPRNLPFYERLGFTVTADVEVPEGPRTWCMTRKPGA

SEQ ID NO: 45102 - protein, 868 aa, synthetic construct
MALPVTALLLPLALLLHAARPLEEDLKNVFPPEVAVFEPSEAEISHTQKATLVCLATGFYPDHVELSWWVNGKEVHSGVSTDPQPLKEQPALNDSRYCLSSRLRVSATFWQNPRNHFRCQVQFYGLSENDEWTQDRAKPVTQIVSAEAWGRADCGFTSESYQQGVLSATNLSVIGFRILLLKVAGFNLLMTLRLWSSRAKRSGSGATNFSLLKQAGDVEENPGPTSMALPVTALLLPLALLLHAARPDIVMTQSPATLSVSPGERATLSCRASQSVSNDVVWYQQKPGQAPRLLIYYASNRYTGIPARFSGSGSGTEFTLTISSLQSEDFAVYYCQQDYTSPWTFGQGTKLEIKRGGGGSGGGGSGGGGSEVQLVQSGAEVKKPGASVRVSCKASGYTFTNYGMNWVRQAPGQGLEWMGWINTYTGEPTYADDFKGRVTMTTDTSTSTAYMELRSLRSDDTAVYYCARIGDSSPSDYWGQGTLVTVSSTRIQNPDPAVYQLRDSKSSDKSVCLFTDFDSQTNVSQSKDSDVYITDKTVLDMRSMDFKSNSAVAWSNKSDFACANAFNNSIIPEDTFFPSPESSCDVKLVEKSFETDTNLNFQILYEILLGKATLYAVLVSALVLMAMVKRKDSRGRAKRSGSGVKQTLNFDLLKLAGDVESNPGPSRGHMTEYKPTVRLATRDDVPRAVRTLAAAFADYPATRHTVDPDRHIERVTELQELFLTRVGLDIGKVWVADDGAAVAVWTTPESVEAGAVFAEIGPRMAELSGSRLAAQQQMEGLLAPHRPKEPAWFLATVGVSPDHQGKGLGSAVVLPGVEAAERAGVPAFLETSAPRNLPFYERLGFTVTADVEVPEGPRTWCMTRKPGA

SEQ ID NO: 45103 - protein, 868 aa, synthetic construct
MALPVTALLLPLALLLHAARPLEIQNPDPAVYQLRDSKSSDKSVCLFTDFDSQTNVSQSKDSDVYITDKTVLDMRSMDFKSNSAVAWSNKSDFACANAFNNSIIPEDTFFPSPESSCDVKLVEKSFETDTNLNFQILYEILLGKATLYAVLVSALVLMAMVKRKDSRGRAKRSGSGATNFSLLKQAGDVEENPGPTSMALPVTALLLPLALLLHAARPDIVMTQSPATLSVSPGERATLSCRASQSVSNDVVWYQQKPGQAPRLLIYYASNRYTGIPARFSGSGSGTEFTLTISSLQSEDFAVYYCQQDYTSPWTFGQGTKLEIKRGGGGSGGGGSGGGGSEVQLVQSGAEVKKPGASVRVSCKASGYTFTNYGMNWVRQAPGQGLEWMGWINTYTGEPTYADDFKGRVTMTTDTSTSTAYMELRSLRSDDTAVYYCARIGDSSPSDYWGQGTLVTVSSTREDLKNVFPPEVAVFEPSEAEISHTQKATLVCLATGFYPDHVELSWWVNGKEVHSGVSTDPQPLKEQPALNDSRYCLSSRLRVSATFWQNPRNHFRCQVQFYGLSENDEWTQDRAKPVTQIVSAEAWGRADCGFTSESYQQGVLSATNLSVIGFRILLLKVAGFNLLMTLRLWSSRAKRSGSGVKQTLNFDLLKLAGDVESNPGPSRGHMTEYKPTVRLATRDDVPRAVRTLAAAFADYPATRHTVDPDRHIERVTELQELFLTRVGLDIGKVWVADDGAAVAVWTTPESVEAGAVFAEIGPRMAELSGSRLAAQQQMEGLLAPHRPKEPAWFLATVGVSPDHQGKGLGSAVVLPGVEAAERAGVPAFLETSAPRNLPFYERLGFTVTADVEVPEGPRTWCMTRKPGA

SEQ ID NO: 45104 - protein, 868 aa, synthetic construct
MALPVTALLLPLALLLHAARPLEEDLKNVFPPEVAVFEPSEAEISHTQKATLVCLATGFYPDHVELSWWVNGKEVHSGVCTDPQPLKEQPALNDSRYCLSSRLRVSATFWQNPRNHFRCQVQFYGLSENDEWTQDRAKPVTQIVSAEAWGRADCDVKLVEKSFETDTNLNFQNLSVIGFRILLLKVAGFNLLMTLRLWSSRAKRSGSGATNFSLLKQAGDVEENPGPTSMALPVTALLLPLALLLHAARPDIVMTQSPATLSVSPGERATLSCRASQSVSNDVVWYQQKPGQAPRLLIYYASNRYTGIPARFSGSGSGTEFTLTISSLQSEDFAVYYCQQDYTSPWTFGQGTKLEIKRGGGGSGGGGSGGGGSEVQLVQSGAEVKKPGASVRVSCKASGYTFTNYGMNWVRQAPGQGLEWMGWINTYTGEPTYADDFKGRVTMTTDTSTSTAYMELRSLRSDDTAVYYCARIGDSSPSDYWGQGTLVTVSSTRIQNPDPAVYQLRDSKSSDKSVCLFTDFDSQTNVSQSKDSDVYITDKCVLDMRSMDFKSNSAVAWSNKSDFACANAFNNSIIPEDTFFPSPESSCGFTSESYQQGVLSATILYEILLGKATLYAVLVSALVLMAMVKRKDSRGRAKRSGSGVKQTLNFDLLKLAGDVESNPGPSRGHMTEYKPTVRLATRDDVPRAVRTLAAAFADYPATRHTVDPDRHIERVTELQELFLTRVGLDIGKVWVADDGAAVAVWTTPESVEAGAVFAEIGPRMAELSGSRLAAQQQMEGLLAPHRPKEPAWFLATVGVSPDHQGKGLGSAVVLPGVEAAERAGVPAFLETSAPRNLPFYERLGFTVTADVEVPEGPRTWCMTRKPGA

SEQ ID NO: 45105 - protein, 868 aa, synthetic construct
MALPVTALLLPLALLLHAARPLEEDLKNVFPPEVAVFEPSEAEISHTQKATLVCLATGFYPDHVELSWWVNGKEVHSGVSTDPQPLKEQPALNDSRYCLSSRLRVSATFWQNPRNHFRCQVQFYGLSENDEWTQDRAKPVTQIVSAEAWGRADCDVKLVEKSFETDTNLNFQNLSVIGFRILLLKVAGFNLLMTLRLWSSRAKRSGSGATNFSLLKQAGDVEENPGPTSMALPVTALLLPLALLLHAARPDIVMTQSPATLSVSPGERATLSCRASQSVSNDVVWYQQKPGQAPRLLIYYASNRYTGIPARFSGSGSGTEFTLTISSLQSEDFAVYYCQQDYTSPWTFGQGTKLEIKRGGGGSGGGGSGGGGSEVQLVQSGAEVKKPGASVRVSCKASGYTFTNYGMNWVRQAPGQGLEWMGWINTYTGEPTYADDFKGRVTMTTDTSTSTAYMELRSLRSDDTAVYYCARIGDSSPSDYWGQGTLVTVSSTRIQNPDPAVYQLRDSKSSDKSVCLFTDFDSQTNVSQSKDSDVYITDKTVLDMRSMDFKSNSAVAWSNKSDFACANAFNNSIIPEDTFFPSPESSCGFTSESYQQGVLSATILYEILLGKATLYAVLVSALVLMAMVKRKDSRGRAKRSGSGVKQTLNFDLLKLAGDVESNPGPSRGHMTEYKPTVRLATRDDVPRAVRTLAAAFADYPATRHTVDPDRHIERVTELQELFLTRVGLDIGKVWVADDGAAVAVWTTPESVEAGAVFAEIGPRMAELSGSRLAAQQQMEGLLAPHRPKEPAWFLATVGVSPDHQGKGLGSAVVLPGVEAAERAGVPAFLETSAPRNLPFYERLGFTVTADVEVPEGPRTWCMTRKPGA

SEQ ID NO: 45106 - protein, 971 aa, synthetic construct
MALPVTALLLPLALLLHAARPLEEEDLKNVFPPEVAVFEPSEAEISHTQKATLVCLATGFYPDHVELSWWVNGKEVHSGVSTDPQPLKEQPALNDSRYCLSSRLRVSATFWQNPRNHFRCQVQFYGLSENDEWTQDRAKPVTQIVSAEAWGRADDVIKIHWQEKKSNTILGSQEGNTMKTNDTYMKFSWLTVPEKSLDKEHRCIVRHENNKNGVDQEIIFPPIKTDVITMDPKDNCSKDANDTLLLQLTNTSAYYMYLLLLLKSVVYFAIITCCLLRRTAFCCNGEKSRAKRSGSGATNFSLLKQAGDVEENPGPTSMALPVTALLLPLALLLHAARPDIVMTQSPATLSVSPGERATLSCRASQSVSNDVVWYQQKPGQAPRLLIYYASNRYTGIPARFSGSGSGTEFTLTISSLQSEDFAVYYCQQDYTSPWTFGQGTKLEIKRGGGGSGGGGSGGGGSEVQLVQSGAEVKKPGASVRVSCKASGYTFTNYGMNWVRQAPGQGLEWMGWINTYTGEPTYADDFKGRVTMTTDTSTSTAYMELRSLRSDDTAVYYCARIGDSSPSDYWGQGTLVTVSSTRIQNPDPAVYQLRDSKSSDKSVCLFTDFDSQTNVSQSKDSDVYITDKTVLDMRSMDFKSNSAVAWSNKSDFACANAFNNSIIPEDTFFPSPESSDSTDHVKPKETENTKQPSKSCHKPKAIVHTEKVNMMSLTVLGLRMLFAKTVAVNFLLTAKLFFLRAKRSGSGVKQTLNFDLLKLAGDVESNPGPSRGHMTEYKPTVRLATRDDVPRAVRTLAAAFADYPATRHTVDPDRHIERVTELQELFLTRVGLDIGKVWVADDGAAVAVWTTPESVEAGAVFAEIGPRMAELSGSRLAAQQQMEGLLAPHRPKEPAWFLATVGVSPDHQGKGLGSAVVLPGVEAAERAGVPAFLETSAPRNLPFYERLGFTVTADVEVPEGPRTWCMTRKPGA

SEQ ID NO: 45107 - protein, 868 aa, synthetic construct
MALPVTALLLPLALLLHAARPLEEDLKNVFPPEVAVFEPSEAEISHTQKATLVCLATGFYPDHVELSWWVNGKEVHSGVCTDPQPLKEQPALNDSRYCLSSRLRVSATFWQNPRNHFRCQVQFYGLSENDEWTQDRAKPVTQIVSAEAWGRADCGFTSESYQQGVLSATNLSVIGFRILLLKVAGFNLLMTLRLWSSRAKRSGSGATNFSLLKQAGDVEENPGPTSMALPVTALLLPLALLLHAARPDIVMTQSPATLSVSPGERATLSCRASQSVSNDVVWYQQKPGQAPRLLIYYASNRYTGIPARFSGSGSGTEFTLTISSLQSEDFAVYYCQQDYTSPWTFGQGTKLEIKRGGGGSGGGGSGGGGSEVQLVQSGAEVKKPGASVRVSCKASGYTFTNYGMNWVRQAPGQGLEWMGWINTYTGEPTYADDFKGRVTMTTDTSTSTAYMELRSLRSDDTAVYYCARIGDSSPSDYWGQGTLVTVSSTRIQNPDPAVYQLRDSKSSDKSVCLFTDFDSQTNVSQSKDSDVYITDKCVLDMRSMDFKSNSAVAWSNKSDFACANAFNNSIIPEDTFFPSPESSCDVKLVEKSFETDTNLNFQILYEILLGKATLYAVLVSALVLMAMVKRKDSRGRAKRSGSGVKQTLNFDLLKLAGDVESNPGPSRGHMTEYKPTVRLATRDDVPRAVRTLAAAFADYPATRHTVDPDRHIERVTELQELFLTRVGLDIGKVWVADDGAAVAVWTTPESVEAGAVFAEIGPRMAELSGSRLAAQQQMEGLLAPHRPKEPAWFLATVGVSPDHQGKGLGSAVVLPGVEAAERAGVPAFLETSAPRNLPFYERLGFTVTADVEVPEGPRTWCMTRKPGA

SEQ ID NO: 45108 - protein, 897 aa, synthetic construct
MALPVTALLLPLALLLHAARPLEEEDLKNVFPPEVAVFEPSEAEISHTQKATLVCLATGFYPDHVELSWWVNGKEVHSGVCTDPQPLKEQPALNDSRYCLSSRLRVSATFWQNPRNHFRCQVQFYGLSENDEWTQDRAKPVTQIVSAEAWGRADCGFTSESYQQGVLSATNLSVIGFRILLLKVAGFNLLMTLRLWSSRAKRSGSGATNFSLLKQAGDVEENPGPTSMALPVTALLLPLALLLHAARPDIVMTQSPATLSVSPGERATLSCRASQSVSNDVVWYQQKPGQAPRLLIYYASNRYTGIPARFSGSGSGTEFTLTISSLQSEDFAVYYCQQDYTSPWTFGQGTKLEIKRGGGGSGGGGSGGGGSEVQLVQSGAEVKKPGASVRVSCKASGYTFTNYGMNWVRQAPGQGLEWMGWINTYTGEPTYADDFKGRVTMTTDTSTSTAYMELRSLRSDDTAVYYCARIGDSSPSDYWGQGTLVTVSSTRGQPKANPTVTLFPPSSEELQANKATLVCLISDFYPGAVTVAWKADGSPVKAGVETTKPSKQSNNKYAASSYLSLTPEQWKSHRSYSCQVTHEGSTVEKTVAPTECSPIKTDVITMDPKDNCSKDANDTLLLQLTNTSAYYMYLLLLLKSVVYFAIITCCLLRRTAFCCNGEKSRAKRSGSGVKQTLNFDLLKLAGDVESNPGPSRGHMTEYKPTVRLATRDDVPRAVRTLAAAFADYPATRHTVDPDRHIERVTELQELFLTRVGLDIGKVWVADDGAAVAVWTTPESVEAGAVFAEIGPRMAELSGSRLAAQQQMEGLLAPHRPKEPAWFLATVGVSPDHQGKGLGSAVVLPGVEAAERAGVPAFLETSAPRNLPFYERLGFTVTADVEVPEGPRTWCMTRKPGA

SEQ ID NO: 45109 - protein, 897 aa, synthetic construct
MALPVTALLLPLALLLHAARPLEGQPKANPTVTLFPPSSEELQANKATLVCLISDFYPGAVTVAWKADGSPVKAGVETTKPSKQSNNKYAASSYLSLTPEQWKSHRSYSCQVTHEGSTVEKTVAPTECSPIKTDVITMDPKDNCSKDANDTLLLQLTNTSAYYMYLLLLLKSVVYFAIITCCLLRRTAFCCNGEKSRAKRSGSGATNFSLLKQAGDVEENPGPTSMALPVTALLLPLALLLHAARPDIVMTQSPATLSVSPGERATLSCRASQSVSNDVVWYQQKPGQAPRLLIYYASNRYTGIPARFSGSGSGTEFTLTISSLQSEDFAVYYCQQDYTSPWTFGQGTKLEIKRGGGGSGGGGSGGGGSEVQLVQSGAEVKKPGASVRVSCKASGYTFTNYGMNWVRQAPGQGLEWMGWINTYTGEPTYADDFKGRVTMTTDTSTSTAYMELRSLRSDDTAVYYCARIGDSSPSDYWGQGTLVTVSSTREEDLKNVFPPEVAVFEPSEAEISHTQKATLVCLATGFYPDHVELSWWVNGKEVHSGVCTDPQPLKEQPALNDSRYCLSSRLRVSATFWQNPRNHFRCQVQFYGLSENDEWTQDRAKPVTQIVSAEAWGRADCGFTSESYQQGVLSATNLSVIGFRILLLKVAGFNLLMTLRLWSSRAKRSGSGVKQTLNFDLLKLAGDVESNPGPSRGHMTEYKPTVRLATRDDVPRAVRTLAAAFADYPATRHTVDPDRHIERVTELQELFLTRVGLDIGKVWVADDGAAVAVWTTPESVEAGAVFAEIGPRMAELSGSRLAAQQQMEGLLAPHRPKEPAWFLATVGVSPDHQGKGLGSAVVLPGVEAAERAGVPAFLETSAPRNLPFYERLGFTVTADVEVPEGPRTWCMTRKPGA

SEQ ID NO: 45110 - protein, 894 aa, synthetic construct
MALPVTALLLPLALLLHAARPLEEASTKGPSVFPLAPSSKSTSGGTAALGCLVKDYFPEPVTVSWNSGALTSGVHTFPAVLQSSGLYSLSSVVTVPSSSLGTQTYICNVNHKPSNTKVDKRVEPKSCPIKTDVITMDPKDNCSKDANDTLLLQLTNTSAYYMYLLLLLKSVVYFAIITCCLLRRTAFCCNGEKSRAKRSGSGATNFSLLKQAGDVEENPGPTSMALPVTALLLPLALLLHAARPDIVMTQSPATLSVSPGERATLSCRASQSVSNDVVWYQQKPGQAPRLLIYYASNRYTGIPARFSGSGSGTEFTLTISSLQSEDFAVYYCQQDYTSPWTFGQGTKLEIKRGGGGSGGGGSGGGGSEVQLVQSGAEVKKPGASVRVSCKASGYTFTNYGMNWVRQAPGQGLEWMGWINTYTGEPTYADDFKGRVTMTTDTSTSTAYMELRSLRSDDTAVYYCARIGDSSPSDYWGQGTLVTVSSTRGQPKANPTVTLFPPSSEELQANKATLVCLISDFYPGAVTVAWKADGSPVKAGVETTKPSKQSNNKYAASSYLSLTPEQWKSHRSYSCQVTHEGSTVEKTVAPTECSEVKTDSTDHVKPKETENTKQPSKSCHKPKAIVHTEKVNMMSLTVLGLRMLFAKTVAVNFLLTAKLFFLRAKRSGSGVKQTLNFDLLKLAGDVESNPGPSRGHMTEYKPTVRLATRDDVPRAVRTLAAAFADYPATRHTVDPDRHIERVTELQELFLTRVGLDIGKVWVADDGAAVAVWTTPESVEAGAVFAEIGPRMAELSGSRLAAQQQMEGLLAPHRPKEPAWFLATVGVSPDHQGKGLGSAVVLPGVEAAERAGVPAFLETSAPRNLPFYERLGFTVTADVEVPEGPRTWCMTRKPGA

SEQ ID NO: 45111 - protein, 872 aa, synthetic construct
MALPVTALLLPLALLLHAARPLEEASTKGPSVFPLAPSSKSTSGGTAALGCLVKDYFPEPVTVSWNSGALTSGVHTFPAVLQSSGLYSLSSVVTVPSSSLGTQTYICNVNHKPSNTKVDKRVEPKSCGRADCGFTSESYQQGVLSATILYEILLGKATLYAVLVSALVLMAMVKRKDSRGRAKRSGSGATNFSLLKQAGDVEENPGPTSMALPVTALLLPLALLLHAARPDIVMTQSPATLSVSPGERATLSCRASQSVSNDVVWYQQKPGQAPRLLIYYASNRYTGIPARFSGSGSGTEFTLTISSLQSEDFAVYYCQQDYTSPWTFGQGTKLEIKRGGGGSGGGGSGGGGSEVQLVQSGAEVKKPGASVRVSCKASGYTFTNYGMNWVRQAPGQGLEWMGWINTYTGEPTYADDFKGRVTMTTDTSTSTAYMELRSLRSDDTAVYYCARIGDSSPSDYWGQGTLVTVSSTRGQPKANPTVTLFPPSSEELQANKATLVCLISDFYPGAVTVAWKADGSPVKAGVETTKPSKQSNNKYAASSYLSLTPEQWKSHRSYSCQVTHEGSTVEKTVAPTECSIPEDTFFPSPESSCDVKLVEKSFETDTNLNFQNLSVIGFRILLLKVAGFNLLMTLRLWSSRAKRSGSGVKQTLNFDLLKLAGDVESNPGPSRGHMTEYKPTVRLATRDDVPRAVRTLAAAFADYPATRHTVDPDRHIERVTELQELFLTRVGLDIGKVWVADDGAAVAVWTTPESVEAGAVFAEIGPRMAELSGSRLAAQQQMEGLLAPHRPKEPAWFLATVGVSPDHQGKGLGSAVVLPGVEAAERAGVPAFLETSAPRNLPFYERLGFTVTADVEVPEGPRTWCMTRKPGA

SEQ ID NO: 45112 - protein, 872 aa, synthetic construct
MALPVTALLLPLALLLHAARPLEEASTKGPSVFPLAPSSKSTSGGTAALGCLVKDYFPEPVTVSWNSGALTSGVHTFPAVLQSSGLYSLSSVVTVPSSSLGTQTYICNVNHKPSNTKVDKRVEPKSCIPEDTFFPSPESSCDVKLVEKSFETDTNLNFQNLSVIGFRILLLKVAGFNLLMTLRLWSSRAKRSGSGATNFSLLKQAGDVEENPGPTSMALPVTALLLPLALLLHAARPDIVMTQSPATLSVSPGERATLSCRASQSVSNDVVWYQQKPGQAPRLLIYYASNRYTGIPARFSGSGSGTEFTLTISSLQSEDFAVYYCQQDYTSPWTFGQGTKLEIKRGGGGSGGGGSGGGGSEVQLVQSGAEVKKPGASVRVSCKASGYTFTNYGMNWVRQAPGQGLEWMGWINTYTGEPTYADDFKGRVTMTTDTSTSTAYMELRSLRSDDTAVYYCARIGDSSPSDYWGQGTLVTVSSTRGQPKANPTVTLFPPSSEELQANKATLVCLISDFYPGAVTVAWKADGSPVKAGVETTKPSKQSNNKYAASSYLSLTPEQWKSHRSYSCQVTHEGSTVEKTVAPTECSGRADCGFTSESYQQGVLSATILYEILLGKATLYAVLVSALVLMAMVKRKDSRGRAKRSGSGVKQTLNFDLLKLAGDVESNPGPSRGHMTEYKPTVRLATRDDVPRAVRTLAAAFADYPATRHTVDPDRHIERVTELQELFLTRVGLDIGKVWVADDGAAVAVWTTPESVEAGAVFAEIGPRMAELSGSRLAAQQQMEGLLAPHRPKEPAWFLATVGVSPDHQGKGLGSAVVLPGVEAAERAGVPAFLETSAPRNLPFYERLGFTVTADVEVPEGPRTWCMTRKPGA

SEQ ID NO: 45113 - protein, 619 aa, synthetic construct
MALPVTALLLPLALLLHAARPDIVMTQSPATLSVSPGERATLSCRASQSVSNDVVWYQQKPGQAPRLLIYYASNRYTGIPARFSGSGSGTEFTLTISSLQSEDFAVYYCQQDYTSPWTFGQGTKLEIKRLEDLKNVFPPEVAVFEPSEAEISHTQKATLVCLATGFYPDHVELSWWVNGKEVHSGVCTDPQPLKEQPALNDSRYCLSSRLRVSATFWQNPRNHFRCQVQFYGLSENDEWTQDRAKPVTQIVSAEAWGRADSGFTSESYQQGVLSATILYEILLGKATLYAVLVSALVLMAMVKRKDSRGRAKRSGSGATNFSLLKQAGDVEENPGPTSMDWIWRILFLVGAATGAHSFEEVQLVQSGAEVKKPGASVRVSCKASGYTFTNYGMNWVRQAPGQGLEWMGWINTYTGEPTYADDFKGRVTMTTDTSTSTAYMELRSLRSDDTAVYYCARIGDSSPSDYWGQGTLVTVSSTRIQNPDPAVYQLRDSKSSDKSVCLFTDFDSQTNVSQSKDSDVYITDKCVLDMRSMDFKSNSAVAWSNKSDFACANAFNNSIIPEDTFFPSPESSSDVKLVEKSFETDTNLNFQNLSVIGFRILLLKVAGFNLLMTLRLWSS

SEQ ID NO: 45114 - protein, 898 aa, synthetic construct
MALPVTALLLPLALLLHAARPEVQLLESGGGLVQPGGSLRLSCAASGRTFSMGWYRQAPGKGLEFVSAITYSGGSPYYADSVKGRFTISRDNSKNTVYLQMNSLRAEDTAVYYCAANPTYGSDWNAENWGQGTLVTVSSGTGGGGSGGGGSGGGGSEFDIVMTQSPATLSVSPGERATLSCRASQSVSNDVVWYQQKPGQAPRLLIYYASNRYTGIPARFSGSGSGTEFTLTISSLQSEDFAVYYCQQDYTSPWTFGQGTKLEIKRLEIQNPDPAVYQLRDSKSSDKSVCLFTDFDSQTNVSQSKDSDVYITDKCVLDMRSMDFKSNSAVAWSNKSDFACANAFNNSIIPEDTFFPSSDVPCDVKLVEKSFETDTNLNFQNLSVIGFRILLLKVAGFNLLMTLRLWSSRAKRSGSGVKQTLNFDLLKLAGDVESNPGPTSTMDWIWRILFLVGAATGTHSGPEVQLVESGGGLVQPGGSLRLSCAASGRTFTMGWYRQAPGKEREFVAAISLSPTLAYYADSVKGRFTISRDNSKNTVVLQMNSLRAEDTALYYCAADRKSVMSIRPDYWGQGTLVTVSSGSGGGGSGGGGSGGGGSFEEVQLVQSGAEVKKPGASVRVSCKASGYTFTNYGMNWVRQAPGQGLEWMGWINTYTGEPTYADDFKGRVTMTTDTSTSTAYMELRSLRSDDTAVYYCARIGDSSPSDYWGQGTLVTVSSTREDLKNVFPPEVAVFEPSKAEIAHTQKATLVCLATGFYPDHVELSWWVNGKEVHSGVCTDPQPLKEQPALNDSRYCLSSRLRVSATFWQNPRNHFRCQVQFYGLSENDEWTQDRAKPVTQIVSAEAWGRADCGITSASYHQGVLSATILYEILLGKATLYAVLVSALVLMAMVKRKDSRG

SEQ ID NO: 45115 - protein, 898 aa, synthetic construct
MALPVTALLLPLALLLHAARPEVQLVESGGGLVQAGGSLRLSCAASGRTFSMGWFRQAPGKEREFVAAITYSGGSPYYADSVKGRFTISRDNAKNTVYLQMNSLKPEDTAVYYCAANPTYGSDWNAENWGQGTQVTVSSGTGGGGSGGGGSGGGGSEFDIVMTQSPATLSVSPGERATLSCRASQSVSNDVVWYQQKPGQAPRLLIYYASNRYTGIPARFSGSGSGTEFTLTISSLQSEDFAVYYCQQDYTSPWTFGQGTKLEIKRLEIQNPDPAVYQLRDSKSSDKSVCLFTDFDSQTNVSQSKDSDVYITDKCVLDMRSMDFKSNSAVAWSNKSDFACANAFNNSIIPEDTFFPSSDVPCDVKLVEKSFETDTNLNFQNLSVIGFRILLLKVAGFNLLMTLRLWSSRAKRSGSGVKQTLNFDLLKLAGDVESNPGPTSTMDWIWRILFLVGAATGAHSGPEVQLVESGGGLVQPGGSLRLSCAASGRTFTMGWYRQAPGKEREFVAAISLSPTLAYYADSVKGRFTISRDNSKNTVVLQMNSLRAEDTALYYCAADRKSVMSIRPDYWGQGTLVTVSSGSGGGGSGGGGSGGGGSFEEVQLVQSGAEVKKPGASVRVSCKASGYTFTNYGMNWVRQAPGQGLEWMGWINTYTGEPTYADDFKGRVTMTTDTSTSTAYMELRSLRSDDTAVYYCARIGDSSPSDYWGQGTLVTVSSTREDLKNVFPPEVAVFEPSKAEIAHTQKATLVCLATGFYPDHVELSWWVNGKEVHSGVCTDPQPLKEQPALNDSRYCLSSRLRVSATFWQNPRNHFRCQVQFYGLSENDEWTQDRAKPVTQIVSAEAWGRADCGITSASYHQGVLSATILYEILLGKATLYAVLVSALVLMAMVKRKDSRG

SEQ ID NO: 45116 - protein, 895 aa, synthetic construct
MALPVTALLLPLALLLHAARPEVQLVESGGGLVQAGGSLRLSCAASGRTFSMGWFRQAPGKEREFVAAITYSGGSPYYADSVKGRFTISRDNAKNTVYLQMNSLKPEDTAVYYCAANPTYGSDWNAENWGQGTQVTVSSGTGGGGSGGGGSGGGGSEFDIVMTQSPATLSVSPGERATLSCRASQSVSNDVVWYQQKPGQAPRLLIYYASNRYTGIPARFSGSGSGTEFTLTISSLQSEDFAVYYCQQDYTSPWTFGQGTKLEIKRLEDLKNVFPPEVAVFEPSEAEISHTQKATLVCLATGFYPDHVELSWWVNGKEVHSGVCTDPQPLKEQPALNDSRYCLSSRLRVSATFWQNPRNHFRCQVQFYGLSENDEWTQDRAKPVTQIVSAEAWGRADCGFTSESYQQGVLSATILYEILLGKATLYAVLVSALVLMAMVKRKDSRGRAKRSGSGATNFSLLKQAGDVEENPGPTSATMDWIWRILFLVGAATGAHSGPEVQLVESGGGLVQAGGSLRLSCAASGRTFTMGWFRQAPGKEREFVAAISLSPTLAYYADSVKGRFTISRDNAKNTVVLQMNSLKPEDTALYYCAADRKSVMSIRPDYWGQGTQVTVSSGSGGGGSGGGGSGGGGSFEEVQLVQSGAEVKKPGASVRVSCKASGYTFTNYGMNWVRQAPGQGLEWMGWINTYTGEPTYADDFKGRVTMTTDTSTSTAYMELRSLRSDDTAVYYCARIGDSSPSDYWGQGTLVTVSSTRIQNPDPAVYQLRDSKSSDKSVCLFTDFDSQTNVSQSKDSDVYITDKCVLDMRSMDFKSNSAVAWSNKSDFACANAFNNSIIPEDTFFPSPESSCDVKLVEKSFETDTNLNFQNLSVIGFRILLLKVAGFNLLMTLRLWSS

SEQ ID NO: 45117 - protein, 766 aa, synthetic construct
MALPVTALLLPLALLLHAARPEVQLVESGGGLVQPGGSLRLSCEASGFASDDYIIGWFRQAPGKEREGVSCISSKYANTVYTDSVKGRFRLSRGTAKNTVYLQMSALKPEDTAVYYCAMDSRRVTCPEISTMHRNFDSWGQGTLVTVSSGTGGGGSGGGGSGGGGSEFDIVMTQSPATLSVSPGERATLSCRASQSVSNDVVWYQQKPGQAPRLLIYYASNRYTGIPARFSGSGSGTEFTLTISSLQSEDFAVYYCQQDYTSPWTFGQGTKLEIKRLEDLKNVFPPEVAVFEPSKAEIAHTQKATLVCLATGFYPDHVELSWWVNGKEVHSGVCTDPQPLKEQPALNDSRYCLSSRLRVSATFWQNPRNHFRCQVQFYGLSENDEWTQDRAKPVTQIVSAEAWGRADCGITSASYHQGVLSATILYEILLGKATLYAVLVSALVLMAMVKRKDSRGRAKRSGSGATNFSLLKQAGDVEENPGPTSMDWIWRILFLVGAATGAHSFEEVQLVQSGAEVKKPGASVRVSCKASGYTFTNYGMNWVRQAPGQGLEWMGWINTYTGEPTYADDFKGRVTMTTDTSTSTAYMELRSLRSDDTAVYYCARIGDSSPSDYWGQGTLVTVSSTRIQNPDPAVYQLRDSKSSDKSVCLFTDFDSQTNVSQSKDSDVYITDKCVLDMRSMDFKSNSAVAWSNKSDFACANAFNNSIIPEDTFFPSSDVPCDVKLVEKSFETDTNLNFQNLSVIGFRILLLKVAGFNLLMTLRLWSS

SEQ ID NO: 45118 - protein, 757 aa, synthetic construct
MALPVTALLLPLALLLHAARPDIVMTQSPATLSVSPGERATLSCRASQSVSNDVVWYQQKPGQAPRLLIYYASNRYTGIPARFSGSGSGTEFTLTISSLQSEDFAVYYCQQDYTSPWTFGQGTKLEIKRLEDLKNVFPPEVAVFEPSEAEISHTQKATLVCLATGFYPDHVELSWWVNGKEVHSGVCTDPQPLKEQPALNDSRYCLSSRLRVSATFWQNPRNHFRCQVQFYGLSENDEWTQDRAKPVTQIVSAEAWGRADCGFTSESYQQGVLSATILYEILLGKATLYAVLVSALVLMAMVKRKDSRGRAKRSGSGATNFSLLKQAGDVEENPGPTSTMDWIWRILFLVGAATGAHSGPEVQLVESGGGLVQPGGSLRLSCAASGRTFTMGWYRQAPGKEREFVAAISLSPTLAYYADSVKGRFTISRDNSKNTVVLQMNSLRAEDTALYYCAADRKSVMSIRPDYWGQGTLVTVSSGSGGGGSGGGGSGGGGSFEEVQLVQSGAEVKKPGASVRVSCKASGYTFTNYGMNWVRQAPGQGLEWMGWINTYTGEPTYADDFKGRVTMTTDTSTSTAYMELRSLRSDDTAVYYCARIGDSSPSDYWGQGTLVTVSSTRIQNPDPAVYQLRDSKSSDKSVCLFTDFDSQTNVSQSKDSDVYITDKCVLDMRSMDFKSNSAVAWSNKSDFACANAFNNSIIPEDTFFPSPESSCDVKLVEKSFETDTNLNFQNLSVIGFRILLLKVAGFNLLMTLRLWSS

SEQ ID NO: 45119 - protein, 764 aa, synthetic construct
MALPVTALLLPLALLLHAARPDIVMTQSPATLSVSPGERATLSCRASQSVSNDVVWYQQKPGQAPRLLIYYASNRYTGIPARFSGSGSGTEFTLTISSLQSEDFAVYYCQQDYTSPWTFGQGTKLEIKRLEDLKNVFPPEVAVFEPSEAEISHTQKATLVCLATGFYPDHVELSWWVNGKEVHSGVCTDPQPLKEQPALNDSRYCLSSRLRVSATFWQNPRNHFRCQVQFYGLSENDEWTQDRAKPVTQIVSAEAWGRADCGFTSESYQQGVLSATILYEILLGKATLYAVLVSALVLMAMVKRKDSRGRAKRSGSGATNFSLLKQAGDVEENPGPTSTMDWIWRILFLVGAATGAHSGPQVQLVESGGGLVQPGGSLRLSCAASGNINSRNCMGWFRQAPGKGREGVAAIGQVTGRTYYVDSVKGRFTISLDNSKNTLYLQMNSLRAEDTAVYYCAAAPGCLLSALRSADYRNWGQGTLVTVSSGSGGGGSGGGGSGGGGSFEEVQLVQSGAEVKKPGASVRVSCKASGYTFTNYGMNWVRQAPGQGLEWMGWINTYTGEPTYADDFKGRVTMTTDTSTSTAYMELRSLRSDDTAVYYCARIGDSSPSDYWGQGTLVTVSSTRIQNPDPAVYQLRDSKSSDKSVCLFTDFDSQTNVSQSKDSDVYITDKCVLDMRSMDFKSNSAVAWSNKSDFACANAFNNSIIPEDTFFPSPESSCDVKLVEKSFETDTNLNFQNLSVIGFRILLLKVAGFNLLMTLRLWSS

SEQ ID NO: 45120 - protein, 764 aa, synthetic construct
MALPVTALLLPLALLLHAARPDIVMTQSPATLSVSPGERATLSCRASQSVSNDVVWYQQKPGQAPRLLIYYASNRYTGIPARFSGSGSGTEFTLTISSLQSEDFAVYYCQQDYTSPWTFGQGTKLEIKRLEDLKNVFPPEVAVFEPSEAEISHTQKATLVCLATGFYPDHVELSWWVNGKEVHSGVCTDPQPLKEQPALNDSRYCLSSRLRVSATFWQNPRNHFRCQVQFYGLSENDEWTQDRAKPVTQIVSAEAWGRADCGFTSESYQQGVLSATILYEILLGKATLYAVLVSALVLMAMVKRKDSRGRAKRSGSGATNFSLLKQAGDVEENPGPTSTMDWIWRILFLVGAATGAHSGPQVQLVESGGGSVQAGGSLRLSCGASGNISSRNCMGWFRQAPGKEREGVAAIGQVTGRSYYVDSVKGRFTISLDNAKNTLYLQMNTLKPEDTAMYYCAAAPGCLLSALRSADYRNWGQGTQVTVSSGSGGGGSGGGGSGGGGSFEEVQLVQSGAEVKKPGASVRVSCKASGYTFTNYGMNWVRQAPGQGLEWMGWINTYTGEPTYADDFKGRVTMTTDTSTSTAYMELRSLRSDDTAVYYCARIGDSSPSDYWGQGTLVTVSSTRIQNPDPAVYQLRDSKSSDKSVCLFTDFDSQTNVSQSKDSDVYITDKCVLDMRSMDFKSNSAVAWSNKSDFACANAFNNSIIPEDTFFPSPESSCDVKLVEKSFETDTNLNFQNLSVIGFRILLLKVAGFNLLMTLRLWSS

SEQ ID NO: 45121 - protein, 905 aa, synthetic construct
MALPVTALLLPLALLLHAARPEVQLVESGGGLVQAGGSLRLSCAASGRTFSMGWFRQAPGKEREFVAAITYSGGSPYYADSVKGRFTISRDNAKNTVYLQMNSLKPEDTAVYYCAANPTYGSDWNAENWGQGTQVTVSSGTGGGGSGGGGSGGGGSEFDIVMTQSPATLSVSPGERATLSCRASQSVSNDVVWYQQKPGQAPRLLIYYASNRYTGIPARFSGSGSGTEFTLTISSLQSEDFAVYYCQQDYTSPWTFGQGTKLEIKRLEIQNPDPAVYQLRDSKSSDKSVCLFTDFDSQTNVSQSKDSDVYITDKCVLDMRSMDFKSNSAVAWSNKSDFACANAFNNSIIPEDTFFPSSDVPCDVKLVEKSFETDTNLNFQNLSVIGFRILLLKVAGFNLLMTLRLWSSRAKRSGSGVKQTLNFDLLKLAGDVESNPGPTSTMDWIWRILFLVGAATGAHSGPQVQLVESGGGSVQAGGSLRLSCGASGNISSRNCMGWFRQAPGKEREGVAAIGQVTGRSYYVDSVKGRFTISLDNAKNTLYLQMNTLKPEDTAMYYCAAAPGCLLSALRSADYRNWGQGTQVTVSSGSGGGGSGGGGSGGGGSFEEVQLVQSGAEVKKPGASVRVSCKASGYTFTNYGMNWVRQAPGQGLEWMGWINTYTGEPTYADDFKGRVTMTTDTSTSTAYMELRSLRSDDTAVYYCARIGDSSPSDYWGQGTLVTVSSTREDLKNVFPPEVAVFEPSKAEIAHTQKATLVCLATGFYPDHVELSWWVNGKEVHSGVCTDPQPLKEQPALNDSRYCLSSRLRVSATFWQNPRNHFRCQVQFYGLSENDEWTQDRAKPVTQIVSAEAWGRADCGITSASYHQGVLSATILYEILLGKATLYAVLVSALVLMAMVKRKDSRG

SEQ ID NO: 45122 - protein, 902 aa, synthetic construct
MALPVTALLLPLALLLHAARPQVQLVESGGGSVQAGGSLRLSCGASGNISSRNCMGWFRQAPGKEREGVAAIGQVTGRSYYVDSVKGRFTISLDNAKNTLYLQMNTLKPEDTAMYYCAAAPGCLLSALRSADYRNWGQGTQVTVSSGTGGGGSGGGGSGGGGSEFDIVMTQSPATLSVSPGERATLSCRASQSVSNDVVWYQQKPGQAPRLLIYYASNRYTGIPARFSGSGSGTEFTLTISSLQSEDFAVYYCQQDYTSPWTFGQGTKLEIKRLEDLKNVFPPEVAVFEPSEAEISHTQKATLVCLATGFYPDHVELSWWVNGKEVHSGVCTDPQPLKEQPALNDSRYCLSSRLRVSATFWQNPRNHFRCQVQFYGLSENDEWTQDRAKPVTQIVSAEAWGRADCGFTSESYQQGVLSATILYEILLGKATLYAVLVSALVLMAMVKRKDSRGRAKRSGSGATNFSLLKQAGDVEENPGPTSATMDWIWRILFLVGAATGAHSGPEVQLVESGGGLVQAGGSLRLSCAASGRTFTMGWFRQAPGKEREFVAAISLSPTLAYYADSVKGRFTISRDNAKNTVVLQMNSLKPEDTALYYCAADRKSVMSIRPDYWGQGTQVTVSSGSGGGGSGGGGSGGGGSFEEVQLVQSGAEVKKPGASVRVSCKASGYTFTNYGMNWVRQAPGQGLEWMGWINTYTGEPTYADDFKGRVTMTTDTSTSTAYMELRSLRSDDTAVYYCARIGDSSPSDYWGQGTLVTVSSTRIQNPDPAVYQLRDSKSSDKSVCLFTDFDSQTNVSQSKDSDVYITDKCVLDMRSMDFKSNSAVAWSNKSDFACANAFNNSIIPEDTFFPSPESSCDVKLVEKSFETDTNLNFQNLSVIGFRILLLKVAGFNLLMTLRLWSS

SEQ ID NO: 45123 - protein, 765 aa, synthetic construct
MALPVTALLLPLALLLHAARPQVQLVESGGGSVQAGGSLRLSCGASGNISSRNCMGWFRQAPGKEREGVAAIGQVTGRSYYVDSVKGRFTISLDNAKNTLYLQMNTLKPEDTAMYYCAAAPGCLLSALRSADYRNWGQGTQVTVSSGTGGGGSGGGGSGGGGSEFDIVMTQSPATLSVSPGERATLSCRASQSVSNDVVWYQQKPGQAPRLLIYYASNRYTGIPARFSGSGSGTEFTLTISSLQSEDFAVYYCQQDYTSPWTFGQGTKLEIKRLEDLKNVFPPEVAVFEPSEAEISHTQKATLVCLATGFYPDHVELSWWVNGKEVHSGVCTDPQPLKEQPALNDSRYCLSSRLRVSATFWQNPRNHFRCQVQFYGLSENDEWTQDRAKPVTQIVSAEAWGRADCGFTSESYQQGVLSATILYEILLGKATLYAVLVSALVLMAMVKRKDSRGRAKRSGSGATNFSLLKQAGDVEENPGPTSATMDWIWRILFLVGAATGAHSFEEVQLVQSGAEVKKPGASVRVSCKASGYTFTNYGMNWVRQAPGQGLEWMGWINTYTGEPTYADDFKGRVTMTTDTSTSTAYMELRSLRSDDTAVYYCARIGDSSPSDYWGQGTLVTVSSTRIQNPDPAVYQLRDSKSSDKSVCLFTDFDSQTNVSQSKDSDVYITDKCVLDMRSMDFKSNSAVAWSNKSDFACANAFNNSIIPEDTFFPSPESSCDVKLVEKSFETDTNLNFQNLSVIGFRILLLKVAGFNLLMTLRLWSS

SEQ ID NO: 45124 - protein, 765 aa, synthetic construct
MALPVTALLLPLALLLHAARPQVQLVESGGGVVQPGGSLRLSCAASGLSFSTYTVAWFRQAPGKGLEGVAAIPYTSQHMVYTDSVRGRFTISRDNSKNTLYLQMNSLRAEDTAVYYCATDRRPGTSMLAINGYNRWGQGTTVTVSSGTGGGGSGGGGSGGGGSEFDIVMTQSPATLSVSPGERATLSCRASQSVSNDVVWYQQKPGQAPRLLIYYASNRYTGIPARFSGSGSGTEFTLTISSLQSEDFAVYYCQQDYTSPWTFGQGTKLEIKRLEDLKNVFPPEVAVFEPSEAEISHTQKATLVCLATGFYPDHVELSWWVNGKEVHSGVCTDPQPLKEQPALNDSRYCLSSRLRVSATFWQNPRNHFRCQVQFYGLSENDEWTQDRAKPVTQIVSAEAWGRADCGFTSESYQQGVLSATILYEILLGKATLYAVLVSALVLMAMVKRKDSRGRAKRSGSGATNFSLLKQAGDVEENPGPTSATMDWIWRILFLVGAATGAHSFEEVQLVQSGAEVKKPGASVRVSCKASGYTFTNYGMNWVRQAPGQGLEWMGWINTYTGEPTYADDFKGRVTMTTDTSTSTAYMELRSLRSDDTAVYYCARIGDSSPSDYWGQGTLVTVSSTRIQNPDPAVYQLRDSKSSDKSVCLFTDFDSQTNVSQSKDSDVYITDKCVLDMRSMDFKSNSAVAWSNKSDFACANAFNNSIIPEDTFFPSPESSCDVKLVEKSFETDTNLNFQNLSVIGFRILLLKVAGFNLLMTLRLWSS

SEQ ID NO: 45125 - protein, 764 aa, synthetic construct
MALPVTALLLPLALLLHAARPDIVMTQSPATLSVSPGERATLSCRASQSVSNDVVWYQQKPGQAPRLLIYYASNRYTGIPARFSGSGSGTEFTLTISSLQSEDFAVYYCQQDYTSPWTFGQGTKLEIKRLEDLKNVFPPEVAVFEPSEAEISHTQKATLVCLATGFYPDHVELSWWVNGKEVHSGVCTDPQPLKEQPALNDSRYCLSSRLRVSATFWQNPRNHFRCQVQFYGLSENDEWTQDRAKPVTQIVSAEAWGRADCGFTSESYQQGVLSATILYEILLGKATLYAVLVSALVLMAMVKRKDSRGRAKRSGSGATNFSLLKQAGDVEENPGPTSTMDWIWRILFLVGAATGAHSGPQVQLVESGGGVVQPGGSLRLSCAASGLSFSTYTVAWFRQAPGKGLEGVAAIPYTSQHMVYTDSVRGRFTISRDNSKNTLYLQMNSLRAEDTAVYYCATDRRPGTSMLAINGYNRWGQGTTVTVSSGSGGGGSGGGGSGGGGSFEEVQLVQSGAEVKKPGASVRVSCKASGYTFTNYGMNWVRQAPGQGLEWMGWINTYTGEPTYADDFKGRVTMTTDTSTSTAYMELRSLRSDDTAVYYCARIGDSSPSDYWGQGTLVTVSSTRIQNPDPAVYQLRDSKSSDKSVCLFTDFDSQTNVSQSKDSDVYITDKCVLDMRSMDFKSNSAVAWSNKSDFACANAFNNSIIPEDTFFPSPESSCDVKLVEKSFETDTNLNFQNLSVIGFRILLLKVAGFNLLMTLRLWSS

SEQ ID NO: 45126 - protein, 766 aa, synthetic construct
MALPVTALLLPLALLLHAARPDIVMTQSPATLSVSPGERATLSCRASQSVSNDVVWYQQKPGQAPRLLIYYASNRYTGIPARFSGSGSGTEFTLTISSLQSEDFAVYYCQQDYTSPWTFGQGTKLEIKRLEDLKNVFPPEVAVFEPSEAEISHTQKATLVCLATGFYPDHVELSWWVNGKEVHSGVCTDPQPLKEQPALNDSRYCLSSRLRVSATFWQNPRNHFRCQVQFYGLSENDEWTQDRAKPVTQIVSAEAWGRADCGFTSESYQQGVLSATILYEILLGKATLYAVLVSALVLMAMVKRKDSRGRAKRSGSGATNFSLLKQAGDVEENPGPTSTMDWIWRILFLVGAATGAHSGPEVQLVESGGGSVQAGGSLRLSCAASGYTYSINCMGWFRQAPGKEREGVAAISTGGGRTDYRDSVKGRFTISQDNAKNTVYLQMNSLKPEDTAMYYCAGKTTYPGYGCGLGRSAYNYWGQGTQVTVSSGSGGGGSGGGGSGGGGSFEEVQLVQSGAEVKKPGASVRVSCKASGYTFTNYGMNWVRQAPGQGLEWMGWINTYTGEPTYADDFKGRVTMTTDTSTSTAYMELRSLRSDDTAVYYCARIGDSSPSDYWGQGTLVTVSSTRIQNPDPAVYQLRDSKSSDKSVCLFTDFDSQTNVSQSKDSDVYITDKCVLDMRSMDFKSNSAVAWSNKSDFACANAFNNSIIPEDTFFPSPESSCDVKLVEKSFETDTNLNFQNLSVIGFRILLLKVAGFNLLMTLRLWSS

SEQ ID NO: 45127 - protein, 619 aa, synthetic construct
MALPVTALLLPLALLLHAARPDIVMTQSPATLSVSPGERATLSCRASQSVSNDVVWYQQKPGQAPRLLIYYASNRYTGIPARFSGSGSGTEFTLTISSLQSEDFAVYYCQQDYTSPWTFGQGTKLEIKRLEDLKHVFPPEVAVFEPSDAEIWHTQKATLVCLATGFYPDHVELSWWVNGKEVHSGVSTDPQPLKEQPALNDSRYCLSSRLRVSATFWQNPRNHFRCQVQFYGLSENDEWTQDRAKPVTQIVSAEAWGRADCGFTSESYQQGVLSATILYEILLGKATLYAVLVSALVLMAMVKRKDSRGRAKRSGSGATNFSLLKQAGDVEENPGPTSMDWIWRILFLVGAATGAHSFEEVQLVQSGAEVKKPGASVRVSCKASGYTFTNYGMNWVRQAPGQGLEWMGWINTYTGEPTYADDFKGRVTMTTDTSTSTAYMELRSLRSDDTAVYYCARIGDSSPSDYWGQGTLVTVSSTRIQNPDPAVYQLRDSKSSDKSVCLFTDFDSQTNVSQSKDSDVYITDKTVLDMRSMDFKSNSAVAWSSKSDFACANAFNNSIIPEDTFFPSPEMACDVKLVEKSFETDTNLNFQNLLVIWLRILLLKVAGFNLLMTLRLWSS

SEQ ID NO: 45128 - protein, 619 aa, synthetic construct
MALPVTALLLPLALLLHAARPDIVMTQSPATLSVSPGERATLSCRASQSVSNDVVWYQQKPGQAPRLLIYYASNRYTGIPARFSGSGSGTEFTLTISSLQSEDFAVYYCQQDYTSPWTFGQGTKLEIKRLEDLKHVFPPEVAVFEPSDAEIWHTQKATLVCLATGFYPDHVELSWWVNGKEVHSGVSTDPQPLKEQPALNDSRYCLSSRLRVSATFWQNPRNHFRCQVQFYGLSENDEWTQDRAKPVTQIVSAEAWGRADCGFTSESYQQGVLSATILYEILLGKATLYAVLVSALVLMAMVKRKDSRGRAKRSGSGATNFSLLKQAGDVEENPGPTSMDWIWRILFLVGAATGAHSFEEVQLVQSGAEVKKPGASVRVSCKASGYTFTNYGMNWVRQAPGQGLEWMGWINTYTGEPTYADDFKGRVTMTTDTSTSTAYMELRSLRSDDTAVYYCARIGDSSPSDYWGQGTLVTVSSTRIQNPDPAVYQLRDSKSSDKSVCLFTDFDSQTNVSQSKDSDVYITDKTVLDMRSMDFKSNSAVAWSTKSDFACANAFNNSIIPEDTFFPSPEVVCDVKLVEKSFETDTNLNFQNLVVIGARILLLKVAGFNLLMTLRLWSS

SEQ ID NO: 45129 - protein, 619 aa, synthetic construct
MALPVTALLLPLALLLHAARPDIVMTQSPATLSVSPGERATLSCRASQSVSNDVVWYQQKPGQAPRLLIYYASNRYTGIPARFSGSGSGTEFTLTISSLQSEDFAVYYCQQDYTSPWTFGQGTKLEIKRLEDLKNVFPPEVAVFEPSKAEISRTQKATLVCLATGFYPPHVELSWWVNGKEVHDGVCTDPQPLKEQPALNDSRYCLSSRLRVSATFWQNPRNHFRCQVQFYGLSENDEWTQDRAKPVTQIVSAEAWGRADCGFTSESYQQGVLSATILYEILLGKATLYAVLVSALVLMAMVKRKDSRGRAKRSGSGATNFSLLKQAGDVEENPGPTSMDWIWRILFLVGAATGAHSFEEVQLVQSGAEVKKPGASVRVSCKASGYTFTNYGMNWVRQAPGQGLEWMGWINTYTGEPTYADDFKGRVTMTTDTSTSTAYMELRSLRSDDTAVYYCARIGDSSPSDYWGQGTLVTVSSTRIQNPDPAVYQLRDSKSSDKFVCLFTDFDSQINVSQSKDSDVYITDKCVLDMRSMDFKSNSAVAWSNKSDFTCANAFNNSIIPEDTFFPSPESSCDVKLVEKSFETDTNLNFQNLSVIGFRILLLKVAGFNLLMTLRLWSS

SEQ ID NO: 45130 - protein, 761 aa, synthetic construct
MALPVTALLLPLALLLHAARPDIVMTQSPATLSVSPGERATLSCRASQSVSNDVVWYQQKPGQAPRLLIYYASNRYTGIPARFSGSGSGTEFTLTISSLQSEDFAVYYCQQDYTSPWTFGQGTKLEIKRLEDLKNVFPPEVAVFEPSEAEISHTQKATLVCLATGFYPDHVELSWWVNGKEVHSGVCTDPQPLKEQPALNDSRYCLSSRLRVSATFWQNPRNHFRCQVQFYGLSENDEWTQDRAKPVTQIVSAEAWGRADCGFTSESYQQGVLSATILYEILLGKATLYAVLVSALVLMAMVKRKDSRGRAKRSGSGATNFSLLKQAGDVEENPGPTSTMDWIWRILFLVGAATGAHSGPQVQLQESGPGLVKPSQTLSLTCTVSGASITTGEYYWNWFRQPPGKGLEWMGAIAASGSTTYSPSFESRTSISRDTSKNQFSLKLSSVTAADTAVYYCGRSFGVAAVTTGQNRGQGTLVTVSSGSGGGGSGGGGSGGGGSFEEVQLVQSGAEVKKPGASVRVSCKASGYTFTNYGMNWVRQAPGQGLEWMGWINTYTGEPTYADDFKGRVTMTTDTSTSTAYMELRSLRSDDTAVYYCARIGDSSPSDYWGQGTLVTVSSTRIQNPDPAVYQLRDSKSSDKSVCLFTDFDSQTNVSQSKDSDVYITDKCVLDMRSMDFKSNSAVAWSNKSDFACANAFNNSIIPEDTFFPSPESSCDVKLVEKSFETDTNLNFQNLSVIGFRILLLKVAGFNLLMTLRLWSS

SEQ ID NO: 45131 - protein, 902 aa, synthetic construct
MALPVTALLLPLALLLHAARPQVQLQESGPGLVKPSQTLSLTCTVSGGSITTGEFYWNWFRQPPGKGLEWMGAIAASGSTTYSPSFESRTSISRDTSKNQFSLKLSSVTAADTAVYYCGRSFGVAAVTTGQNRGQGTLVTVSSGTGGGGSGGGGSGGGGSEFDIVMTQSPATLSVSPGERATLSCRASQSVSNDVVWYQQKPGQAPRLLIYYASNRYTGIPARFSGSGSGTEFTLTISSLQSEDFAVYYCQQDYTSPWTFGQGTKLEIKRLEIQNPDPAVYQLRDSKSSDKSVCLFTDFDSQTNVSQSKDSDVYITDKCVLDMRSMDFKSNSAVAWSNKSDFACANAFNNSIIPEDTFFPSSDVPCDVKLVEKSFETDTNLNFQNLSVIGFRILLLKVAGFNLLMTLRLWSSRAKRSGSGVKQTLNFDLLKLAGDVESNPGPTSTMDWIWRILFLVGAATGAHSGPEVQLVESGGGLVQPGGSLRLSCAASGRTFTMGWYRQAPGKEREFVAAISLSPTLAYYADSVKGRFTISRDNSKNTVVLQMNSLRAEDTALYYCAADRKSVMSIRPDYWGQGTLVTVSSGSGGGGSGGGGSGGGGSFEEVQLVQSGAEVKKPGASVRVSCKASGYTFTNYGMNWVRQAPGQGLEWMGWINTYTGEPTYADDFKGRVTMTTDTSTSTAYMELRSLRSDDTAVYYCARIGDSSPSDYWGQGTLVTVSSTREDLKNVFPPEVAVFEPSKAEIAHTQKATLVCLATGFYPDHVELSWWVNGKEVHSGVCTDPQPLKEQPALNDSRYCLSSRLRVSATFWQNPRNHFRCQVQFYGLSENDEWTQDRAKPVTQIVSAEAWGRADCGITSASYHQGVLSATILYEILLGKATLYAVLVSALVLMAMVKRKDSRG

SEQ ID NO: 45132 - protein, 765 aa, synthetic construct
MALPVTALLLPLALLLHAARPQVQLQESGPGLVKPSQTLSLTCTVSGGSITTGEFYWNWFRQPPGKGLEWMGAIAASGSTTYSPSFESRTSISRDTSKNQFSLKLSSVTAADTAVYYCGRSFGVAAVTTGQNRGQGTLVTVSSGTGGGGSGGGGSGGGGSEFDIVMTQSPATLSVSPGERATLSCRASQSVSNDVVWYQQKPGQAPRLLIYYASNRYTGIPARFSGSGSGTEFTLTISSLQSEDFAVYYCQQDYTSPWTFGQGTKLEIKRLEIQNPDPAVYQLRDSKSSDKSVCLFTDFDSQTNVSQSKDSDVYITDKCVLDMRSMDFKSNSAVAWSNKSDFACANAFNNSIIPEDTFFPSSDVPCDVKLVEKSFETDTNLNFQNLSVIGFRILLLKVAGFNLLMTLRLWSSRAKRSGSGVKQTLNFDLLKLAGDVESNPGPTSTMDWIWRILFLVGAATGAHSFEEVQLVQSGAEVKKPGASVRVSCKASGYTFTNYGMNWVRQAPGQGLEWMGWINTYTGEPTYADDFKGRVTMTTDTSTSTAYMELRSLRSDDTAVYYCARIGDSSPSDYWGQGTLVTVSSTREDLKNVFPPEVAVFEPSKAEIAHTQKATLVCLATGFYPDHVELSWWVNGKEVHSGVCTDPQPLKEQPALNDSRYCLSSRLRVSATFWQNPRNHFRCQVQFYGLSENDEWTQDRAKPVTQIVSAEAWGRADCGITSASYHQGVLSATILYEILLGKATLYAVLVSALVLMAMVKRKDSRG

SEQ ID NO: 45133 - protein, 898 aa, synthetic construct
MALPVTALLLPLALLLHAARPEVQLVESGGGLVQAGGSLRLSCAASGRTFSMGWFRQAPGKEREFVAAITYSGGSPYYADSVKGRFTISRDNAKNTVYLQMNSLKPEDTAVYYCAANPTYGSDWNAENWGQGTQVTVSSGTGGGGSGGGGSGGGGSEFDIVMTQSPATLSVSPGERATLSCRASQSVSNDVVWYQQKPGQAPRLLIYYASNRYTGIPARFSGSGSGTEFTLTISSLQSEDFAVYYCQQDYTSPWTFGQGTKLEIKRLEDLKNVFPPEVAVFEPSEAEISHTQKATLVCLATGFYPDHVELSWWVNGKEVHSGVCTDPQPLKEQPALNDSRYCLSSRLRVSATFWQNPRNHFRCQVQFYGLSENDEWTQDRAKPVTQIVSAEAWGRADCGFTSESYQQGVLSATILYEILLGKATLYAVLVSALVLMAMVKRKDSRGRAKRSGSGATNFSLLKQAGDVEENPGPTSTMDWIWRILFLVGAATGAHSGPQVQLQESGPGLVKPSQTLSLTCTVSGASITTGEYYWNWFRQPPGKGLEWMGAIAASGSTTYSPSFESRTSISRDTSKNQFSLKLSSVTAADTAVYYCGRSFGVAAVTTGQNRGQGTLVTVSSGSGGGGSGGGGSGGGGSFEEVQLVQSGAEVKKPGASVRVSCKASGYTFTNYGMNWVRQAPGQGLEWMGWINTYTGEPTYADDFKGRVTMTTDTSTSTAYMELRSLRSDDTAVYYCARIGDSSPSDYWGQGTLVTVSSTRIQNPDPAVYQLRDSKSSDKSVCLFTDFDSQTNVSQSKDSDVYITDKCVLDMRSMDFKSNSAVAWSNKSDFACANAFNNSIIPEDTFFPSPESSCDVKLVEKSFETDTNLNFQNLSVIGFRILLLKVAGFNLLMTLRLWSS

SEQ ID NO: 45134 - protein, 905 aa, synthetic construct
MALPVTALLLPLALLLHAARPEVQLVESGGGLVQAGGSLRLSCAASGRTFSMGWFRQAPGKEREFVAAITYSGGSPYYADSVKGRFTISRDNAKNTVYLQMNSLKPEDTAVYYCAANPTYGSDWNAENWGQGTQVTVSSGTGGGGSGGGGSGGGGSEFDIVMTQSPATLSVSPGERATLSCRASQSVSNDVVWYQQKPGQAPRLLIYYASNRYTGIPARFSGSGSGTEFTLTISSLQSEDFAVYYCQQDYTSPWTFGQGTKLEIKRLEIQNPDPAVYQLRDSKSSDKSVCLFTDFDSQTNVSQSKDSDVYITDKCVLDMRSMDFKSNSAVAWSNKSDFACANAFNNSIIPEDTFFPSSDVPCDVKLVEKSFETDTNLNFQNLSVIGFRILLLKVAGFNLLMTLRLWSSRAKRSGSGVKQTLNFDLLKLAGDVESNPGPTSTMDWIWRILFLVGAATGAHSGPQVQLVESGGGLVQPGGSLRLSCAASGNINSRNCMGWFRQAPGKGREGVAAIGQVTGRTYYVDSVKGRFTISLDNSKNTLYLQMNSLRAEDTAVYYCAAAPGCLLSALRSADYRNWGQGTLVTVSSGSGGGGSGGGGSGGGGSFEEVQLVQSGAEVKKPGASVRVSCKASGYTFTNYGMNWVRQAPGQGLEWMGWINTYTGEPTYADDFKGRVTMTTDTSTSTAYMELRSLRSDDTAVYYCARIGDSSPSDYWGQGTLVTVSSTREDLKNVFPPEVAVFEPSKAEIAHTQKATLVCLATGFYPDHVELSWWVNGKEVHSGVCTDPQPLKEQPALNDSRYCLSSRLRVSATFWQNPRNHFRCQVQFYGLSENDEWTQDRAKPVTQIVSAEAWGRADCGITSASYHQGVLSATILYEILLGKATLYAVLVSALVLMAMVKRKDSRG

SEQ ID NO: 45135 - protein, 901 aa, synthetic construct
MALPVTALLLPLALLLHAARPEVQLVESGGGLVQAGGSLRLSCAASGRTFSMGWFRQAPGKEREFVAAITYSGGSPYYADSVKGRFTISRDNAKNTVYLQMNSLKPEDTAVYYCAANPTYGSDWNAENWGQGTQVTVSSGTGGGGSGGGGSGGGGSEFDIVMTQSPATLSVSPGERATLSCRASQSVSNDVVWYQQKPGQAPRLLIYYASNRYTGIPARFSGSGSGTEFTLTISSLQSEDFAVYYCQQDYTSPWTFGQGTKLEIKRLEDLKNVFPPEVAVFEPSEAEISHTQKATLVCLATGFYPDHVELSWWVNGKEVHSGVCTDPQPLKEQPALNDSRYCLSSRLRVSATFWQNPRNHFRCQVQFYGLSENDEWTQDRAKPVTQIVSAEAWGRADCGFTSESYQQGVLSATILYEILLGKATLYAVLVSALVLMAMVKRKDSRGRAKRSGSGATNFSLLKQAGDVEENPGPTSTMDWIWRILFLVGAATGAHSGPQVQLVESGGGLVQPGGSLRLSCAASGNINSRNCMGWFRQAPGKGREGVAAIGQVTGRTYYVDSVKGRFTISLDNSKNTLYLQMNSLRAEDTAVYYCAAAPGCLLSALRSADYRNWGQGTLVTVSSGSGGGGSGGGGSGGGGSFEEVQLVQSGAEVKKPGASVRVSCKASGYTFTNYGMNWVRQAPGQGLEWMGWINTYTGEPTYADDFKGRVTMTTDTSTSTAYMELRSLRSDDTAVYYCARIGDSSPSDYWGQGTLVTVSSTRIQNPDPAVYQLRDSKSSDKSVCLFTDFDSQTNVSQSKDSDVYITDKCVLDMRSMDFKSNSAVAWSNKSDFACANAFNNSIIPEDTFFPSPESSCDVKLVEKSFETDTNLNFQNLSVIGFRILLLKVAGFNLLMTLRLWSS

SEQ ID NO: 45136 - protein, 901 aa, synthetic construct
MALPVTALLLPLALLLHAARPEVQLVESGGGLVQAGGSLRLSCAASGRTFTMGWFRQAPGKEREFVAAISLSPTLAYYADSVKGRFTISRDNAKNTVVLQMNSLKPEDTALYYCAADRKSVMSIRPDYWGQGTQVTVSSGTGGGGSGGGGSGGGGSEFDIVMTQSPATLSVSPGERATLSCRASQSVSNDVVWYQQKPGQAPRLLIYYASNRYTGIPARFSGSGSGTEFTLTISSLQSEDFAVYYCQQDYTSPWTFGQGTKLEIKRLEDLKNVFPPEVAVFEPSEAEISHTQKATLVCLATGFYPDHVELSWWVNGKEVHSGVCTDPQPLKEQPALNDSRYCLSSRLRVSATFWQNPRNHFRCQVQFYGLSENDEWTQDRAKPVTQIVSAEAWGRADCGFTSESYQQGVLSATILYEILLGKATLYAVLVSALVLMAMVKRKDSRGRAKRSGSGATNFSLLKQAGDVEENPGPTSTMDWIWRILFLVGAATGAHSGPQVQLVESGGGLVQPGGSLRLSCAASGNINSRNCMGWFRQAPGKGREGVAAIGQVTGRTYYVDSVKGRFTISLDNSKNTLYLQMNSLRAEDTAVYYCAAAPGCLLSALRSADYRNWGQGTLVTVSSGSGGGGSGGGGSGGGGSFEEVQLVQSGAEVKKPGASVRVSCKASGYTFTNYGMNWVRQAPGQGLEWMGWINTYTGEPTYADDFKGRVTMTTDTSTSTAYMELRSLRSDDTAVYYCARIGDSSPSDYWGQGTLVTVSSTRIQNPDPAVYQLRDSKSSDKSVCLFTDFDSQTNVSQSKDSDVYITDKCVLDMRSMDFKSNSAVAWSNKSDFACANAFNNSIIPEDTFFPSPESSCDVKLVEKSFETDTNLNFQNLSVIGFRILLLKVAGFNLLMTLRLWSS

SEQ ID NO: 45137 - protein, 905 aa, synthetic construct
MALPVTALLLPLALLLHAARPQVQLQESGPGLVKPSQTLSLTCTVSGGSITTGEFYWNWFRQPPGKGLEWMGAIAASGSTTYSPSFESRTSISRDTSKNQFSLKLSSVTAADTAVYYCGRSFGVAAVTTGQNRGQGTLVTVSSGTGGGGSGGGGSGGGGSEFDIVMTQSPATLSVSPGERATLSCRASQSVSNDVVWYQQKPGQAPRLLIYYASNRYTGIPARFSGSGSGTEFTLTISSLQSEDFAVYYCQQDYTSPWTFGQGTKLEIKRLEDLKNVFPPEVAVFEPSEAEISHTQKATLVCLATGFYPDHVELSWWVNGKEVHSGVCTDPQPLKEQPALNDSRYCLSSRLRVSATFWQNPRNHFRCQVQFYGLSENDEWTQDRAKPVTQIVSAEAWGRADCGFTSESYQQGVLSATILYEILLGKATLYAVLVSALVLMAMVKRKDSRGRAKRSGSGATNFSLLKQAGDVEENPGPTSTMDWIWRILFLVGAATGAHSGPQVQLVESGGGLVQPGGSLRLSCAASGNINSRNCMGWFRQAPGKGREGVAAIGQVTGRTYYVDSVKGRFTISLDNSKNTLYLQMNSLRAEDTAVYYCAAAPGCLLSALRSADYRNWGQGTLVTVSSGSGGGGSGGGGSGGGGSFEEVQLVQSGAEVKKPGASVRVSCKASGYTFTNYGMNWVRQAPGQGLEWMGWINTYTGEPTYADDFKGRVTMTTDTSTSTAYMELRSLRSDDTAVYYCARIGDSSPSDYWGQGTLVTVSSTRIQNPDPAVYQLRDSKSSDKSVCLFTDFDSQTNVSQSKDSDVYITDKCVLDMRSMDFKSNSAVAWSNKSDFACANAFNNSIIPEDTFFPSPESSCDVKLVEKSFETDTNLNFQNLSVIGFRILLLKVAGFNLLMTLRLWSS

SEQ ID NO: 45138 - protein, 486 aa, synthetic construct
MALPVTALLLPLALLLHAARPDIQMTQSPSSLSASVGDRVTITCRASQDVRNIVVWFQQKPGKAPKLLIYSGSYRYSGVPSRFSGSGSGTDFTLTISSLQPEDFATYYCQQHYSPPYTFGQGTKVEIKRGGGGSGGGGSGGGGSEVQLVESGPGLVKPSETLSLTCTVSGFSLTRFGVHWVRQPPGKGLEWLGVIWRGGSTDYNAAFMSRLTISKDNSKNQVSLKLSSVTAADTAVYYCSNHYYGSSDYALDNWGQGTLVTVSSTRKIEVMYPPPYLDNEKSNGTIIHVKGKHLCPSPLFPGPSKPFWVLVVVGGVLACYSLLVTVAFIIFWVRSKRSRLLHSDYMNMTPRRPGPTRKHYQPYAPPRDFAAYRSRVKFSRSADAPAYQQGQNQLYNELNLGRREEYDVLDKRRGRDPEMGGKPRRKNPQEGLYNELQKDKMAEAYSEIGMKGERRRGKGHDGLYQGLSTATKDTYDALHMQALPPR

SEQ ID NO: 45139 - protein, 492 aa, synthetic construct
MALPVTALLLPLALLLHAARPDIQMTQSPSSLSASVGDRVTITCRASQDVRNIVVWFQQKPGKAPKLLIYSGSYRYSGVPSRFSGSGSGTDFTLTISSLQPEDFATYYCQQHYSPPYTFGQGTKVEIKRGGGGSGGGGSGGGGSEVQLVESGPGLVKPSETLSLTCTVSGFSLTRFGVHWVRQPPGKGLEWLGVIWRGGSTDYNAAFMSRLTISKDNSKNQVSLKLSSVTAADTAVYYCSNHYYGSSDYALDNWGQGTLVTVSSTRAKPTTTPAPRPPTPAPTIASQPLSLRPEACRPAAGGAVHTRGLDFACDIYIWAPLAGTCGVLLLSLVITLYCKRGRKKLLYIFKQPFMRPVQTTQEEDGCSCRFPEEEEGGCELRVKFSRSADAPAYQQGQNQLYNELNLGRREEYDVLDKRRGRDPEMGGKPRRKNPQEGLYNELQKDKMAEAYSEIGMKGERRRGKGHDGLYQGLSTATKDTYDALHMQALPPR

SEQ ID NO: 45140 - protein, 492 aa, synthetic construct
MALPVTALLLPLALLLHAARPEVQLVESGPGLVKPSETLSLTCTVSGFSLTRFGVHWVRQPPGKGLEWLGVIWRGGSTDYNAAFMSRLTISKDNSKNQVSLKLSSVTAADTAVYYCSNHYYGSSDYALDNWGQGTLVTVSSGGGGSGGGGSGGGGSDIQMTQSPSSLSASVGDRVTITCRASQDVRNIVVWFQQKPGKAPKLLIYSGSYRYSGVPSRFSGSGSGTDFTLTISSLQPEDFATYYCQQHYSPPYTFGQGTKVEIKRTRAKPTTTPAPRPPTPAPTIASQPLSLRPEACRPAAGGAVHTRGLDFACDIYIWAPLAGTCGVLLLSLVITLYCKRGRKKLLYIFKQPFMRPVQTTQEEDGCSCRFPEEEEGGCELRVKFSRSADAPAYQQGQNQLYNELNLGRREEYDVLDKRRGRDPEMGGKPRRKNPQEGLYNELQKDKMAEAYSEIGMKGERRRGKGHDGLYQGLSTATKDTYDALHMQALPPR

SEQ ID NO: 45141 - protein, 625 aa, synthetic construct
MALPVTALLLPLALLLHAARPDIQMTQSPSSLSASVGDRVTITCRASQDVRNIVVWFQQKPGKAPKLLIYSGSYRYSGVPSRFSGSGSGTDFTLTISSLQPEDFATYYCQQHYSPPYTFGQGTKVEIKRLEIQNPDPAVYQLRDSKSSDKSVCLFTDFDSQTNVSQSKDSDVYITDKCVLDMRSMDFKSNSAVAWSNKSDFACANAFNNSIIPEDTFFPSSDVPCDVKLVEKSFETDTNLNFQNLSVIGFRILLLKVAGFNLLMTLRLWSSRAKRSGSGVKQTLNFDLLKLAGDVESNPGPTSMDWIWRILFLVGAATGAHSFEEVQLVESGPGLVKPSETLSLTCTVSGFSLTRFGVHWVRQPPGKGLEWLGVIWRGGSTDYNAAFMSRLTISKDNSKNQVSLKLSSVTAADTAVYYCSNHYYGSSDYALDNWGQGTLVTVSSTREDLKNVFPPEVAVFEPSKAEIAHTQKATLVCLATGFYPDHVELSWWVNGKEVHSGVCTDPQPLKEQPALNDSRYCLSSRLRVSATFWQNPRNHFRCQVQFYGLSENDEWTQDRAKPVTQIVSAEAWGRADCGITSASYHQGVLSATILYEILLGKATLYAVLVSALVLMAMVKRKDSRG

SEQ ID NO: 45142 - protein, 621 aa, synthetic construct
MALPVTALLLPLALLLHAARPDIQMTQSPSSLSASVGDRVTITCRASQDVRNIVVWFQQKPGKAPKLLIYSGSYRYSGVPSRFSGSGSGTDFTLTISSLQPEDFATYYCQQHYSPPYTFGQGTKVEIKRLEDLKNVFPPEVAVFEPSKAEIAHTQKATLVCLATGFYPDHVELSWWVNGKEVHSGVCTDPQPLKEQPALNDSRYCLSSRLRVSATFWQNPRNHFRCQVQFYGLSENDEWTQDRAKPVTQIVSAEAWGRADCGITSASYHQGVLSATILYEILLGKATLYAVLVSALVLMAMVKRKDSRGRAKRSGSGATNFSLLKQAGDVEENPGPTSMDWIWRILFLVGAATGAHSFEEVQLVESGPGLVKPSETLSLTCTVSGFSLTRFGVHWVRQPPGKGLEWLGVIWRGGSTDYNAAFMSRLTISKDNSKNQVSLKLSSVTAADTAVYYCSNHYYGSSDYALDNWGQGTLVTVSSTRIQNPDPAVYQLRDSKSSDKSVCLFTDFDSQTNVSQSKDSDVYITDKCVLDMRSMDFKSNSAVAWSNKSDFACANAFNNSIIPEDTFFPSSDVPCDVKLVEKSFETDTNLNFQNLSVIGFRILLLKVAGFNLLMTLRLWSS

SEQ ID NO: 45143 - protein, 621 aa, synthetic construct
MALPVTALLLPLALLLHAARPDIQMTQSPSSLSASVGDRVTITCRASQDVRNIVVWFQQKPGKAPKLLIYSGSYRYSGVPSRFSGSGSGTDFTLTISSLQPEDFATYYCQQHYSPPYTFGQGTKVEIKRLEDLKNVFPPEVAVFEPSEAEISHTQKATLVCLATGFYPDHVELSWWVNGKEVHSGVCTDPQPLKEQPALNDSRYCLSSRLRVSATFWQNPRNHFRCQVQFYGLSENDEWTQDRAKPVTQIVSAEAWGRADCGFTSESYQQGVLSATILYEILLGKATLYAVLVSALVLMAMVKRKDSRGRAKRSGSGATNFSLLKQAGDVEENPGPTSMDWIWRILFLVGAATGAHSFEEVQLVESGPGLVKPSETLSLTCTVSGFSLTRFGVHWVRQPPGKGLEWLGVIWRGGSTDYNAAFMSRLTISKDNSKNQVSLKLSSVTAADTAVYYCSNHYYGSSDYALDNWGQGTLVTVSSTRIQNPDPAVYQLRDSKSSDKSVCLFTDFDSQTNVSQSKDSDVYITDKCVLDMRSMDFKSNSAVAWSNKSDFACANAFNNSIIPEDTFFPSPESSCDVKLVEKSFETDTNLNFQNLSVIGFRILLLKVAGFNLLMTLRLWSS

SEQ ID NO: 45144 - protein, 625 aa, synthetic construct
MALPVTALLLPLALLLHAARPDIQMTQSPSSLSASVGDRVTITCRASQDVRNIVVWFQQKPGKAPKLLIYSGSYRYSGVPSRFSGSGSGTDFTLTISSLQPEDFATYYCQQHYSPPYTFGQGTKVEIKRLEIQNPDPAVYQLRDSKSSDKSVCLFTDFDSQTNVSQSKDSDVYITDKCVLDMRSMDFKSNSAVAWSNKSDFACANAFNNSIIPEDTFFPSPESSCDVKLVEKSFETDTNLNFQNLSVIGFRILLLKVAGFNLLMTLRLWSSRAKRSGSGVKQTLNFDLLKLAGDVESNPGPTSMDWIWRILFLVGAATGAHSFEEVQLVESGPGLVKPSETLSLTCTVSGFSLTRFGVHWVRQPPGKGLEWLGVIWRGGSTDYNAAFMSRLTISKDNSKNQVSLKLSSVTAADTAVYYCSNHYYGSSDYALDNWGQGTLVTVSSTREDLKNVFPPEVAVFEPSEAEISHTQKATLVCLATGFYPDHVELSWWVNGKEVHSGVCTDPQPLKEQPALNDSRYCLSSRLRVSATFWQNPRNHFRCQVQFYGLSENDEWTQDRAKPVTQIVSAEAWGRADCGFTSESYQQGVLSATILYEILLGKATLYAVLVSALVLMAMVKRKDSRG

SEQ ID NO: 45145 - protein, 637 aa, synthetic construct
MALPVTALLLPLALLLHAARPLEEDLKNVFPPEVAVFEPSKAEIAHTQKATLVCLATGFYPDHVELSWWVNGKEVHSGVCTDPQPLKEQPALNDSRYCLSSRLRVSATFWQNPRNHFRCQVQFYGLSENDEWTQDRAKPVTQIVSAEAWGRADCGITSASYHQGVLSATILYEILLGKATLYAVLVSALVLMAMVKRKDSRGRAKRSGSGATNFSLLKQAGDVEENPGPTSMALPVTALLLPLALLLHAARPDIQMTQSPSSLSASVGDRVTITCRASQDVRNIVVWFQQKPGKAPKLLIYSGSYRYSGVPSRFSGSGSGTDFTLTISSLQPEDFATYYCQQHYSPPYTFGQGTKVEIKRGGGGSGGGGSGGGGSEVQLVESGPGLVKPSETLSLTCTVSGFSLTRFGVHWVRQPPGKGLEWLGVIWRGGSTDYNAAFMSRLTISKDNSKNQVSLKLSSVTAADTAVYYCSNHYYGSSDYALDNWGQGTLVTVSSTRIQNPDPAVYQLRDSKSSDKSVCLFTDFDSQTNVSQSKDSDVYITDKCVLDMRSMDFKSNSAVAWSNKSDFACANAFNNSIIPEDTFFPSSDVPCDVKLVEKSFETDTNLNFQNLSVIGFRILLLKVAGFNLLMTLRLWSS

SEQ ID NO: 45146 - protein, 644 aa, synthetic construct
MALPVTALLLPLALLLHAARPLEGSGDRPDPAVYQLRDSKSSDKSVCLFTDFDSQTNVSQSKDSDVYITDKCVLDMRSMDFKSNSAVAWSNKSDFACANAFNNSIIPEDTFFPSPESSCDVKLVEKSFETDTNLNFQNLSVIGFRILLLKVAGFNLLMTLRLWSSSSRAKRSGSGVKQTLNFDLLKLAGDVESNPGPTSMALPVTALLLPLALLLHAARPDIQMTQSPSSLSASVGDRVTITCRASQDVRNIVVWFQQKPGKAPKLLIYSGSYRYSGVPSRFSGSGSGTDFTLTISSLQPEDFATYYCQQHYSPPYTFGQGTKVEIKRGGGGSGGGGSGGGGSEVQLVESGPGLVKPSETLSLTCTVSGFSLTRFGVHWVRQPPGKGLEWLGVIWRGGSTDYNAAFMSRLTISKDNSKNQVSLKLSSVTAADTAVYYCSNHYYGSSDYALDNWGQGTLVTVSSTREDLKNVFPPEVAVFEPSEAEISHTQKATLVCLATGFYPDHVELSWWVNGKEVHSGVCTDPQPLKEQPALNDSRYCLSSRLRVSATFWQNPRNHFRCQVQFYGLSENDEWTQDRAKPVTQIVSAEAWGRADCGFTSESYQQGVLSATILYEILLGKATLYAVLVSALVLMAMVKRKDSRG

SEQ ID NO: 45147 - protein, 621 aa, synthetic construct
MALPVTALLLPLALLLHAARPDIQMTQSPSSLSASVGDRVTITCRASQDVRNIVVWFQQKPGKAPKLLIYSGSYRYSGVPSRFSGSGSGTDFTLTISSLQPEDFATYYCQQHYSPPYTFGQGTKVEIKRLEDLKNVFPPEVAVFEPSEAEISHTQKATLVCLATGFYPDHVELSWWVNGKEVHSGVSTDPQPLKEQPALNDSRYCLSSRLRVSATFWQNPRNHFRCQVQFYGLSENDEWTQDRAKPVTQIVSAEAWGRADCGFTSESYQQGVLSATILYEILLGKATLYAVLVSALVLMAMVKRKDSRGRAKRSGSGATNFSLLKQAGDVEENPGPTSMDWIWRILFLVGAATGAHSFEEVQLVESGPGLVKPSETLSLTCTVSGFSLTRFGVHWVRQPPGKGLEWLGVIWRGGSTDYNAAFMSRLTISKDNSKNQVSLKLSSVTAADTAVYYCSNHYYGSSDYALDNWGQGTLVTVSSTRIQNPDPAVYQLRDSKSSDKSVCLFTDFDSQTNVSQSKDSDVYITDKTVLDMRSMDFKSNSAVAWSNKSDFACANAFNNSIIPEDTFFPSPESSCDVKLVEKSFETDTNLNFQNLSVIGFRILLLKVAGFNLLMTLRLWSS

SEQ ID NO: 45148 - protein, 629 aa, synthetic construct
MALPVTALLLPLALLLHAARPDIQMTQSPSSLSASVGDRVTITCRASQDVRNIVVWFQQKPGKAPKLLIYSGSYRYSGVPSRFSGSGSGTDFTLTISSLQPEDFATYYCQQHYSPPYTFGQGTKVEIKRLEDKQLDADVSPKPTIFLPSIAETKLQKAGTYLCLLEKFFPDVIKIHWQEKKSNTILGSQEGNTMKTNDTYMKFSWLTVPEKSLDKEHRCIVRHENNKNGVDQEIIFPPIKTDVITMDPKDNCSKDANDTLLLQLTNTSAYYMYLLLLLKSVVYFAIITCCLLRRTAFCCNGEKSRAKRSGSGATNFSLLKQAGDVEENPGPTSMDWIWRILFLVGAATGAHSFEEVQLVESGPGLVKPSETLSLTCTVSGFSLTRFGVHWVRQPPGKGLEWLGVIWRGGSTDYNAAFMSRLTISKDNSKNQVSLKLSSVTAADTAVYYCSNHYYGSSDYALDNWGQGTLVTVSSTRSQPHTKPSVFVMKNGTNVACLVKEFYPKDIRINLVSSKKITEFDPAIVISPSGKYNAVKLGKYEDSNSVTCSVQHDNKTVHSTDFEVKTDSTDHVKPKETENTKQPSKSCHKPKAIVHTEKVNMMSLTVLGLRMLFAKTVAVNFLLTAKLFFL

SEQ ID NO: 45149 - protein, 629 aa, synthetic construct
MALPVTALLLPLALLLHAARPDIQMTQSPSSLSASVGDRVTITCRASQDVRNIVVWFQQKPGKAPKLLIYSGSYRYSGVPSRFSGSGSGTDFTLTISSLQPEDFATYYCQQHYSPPYTFGQGTKVEIKRLESQPHTKPSVFVMKNGTNVACLVKEFYPKDIRINLVSSKKITEFDPAIVISPSGKYNAVKLGKYEDSNSVTCSVQHDNKTVHSTDFEVKTDSTDHVKPKETENTKQPSKSCHKPKAIVHTEKVNMMSLTVLGLRMLFAKTVAVNFLLTAKLFFLRAKRSGSGATNFSLLKQAGDVEENPGPTSMDWIWRILFLVGAATGAHSFEEVQLVESGPGLVKPSETLSLTCTVSGFSLTRFGVHWVRQPPGKGLEWLGVIWRGGSTDYNAAFMSRLTISKDNSKNQVSLKLSSVTAADTAVYYCSNHYYGSSDYALDNWGQGTLVTVSSTRDKQLDADVSPKPTIFLPSIAETKLQKAGTYLCLLEKFFPDVIKIHWQEKKSNTILGSQEGNTMKTNDTYMKFSWLTVPEKSLDKEHRCIVRHENNKNGVDQEIIFPPIKTDVITMDPKDNCSKDANDTLLLQLTNTSAYYMYLLLLLKSVVYFAIITCCLLRRTAFCCNGEKS

SEQ ID NO: 45150 - protein, 644 aa, synthetic construct
MALPVTALLLPLALLLHAARPLEDKQLDADVSPKPTIFLPSIAETKLQKAGTYLCLLEKFFPDVIKIHWQEKKSNTILGSQEGNTMKTNDTYMKFSWLTVPEKSLDKEHRCIVRHENNKNGVDQEIIFPPIKTDVITMDPKDNCSKDANDTLLLQLTNTSAYYMYLLLLLKSVVYFAIITCCLLRRTAFCCNGEKSRAKRSGSGATNFSLLKQAGDVEENPGPTSMALPVTALLLPLALLLHAARPDIQMTQSPSSLSASVGDRVTITCRASQDVRNIVVWFQQKPGKAPKLLIYSGSYRYSGVPSRFSGSGSGTDFTLTISSLQPEDFATYYCQQHYSPPYTFGQGTKVEIKRGGGGSGGGGSGGGGSEVQLVESGPGLVKPSETLSLTCTVSGFSLTRFGVHWVRQPPGKGLEWLGVIWRGGSTDYNAAFMSRLTISKDNSKNQVSLKLSSVTAADTAVYYCSNHYYGSSDYALDNWGQGTLVTVSSTRSQPHTKPSVFVMKNGTNVACLVKEFYPKDIRINLVSSKKITEFDPAIVISPSGKYNAVKLGKYEDSNSVTCSVQHDNKTVHSTDFEVKTDSTDHVKPKETENTKQPSKSCHKPKAIVHTEKVNMMSLTVLGLRMLFAKTVAVNFLLTAKLFFL

SEQ ID NO: 45151 - protein, 798 aa, synthetic construct
MALPVTALLLPLALLLHAARPDIQMTQSPSSLSASVGDRVTITCRASQDVRNIVVWFQQKPGKAPKLLIYSGSYRYSGVPSRFSGSGSGTDFTLTISSLQPEDFATYYCQQHYSPPYTFGQGTKVEIKRGQPKANPTVTLFPPSSEELQANKATLVCLISDFYPGAVTVAWKADGSPVKAGVETTKPSKQSNNKYAASSYLSLTPEQWKSHRSYSCQVTHEGSTVEKTVAPTECSGSQSFGLLDPKLCYLLDGILFIYGVILTALFLRVKFSRSADAPAYQQGQNQLYNELNLGRREEYDVLDKRRGRDPEMGGKPQRRKNPQEGLYNELQKDKMAEAYSEIGMKGERRRGKGHDGLYQGLSTATKDTYDALHMQALPPRRAKRSGSGATNFSLLKQAGDVEENPGPTSMDWIWRILFLVGAATGAHSFEEVQLVESGPGLVKPSETLSLTCTVSGFSLTRFGVHWVRQPPGKGLEWLGVIWRGGSTDYNAAFMSRLTISKDNSKNQVSLKLSSVTAADTAVYYCSNHYYGSSDYALDNWGQGTLVTVSSASTKGPSVFPLAPSSKSTSGGTAALGCLVKDYFPEPVTVSWNSGALTSGVHTFPAVLQSSGLYSLSSVVTVPSSSLGTQTYICNVNHKPSNTKVDKRVEPKSCGTQSFGLLDPKLCYLLDGILFIYGVILTALFLRVKFSRSADAPAYQQGQNQLYNELNLGRREEYDVLDKRRGRDPEMGGKPQRRKNPQEGLYNELQKDKMAEAYSEIGMKGERRRGKGHDGLYQGLSTATKDTYDALHMQALPPR

SEQ ID NO: 45152 - protein, 817 aa, synthetic construct
MALPVTALLLPLALLLHAARPDIQMTQSPSSLSASVGDRVTITCRASQDVRNIVVWFQQKPGKAPKLLIYSGSYRYSGVPSRFSGSGSGTDFTLTISSLQPEDFATYYCQQHYSPPYTFGQGTKVEIKRLEDLKNVFPPEVAVFEPSEAEISHTQKATLVCLATGFYPDHVELSWWVNGKEVHSGVSTDPQPLKEQPALNDSRYCLSSRLRVSATFWQNPRNHFRCQVQFYGLSENDEWTQDRAKPVTQIVSAEAWGRADCGSQSFGLLDPKLCYLLDGILFIYGVILTALFLRVKFSRSADAPAYQQGQNQLYNELNLGRREEYDVLDKRRGRDPEMGGKPQRRKNPQEGLYNELQKDKMAEAYSEIGMKGERRRGKGHDGLYQGLSTATKDTYDALHMQALPPRRAKRSGSGATNFSLLKQAGDVEENPGPTSMDWIWRILFLVGAATGAHSFEEVQLVESGPGLVKPSETLSLTCTVSGFSLTRFGVHWVRQPPGKGLEWLGVIWRGGSTDYNAAFMSRLTISKDNSKNQVSLKLSSVTAADTAVYYCSNHYYGSSDYALDNWGQGTLVTVSSTRIQNPDPAVYQLRDSKSSDKSVCLFTDFDSQTNVSQSKDSDVYITDKTVLDMRSMDFKSNSAVAWSNKSDFACANAFNNSIIPEDTFFPSPESSCGTQSFGLLDPKLCYLLDGILFIYGVILTALFLRVKFSRSADAPAYQQGQNQLYNELNLGRREEYDVLDKRRGRDPEMGGKPQRRKNPQEGLYNELQKDKMAEAYSEIGMKGERRRGKGHDGLYQGLSTATKDTYDALHMQALPPR

SEQ ID NO: 45153 - protein, 859 aa, synthetic construct
MALPVTALLLPLALLLHAARPDIQMTQSPSSLSASVGDRVTITCRASQDVRNIVVWFQQKPGKAPKLLIYSGSYRYSGVPSRFSGSGSGTDFTLTISSLQPEDFATYYCQQHYSPPYTFGQGTKVEIKRLEEDLKNVFPPEVAVFEPSEAEISHTQKATLVCLATGFYPDHVELSWWVNGKEVHSGVSTDPQPLKEQPALNDSRYCLSSRLRVSATFWQNPRNHFRCQVQFYGLSENDEWTQDRAKPVTQIVSAEAWGRADCGSQSFGLLDPKLCYLLDGILFIYGVILTALFLRVKFSRSADAPAYQQGQNQLYNELNLGRREEYDVLDKRRGRDPEMGGKPQRRKNPQEGLYNELQKDKMAEAYSEIGMKGERRRGKGHDGLYQGLSTATKDTYDALHMQALPPRRAKRSGSGATNFSLLKQAGDVEENPGPTSMDWIWRILFLVGAATGAHSFEEVQLVESGPGLVKPSETLSLTCTVSGFSLTRFGVHWVRQPPGKGLEWLGVIWRGGSTDYNAAFMSRLTISKDNSKNQVSLKLSSVTAADTAVYYCSNHYYGSSDYALDNWGQGTLVTVSSTRIQNPDPAVYQLRDSKSSDKSVCLFTDFDSQTNVSQSKDSDVYITDKTVLDMRSMDFKSNSAVAWSNKSDFACANAFNNSIIPEDTFFPSPESSCGTQSFGLLDPKLCYLLDGILFIYGVILTALFLRSKRSRLLHSDYMNMTPRRPGPTRKHYQPYAPPRDFAAYRSRVKFSRSADAPAYQQGQNQLYNELNLGRREEYDVLDKRRGRDPEMGGKPQRRKNPQEGLYNELQKDKMAEAYSEIGMKGERRRGKGHDGLYQGLSTATKDTYDALHMQALPPR

SEQ ID NO: 45154 - protein, 902 aa, synthetic construct
MALPVTALLLPLALLLHAARPDIQMTQSPSSLSASVGDRVTITCRASQDVRNIVVWFQQKPGKAPKLLIYSGSYRYSGVPSRFSGSGSGTDFTLTISSLQPEDFATYYCQQHYSPPYTFGQGTKVEIKRLEEDLKNVFPPEVAVFEPSEAEISHTQKATLVCLATGFYPDHVELSWWVNGKEVHSGVSTDPQPLKEQPALNDSRYCLSSRLRVSATFWQNPRNHFRCQVQFYGLSENDEWTQDRAKPVTQIVSAEAWGRADCGSQSFGLLDPKLCYLLDGILFIYGVILTALFLKRGRKKLLYIFKQPFMRPVQTTQEEDGCSCRFPEEEEGGCELRVKFSRSADAPAYQQGQNQLYNELNLGRREEYDVLDKRRGRDPEMGGKPQRRKNPQEGLYNELQKDKMAEAYSEIGMKGERRRGKGHDGLYQGLSTATKDTYDALHMQALPPRRAKRSGSGATNFSLLKQAGDVEENPGPTSMDWIWRILFLVGAATGAHSFEEVQLVESGPGLVKPSETLSLTCTVSGFSLTRFGVHWVRQPPGKGLEWLGVIWRGGSTDYNAAFMSRLTISKDNSKNQVSLKLSSVTAADTAVYYCSNHYYGSSDYALDNWGQGTLVTVSSTRIQNPDPAVYQLRDSKSSDKSVCLFTDFDSQTNVSQSKDSDVYITDKTVLDMRSMDFKSNSAVAWSNKSDFACANAFNNSIIPEDTFFPSPESSCGTQSFGLLDPKLCYLLDGILFIYGVILTALFLKRGRKKLLYIFKQPFMRPVQTTQEEDGCSCRFPEEEEGGCELRVKFSRSADAPAYQQGQNQLYNELNLGRREEYDVLDKRRGRDPEMGGKPQRRKNPQEGLYNELQKDKMAEAYSEIGMKGERRRGKGHDGLYQGLSTATKDTYDALHMQALPPR

SEQ ID NO: 45155 - protein, 589 aa, synthetic construct
MALPVTALLLPLALLLHAARPDIQMTQSPSSLSASVGDRVTITCRASQDVRNIVVWFQQKPGKAPKLLIYSGSYRYSGVPSRFSGSGSGTDFTLTISSLQPEDFATYYCQQHYSPPYTFGQGTKVEIKRLEQSFGLLDPKLCYLLDGILFIYGVILTALFLRVKFSRSADAPAYQQGQNQLYNELNLGRREEYDVLDKRRGRDPEMGGKPQRRKNPQEGLYNELQKDKMAEAYSEIGMKGERRRGKGHDGLYQGLSTATKDTYDALHMQALPPRRAKRSGSGATNFSLLKQAGDVEENPGPTSMDWIWRILFLVGAATGAHSFEEVQLVESGPGLVKPSETLSLTCTVSGFSLTRFGVHWVRQPPGKGLEWLGVIWRGGSTDYNAAFMSRLTISKDNSKNQVSLKLSSVTAADTAVYYCSNHYYGSSDYALDNWGQGTLVTVSSTRQSFGLLDPKLCYLLDGILFIYGVILTALFLRVKFSRSADAPAYQQGQNQLYNELNLGRREEYDVLDKRRGRDPEMGGKPQRRKNPQEGLYNELQKDKMAEAYSEIGMKGERRRGKGHDGLYQGLSTATKDTYDALHMQALPPR

SEQ ID NO: 45156 - protein, 647 aa, synthetic construct
MALPVTALLLPLALLLHAARPDIQMTQSPSSLSASVGDRVTITCRASQDVRNIVVWFQQKPGKAPKLLIYSGSYRYSGVPSRFSGSGSGTDFTLTISSLQPEDFATYYCQQHYSPPYTFGQGTKVEIKRLEGQPKANPTVTLFPPSSEELQANKATLVCLISDFYPGAVTVAWKADGSPVKAGVETTKPSKQSNNKYAASSYLSLTPEQWKSHRSYSCQVTHEGSTVEKTVAPTECSPIKTDVITMDPKDNCSKDANDTLLLQLTNTSAYYMYLLLLLKSVVYFAIITCCLLRRTAFCCNGEKSRAKRSGSGATNFSLLKQAGDVEENPGPTSMDWIWRILFLVGAATGAHSFEEVQLVESGPGLVKPSETLSLTCTVSGFSLTRFGVHWVRQPPGKGLEWLGVIWRGGSTDYNAAFMSRLTISKDNSKNQVSLKLSSVTAADTAVYYCSNHYYGSSDYALDNWGQGTLVTVSSTRASTKGPSVFPLAPSSKSTSGGTAALGCLVKDYFPEPVTVSWNSGALTSGVHTFPAVLQSSGLYSLSSVVTVPSSSLGTQTYICNVNHKPSNTKVDKRVEPKSCEVKTDSTDHVKPKETENTKQPSKSCHKPKAIVHTEKVNMMSLTVLGLRMLFAKTVAVNFLLTAKLFFL

SEQ ID NO: 45157 - protein, 625 aa, synthetic construct
MALPVTALLLPLALLLHAARPDIQMTQSPSSLSASVGDRVTITCRASQDVRNIVVWFQQKPGKAPKLLIYSGSYRYSGVPSRFSGSGSGTDFTLTISSLQPEDFATYYCQQHYSPPYTFGQGTKVEIKRLEGQPKANPTVTLFPPSSEELQANKATLVCLISDFYPGAVTVAWKADGSPVKAGVETTKPSKQSNNKYAASSYLSLTPEQWKSHRSYSCQVTHEGSTVEKTVAPTECSGRADCGITSASYHQGVLSATILYEILLGKATLYAVLVSALVLMAMVKRKDSRGRAKRSGSGATNFSLLKQAGDVEENPGPTSMDWIWRILFLVGAATGAHSFEEVQLVESGPGLVKPSETLSLTCTVSGFSLTRFGVHWVRQPPGKGLEWLGVIWRGGSTDYNAAFMSRLTISKDNSKNQVSLKLSSVTAADTAVYYCSNHYYGSSDYALDNWGQGTLVTVSSTRASTKGPSVFPLAPSSKSTSGGTAALGCLVKDYFPEPVTVSWNSGALTSGVHTFPAVLQSSGLYSLSSVVTVPSSSLGTQTYICNVNHKPSNTKVDKRVEPKSCIPEDTFFPSSDVPCDVKLVEKSFETDTNLNFQNLSVIGFRILLLKVAGFNLLMTLRLWSS

SEQ ID NO: 45158 - protein, 625 aa, synthetic construct
MALPVTALLLPLALLLHAARPDIQMTQSPSSLSASVGDRVTITCRASQDVRNIVVWFQQKPGKAPKLLIYSGSYRYSGVPSRFSGSGSGTDFTLTISSLQPEDFATYYCQQHYSPPYTFGQGTKVEIKRLEGQPKANPTVTLFPPSSEELQANKATLVCLISDFYPGAVTVAWKADGSPVKAGVETTKPSKQSNNKYAASSYLSLTPEQWKSHRSYSCQVTHEGSTVEKTVAPTECSGRADCGFTSESYQQGVLSATILYEILLGKATLYAVLVSALVLMAMVKRKDSRGRAKRSGSGATNFSLLKQAGDVEENPGPTSMDWIWRILFLVGAATGAHSFEEVQLVESGPGLVKPSETLSLTCTVSGFSLTRFGVHWVRQPPGKGLEWLGVIWRGGSTDYNAAFMSRLTISKDNSKNQVSLKLSSVTAADTAVYYCSNHYYGSSDYALDNWGQGTLVTVSSTRASTKGPSVFPLAPSSKSTSGGTAALGCLVKDYFPEPVTVSWNSGALTSGVHTFPAVLQSSGLYSLSSVVTVPSSSLGTQTYICNVNHKPSNTKVDKRVEPKSCIPEDTFFPSPESSCDVKLVEKSFETDTNLNFQNLSVIGFRILLLKVAGFNLLMTLRLWSS

SEQ ID NO: 45159 - protein, 451 aa, synthetic construct
MALPVTALLLPLALLLHAARPDIQMTQSPSSLSASVGDRVTITCRASQDVRNIVVWFQQKPGKAPKLLIYSGSYRYSGVPSRFSGSGSGTDFTLTISSLQPEDFATYYCQQHYSPPYTFGQGTKVEIKRGGGGSGGGGSGGGGSEVQLVESGPGLVKPSETLSLTCTVSGFSLTRFGVHWVRQPPGKGLEWLGVIWRGGSTDYNAAFMSRLTISKDNSKNQVSLKLSSVTAADTAVYYCSNHYYGSSDYALDNWGQGTLVTVSSTRDGNEEMGGITQTPYKVSISGTTVILTCPQYPGSEILWQHNDKNIGGDEDDKNIGSDEDHLSLKEFSELEQSGYYVCYPRGSKPEDANFYLYLRARVCENCMEMDVMSVATIVIVDICITGGLLLLVYYWSKNRKAKAKPVTRGAGAGGRQRGQNKERPPPVPNPDYEPIRKGQRDLYSGLNQRRI

SEQ ID NO: 45160 - protein, 416 aa, synthetic construct
MALPVTALLLPLALLLHAARPDIQMTQSPSSLSASVGDRVTITCRASQDVRNIVVWFQQKPGKAPKLLIYSGSYRYSGVPSRFSGSGSGTDFTLTISSLQPEDFATYYCQQHYSPPYTFGQGTKVEIKRGGGGSGGGGSGGGGSEVQLVESGPGLVKPSETLSLTCTVSGFSLTRFGVHWVRQPPGKGLEWLGVIWRGGSTDYNAAFMSRLTISKDNSKNQVSLKLSSVTAADTAVYYCSNHYYGSSDYALDNWGQGTLVTVSSTRFKIPIEELEDRVFVNCNTSITWVEGTVGTLLSDITRLDLGKRILDPRGIYRCNGTDIYKDKESTVQVHYRMCQSCVELDPATVAGIIVTDVIATLLLALGVFCFAGHETGRLSGAADTQALLRNDQVYQPLRDRDDAQYSHLGGNWARNK

SEQ ID NO: 45161 - protein, 426 aa, synthetic construct
MALPVTALLLPLALLLHAARPDIQMTQSPSSLSASVGDRVTITCRASQDVRNIVVWFQQKPGKAPKLLIYSGSYRYSGVPSRFSGSGSGTDFTLTISSLQPEDFATYYCQQHYSPPYTFGQGTKVEIKRGGGGSGGGGSGGGGSEVQLVESGPGLVKPSETLSLTCTVSGFSLTRFGVHWVRQPPGKGLEWLGVIWRGGSTDYNAAFMSRLTISKDNSKNQVSLKLSSVTAADTAVYYCSNHYYGSSDYALDNWGQGTLVTVSSTRQSIKGNHLVKVYDYQEDGSVLLTCDAEAKNITWFKDGKMIGFLTEDKKKWNLGSNAKDPRGMYQCKGSQNKSKPLQVYYRMCQNCIELNAATISGFLFAEIVSIFVLAVGVYFIAGQDGVRQSRASDKQTLLPNDQLYQPLKDREDDQYSHLQGNQLRRN

SEQ ID NO: 45162 - protein, 409 aa, synthetic construct
MALPVTALLLPLALLLHAARPDIQMTQSPSSLSASVGDRVTITCRASQDVRNIVVWFQQKPGKAPKLLIYSGSYRYSGVPSRFSGSGSGTDFTLTISSLQPEDFATYYCQQHYSPPYTFGQGTKVEIKRGGGGSGGGGSGGGGSEVQLVESGPGLVKPSETLSLTCTVSGFSLTRFGVHWVRQPPGKGLEWLGVIWRGGSTDYNAAFMSRLTISKDNSKNQVSLKLSSVTAADTAVYYCSNHYYGSSDYALDNWGQGTLVTVSSTRQSFGLLDPKLCYLLDGILFIYGVILTALFLRVKFSRSADAPAYQQGQNQLYNELNLGRREEYDVLDKRRGRDPEMGGKPQRRKNPQEGLYNELQKDKMAEAYSEIGMKGERRRGKGHDGLYQGLSTATKDTYDALHMQALPPR

SEQ ID NO: 45163 - protein, 504 aa, synthetic construct
MALPVTALLLPLALLLHAARPDIQMTQSPSSLSASVGDRVTITCRASQDVRNIVVWFQQKPGKAPKLLIYSGSYRYSGVPSRFSGSGSGTDFTLTISSLQPEDFATYYCQQHYSPPYTFGQGTKVEIKRGGGGSGGGGSGGGGSEVQLVESGPGLVKPSETLSLTCTVSGFSLTRFGVHWVRQPPGKGLEWLGVIWRGGSTDYNAAFMSRLTISKDNSKNQVSLKLSSVTAADTAVYYCSNHYYGSSDYALDNWGQGTLVTVSSTRGMRTEDLPKAVVFLEPQWYRVLEKDSVTLKCQGAYSPEDNSTQWFHNESLISSQASSYFIDAATVDDSGEYRCQTNLSTLSDPVQLEVHIGWLLLQAPRWVFKEEDPIHLRCHSWKNTALHKVTYLQNGKGRKYFHHNSDFYIPKATLKDSGSYFCRGLVGSKNVSSETVNITITQGLAVPTISSFFPPGYQVSFCLVMVLLFAVDTGLYFSVKTNIRSSTRDWKDHKFKWRKDPQDK

SEQ ID NO: 45164 - protein, 479 aa, synthetic construct
MALPVTALLLPLALLLHAARPDIQMTQSPSSLSASVGDRVTITCRASQDVRNIVVWFQQKPGKAPKLLIYSGSYRYSGVPSRFSGSGSGTDFTLTISSLQPEDFATYYCQQHYSPPYTFGQGTKVEIKRGGGGSGGGGSGGGGSEVQLVESGPGLVKPSETLSLTCTVSGFSLTRFGVHWVRQPPGKGLEWLGVIWRGGSTDYNAAFMSRLTISKDNSKNQVSLKLSSVTAADTAVYYCSNHYYGSSDYALDNWGQGTLVTVSSTRGMRTEDLPKAVVFLEPQWYRVLEKDSVTLKCQGAYSPEDNSTQWFHNESLISSQASSYFIDAATVDDSGEYRCQTNLSTLSDPVQLEVHIGWLLLQAPRWVFKEEDPIHLRCHSWKNTALHKVTYLQNGKGRKYFHHNSDFYIPKATLKDSGSYFCRGLVGSKNVSSETVNITITQGLAVPTISSFFPPGYQVSFCLVMVLLFAVDTGLYFSV

SEQ ID NO: 45165 - protein, 480 aa, synthetic construct
MALPVTALLLPLALLLHAARPDIQMTQSPSSLSASVGDRVTITCRASQDVRNIVVWFQQKPGKAPKLLIYSGSYRYSGVPSRFSGSGSGTDFTLTISSLQPEDFATYYCQQHYSPPYTFGQGTKVEIKRGGGGSGGGGSGGGGSEVQLVESGPGLVKPSETLSLTCTVSGFSLTRFGVHWVRQPPGKGLEWLGVIWRGGSTDYNAAFMSRLTISKDNSKNQVSLKLSSVTAADTAVYYCSNHYYGSSDYALDNWGQGTLVTVSSTRGMRTEDLPKAVVFLEPQWYRVLEKDSVTLKCQGAYSPEDNSTQWFHNESLISSQASSYFIDAATVDDSGEYRCQTNLSTLSDPVQLEVHIGWLLLQAPRWVFKEEDPIHLRCHSWKNTALHKVTYLQNGKGRKYFHHNSDFYIPKATLKDSGSYFCRGLVGSKNVSSETVNITITQGLAVPTISSFFPPGYQVSFCLVMVLLFAVDTGLYFSVK

SEQ ID NO: 45166 - protein, 724 aa, synthetic construct
MALPVTALLLPLALLLHAARPDIQMTQSPSSLSASVGDRVTITCRASQDVRNIVVWFQQKPGKAPKLLIYSGSYRYSGVPSRFSGSGSGTDFTLTISSLQPEDFATYYCQQHYSPPYTFGQGTKVEIKRLEGQPKANPTVTLFPPSSEELQANKATLVCLISDFYPGAVTVAWKADGSPVKAGVETTKPSKQSNNKYAASSYLSLTPEQWKSHRSYSCQVTHEGSTVEKTVAPTECSGSQSFGLLDPKLCYLLDGILFIYGVILTALFLRVKFSRSADAPAYQQGQNQLYNELNLGRREEYDVLDKRRGRDPEMGGKPQRRKNPQEGLYNELQKDKMAEAYSEIGMKGERRRGKGHDGLYQGLSTATKDTYDALHMQALPPRRAKRSGSGATNFSLLKQAGDVEENPGPTSMDWIWRILFLVGAATGAHSFEEVQLVESGPGLVKPSETLSLTCTVSGFSLTRFGVHWVRQPPGKGLEWLGVIWRGGSTDYNAAFMSRLTISKDNSKNQVSLKLSSVTAADTAVYYCSNHYYGSSDYALDNWGQGTLVTVSSTRASTKGPSVFPLAPSSKSTSGGTAALGCLVKDYFPEPVTVSWNSGALTSGVHTFPAVLQSSGLYSLSSVVTVPSSSLGTQTYICNVNHKPSNTKVDKRVEPKSCGTITQGLAVSTISSFFPPGYQVSFCLVMVLLFAVDTGLYFSVKTNIRSSTRDWKDHKFKWRKDPQDK

SEQ ID NO: 45167 - protein, 739 aa, synthetic construct
MALPVTALLLPLALLLHAARPDIQMTQSPSSLSASVGDRVTITCRASQDVRNIVVWFQQKPGKAPKLLIYSGSYRYSGVPSRFSGSGSGTDFTLTISSLQPEDFATYYCQQHYSPPYTFGQGTKVEIKRLEDLKNVFPPEVAVFEPSEAEISHTQKATLVCLATGFYPDHVELSWWVNGKEVHSGVSTDPQPLKEQPALNDSRYCLSSRLRVSATFWQNPRNHFRCQVQFYGLSENDEWTQDRAKPVTQIVSAEAWGRADCGSQSFGLLDPKLCYLLDGILFIYGVILTALFLRVKFSRSADAPAYQQGQNQLYNELNLGRREEYDVLDKRRGRDPEMGGKPQRRKNPQEGLYNELQKDKMAEAYSEIGMKGERRRGKGHDGLYQGLSTATKDTYDALHMQALPPRRAKRSGSGATNFSLLKQAGDVEENPGPTSMDWIWRILFLVGAATGAHSFEEVQLVESGPGLVKPSETLSLTCTVSGFSLTRFGVHWVRQPPGKGLEWLGVIWRGGSTDYNAAFMSRLTISKDNSKNQVSLKLSSVTAADTAVYYCSNHYYGSSDYALDNWGQGTLVTVSSTRIQNPDPAVYQLRDSKSSDKSVCLFTDFDSQTNVSQSKDSDVYITDKTVLDMRSMDFKSNSAVAWSNKSDFACANAFNNSIIPEDTFFPSPESSCGTITQGLAVSTISSFFPPGYQVSFCLVMVLLFAVDTGLYFSVKTNIRSSTRDWKDHKFKWRKDPQDK

SEQ ID NO: 45168 - protein, 714 aa, synthetic construct
MALPVTALLLPLALLLHAARPDIQMTQSPSSLSASVGDRVTITCRASQDVRNIVVWFQQKPGKAPKLLIYSGSYRYSGVPSRFSGSGSGTDFTLTISSLQPEDFATYYCQQHYSPPYTFGQGTKVEIKRLEDLKNVFPPEVAVFEPSEAEISHTQKATLVCLATGFYPDHVELSWWVNGKEVHSGVSTDPQPLKEQPALNDSRYCLSSRLRVSATFWQNPRNHFRCQVQFYGLSENDEWTQDRAKPVTQIVSAEAWGRADCGSQSFGLLDPKLCYLLDGILFIYGVILTALFLRVKFSRSADAPAYQQGQNQLYNELNLGRREEYDVLDKRRGRDPEMGGKPQRRKNPQEGLYNELQKDKMAEAYSEIGMKGERRRGKGHDGLYQGLSTATKDTYDALHMQALPPRRAKRSGSGATNFSLLKQAGDVEENPGPTSMDWIWRILFLVGAATGAHSFEEVQLVESGPGLVKPSETLSLTCTVSGFSLTRFGVHWVRQPPGKGLEWLGVIWRGGSTDYNAAFMSRLTISKDNSKNQVSLKLSSVTAADTAVYYCSNHYYGSSDYALDNWGQGTLVTVSSTRIQNPDPAVYQLRDSKSSDKSVCLFTDFDSQTNVSQSKDSDVYITDKTVLDMRSMDFKSNSAVAWSNKSDFACANAFNNSIIPEDTFFPSPESSCGTITQGLAVSTISSFFPPGYQVSFCLVMVLLFAVDTGLYFSV

SEQ ID NO: 45169 - protein, 715 aa, synthetic construct
MALPVTALLLPLALLLHAARPDIQMTQSPSSLSASVGDRVTITCRASQDVRNIVVWFQQKPGKAPKLLIYSGSYRYSGVPSRFSGSGSGTDFTLTISSLQPEDFATYYCQQHYSPPYTFGQGTKVEIKRLEDLKNVFPPEVAVFEPSEAEISHTQKATLVCLATGFYPDHVELSWWVNGKEVHSGVSTDPQPLKEQPALNDSRYCLSSRLRVSATFWQNPRNHFRCQVQFYGLSENDEWTQDRAKPVTQIVSAEAWGRADCGSQSFGLLDPKLCYLLDGILFIYGVILTALFLRVKFSRSADAPAYQQGQNQLYNELNLGRREEYDVLDKRRGRDPEMGGKPQRRKNPQEGLYNELQKDKMAEAYSEIGMKGERRRGKGHDGLYQGLSTATKDTYDALHMQALPPRRAKRSGSGATNFSLLKQAGDVEENPGPTSMDWIWRILFLVGAATGAHSFEEVQLVESGPGLVKPSETLSLTCTVSGFSLTRFGVHWVRQPPGKGLEWLGVIWRGGSTDYNAAFMSRLTISKDNSKNQVSLKLSSVTAADTAVYYCSNHYYGSSDYALDNWGQGTLVTVSSTRIQNPDPAVYQLRDSKSSDKSVCLFTDFDSQTNVSQSKDSDVYITDKTVLDMRSMDFKSNSAVAWSNKSDFACANAFNNSIIPEDTFFPSPESSCGTITQGLAVSTISSFFPPGYQVSFCLVMVLLFAVDTGLYFSVK

SEQ ID NO: 45170 - protein, 716 aa, synthetic construct
MALPVTALLLPLALLLHAARPDIQMTQSPSSLSASVGDRVTITCRASQDVRNIVVWFQQKPGKAPKLLIYSGSYRYSGVPSRFSGSGSGTDFTLTISSLQPEDFATYYCQQHYSPPYTFGQGTKVEIKRLEDLKNVFPPEVAVFEPSEAEISHTQKATLVCLATGFYPDHVELSWWVNGKEVHSGVSTDPQPLKEQPALNDSRYCLSSRLRVSATFWQNPRNHFRCQVQFYGLSENDEWTQDRAKPVTQIVSAEAWGRADCGSQSFGLLDPKLCYLLDGILFIYGVILTALFLRVKFSRSADAPAYQQGQNQLYNELNLGRREEYDVLDKRRGRDPEMGGKPQRRKNPQEGLYNELQKDKMAEAYSEIGMKGERRRGKGHDGLYQGLSTATKDTYDALHMQALPPRRAKRSGSGATNFSLLKQAGDVEENPGPTSMDWIWRILFLVGAATGAHSFEEVQLVESGPGLVKPSETLSLTCTVSGFSLTRFGVHWVRQPPGKGLEWLGVIWRGGSTDYNAAFMSRLTISKDNSKNQVSLKLSSVTAADTAVYYCSNHYYGSSDYALDNWGQGTLVTVSSTRIQNPDPAVYQLRDSKSSDKSVCLFTDFDSQTNVSQSKDSDVYITDKTVLDMRSMDFKSNSAVAWSNKSDFACANAFNNSIIPEDTFFPSPESSCGTITQGLAVSTISSFFPPGYQVSFCLVMVLLFAVDTGLYFSVKT

SEQ ID NO: 45171 - protein, 652 aa, synthetic construct
MALPVTALLLPLALLLHAARPDIQMTQSPSSLSASVGDRVTITCRASQDVRNIVVWFQQKPGKAPKLLIYSGSYRYSGVPSRFSGSGSGTDFTLTISSLQPEDFATYYCQQHYSPPYTFGQGTKVEIKRLEGQPKANPTVTLFPPSSEELQANKATLVCLISDFYPGAVTVAWKADGSPVKAGVETTKPSKQSNNKYAASSYLSLTPEQWKSHRSYSCQVTHEGSTVEKTVAPTECSGSLGEPQLCYILDAILFLYGIVLTLLYCRLKIQVRKAAITSYEKSDGVYTGLSTRNQETYETLKHEKPPQRAKRSGSGATNFSLLKQAGDVEENPGPTSMDWIWRILFLVGAATGAHSFEEVQLVESGPGLVKPSETLSLTCTVSGFSLTRFGVHWVRQPPGKGLEWLGVIWRGGSTDYNAAFMSRLTISKDNSKNQVSLKLSSVTAADTAVYYCSNHYYGSSDYALDNWGQGTLVTVSSTRASTKGPSVFPLAPSSKSTSGGTAALGCLVKDYFPEPVTVSWNSGALTSGVHTFPAVLQSSGLYSLSSVVTVPSSSLGTQTYICNVNHKPSNTKVDKRVEPKSCGTLGEPQLCYILDAILFLYGIVLTLLYCRLKIQVRKAAITSYEKSDGVYTGLSTRNQETYETLKHEKPPQ

SEQ ID NO: 45172 - protein, 622 aa, synthetic construct
MALPVTALLLPLALLLHAARPDIQMTQSPSSLSASVGDRVTITCRASQDVRNIVVWFQQKPGKAPKLLIYSGSYRYSGVPSRFSGSGSGTDFTLTISSLQPEDFATYYCQQHYSPPYTFGQGTKVEIKRLEDLKNVFPPEVAVFEPSEAEISHTQKATLVCLATGFYPDHVELSWWVNGKEVHSGVCTDPQPLKEQPALNDSRYCLSSRLRVSATFWQNPRNHFRCQVQFYGLSENDEWTQDRAKPVTQIVSAEAWGRADCGFTSESYQQGVLSAYYMYLLLLLKSVVYFAIITCCLLRRTAFCCNGEKSRAKRSGSGATNFSLLKQAGDVEENPGPTSMDWIWRILFLVGAATGAHSFEEVQLVESGPGLVKPSETLSLTCTVSGFSLTRFGVHWVRQPPGKGLEWLGVIWRGGSTDYNAAFMSRLTISKDNSKNQVSLKLSSVTAADTAVYYCSNHYYGSSDYALDNWGQGTLVTVSSTRIQNPDPAVYQLRDSKSSDKSVCLFTDFDSQTNVSQSKDSDVYITDKCVLDMRSMDFKSNSAVAWSNKSDFACANAFNNSIIPEDTFFPSPESSCDVKLVEKSFETDTNLNFQNLSVIGFRILLLKVAGFNLLMTLRLWSS

SEQ ID NO: 45173 - protein, 628 aa, synthetic construct
MALPVTALLLPLALLLHAARPDIQMTQSPSSLSASVGDRVTITCRASQDVRNIVVWFQQKPGKAPKLLIYSGSYRYSGVPSRFSGSGSGTDFTLTISSLQPEDFATYYCQQHYSPPYTFGQGTKVEIKRLEDKQLDADVSPKPTIFLPSIAETKLQKAGTYLCLLEKFFPDVIKIHWQEKKSNTILGSQEGNTMKTNDTYMKFSWLTVPEKSLDKEHRCIVRHENNKNGVDQEIIFPPIKTDVITMDPKDNCSKDANDTLLLQLTNTSAYYMYEILLGKATLYAVLVSALVLMAMVKRKDSRGRAKRSGSGATNFSLLKQAGDVEENPGPTSMDWIWRILFLVGAATGAHSFEEVQLVESGPGLVKPSETLSLTCTVSGFSLTRFGVHWVRQPPGKGLEWLGVIWRGGSTDYNAAFMSRLTISKDNSKNQVSLKLSSVTAADTAVYYCSNHYYGSSDYALDNWGQGTLVTVSSTRSQPHTKPSVFVMKNGTNVACLVKEFYPKDIRINLVSSKKITEFDPAIVISPSGKYNAVKLGKYEDSNSVTCSVQHDNKTVHSTDFEVKTDSTDHVKPKETENTKQPSKSCHKPKAIVHTEKVNMMSLTVIGFRILLLKVAGFNLLMTLRLWSS

SEQ ID NO: 45174 - protein, 628 aa, synthetic construct
MALPVTALLLPLALLLHAARPDIQMTQSPSSLSASVGDRVTITCRASQDVRNIVVWFQQKPGKAPKLLIYSGSYRYSGVPSRFSGSGSGTDFTLTISSLQPEDFATYYCQQHYSPPYTFGQGTKVEIKRLEDKQLDADVSPKPTIFLPSIAETKLQKAGTYLCLLEKFFPDVIKIHWQEKKSNTILGSQEGNTMKTNDTYMKFSWLTVPEKSLDKEHRCIVRHENNKNGVDQEIIFPPIKTDVITMDPKDNCSKDANDTLLLQLTNTSATILYEILLGKATLYAVLVSALVLMAMVKRKDSRGRAKRSGSGATNFSLLKQAGDVEENPGPTSMDWIWRILFLVGAATGAHSFEEVQLVESGPGLVKPSETLSLTCTVSGFSLTRFGVHWVRQPPGKGLEWLGVIWRGGSTDYNAAFMSRLTISKDNSKNQVSLKLSSVTAADTAVYYCSNHYYGSSDYALDNWGQGTLVTVSSTRSQPHTKPSVFVMKNGTNVACLVKEFYPKDIRINLVSSKKITEFDPAIVISPSGKYNAVKLGKYEDSNSVTCSVQHDNKTVHSTDFEVKTDSTDHVKPKETENTKQPSKSCHKPKAIVHTEKVNMMSLTVIGFRILLLKVAGFNLLMTLRLWSS

SEQ ID NO: 45175 - protein, 628 aa, synthetic construct
MALPVTALLLPLALLLHAARPDIQMTQSPSSLSASVGDRVTITCRASQDVRNIVVWFQQKPGKAPKLLIYSGSYRYSGVPSRFSGSGSGTDFTLTISSLQPEDFATYYCQQHYSPPYTFGQGTKVEIKRLEDKQLDADVSPKPTIFLPSIAETKLQKAGTYLCLLEKFFPDVIKIHWQEKKSNTILGSQEGNTMKTNDTYMKFSWLTVPEKSLDKEHRCIVRHENNKNGVDQEIIFPPIKTDVITMDPKDNCSKDANDTLLLQLTNTSAYYMYEILLGKATLYAVLVSALVLMAMVKRKDSRGRAKRSGSGATNFSLLKQAGDVEENPGPTSMDWIWRILFLVGAATGAHSFEEVQLVESGPGLVKPSETLSLTCTVSGFSLTRFGVHWVRQPPGKGLEWLGVIWRGGSTDYNAAFMSRLTISKDNSKNQVSLKLSSVTAADTAVYYCSNHYYGSSDYALDNWGQGTLVTVSSTRSQPHTKPSVFVMKNGTNVACLVKEFYPKDIRINLVSSKKITEFDPAIVISPSGKYNAVKLGKYEDSNSVTCSVQHDNKTVHSTDFEVKTDSTDHVKPKETENTKQPSKSCHKPKAIVHTEKVNMMSLTVLGFRILLLKVAGFNLLMTLRLWSS

SEQ ID NO: 45176 - protein, 628 aa, synthetic construct
MALPVTALLLPLALLLHAARPDIQMTQSPSSLSASVGDRVTITCRASQDVRNIVVWFQQKPGKAPKLLIYSGSYRYSGVPSRFSGSGSGTDFTLTISSLQPEDFATYYCQQHYSPPYTFGQGTKVEIKRLEDKQLDADVSPKPTIFLPSIAETKLQKAGTYLCLLEKFFPDVIKIHWQEKKSNTILGSQEGNTMKTNDTYMKFSWLTVPEKSLDKEHRCIVRHENNKNGVDQEIIFPPIKTDVITMDPKDNCSKDANDTLLLQLTNTSATILYEILLGKATLYAVLVSALVLMAMVKRKDSRGRAKRSGSGATNFSLLKQAGDVEENPGPTSMDWIWRILFLVGAATGAHSFEEVQLVESGPGLVKPSETLSLTCTVSGFSLTRFGVHWVRQPPGKGLEWLGVIWRGGSTDYNAAFMSRLTISKDNSKNQVSLKLSSVTAADTAVYYCSNHYYGSSDYALDNWGQGTLVTVSSTRSQPHTKPSVFVMKNGTNVACLVKEFYPKDIRINLVSSKKITEFDPAIVISPSGKYNAVKLGKYEDSNSVTCSVQHDNKTVHSTDFEVKTDSTDHVKPKETENTKQPSKSCHKPKAIVHTEKVNMMSLTVLGFRILLLKVAGFNLLMTLRLWSS

SEQ ID NO: 45177 - protein, 622 aa, synthetic construct
MALPVTALLLPLALLLHAARPDIQMTQSPSSLSASVGDRVTITCRASQDVRNIVVWFQQKPGKAPKLLIYSGSYRYSGVPSRFSGSGSGTDFTLTISSLQPEDFATYYCQQHYSPPYTFGQGTKVEIKRLEDLKNVFPPEVAVFEPSEAEISHTQKATLVCLATGFYPDHVELSWWVNGKEVHSGVCTDPQPLKEQPALNDSRYCLSSRLRVSATFWQNPRNHFRCQVQFYGLSENDEWTQDRAKPVTQIVSAEAWGRADCGFTSESYQQGVLSATILYLLLLLKSVVYFAIITCCLLRRTAFCCNGEKSRAKRSGSGATNFSLLKQAGDVEENPGPTSMDWIWRILFLVGAATGAHSFEEVQLVESGPGLVKPSETLSLTCTVSGFSLTRFGVHWVRQPPGKGLEWLGVIWRGGSTDYNAAFMSRLTISKDNSKNQVSLKLSSVTAADTAVYYCSNHYYGSSDYALDNWGQGTLVTVSSTRIQNPDPAVYQLRDSKSSDKSVCLFTDFDSQTNVSQSKDSDVYITDKCVLDMRSMDFKSNSAVAWSNKSDFACANAFNNSIIPEDTFFPSPESSCDVKLVEKSFETDTNLNFQNLSVIGLRMLFAKTVAVNFLLTAKLFFL

SEQ ID NO: 45178 - protein, 651 aa, synthetic construct
MALPVTALLLPLALLLHAARPDIQMTQSPSSLSASVGDRVTITCRASQDVRNIVVWFQQKPGKAPKLLIYSGSYRYSGVPSRFSGSGSGTDFTLTISSLQPEDFATYYCQQHYSPPYTFGQGTKVEIKRLEDLKNVFPPEVAVFEPSEAEISHTQKATLVCLATGFYPDHVELSWWVNGKEVHSGVSTDPQPLKEQPALNDSRYCLSSRLRVSATFWQNPRNHFRCQVQFYGLSENDEWTQDRAKPVTQIVSAEAWGRADCGSSKDANDTLLLQLTNTSAYYMYLLLLLKSVVYFAIITCCLLRRTAFCCNGEKSRAKRSGSGATNFSLLKQAGDVEENPGPTSMDWIWRILFLVGAATGAHSFEEVQLVESGPGLVKPSETLSLTCTVSGFSLTRFGVHWVRQPPGKGLEWLGVIWRGGSTDYNAAFMSRLTISKDNSKNQVSLKLSSVTAADTAVYYCSNHYYGSSDYALDNWGQGTLVTVSSTRIQNPDPAVYQLRDSKSSDKSVCLFTDFDSQTNVSQSKDSDVYITDKTVLDMRSMDFKSNSAVAWSNKSDFACANAFNNSIIPEDTFFPSPESSCGTEVKTDSTDHVKPKETENTKQPSKSCHKPKAIVHTEKVNMMSLTVLGLRMLFAKTVAVNFLLTAKLFFL

SEQ ID NO: 45179 - protein, 621 aa, synthetic construct
MALPVTALLLPLALLLHAARPDIQMTQSPSSLSASVGDRVTITCRASQDVRNIVVWFQQKPGKAPKLLIYSGSYRYSGVPSRFSGSGSGTDFTLTISSLQPEDFATYYCQQHYSPPYTFGQGTKVEIKRLEDLKNVFPPEVAVFEPSEAEISHTQKATLVCLATGFYPDHVELSWWVNGKEVHSGVCTDPQPLKEQPALNDSRYCLSSRLRVSATFWQNPRNHFRCQVQFYGLSENDEWTQDRAKPVTQIVSAEAWGRADCDVKLVEKSFETDTNLNFQNLSVIGFRILLLKVAGFNLLMTLRLWSSRAKRSGSGATNFSLLKQAGDVEENPGPTSMDWIWRILFLVGAATGAHSFEEVQLVESGPGLVKPSETLSLTCTVSGFSLTRFGVHWVRQPPGKGLEWLGVIWRGGSTDYNAAFMSRLTISKDNSKNQVSLKLSSVTAADTAVYYCSNHYYGSSDYALDNWGQGTLVTVSSTRIQNPDPAVYQLRDSKSSDKSVCLFTDFDSQTNVSQSKDSDVYITDKCVLDMRSMDFKSNSAVAWSNKSDFACANAFNNSIIPEDTFFPSPESSCGFTSESYQQGVLSATILYEILLGKATLYAVLVSALVLMAMVKRKDSRG

SEQ ID NO: 45180 - protein, 621 aa, synthetic construct
MALPVTALLLPLALLLHAARPDIQMTQSPSSLSASVGDRVTITCRASQDVRNIVVWFQQKPGKAPKLLIYSGSYRYSGVPSRFSGSGSGTDFTLTISSLQPEDFATYYCQQHYSPPYTFGQGTKVEIKRLEDLKNVFPPEVAVFEPSEAEISHTQKATLVCLATGFYPDHVELSWWVNGKEVHSGVCTDPQPLKEQPALNDSRYCLSSRLRVSATFWQNPRNHFRCQVQFYGLSENDEWTQDRAKPVTQIVSAEAWGRADCGFTSESYQQGVLSATNLSVIGFRILLLKVAGFNLLMTLRLWSSRAKRSGSGATNFSLLKQAGDVEENPGPTSMDWIWRILFLVGAATGAHSFEEVQLVESGPGLVKPSETLSLTCTVSGFSLTRFGVHWVRQPPGKGLEWLGVIWRGGSTDYNAAFMSRLTISKDNSKNQVSLKLSSVTAADTAVYYCSNHYYGSSDYALDNWGQGTLVTVSSTRIQNPDPAVYQLRDSKSSDKSVCLFTDFDSQTNVSQSKDSDVYITDKCVLDMRSMDFKSNSAVAWSNKSDFACANAFNNSIIPEDTFFPSPESSCDVKLVEKSFETDTNLNFQILYEILLGKATLYAVLVSALVLMAMVKRKDSRG

SEQ ID NO: 45181 - protein, 621 aa, synthetic construct; identical to SEQ ID NO: 45179

SEQ ID NO: 45182 - protein, 621 aa, synthetic construct; identical to SEQ ID NO: 45180

SEQ ID NO: 45183 - protein, 621 aa, synthetic construct; identical to SEQ ID NO: 45179

SEQ ID NO: 45184 - protein, 624 aa, synthetic construct
MALPVTALLLPLALLLHAARPDIQMTQSPSSLSASVGDRVTITCRASQDVRNIVVWFQQKPGKAPKLLIYSGSYRYSGVPSRFSGSGSGTDFTLTISSLQPEDFATYYCQQHYSPPYTFGQGTKVEIKRLEADVSPKPTIFLPSIAETKLQKAGTYLCLLEKFFPDVIKIHWQEKKSNTILGSQEGNTMKTNDTYMKFSWLTVPEKSLDKEHRCIVRHENNKNGVDQEIIFPPIKTDVITMDPKDNCSKDANDTLLLQLTNTSAYYMYLLLLLKSVVYFAIITCCLLRRTAFCCNGEKSRAKRSGSGATNFSLLKQAGDVEENPGPTSMDWIWRILFLVGAATGAHSFEEVQLVESGPGLVKPSETLSLTCTVSGFSLTRFGVHWVRQPPGKGLEWLGVIWRGGSTDYNAAFMSRLTISKDNSKNQVSLKLSSVTAADTAVYYCSNHYYGSSDYALDNWGQGTLVTVSSTRSQPHTKPSVFVMKNGTNVACLVKEFYPKDIRINLVSSKKITEFDPAIVISPSGKYNAVKLGKYEDSNSVTCSVQHDNKTVHSTDFEVKTDSTDHVKPKETENTKQPSKSCHKPKAIVHTEKVNMMSLTVIGFRILLLKVAGFNLLMTLRLWSS

SEQ ID NO: 45185 - protein, 624 aa, synthetic construct
MALPVTALLLPLALLLHAARPDIQMTQSPSSLSASVGDRVTITCRASQDVRNIVVWFQQKPGKAPKLLIYSGSYRYSGVPSRFSGSGSGTDFTLTISSLQPEDFATYYCQQHYSPPYTFGQGTKVEIKRLEADVSPKPTIFLPSIAETKLQKAGTYLCLLEKFFPDVIKIHWQEKKSNTILGSQEGNTMKTNDTYMKFSWLTVPEKSLDKEHRCIVRHENNKNGVDQEIIFPPIKTDVITMDPKDNCSKDANDTLLLQLTNTSAYYMYLLLLLKSVVYFAIITCCLLRRTAFCCNGEKSRAKRSGSGATNFSLLKQAGDVEENPGPTSMDWIWRILFLVGAATGAHSFEEVQLVESGPGLVKPSETLSLTCTVSGFSLTRFGVHWVRQPPGKGLEWLGVIWRGGSTDYNAAFMSRLTISKDNSKNQVSLKLSSVTAADTAVYYCSNHYYGSSDYALDNWGQGTLVTVSSTRSQPHTKPSVFVMKNGTNVACLVKEFYPKDIRINLVSSKKITEFDPAIVISPSGKYNAVKLGKYEDSNSVTCSVQHDNKTVHSTDFEVKTDSTDHVKPKETENTKQPSKSCHKPKAIVHTEKVNMMSLTVLGFRILLLKVAGFNLLMTLRLWSS

SEQ ID NO: 45186 - protein, 621 aa, synthetic construct; identical to SEQ ID NO: 45179

SEQ ID NO: 45187 - protein, 625 aa, synthetic construct
MALPVTALLLPLALLLHAARPDIQMTQSPSSLSASVGDRVTITCRASQDVRNIVVWFQQKPGKAPKLLIYSGSYRYSGVPSRFSGSGSGTDFTLTISSLQPEDFATYYCQQHYSPPYTFGQGTKVEIKRLEIQNPDPAVYQLRDSKSSDKSVCLFTDFDSQTNVSQSKDSDVYITDKCVLDMRSMDFKSNSAVAWSNKSDFACANAFNNSIIPEDTFFPSPESSCGFTSESYQQGVLSATILYEILLGKATLYAVLVSALVLMAMVKRKDSRGRAKRSGSGVKQTLNFDLLKLAGDVESNPGPTSMDWIWRILFLVGAATGAHSFEEVQLVESGPGLVKPSETLSLTCTVSGFSLTRFGVHWVRQPPGKGLEWLGVIWRGGSTDYNAAFMSRLTISKDNSKNQVSLKLSSVTAADTAVYYCSNHYYGSSDYALDNWGQGTLVTVSSTREDLKNVFPPEVAVFEPSEAEISHTQKATLVCLATGFYPDHVELSWWVNGKEVHSGVCTDPQPLKEQPALNDSRYCLSSRLRVSATFWQNPRNHFRCQVQFYGLSENDEWTQDRAKPVTQIVSAEAWGRADCDVKLVEKSFETDTNLNFQNLSVIGFRILLLKVAGFNLLMTLRLWSS

SEQ ID NO: 45188 - protein, 756 aa, synthetic construct
MALPVTALLLPLALLLHAARPEVQLVESGGGLVQPGGSLRLSCAASGFSFSDFWMSWVRQAPGKGLEWVATISQAGSEKDYVDSVKGRFTISRDNAKKSLYLQMNSLRAEDTAVYYCASGVYSFDYRGQGTLVTVSSGTGGGGSGGGGSGGGGSEFDIQMTQSPSSLSASVGDRVTITCRASQDVRNIVVWFQQKPGKAPKLLIYSGSYRYSGVPSRFSGSGSGTDFTLTISSLQPEDFATYYCQQHYSPPYTFGQGTKVEIKRLEDLKNVFPPEVAVFEPSEAEISHTQKATLVCLATGFYPDHVELSWWVNGKEVHSGVCTDPQPLKEQPALNDSRYCLSSRLRVSATFWQNPRNHFRCQVQFYGLSENDEWTQDRAKPVTQIVSAEAWGRADCDVKLVEKSFETDTNLNFQNLSVIGFRILLLKVAGFNLLMTLRLWSSRAKRSGSGATNFSLLKQAGDVEENPGPTSMDWIWRILFLVGAATGAHSFEEVQLVESGPGLVKPSETLSLTCTVSGFSLTRFGVHWVRQPPGKGLEWLGVIWRGGSTDYNAAFMSRLTISKDNSKNQVSLKLSSVTAADTAVYYCSNHYYGSSDYALDNWGQGTLVTVSSTRIQNPDPAVYQLRDSKSSDKSVCLFTDFDSQTNVSQSKDSDVYITDKCVLDMRSMDFKSNSAVAWSNKSDFACANAFNNSIIPEDTFFPSPESSCGFTSESYQQGVLSATILYEILLGKATLYAVLVSALVLMAMVKRKDSRG

SEQ ID NO: 45189 - protein, 760 aa, synthetic construct
MALPVTALLLPLALLLHAARPEVQLVESGGGLVQPGGSLRLSCAASGFSFSDFWMSWVRQAPGKGLEWVATISQAGSEKDYVDSVKGRFTISRDNAKKSLYLQMNSLRAEDTAVYYCASGVYSFDYRGQGTLVTVSSGTGGGGSGGGGSGGGGSEFDIQMTQSPSSLSASVGDRVTITCRASQDVRNIVVWFQQKPGKAPKLLIYSGSYRYSGVPSRFSGSGSGTDFTLTISSLQPEDFATYYCQQHYSPPYTFGQGTKVEIKRLEIQNPDPAVYQLRDSKSSDKSVCLFTDFDSQTNVSQSKDSDVYITDKCVLDMRSMDFKSNSAVAWSNKSDFACANAFNNSIIPEDTFFPSPESSCGFTSESYQQGVLSATILYEILLGKATLYAVLVSALVLMAMVKRKDSRGRAKRSGSGVKQTLNFDLLKLAGDVESNPGPTSMDWIWRILFLVGAATGAHSFEEVQLVESGPGLVKPSETLSLTCTVSGFSLTRFGVHWVRQPPGKGLEWLGVIWRGGSTDYNAAFMSRLTISKDNSKNQVSLKLSSVTAADTAVYYCSNHYYGSSDYALDNWGQGTLVTVSSTREDLKNVFPPEVAVFEPSEAEISHTQKATLVCLATGFYPDHVELSWWVNGKEVHSGVCTDPQPLKEQPALNDSRYCLSSRLRVSATFWQNPRNHFRCQVQFYGLSENDEWTQDRAKPVTQIVSAEAWGRADCDVKLVEKSFETDTNLNFQNLSVIGFRILLLKVAGFNLLMTLRLWSS

SEQ ID NO: 45190 - protein, 893 aa, synthetic construct
MALPVTALLLPLALLLHAARPEVQLVESGGGLVQPGGSLRLSCAASGFSFSDFWMSWVRQAPGKGLEWVATISQAGSEKDYVDSVKGRFTISRDNAKKSLYLQMNSLRAEDTAVYYCASGVYSFDYRGQGTLVTVSSGTGGGGSGGGGSGGGGSEFDIQMTQSPSSLSASVGDRVTITCRASQDVRNIVVWFQQKPGKAPKLLIYSGSYRYSGVPSRFSGSGSGTDFTLTISSLQPEDFATYYCQQHYSPPYTFGQGTKVEIKRLEDLKNVFPPEVAVFEPSEAEISHTQKATLVCLATGFYPDHVELSWWVNGKEVHSGVCTDPQPLKEQPALNDSRYCLSSRLRVSATFWQNPRNHFRCQVQFYGLSENDEWTQDRAKPVTQIVSAEAWGRADCDVKLVEKSFETDTNLNFQNLSVIGFRILLLKVAGFNLLMTLRLWSSRAKRSGSGATNFSLLKQAGDVEENPGPTSMDWIWRILFLVGAATGAHSGPQLQLQESGPGLVKPSETLSLTCTVSGDSISSGDYYWGWIRQPPGKGLEWIGHIYYSGVTYYNPSLKSRVTISVDTSRNQFSLKLSSVTAADTAVYYCTREDSSNWRSRGQGTLVTVSSGSGGGGSGGGGSGGGGSFEEVQLVESGPGLVKPSETLSLTCTVSGFSLTRFGVHWVRQPPGKGLEWLGVIWRGGSTDYNAAFMSRLTISKDNSKNQVSLKLSSVTAADTAVYYCSNHYYGSSDYALDNWGQGTLVTVSSTRIQNPDPAVYQLRDSKSSDKSVCLFTDFDSQTNVSQSKDSDVYITDKCVLDMRSMDFKSNSAVAWSNKSDFACANAFNNSIIPEDTFFPSPESSCGFTSESYQQGVLSATILYEILLGKATLYAVLVSALVLMAMVKRKDSRG

SEQ ID NO: 45191 - protein, 897 aa, synthetic construct
MALPVTALLLPLALLLHAARPEVQLVESGGGLVQPGGSLRLSCAASGFSFSDFWMSWVRQAPGKGLEWVATISQAGSEKDYVDSVKGRFTISRDNAKKSLYLQMNSLRAEDTAVYYCASGVYSFDYRGQGTLVTVSSGTGGGGSGGGGSGGGGSEFDIQMTQSPSSLSASVGDRVTITCRASQDVRNIVVWFQQKPGKAPKLLIYSGSYRYSGVPSRFSGSGSGTDFTLTISSLQPEDFATYYCQQHYSPPYTFGQGTKVEIKRLEIQNPDPAVYQLRDSKSSDKSVCLFTDFDSQTNVSQSKDSDVYITDKCVLDMRSMDFKSNSAVAWSNKSDFACANAFNNSIIPEDTFFPSPESSCGFTSESYQQGVLSATILYEILLGKATLYAVLVSALVLMAMVKRKDSRGRAKRSGSGVKQTLNFDLLKLAGDVESNPGPTSMDWIWRILFLVGAATGAHSGPQLQLQESGPGLVKPSETLSLTCTVSGDSISSGDYYWGWIRQPPGKGLEWIGHIYYSGVTYYNPSLKSRVTISVDTSRNQFSLKLSSVTAADTAVYYCTREDSSNWRSRGQGTLVTVSSGSGGGGSGGGGSGGGGSFEEVQLVESGPGLVKPSETLSLTCTVSGFSLTRFGVHWVRQPPGKGLEWLGVIWRGGSTDYNAAFMSRLTISKDNSKNQVSLKLSSVTAADTAVYYCSNHYYGSSDYALDNWGQGTLVTVSSTREDLKNVFPPEVAVFEPSEAEISHTQKATLVCLATGFYPDHVELSWWVNGKEVHSGVCTDPQPLKEQPALNDSRYCLSSRLRVSATFWQNPRNHFRCQVQFYGLSENDEWTQDRAKPVTQIVSAEAWGRADCDVKLVEKSFETDTNLNFQNLSVIGFRILLLKVAGFNLLMTLRLWSS

SEQ ID NO: 45192 - protein, 691 aa, synthetic construct
MALPVTALLLPLALLLHAARPDIQMTQSPSSLSASVGDRVTITCRASQDVRNIVVWFQQKPGKAPKLLIYSGSYRYSGVPSRFSGSGSGTDFTLTISSLQPEDFATYYCQQHYSPPYTFGQGTKVEIKRLEDLKNVFPPEVAVFEPSEAEISHTQKATLVCLATGFYPDHVELSWWVNGKEVHSGVCTDPQPLKEQPALNDSRYCLSSRLRVSATFWQNPRNHFRCQVQFYGLSENDEWTQDRAKPVTQIVSAEAWGRADCDVKLVEKSFETDTNLNFQNLSVIGFRILLLKVAGFNLLMTLRLWSSRAKRSGSGATNFSLLKQAGDVEENPGPTSMDWIWRILFLVGAATGAHSGPMDPDLEIRAAFLRQRNTALRTEVAELEQEVQRLENEVSQYETRYGPLGGGKGSGGGGSGGGGSGGGGSFEEVQLVESGPGLVKPSETLSLTCTVSGFSLTRFGVHWVRQPPGKGLEWLGVIWRGGSTDYNAAFMSRLTISKDNSKNQVSLKLSSVTAADTAVYYCSNHYYGSSDYALDNWGQGTLVTVSSTRIQNPDPAVYQLRDSKSSDKSVCLFTDFDSQTNVSQSKDSDVYITDKCVLDMRSMDFKSNSAVAWSNKSDFACANAFNNSIIPEDTFFPSPESSCGFTSESYQQGVLSATILYEILLGKATLYAVLVSALVLMAMVKRKDSRG

SEQ ID NO: 45193 - protein, 695 aa, synthetic construct
MALPVTALLLPLALLLHAARPDIQMTQSPSSLSASVGDRVTITCRASQDVRNIVVWFQQKPGKAPKLLIYSGSYRYSGVPSRFSGSGSGTDFTLTISSLQPEDFATYYCQQHYSPPYTFGQGTKVEIKRLEIQNPDPAVYQLRDSKSSDKSVCLFTDFDSQTNVSQSKDSDVYITDKCVLDMRSMDFKSNSAVAWSNKSDFACANAFNNSIIPEDTFFPSPESSCGFTSESYQQGVLSATILYEILLGKATLYAVLVSALVLMAMVKRKDSRGRAKRSGSGVKQTLNFDLLKLAGDVESNPGPTSMDWIWRILFLVGAATGAHSGPMDPDLEIRAAFLRQRNTALRTEVAELEQEVQRLENEVSQYETRYGPLGGGKGSGGGGSGGGGSGGGGSFEEVQLVESGPGLVKPSETLSLTCTVSGFSLTRFGVHWVRQPPGKGLEWLGVIWRGGSTDYNAAFMSRLTISKDNSKNQVSLKLSSVTAADTAVYYCSNHYYGSSDYALDNWGQGTLVTVSSTREDLKNVFPPEVAVFEPSEAEISHTQKATLVCLATGFYPDHVELSWWVNGKEVHSGVCTDPQPLKEQPALNDSRYCLSSRLRVSATFWQNPRNHFRCQVQFYGLSENDEWTQDRAKPVTQIVSAEAWGRADCDVKLVEKSFETDTNLNFQNLSVIGFRILLLKVAGFNLLMTLRLWSS

SEQ ID NO: 45194 - protein, 668 aa, synthetic construct
MALPVTALLLPLALLLHAARPDIQMTQSPSSLSASVGDRVTITCRASQDVRNIVVWFQQKPGKAPKLLIYSGSYRYSGVPSRFSGSGSGTDFTLTISSLQPEDFATYYCQQHYSPPYTFGQGTKVEIKRLEDLKNVFPPEVAVFEPSEAEISHTQKATLVCLATGFYPDHVELSWWVNGKEVHSGVCTDPQPLKEQPALNDSRYCLSSRLRVSATFWQNPRNHFRCQVQFYGLSENDEWTQDRAKPVTQIVSAEAWGRADCDVKLVEKSFETDTNLNFQNLSVIGFRILLLKVAGFNLLMTLRLWSSRAKRSGSGATNFSLLKQAGDVEENPGPTSMDWIWRILFLVGAATGAHSGPEVAALEKEVAALEKEVAALEKEVAALEKGSGGGGSGGGGSGGGGSFEEVQLVESGPGLVKPSETLSLTCTVSGFSLTRFGVHWVRQPPGKGLEWLGVIWRGGSTDYNAAFMSRLTISKDNSKNQVSLKLSSVTAADTAVYYCSNHYYGSSDYALDNWGQGTLVTVSSTRIQNPDPAVYQLRDSKSSDKSVCLFTDFDSQTNVSQSKDSDVYITDKCVLDMRSMDFKSNSAVAWSNKSDFACANAFNNSIIPEDTFFPSPESSCGFTSESYQQGVLSATILYEILLGKATLYAVLVSALVLMAMVKRKDSRG

SEQ ID NO: 45195 - protein, 672 aa, synthetic construct
MALPVTALLLPLALLLHAARPDIQMTQSPSSLSASVGDRVTITCRASQDVRNIVVWFQQKPGKAPKLLIYSGSYRYSGVPSRFSGSGSGTDFTLTISSLQPEDFATYYCQQHYSPPYTFGQGTKVEIKRLEIQNPDPAVYQLRDSKSSDKSVCLFTDFDSQTNVSQSKDSDVYITDKCVLDMRSMDFKSNSAVAWSNKSDFACANAFNNSIIPEDTFFPSPESSCGFTSESYQQGVLSATILYEILLGKATLYAVLVSALVLMAMVKRKDSRGRAKRSGSGVKQTLNFDLLKLAGDVESNPGPTSMDWIWRILFLVGAATGAHSGPEVAALEKEVAALEKEVAALEKEVAALEKGSGGGGSGGGGSGGGGSFEEVQLVESGPGLVKPSETLSLTCTVSGFSLTRFGVHWVRQPPGKGLEWLGVIWRGGSTDYNAAFMSRLTISKDNSKNQVSLKLSSVTAADTAVYYCSNHYYGSSDYALDNWGQGTLVTVSSTREDLKNVFPPEVAVFEPSEAEISHTQKATLVCLATGFYPDHVELSWWVNGKEVHSGVCTDPQPLKEQPALNDSRYCLSSRLRVSATFWQNPRNHFRCQVQFYGLSENDEWTQDRAKPVTQIVSAEAWGRADCDVKLVEKSFETDTNLNFQNLSVIGFRILLLKVAGFNLLMTLRLWSS

SEQ ID NO: 45196 - protein, 758 aa, synthetic construct
MALPVTALLLPLALLLHAARPDIQMTQSPSSLSASVGDRVTITCRASQDVRNIVVWFQQKPGKAPKLLIYSGSYRYSGVPSRFSGSGSGTDFTLTISSLQPEDFATYYCQQHYSPPYTFGQGTKVEIKRLEDLKNVFPPEVAVFEPSEAEISHTQKATLVCLATGFYPDHVELSWWVNGKEVHSGVCTDPQPLKEQPALNDSRYCLSSRLRVSATFWQNPRNHFRCQVQFYGLSENDEWTQDRAKPVTQIVSAEAWGRADCDVKLVEKSFETDTNLNFQNLSVIGFRILLLKVAGFNLLMTLRLWSSRAKRSGSGATNFSLLKQAGDVEENPGPTSMDWIWRILFLVGAATGAHSGPQVQLQESGGGLAQAGGSLRLSCAASGRTFSMGWFRQAPGKEREFVAAITYSGGSPYYASSVRGRFTISRDNAKNTVYLQMNSLKPEDTAVYYCAANPTYGSDWNAENWGQGTQVTVSSGSGGGGSGGGGSGGGGSFEEVQLVESGPGLVKPSETLSLTCTVSGFSLTRFGVHWVRQPPGKGLEWLGVIWRGGSTDYNAAFMSRLTISKDNSKNQVSLKLSSVTAADTAVYYCSNHYYGSSDYALDNWGQGTLVTVSSTRIQNPDPAVYQLRDSKSSDKSVCLFTDFDSQTNVSQSKDSDVYITDKCVLDMRSMDFKSNSAVAWSNKSDFACANAFNNSIIPEDTFFPSPESSCGFTSESYQQGVLSATILYEILLGKATLYAVLVSALVLMAMVKRKDSRG

SEQ ID NO: 45197 - protein, 762 aa, synthetic construct
MALPVTALLLPLALLLHAARPDIQMTQSPSSLSASVGDRVTITCRASQDVRNIVVWFQQKPGKAPKLLIYSGSYRYSGVPSRFSGSGSGTDFTLTISSLQPEDFATYYCQQHYSPPYTFGQGTKVEIKRLEIQNPDPAVYQLRDSKSSDKSVCLFTDFDSQTNVSQSKDSDVYITDKCVLDMRSMDFKSNSAVAWSNKSDFACANAFNNSIIPEDTFFPSPESSCGFTSESYQQGVLSATILYEILLGKATLYAVLVSALVLMAMVKRKDSRGRAKRSGSGVKQTLNFDLLKLAGDVESNPGPTSMDWIWRILFLVGAATGAHSGPQVQLQESGGGLAQAGGSLRLSCAASGRTFSMGWFRQAPGKEREFVAAITYSGGSPYYASSVRGRFTISRDNAKNTVYLQMNSLKPEDTAVYYCAANPTYGSDWNAENWGQGTQVTVSSGSGGGGSGGGGSGGGGSFEEVQLVESGPGLVKPSETLSLTCTVSGFSLTRFGVHWVRQPPGKGLEWLGVIWRGGSTDYNAAFMSRLTISKDNSKNQVSLKLSSVTAADTAVYYCSNHYYGSSDYALDNWGQGTLVTVSSTREDLKNVFPPEVAVFEPSEAEISHTQKATLVCLATGFYPDHVELSWWVNGKEVHSGVCTDPQPLKEQPALNDSRYCLSSRLRVSATFWQNPRNHFRCQVQFYGLSENDEWTQDRAKPVTQIVSAEAWGRADCDVKLVEKSFETDTNLNFQNLSVIGFRILLLKVAGFNLLMTLRLWSS

SEQ ID NO: 45198 - protein, 764 aa, synthetic construct
MALPVTALLLPLALLLHAARPEVQLVESGGSLVQPGGSLRLSCAASGFTFDDYAMSWVRQVPGKGLEWVSSINWSGTHTDYADSVKGRFTISRNNANNTLYLQMNSLKSEDTAVYYCAKNWRDAGTTWFEKSGSAGQGTQVTVSSGTGGGGSGGGGSGGGGSEFDIQMTQSPSSLSASVGDRVTITCRASQDVRNIVVWFQQKPGKAPKLLIYSGSYRYSGVPSRFSGSGSGTDFTLTISSLQPEDFATYYCQQHYSPPYTFGQGTKVEIKRLEDLKNVFPPEVAVFEPSEAEISHTQKATLVCLATGFYPDHVELSWWVNGKEVHSGVCTDPQPLKEQPALNDSRYCLSSRLRVSATFWQNPRNHFRCQVQFYGLSENDEWTQDRAKPVTQIVSAEAWGRADCDVKLVEKSFETDTNLNFQNLSVIGFRILLLKVAGFNLLMTLRLWSSRAKRSGSGATNFSLLKQAGDVEENPGPTSMDWIWRILFLVGAATGAHSFEEVQLVESGPGLVKPSETLSLTCTVSGFSLTRFGVHWVRQPPGKGLEWLGVIWRGGSTDYNAAFMSRLTISKDNSKNQVSLKLSSVTAADTAVYYCSNHYYGSSDYALDNWGQGTLVTVSSTRIQNPDPAVYQLRDSKSSDKSVCLFTDFDSQTNVSQSKDSDVYITDKCVLDMRSMDFKSNSAVAWSNKSDFACANAFNNSIIPEDTFFPSPESSCGFTSESYQQGVLSATILYEILLGKATLYAVLVSALVLMAMVKRKDSRG

SEQ ID NO: 45199 - protein, 768 aa, synthetic construct
MALPVTALLLPLALLLHAARPEVQLVESGGSLVQPGGSLRLSCAASGFTFDDYAMSWVRQVPGKGLEWVSSINWSGTHTDYADSVKGRFTISRNNANNTLYLQMNSLKSEDTAVYYCAKNWRDAGTTWFEKSGSAGQGTQVTVSSGTGGGGSGGGGSGGGGSEFDIQMTQSPSSLSASVGDRVTITCRASQDVRNIVVWFQQKPGKAPKLLIYSGSYRYSGVPSRFSGSGSGTDFTLTISSLQPEDFATYYCQQHYSPPYTFGQGTKVEIKRLEIQNPDPAVYQLRDSKSSDKSVCLFTDFDSQTNVSQSKDSDVYITDKCVLDMRSMDFKSNSAVAWSNKSDFACANAFNNSIIPEDTFFPSPESSCGFTSESYQQGVLSATILYEILLGKATLYAVLVSALVLMAMVKRKDSRGRAKRSGSGVKQTLNFDLLKLAGDVESNPGPTSMDWIWRILFLVGAATGAHSFEEVQLVESGPGLVKPSETLSLTCTVSGFSLTRFGVHWVRQPPGKGLEWLGVIWRGGSTDYNAAFMSRLTISKDNSKNQVSLKLSSVTAADTAVYYCSNHYYGSSDYALDNWGQGTLVTVSSTREDLKNVFPPEVAVFEPSEAEISHTQKATLVCLATGFYPDHVELSWWVNGKEVHSGVCTDPQPLKEQPALNDSRYCLSSRLRVSATFWQNPRNHFRCQVQFYGLSENDEWTQDRAKPVTQIVSAEAWGRADCDVKLVEKSFETDTNLNFQNLSVIGFRILLLKVAGFNLLMTLRLWSS

SEQ ID NO: 45200 - protein, 762 aa, synthetic construct
MALPVTALLLPLALLLHAARPEVQLLESGGGLVQPGGSLRLSCAASGFIFSSYAMSWVRQAPGKGQEWVSGVSGTGVNTYYADSVKGRFTISRDNSKNTLYLQMNSLRAEDTAVYYCASGKGWDSGSWYEDYRGQGTLVTVSSGTGGGGSGGGGSGGGGSEFDIQMTQSPSSLSASVGDRVTITCRASQDVRNIVVWFQQKPGKAPKLLIYSGSYRYSGVPSRFSGSGSGTDFTLTISSLQPEDFATYYCQQHYSPPYTFGQGTKVEIKRLEDLKNVFPPEVAVFEPSEAEISHTQKATLVCLATGFYPDHVELSWWVNGKEVHSGVCTDPQPLKEQPALNDSRYCLSSRLRVSATFWQNPRNHFRCQVQFYGLSENDEWTQDRAKPVTQIVSAEAWGRADCDVKLVEKSFETDTNLNFQNLSVIGFRILLLKVAGFNLLMTLRLWSSRAKRSGSGATNFSLLKQAGDVEENPGPTSMDWIWRILFLVGAATGAHSFEEVQLVESGPGLVKPSETLSLTCTVSGFSLTRFGVHWVRQPPGKGLEWLGVIWRGGSTDYNAAFMSRLTISKDNSKNQVSLKLSSVTAADTAVYYCSNHYYGSSDYALDNWGQGTLVTVSSTRIQNPDPAVYQLRDSKSSDKSVCLFTDFDSQTNVSQSKDSDVYITDKCVLDMRSMDFKSNSAVAWSNKSDFACANAFNNSIIPEDTFFPSPESSCGFTSESYQQGVLSATILYEILLGKATLYAVLVSALVLMAMVKRKDSRG

SEQ ID NO: 45201 - protein, 766 aa, synthetic construct
MALPVTALLLPLALLLHAARPEVQLLESGGGLVQPGGSLRLSCAASGFIFSSYAMSWVRQAPGKGQEWVSGVSGTGVNTYYADSVKGRFTISRDNSKNTLYLQMNSLRAEDTAVYYCASGKGWDSGSWYEDYRGQGTLVTVSSGTGGGGSGGGGSGGGGSEFDIQMTQSPSSLSASVGDRVTITCRASQDVRNIVVWFQQKPGKAPKLLIYSGSYRYSGVPSRFSGSGSGTDFTLTISSLQPEDFATYYCQQHYSPPYTFGQGTKVEIKRLEIQNPDPAVYQLRDSKSSDKSVCLFTDFDSQTNVSQSKDSDVYITDKCVLDMRSMDFKSNSAVAWSNKSDFACANAFNNSIIPEDTFFPSPESSCGFTSESYQQGVLSATILYEILLGKATLYAVLVSALVLMAMVKRKDSRGRAKRSGSGVKQTLNFDLLKLAGDVESNPGPTSMDWIWRILFLVGAATGAHSFEEVQLVESGPGLVKPSETLSLTCTVSGFSLTRFGVHWVRQPPGKGLEWLGVIWRGGSTDYNAAFMSRLTISKDNSKNQVSLKLSSVTAADTAVYYCSNHYYGSSDYALDNWGQGTLVTVSSTREDLKNVFPPEVAVFEPSEAEISHTQKATLVCLATGFYPDHVELSWWVNGKEVHSGVCTDPQPLKEQPALNDSRYCLSSRLRVSATFWQNPRNHFRCQVQFYGLSENDEWTQDRAKPVTQIVSAEAWGRADCDVKLVEKSFETDTNLNFQNLSVIGFRILLLKVAGFNLLMTLRLWSS

SEQ ID NO: 45202 - protein, 730 aa, synthetic construct
MALPVTALLLPLALLLHAARPMLPAPKNLVVSRITEDSARLSWTAPDAAFDSFPIRYIETLIWGEAIWLDVPGSERSYDLTGLKPGTEYAVVITGVKGGRFSSPLVASFTTGTGGGGSGGGGSGGGGSEFDIQMTQSPSSLSASVGDRVTITCRASQDVRNIVVWFQQKPGKAPKLLIYSGSYRYSGVPSRFSGSGSGTDFTLTISSLQPEDFATYYCQQHYSPPYTFGQGTKVEIKRLEDLKNVFPPEVAVFEPSEAEISHTQKATLVCLATGFYPDHVELSWWVNGKEVHSGVCTDPQPLKEQPALNDSRYCLSSRLRVSATFWQNPRNHFRCQVQFYGLSENDEWTQDRAKPVTQIVSAEAWGRADCDVKLVEKSFETDTNLNFQNLSVIGFRILLLKVAGFNLLMTLRLWSSRAKRSGSGATNFSLLKQAGDVEENPGPTSMDWIWRILFLVGAATGAHSFEEVQLVESGPGLVKPSETLSLTCTVSGFSLTRFGVHWVRQPPGKGLEWLGVIWRGGSTDYNAAFMSRLTISKDNSKNQVSLKLSSVTAADTAVYYCSNHYYGSSDYALDNWGQGTLVTVSSTRIQNPDPAVYQLRDSKSSDKSVCLFTDFDSQTNVSQSKDSDVYITDKCVLDMRSMDFKSNSAVAWSNKSDFACANAFNNSIIPEDTFFPSPESSCGFTSESYQQGVLSATILYEILLGKATLYAVLVSALVLMAMVKRKDSRG

SEQ ID NO: 45203 - protein, 734 aa, synthetic construct
MALPVTALLLPLALLLHAARPMLPAPKNLVVSRITEDSARLSWTAPDAAFDSFPIRYIETLIWGEAIWLDVPGSERSYDLTGLKPGTEYAVVITGVKGGRFSSPLVASFTTGTGGGGSGGGGSGGGGSEFDIQMTQSPSSLSASVGDRVTITCRASQDVRNIVVWFQQKPGKAPKLLIYSGSYRYSGVPSRFSGSGSGTDFTLTISSLQPEDFATYYCQQHYSPPYTFGQGTKVEIKRLEIQNPDPAVYQLRDSKSSDKSVCLFTDFDSQTNVSQSKDSDVYITDKCVLDMRSMDFKSNSAVAWSNKSDFACANAFNNSIIPEDTFFPSPESSCGFTSESYQQGVLSATILYEILLGKATLYAVLVSALVLMAMVKRKDSRGRAKRSGSGVKQTLNFDLLKLAGDVESNPGPTSMDWIWRILFLVGAATGAHSFEEVQLVESGPGLVKPSETLSLTCTVSGFSLTRFGVHWVRQPPGKGLEWLGVIWRGGSTDYNAAFMSRLTISKDNSKNQVSLKLSSVTAADTAVYYCSNHYYGSSDYALDNWGQGTLVTVSSTREDLKNVFPPEVAVFEPSEAEISHTQKATLVCLATGFYPDHVELSWWVNGKEVHSGVCTDPQPLKEQPALNDSRYCLSSRLRVSATFWQNPRNHFRCQVQFYGLSENDEWTQDRAKPVTQIVSAEAWGRADCDVKLVEKSFETDTNLNFQNLSVIGFRILLLKVAGFNLLMTLRLWSS

SEQ ID NO: 45204 - protein, 759 aa, synthetic construct
MALPVTALLLPLALLLHAARPEVQLVESGGGLVQPGGSLRLSCAASGFNIKDTCIGWVRRAPGKEEELVAKICKYSGHTRYADSVKGRFTISADTSKNTAYLQMNSLRAEDTAVYYCAAVSVRDGHYNYWGQGTTVTVSSGTGGGGSGGGGSGGGGSEFDIQMTQSPSSLSASVGDRVTITCRASQDVRNIVVWFQQKPGKAPKLLIYSGSYRYSGVPSRFSGSGSGTDFTLTISSLQPEDFATYYCQQHYSPPYTFGQGTKVEIKRLEDLKNVFPPEVAVFEPSEAEISHTQKATLVCLATGFYPDHVELSWWVNGKEVHSGVCTDPQPLKEQPALNDSRYCLSSRLRVSATFWQNPRNHFRCQVQFYGLSENDEWTQDRAKPVTQIVSAEAWGRADCDVKLVEKSFETDTNLNFQNLSVIGFRILLLKVAGFNLLMTLRLWSSRAKRSGSGATNFSLLKQAGDVEENPGPTSMDWIWRILFLVGAATGAHSFEEVQLVESGPGLVKPSETLSLTCTVSGFSLTRFGVHWVRQPPGKGLEWLGVIWRGGSTDYNAAFMSRLTISKDNSKNQVSLKLSSVTAADTAVYYCSNHYYGSSDYALDNWGQGTLVTVSSTRIQNPDPAVYQLRDSKSSDKSVCLFTDFDSQTNVSQSKDSDVYITDKCVLDMRSMDFKSNSAVAWSNKSDFACANAFNNSIIPEDTFFPSPESSCGFTSESYQQGVLSATILYEILLGKATLYAVLVSALVLMAMVKRKDSRG

SEQ ID NO: 45205 - protein, 763 aa, synthetic construct
MALPVTALLLPLALLLHAARPEVQLVESGGGLVQPGGSLRLSCAASGFNIKDTCIGWVRRAPGKEEELVAKICKYSGHTRYADSVKGRFTISADTSKNTAYLQMNSLRAEDTAVYYCAAVSVRDGHYNYWGQGTTVTVSSGTGGGGSGGGGSGGGGSEFDIQMTQSPSSLSASVGDRVTITCRASQDVRNIVVWFQQKPGKAPKLLIYSGSYRYSGVPSRFSGSGSGTDFTLTISSLQPEDFATYYCQQHYSPPYTFGQGTKVEIKRLEIQNPDPAVYQLRDSKSSDKSVCLFTDFDSQTNVSQSKDSDVYITDKCVLDMRSMDFKSNSAVAWSNKSDFACANAFNNSIIPEDTFFPSPESSCGFTSESYQQGVLSATILYEILLGKATLYAVLVSALVLMAMVKRKDSRGRAKRSGSGVKQTLNFDLLKLAGDVESNPGPTSMDWIWRILFLVGAATGAHSFEEVQLVESGPGLVKPSETLSLTCTVSGFSLTRFGVHWVRQPPGKGLEWLGVIWRGGSTDYNAAFMSRLTISKDNSKNQVSLKLSSVTAADTAVYYCSNHYYGSSDYALDNWGQGTLVTVSSTREDLKNVFPPEVAVFEPSEAEISHTQKATLVCLATGFYPDHVELSWWVNGKEVHSGVCTDPQPLKEQPALNDSRYCLSSRLRVSATFWQNPRNHFRCQVQFYGLSENDEWTQDRAKPVTQIVSAEAWGRADCDVKLVEKSFETDTNLNFQNLSVIGFRILLLKVAGFNLLMTLRLWSS

SEQ ID NO: 45206 - protein, 1130 aa, synthetic construct
MALPVTALLLPLALLLHAARPEVQLVESGGGLVQAGGSLRLSCAASGRTFSMGWFRQAPGKEREFVAAITYSGGSPYYADSVKGRFTISRDNAKNTVYLQMNSLKPEDTAVYYCAANPTYGSDWNAENWGQGTQVTVSSGTGGGGSGGGGSGGGGSEFDIQMTQSPSSLSASVGDRVTITCRASQDVRNIVVWFQQKPGKAPKLLIYSGSYRYSGVPSRFSGSGSGTDFTLTISSLQPEDFATYYCQQHYSPPYTFGQGTKVEIKRLEDLKNVFPPEVAVFEPSEAEISHTQKATLVCLATGFYPDHVELSWWVNGKEVHSGVCTDPQPLKEQPALNDSRYCLSSRLRVSATFWQNPRNHFRCQVQFYGLSENDEWTQDRAKPVTQIVSAEAWGRADCDVKLVEKSFETDTNLNFQNLSVIGFRILLLKVAGFNLLMTLRLWSSRAKRSGSGATNFSLLKQAGDVEENPGPTSATMDWIWRILFLVGAATGAHSGPEVQLVESGGGLVQAGGSLRLSCAASGRTFTMGWFRQAPGKEREFVAAISLSPTLAYYADSVKGRFTISRDNAKNTVVLQMNSLKPEDTALYYCAADRKSVMSIRPDYWGQGTQVTVSSGSGGGGSGGGGSGGGGSFEEVQLVESGPGLVKPSETLSLTCTVSGFSLTRFGVHWVRQPPGKGLEWLGVIWRGGSTDYNAAFMSRLTISKDNSKNQVSLKLSSVTAADTAVYYCSNHYYGSSDYALDNWGQGTLVTVSSTRIQNPDPAVYQLRDSKSSDKSVCLFTDFDSQTNVSQSKDSDVYITDKCVLDMRSMDFKSNSAVAWSNKSDFACANAFNNSIIPEDTFFPSPESSCGFTSESYQQGVLSATILYEILLGKATLYAVLVSALVLMAMVKRKDSRGRAKRSGSGVKQTLNFDLLKLAGDVESNPGPSRGHMTEYKPTVRLATRDDVPRAVRTLAAAFADYPATRHTVDPDRHIERVTELQELFLTRVGLDIGKVWVADDGAAVAVWTTPESVEAGAVFAEIGPRMAELSGSRLAAQQQMEGLLAPHRPKEPAWFLATVGVSPDHQGKGLGSAVVLPGVEAAERAGVPAFLETSAPRNLPFYERLGFTVTADVEVPEGPRTWCMTRKPGA

SEQ ID NO: 45207 - protein, 768 aa, synthetic construct
MALPVTALLLPLALLLHAARPEVQLVESGGGLVQPGGSLRLSCAASGFASDYYIIGWFRQAPGKEREGVSCISSRYANTNYADSVKGRFTISRDNAKNTVYLQMNSLKPEDTAVYYCAADTRRYTCPDIATMHRNFDSWGQGTLVTVSSGTGGGGSGGGGSGGGGSEFDIQMTQSPSSLSASVGDRVTITCRASQDVRNIVVWFQQKPGKAPKLLIYSGSYRYSGVPSRFSGSGSGTDFTLTISSLQPEDFATYYCQQHYSPPYTFGQGTKVEIKRLEDLKNVFPPEVAVFEPSEAEISHTQKATLVCLATGFYPDHVELSWWVNGKEVHSGVCTDPQPLKEQPALNDSRYCLSSRLRVSATFWQNPRNHFRCQVQFYGLSENDEWTQDRAKPVTQIVSAEAWGRADCDVKLVEKSFETDTNLNFQNLSVIGFRILLLKVAGFNLLMTLRLWSSRAKRSGSGATNFSLLKQAGDVEENPGPTSMDWIWRILFLVGAATGAHSFEEVQLVESGPGLVKPSETLSLTCTVSGFSLTRFGVHWVRQPPGKGLEWLGVIWRGGSTDYNAAFMSRLTISKDNSKNQVSLKLSSVTAADTAVYYCSNHYYGSSDYALDNWGQGTLVTVSSTRIQNPDPAVYQLRDSKSSDKSVCLFTDFDSQTNVSQSKDSDVYITDKCVLDMRSMDFKSNSAVAWSNKSDFACANAFNNSIIPEDTFFPSPESSCGFTSESYQQGVLSATILYEILLGKATLYAVLVSALVLMAMVKRKDSRG

SEQ ID NO: 45208 - protein, 768 aa, synthetic construct
MALPVTALLLPLALLLHAARPEVQLVESGGGLVQPGGSLRLSCEASGFASDDYIIGWFRQAPGKEREGVSCISSKYANTVYTDSVKGRFRLSRGTAKNTVYLQMSALKPEDTAVYYCAMDSRRVTCPEISTMHRNFDSWGQGTLVTVSSGTGGGGSGGGGSGGGGSEFDIQMTQSPSSLSASVGDRVTITCRASQDVRNIVVWFQQKPGKAPKLLIYSGSYRYSGVPSRFSGSGSGTDFTLTISSLQPEDFATYYCQQHYSPPYTFGQGTKVEIKRLEDLKNVFPPEVAVFEPSEAEISHTQKATLVCLATGFYPDHVELSWWVNGKEVHSGVCTDPQPLKEQPALNDSRYCLSSRLRVSATFWQNPRNHFRCQVQFYGLSENDEWTQDRAKPVTQIVSAEAWGRADCDVKLVEKSFETDTNLNFQNLSVIGFRILLLKVAGFNLLMTLRLWSSRAKRSGSGATNFSLLKQAGDVEENPGPTSMDWIWRILFLVGAATGAHSFEEVQLVESGPGLVKPSETLSLTCTVSGFSLTRFGVHWVRQPPGKGLEWLGVIWRGGSTDYNAAFMSRLTISKDNSKNQVSLKLSSVTAADTAVYYCSNHYYGSSDYALDNWGQGTLVTVSSTRIQNPDPAVYQLRDSKSSDKSVCLFTDFDSQTNVSQSKDSDVYITDKCVLDMRSMDFKSNSAVAWSNKSDFACANAFNNSIIPEDTFFPSPESSCGFTSESYQQGVLSATILYEILLGKATLYAVLVSALVLMAMVKRKDSRG

SEQ ID NO: 45209 - protein, 768 aa, synthetic construct
MALPVTALLLPLALLLHAARPEVQLVESGGGLVQPGGSLRLSCAASGFASDYYIIGWFRQAPGKEREGVSCISSRYANTNYADSVKGRFTISRDNAKNTVYLQMNSLKPEDTAVYYCAADTRRYTCPDIATMHRNFDSWGQGTLVTVSSGTGGGGSGGGGSGGGGSEFDIQMTQSPSSLSASVGDRVTITCRASQDVRNIVVWFQQKPGKAPKLLIYSGSYRYSGVPSRFSGSGSGTDFTLTISSLQPEDFATYYCQQHYSPPYTFGQGTKVEIKRLEIQNPDPAVYQLRDSKSSDKSVCLFTDFDSQTNVSQSKDSDVYITDKCVLDMRSMDFKSNSAVAWSNKSDFACANAFNNSIIPEDTFFPSPESSCGFTSESYQQGVLSATILYEILLGKATLYAVLVSALVLMAMVKRKDSRGRAKRSGSGATNFSLLKQAGDVEENPGPTSMDWIWRILFLVGAATGAHSFEEVQLVESGPGLVKPSETLSLTCTVSGFSLTRFGVHWVRQPPGKGLEWLGVIWRGGSTDYNAAFMSRLTISKDNSKNQVSLKLSSVTAADTAVYYCSNHYYGSSDYALDNWGQGTLVTVSSTRDLKNVFPPEVAVFEPSEAEISHTQKATLVCLATGFYPDHVELSWWVNGKEVHSGVCTDPQPLKEQPALNDSRYCLSSRLRVSATFWQNPRNHFRCQVQFYGLSENDEWTQDRAKPVTQIVSAEAWGRADCDVKLVEKSFETDTNLNFQNLSVIGFRILLLKVAGFNLLMTLRLWSS

SEQ ID NO: 45210 - protein, 768 aa, synthetic construct
MALPVTALLLPLALLLHAARPEVQLVESGGGLVQPGGSLRLSCEASGFASDDYIIGWFRQAPGKEREGVSCISSKYANTVYTDSVKGRFRLSRGTAKNTVYLQMSALKPEDTAVYYCAMDSRRVTCPEISTMHRNFDSWGQGTLVTVSSGTGGGGSGGGGSGGGGSEFDIQMTQSPSSLSASVGDRVTITCRASQDVRNIVVWFQQKPGKAPKLLIYSGSYRYSGVPSRFSGSGSGTDFTLTISSLQPEDFATYYCQQHYSPPYTFGQGTKVEIKRLEIQNPDPAVYQLRDSKSSDKSVCLFTDFDSQTNVSQSKDSDVYITDKCVLDMRSMDFKSNSAVAWSNKSDFACANAFNNSIIPEDTFFPSPESSCGFTSESYQQGVLSATILYEILLGKATLYAVLVSALVLMAMVKRKDSRGRAKRSGSGATNFSLLKQAGDVEENPGPTSMDWIWRILFLVGAATGAHSFEEVQLVESGPGLVKPSETLSLTCTVSGFSLTRFGVHWVRQPPGKGLEWLGVIWRGGSTDYNAAFMSRLTISKDNSKNQVSLKLSSVTAADTAVYYCSNHYYGSSDYALDNWGQGTLVTVSSTRDLKNVFPPEVAVFEPSEAEISHTQKATLVCLATGFYPDHVELSWWVNGKEVHSGVCTDPQPLKEQPALNDSRYCLSSRLRVSATFWQNPRNHFRCQVQFYGLSENDEWTQDRAKPVTQIVSAEAWGRADCDVKLVEKSFETDTNLNFQNLSVIGFRILLLKVAGFNLLMTLRLWSS

SEQ ID NO: 45211 - protein, 759 aa, synthetic construct
MALPVTALLLPLALLLHAARPQVKLEESGGGLVQPGESLRLSCSASGSIFKVFRVFAMSWYRQGPGKQRELVASISSGETTTYAESVKGRFTISRDNAKNTAYLQMDSLKPEDTAVYYCNADHTFTGDFWGQGTQVTVSSGTGGGGSGGGGSGGGGSEFDIQMTQSPSSLSASVGDRVTITCRASQDVRNIVVWFQQKPGKAPKLLIYSGSYRYSGVPSRFSGSGSGTDFTLTISSLQPEDFATYYCQQHYSPPYTFGQGTKVEIKRLEIQNPDPAVYQLRDSKSSDKSVCLFTDFDSQTNVSQSKDSDVYITDKCVLDMRSMDFKSNSAVAWSNKSDFACANAFNNSIIPEDTFFPSPESSCGFTSESYQQGVLSATILYEILLGKATLYAVLVSALVLMAMVKRKDSRGRAKRSGSGATNFSLLKQAGDVEENPGPTSMDWIWRILFLVGAATGAHSFEEVQLVESGPGLVKPSETLSLTCTVSGFSLTRFGVHWVRQPPGKGLEWLGVIWRGGSTDYNAAFMSRLTISKDNSKNQVSLKLSSVTAADTAVYYCSNHYYGSSDYALDNWGQGTLVTVSSTRDLKNVFPPEVAVFEPSEAEISHTQKATLVCLATGFYPDHVELSWWVNGKEVHSGVCTDPQPLKEQPALNDSRYCLSSRLRVSATFWQNPRNHFRCQVQFYGLSENDEWTQDRAKPVTQIVSAEAWGRADCDVKLVEKSFETDTNLNFQNLSVIGFRILLLKVAGFNLLMTLRLWSS

SEQ ID NO: 45212 - protein, 760 aa, synthetic construct
MALPVTALLLPLALLLHAARPDIQMTQSPSSLSASVGDRVTITCRASQDVRNIVVWFQQKPGKAPKLLIYSGSYRYSGVPSRFSGSGSGTDFTLTISSLQPEDFATYYCQQHYSPPYTFGQGTKVEIKRLEDLKNVFPPEVAVFEPSEAEISHTQKATLVCLATGFYPDHVELSWWVNGKEVHSGVCTDPQPLKEQPALNDSRYCLSSRLRVSATFWQNPRNHFRCQVQFYGLSENDEWTQDRAKPVTQIVSAEAWGRADCDVKLVEKSFETDTNLNFQNLSVIGFRILLLKVAGFNLLMTLRLWSSRAKRSGSGATNFSLLKQAGDVEENPGPTSATMDWIWRILFLVGAATGAHSGPEVQLVESGGGLVQAGGSLRLSCAASGRTFSMGWFRQAPGKEREFVAAITYSGGSPYYADSVKGRFTISRDNAKNTVYLQMNSLKPEDTAVYYCAANPTYGSDWNAENWGQGTQVTVSSGSGGGGSGGGGSGGGGSFEEVQLVESGPGLVKPSETLSLTCTVSGFSLTRFGVHWVRQPPGKGLEWLGVIWRGGSTDYNAAFMSRLTISKDNSKNQVSLKLSSVTAADTAVYYCSNHYYGSSDYALDNWGQGTLVTVSSTRIQNPDPAVYQLRDSKSSDKSVCLFTDFDSQTNVSQSKDSDVYITDKCVLDMRSMDFKSNSAVAWSNKSDFACANAFNNSIIPEDTFFPSPESSCGFTSESYQQGVLSATILYEILLGKATLYAVLVSALVLMAMVKRKDSRG

SEQ ID NO: 45213 - protein, 761 aa, synthetic construct
MALPVTALLLPLALLLHAARPDIQMTQSPSSLSASVGDRVTITCRASQDVRNIVVWFQQKPGKAPKLLIYSGSYRYSGVPSRFSGSGSGTDFTLTISSLQPEDFATYYCQQHYSPPYTFGQGTKVEIKRLEDLKNVFPPEVAVFEPSEAEISHTQKATLVCLATGFYPDHVELSWWVNGKEVHSGVCTDPQPLKEQPALNDSRYCLSSRLRVSATFWQNPRNHFRCQVQFYGLSENDEWTQDRAKPVTQIVSAEAWGRADCDVKLVEKSFETDTNLNFQNLSVIGFRILLLKVAGFNLLMTLRLWSSRAKRSGSGATNFSLLKQAGDVEENPGPTSATMDWIWRILFLVGAATGAHSGPEVQLVESGGGLVQPGGSLRLSCAASGSIFGFNDMAWYRQAPGKQRELVALISRVGVTSSADSVKGRFTISRVNAKDTVYLQMNSLKPEDTAVYYCYMDQRLDGSTLAYWGQGTQVTVSSGSGGGGSGGGGSGGGGSFEEVQLVESGPGLVKPSETLSLTCTVSGFSLTRFGVHWVRQPPGKGLEWLGVIWRGGSTDYNAAFMSRLTISKDNSKNQVSLKLSSVTAADTAVYYCSNHYYGSSDYALDNWGQGTLVTVSSTRIQNPDPAVYQLRDSKSSDKSVCLFTDFDSQTNVSQSKDSDVYITDKCVLDMRSMDFKSNSAVAWSNKSDFACANAFNNSIIPEDTFFPSPESSCGFTSESYQQGVLSATILYEILLGKATLYAVLVSALVLMAMVKRKDSRG

SEQ ID NO: 45214 - protein, 757 aa, synthetic construct
MALPVTALLLPLALLLHAARPDIQMTQSPSSLSASVGDRVTITCRASQDVRNIVVWFQQKPGKAPKLLIYSGSYRYSGVPSRFSGSGSGTDFTLTISSLQPEDFATYYCQQHYSPPYTFGQGTKVEIKRLEDLKNVFPPEVAVFEPSEAEISHTQKATLVCLATGFYPDHVELSWWVNGKEVHSGVCTDPQPLKEQPALNDSRYCLSSRLRVSATFWQNPRNHFRCQVQFYGLSENDEWTQDRAKPVTQIVSAEAWGRADCDVKLVEKSFETDTNLNFQNLSVIGFRILLLKVAGFNLLMTLRLWSSRAKRSGSGATNFSLLKQAGDVEENPGPTSATMDWIWRILFLVGAATGAHSGPEVQLVESGGGLVQAGGSLRLSCAASGSVFSGNVMGWYRQAPGKEREWVAAIASGGSIYYRDSVKGRFTISRDNAKNTVYLQMNSLKPEDTAVYYCNSHPPTLPYWGLGTQVTVSSGSGGGGSGGGGSGGGGSFEEVQLVESGPGLVKPSETLSLTCTVSGFSLTRFGVHWVRQPPGKGLEWLGVIWRGGSTDYNAAFMSRLTISKDNSKNQVSLKLSSVTAADTAVYYCSNHYYGSSDYALDNWGQGTLVTVSSTRIQNPDPAVYQLRDSKSSDKSVCLFTDFDSQTNVSQSKDSDVYITDKCVLDMRSMDFKSNSAVAWSNKSDFACANAFNNSIIPEDTFFPSPESSCGFTSESYQQGVLSATILYEILLGKATLYAVLVSALVLMAMVKRKDSRG

SEQ ID NO: 45215 - protein, 755 aa, synthetic construct
MALPVTALLLPLALLLHAARPDIQMTQSPSSLSASVGDRVTITCRASQDVRNIVVWFQQKPGKAPKLLIYSGSYRYSGVPSRFSGSGSGTDFTLTISSLQPEDFATYYCQQHYSPPYTFGQGTKVEIKRLEDLKNVFPPEVAVFEPSEAEISHTQKATLVCLATGFYPDHVELSWWVNGKEVHSGVCTDPQPLKEQPALNDSRYCLSSRLRVSATFWQNPRNHFRCQVQFYGLSENDEWTQDRAKPVTQIVSAEAWGRADCDVKLVEKSFETDTNLNFQNLSVIGFRILLLKVAGFNLLMTLRLWSSRAKRSGSGATNFSLLKQAGDVEENPGPTSATMDWIWRILFLVGAATGAHSGPEVQLLESGGGLVQPGGSLRLSCAASGFSFSSYALSWVRQAPGKGLEWVSSIGENDGTTDYADAVKGRFTISRDNSKNTLYLQMNSLRVEDTAVYYCVKDGIHWGQGTLVTVSSGSGGGGSGGGGSGGGGSFEEVQLVESGPGLVKPSETLSLTCTVSGFSLTRFGVHWVRQPPGKGLEWLGVIWRGGSTDYNAAFMSRLTISKDNSKNQVSLKLSSVTAADTAVYYCSNHYYGSSDYALDNWGQGTLVTVSSTRIQNPDPAVYQLRDSKSSDKSVCLFTDFDSQTNVSQSKDSDVYITDKCVLDMRSMDFKSNSAVAWSNKSDFACANAFNNSIIPEDTFFPSPESSCGFTSESYQQGVLSATILYEILLGKATLYAVLVSALVLMAMVKRKDSRG

SEQ ID NO: 45216 - protein, 1124 aa, synthetic construct
MGPRLLFWALLCLLGTGPVEAGVTQSPTHLIKTRGQQATLRCSPISGHTSVYWYQQALGLGLQFLLWYDEGEERNRGNFPPRFSGRQFPNYSSELNVNALELEDSALYLCASSLGGPRGLAGLRGDEQFFGPGTRLTVLEGTGGGGSGGGEFDIQMTQSPSSLSASVGDRVTITCRASQDVRNIVVWFQQKPGKAPKLLIYSGSYRYSGVPSRFSGSGSGTDFTLTISSLQPEDFATYYCQQHYSPPYTFGQGTKVEIKRLEDLKNVFPPEVAVFEPSEAEISHTQKATLVCLATGFYPDHVELSWWVNGKEVHSGVCTDPQPLKEQPALNDSRYCLSSRLRVSATFWQNPRNHFRCQVQFYGLSENDEWTQDRAKPVTQIVSAEAWGRADCDVKLVEKSFETDTNLNFQNLSVIGFRILLLKVAGFNLLMTLRLWSSRAKRSGSGATNFSLLKQAGDVEENPGPTSATMDWIWRILFLVGAATGAHSGPEVQLVESGGGLVQAGGSLRLSCAASGRTFSMGWFRQAPGKEREFVAAITYSGGSPYYADSVKGRFTISRDNAKNTVYLQMNSLKPEDTAVYYCAANPTYGSDWNAENWGQGTQVTVSSGSGGGGSGGGGSGGGGSFEEVQLVESGPGLVKPSETLSLTCTVSGFSLTRFGVHWVRQPPGKGLEWLGVIWRGGSTDYNAAFMSRLTISKDNSKNQVSLKLSSVTAADTAVYYCSNHYYGSSDYALDNWGQGTLVTVSSTRIQNPDPAVYQLRDSKSSDKSVCLFTDFDSQTNVSQSKDSDVYITDKCVLDMRSMDFKSNSAVAWSNKSDFACANAFNNSIIPEDTFFPSPESSCGFTSESYQQGVLSATILYEILLGKATLYAVLVSALVLMAMVKRKDSRGRAKRSGSGVKQTLNFDLLKLAGDVESNPGPSRGHMTEYKPTVRLATRDDVPRAVRTLAAAFADYPATRHTVDPDRHIERVTELQELFLTRVGLDIGKVWVADDGAAVAVWTTPESVEAGAVFAEIGPRMAELSGSRLAAQQQMEGLLAPHRPKEPAWFLATVGVSPDHQGKGLGSAVVLPGVEAAERAGVPAFLETSAPRNLPFYERLGFTVTADVEVPEGPRTWCMTRKPGA

SEQ ID NO: 45217 - protein, 1123 aa, synthetic construct
MGPRLLFWALLCLLGTGPVEAGVTQSPTHLIKTRGQQATLRCSPISGHTSVYWYQQALGLGLQFLLWYDEGEERNRGNFPPRFSGRQFPNYSSELNVNALELEDSALYLCASSLGGDELGADGNEQFFGPGTRLTVLEGTGGGGSGGGSEFDIQMTQSPSSLSASVGDRVTITCRASQDVRNIVVWFQQKPGKAPKLLIYSGSYRYSGVPSRFSGSGSGTDFTLTISSLQPEDFATYYCQQHYSPPYTFGQGTKVEIKRLEDLKNVFPPEVAVFEPSEAEISHTQKATLVCLATGFYPDHVELSWWVNGKEVHSGVCTDPQPLKEQPALNDSRYCLSSRLRVSATFWQNPRNHFRCQVQFYGLSENDEWTQDRAKPVTQIVSAEAWGRADCDVKLVEKSFETDTNLNFQNLSVIGFRILLLKVAGFNLLMTLRLWSSRAKRSGSGATNFSLLKQAGDVEENPGPTSATMDWIWRILFLVGAATGAHSGPEVQLVESGGGLVQAGGSLRLSCAASGRTFSMGWFRQAPGKEREFVAAITYSGGSPYYADSVKGRFTISRDNAKNTVYLQMNSLKPEDTAVYYCAANPTYGSDWNAENWGQGTQVTVSSGSGGGGSGGGGSGGGGSFEEVQLVESGPGLVKPSETLSLTCTVSGFSLTRFGVHWVRQPPGKGLEWLGVIWRGGSTDYNAAFMSRLTISKDNSKNQVSLKLSSVTAADTAVYYCSNHYYGSSDYALDNWGQGTLVTVSSTRIQNPDPAVYQLRDSKSSDKSVCLFTDFDSQTNVSQSKDSDVYITDKCVLDMRSMDFKSNSAVAWSNKSDFACANAFNNSIIPEDTFFPSPESSCGFTSESYQQGVLSATILYEILLGKATLYAVLVSALVLMAMVKRKDSRGRAKRSGSGVKQTLNFDLLKLAGDVESNPGPSRGHMTEYKPTVRLATRDDVPRAVRTLAAAFADYPATRHTVDPDRHIERVTELQELFLTRVGLDIGKVWVADDGAAVAVWTTPESVEAGAVFAEIGPRMAELSGSRLAAQQQMEGLLAPHRPKEPAWFLATVGVSPDHQGKGLGSAVVLPGVEAAERAGVPAFLETSAPRNLPFYERLGFTVTADVEVPEGPRTWCMTRKPGA

SEQ ID NO: 45218 - protein, 948 aa, synthetic construct
MALPVTALLLPLALLLHAARPDIQMTQSPSSLSASVGDRVTITCRASQDVRNIVVWFQQKPGKAPKLLIYSGSYRYSGVPSRFSGSGSGTDFTLTISSLQPEDFATYYCQQHYSPPYTFGQGTKVEIKRLEDLKNVFPPEVAVFEPSEAEISHTQKATLVCLATGFYPDHVELSWWVNGKEVHSGVCTDPQPLKEQPALNDSRYCLSSRLRVSATFWQNPRNHFRCQVQFYGLSENDEWTQDRAKPVTQIVSAEAWGRADCDVKLVEKSFETDTNLNFQNLSVIGFRILLLKVAGFNLLMTLRLWSSRAKRSGSGATNFSLLKQAGDVEENPGPTSATMDWIWRILFLVGAATGAHSGPMGSWLEFYHRLNAIDSRLWALGGSEAELAAFEKEIAAFESELQAYKGKGNPEVESLRDHAAHIREWLQAYRHNGSGGGGSGGGGSGGGGSFEEVQLVESGPGLVKPSETLSLTCTVSGFSLTRFGVHWVRQPPGKGLEWLGVIWRGGSTDYNAAFMSRLTISKDNSKNQVSLKLSSVTAADTAVYYCSNHYYGSSDYALDNWGQGTLVTVSSTRIQNPDPAVYQLRDSKSSDKSVCLFTDFDSQTNVSQSKDSDVYITDKCVLDMRSMDFKSNSAVAWSNKSDFACANAFNNSIIPEDTFFPSPESSCGFTSESYQQGVLSATILYEILLGKATLYAVLVSALVLMAMVKRKDSRGRAKRSGSGVKQTLNFDLLKLAGDVESNPGPSRGHMTEYKPTVRLATRDDVPRAVRTLAAAFADYPATRHTVDPDRHIERVTELQELFLTRVGLDIGKVWVADDGAAVAVWTTPESVEAGAVFAEIGPRMAELSGSRLAAQQQMEGLLAPHRPKEPAWFLATVGVSPDHQGKGLGSAVVLPGVEAAERAGVPAFLETSAPRNLPFYERLGFTVTADVEVPEGPRTWCMTRKPGA

SEQ ID NO: 45219 - protein, 948 aa, synthetic construct
MALPVTALLLPLALLLHAARPACMGSWFEFYDRLNAIDARLWALGGSEAELAAFEKEIAAFESELQAYKGKGNPEVENLRVHAAAIREWLQAYRHNGTGGGGSGGGGSGGGGSEFDIQMTQSPSSLSASVGDRVTITCRASQDVRNIVVWFQQKPGKAPKLLIYSGSYRYSGVPSRFSGSGSGTDFTLTISSLQPEDFATYYCQQHYSPPYTFGQGTKVEIKRLEDLKNVFPPEVAVFEPSEAEISHTQKATLVCLATGFYPDHVELSWWVNGKEVHSGVCTDPQPLKEQPALNDSRYCLSSRLRVSATFWQNPRNHFRCQVQFYGLSENDEWTQDRAKPVTQIVSAEAWGRADCDVKLVEKSFETDTNLNFQNLSVIGFRILLLKVAGFNLLMTLRLWSSRAKRSGSGATNFSLLKQAGDVEENPGPTSMDWIWRILFLVGAATGAHSFEEVQLVESGPGLVKPSETLSLTCTVSGFSLTRFGVHWVRQPPGKGLEWLGVIWRGGSTDYNAAFMSRLTISKDNSKNQVSLKLSSVTAADTAVYYCSNHYYGSSDYALDNWGQGTLVTVSSTRIQNPDPAVYQLRDSKSSDKSVCLFTDFDSQTNVSQSKDSDVYITDKCVLDMRSMDFKSNSAVAWSNKSDFACANAFNNSIIPEDTFFPSPESSCGFTSESYQQGVLSATILYEILLGKATLYAVLVSALVLMAMVKRKDSRGRAKRSGSGVKQTLNFDLLKLAGDVESNPGPSRGHMTEYKPTVRLATRDDVPRAVRTLAAAFADYPATRHTVDPDRHIERVTELQELFLTRVGLDIGKVWVADDGAAVAVWTTPESVEAGAVFAEIGPRMAELSGSRLAAQQQMEGLLAPHRPKEPAWFLATVGVSPDHQGKGLGSAVVLPGVEAAERAGVPAFLETSAPRNLPFYERLGFTVTADVEVPEGPRTWCMTRKPGA

SEQ ID NO: 45220 - protein, 1065 aa, synthetic construct
MALPVTALLLPLALLLHAARPACMDPDLEIRAAFLRQRNTALRTEVAELEQEVQRLENEVSQYETRYGPLGGGKGTGGGGSGGGGSGGGGSEFDIQMTQSPSSLSASVGDRVTITCRASQDVRNIVVWFQQKPGKAPKLLIYSGSYRYSGVPSRFSGSGSGTDFTLTISSLQPEDFATYYCQQHYSPPYTFGQGTKVEIKRLEDLKNVFPPEVAVFEPSEAEISHTQKATLVCLATGFYPDHVELSWWVNGKEVHSGVCTDPQPLKEQPALNDSRYCLSSRLRVSATFWQNPRNHFRCQVQFYGLSENDEWTQDRAKPVTQIVSAEAWGRADCDVKLVEKSFETDTNLNFQNLSVIGFRILLLKVAGFNLLMTLRLWSSRAKRSGSGATNFSLLKQAGDVEENPGPTSATMDWIWRILFLVGAATGAHSGPEVQLVESGGGLVQAGGSLRLSCAASGRTFSMGWFRQAPGKEREFVAAITYSGGSPYYADSVKGRFTISRDNAKNTVYLQMNSLKPEDTAVYYCAANPTYGSDWNAENWGQGTQVTVSSGSGGGGSGGGGSGGGGSFEEVQLVESGPGLVKPSETLSLTCTVSGFSLTRFGVHWVRQPPGKGLEWLGVIWRGGSTDYNAAFMSRLTISKDNSKNQVSLKLSSVTAADTAVYYCSNHYYGSSDYALDNWGQGTLVTVSSTRIQNPDPAVYQLRDSKSSDKSVCLFTDFDSQTNVSQSKDSDVYITDKCVLDMRSMDFKSNSAVAWSNKSDFACANAFNNSIIPEDTFFPSPESSCGFTSESYQQGVLSATILYEILLGKATLYAVLVSALVLMAMVKRKDSRGRAKRSGSGVKQTLNFDLLKLAGDVESNPGPSRGHMTEYKPTVRLATRDDVPRAVRTLAAAFADYPATRHTVDPDRHIERVTELQELFLTRVGLDIGKVWVADDGAAVAVWTTPESVEAGAVFAEIGPRMAELSGSRLAAQQQMEGLLAPHRPKEPAWFLATVGVSPDHQGKGLGSAVVLPGVEAAERAGVPAFLETSAPRNLPFYERLGFTVTADVEVPEGPRTWCMTRKPGA

SEQ ID NO: 45221 - protein, 948 aa, synthetic construct
MALPVTALLLPLALLLHAARPDIQMTQSPSSLSASVGDRVTITCRASQDVRNIVVWFQQKPGKAPKLLIYSGSYRYSGVPSRFSGSGSGTDFTLTISSLQPEDFATYYCQQHYSPPYTFGQGTKVEIKRLEDLKNVFPPEVAVFEPSEAEISHTQKATLVCLATGFYPDHVELSWWVNGKEVHSGVCTDPQPLKEQPALNDSRYCLSSRLRVSATFWQNPRNHFRCQVQFYGLSENDEWTQDRAKPVTQIVSAEAWGRADCDVKLVEKSFETDTNLNFQNLSVIGFRILLLKVAGFNLLMTLRLWSSRAKRSGSGATNFSLLKQAGDVEENPGPTSATMDWIWRILFLVGAATGAHSGPMGSWSEFYDRLHAIHHRLYALGGSEAELAAFEKEIAAFESELQAYKGKGNPEVEALRDTAAFIRTRLQAYRHNGSGGGGSGGGGSGGGGSFEEVQLVESGPGLVKPSETLSLTCTVSGFSLTRFGVHWVRQPPGKGLEWLGVIWRGGSTDYNAAFMSRLTISKDNSKNQVSLKLSSVTAADTAVYYCSNHYYGSSDYALDNWGQGTLVTVSSTRIQNPDPAVYQLRDSKSSDKSVCLFTDFDSQTNVSQSKDSDVYITDKCVLDMRSMDFKSNSAVAWSNKSDFACANAFNNSIIPEDTFFPSPESSCGFTSESYQQGVLSATILYEILLGKATLYAVLVSALVLMAMVKRKDSRGRAKRSGSGVKQTLNFDLLKLAGDVESNPGPSRGHMTEYKPTVRLATRDDVPRAVRTLAAAFADYPATRHTVDPDRHIERVTELQELFLTRVGLDIGKVWVADDGAAVAVWTTPESVEAGAVFAEIGPRMAELSGSRLAAQQQMEGLLAPHRPKEPAWFLATVGVSPDHQGKGLGSAVVLPGVEAAERAGVPAFLETSAPRNLPFYERLGFTVTADVEVPEGPRTWCMTRKPGA

SEQ ID NO: 45222 - protein, 1158 aa, synthetic construct
MALPVTALLLPLALLLHAARPDIQMTQSPSSLSASVGDRVTITCRASQDVRNIVVWFQQKPGKAPKLLIYSGSYRYSGVPSRFSGSGSGTDFTLTISSLQPEDFATYYCQQHYSPPYTFGQGTKVEIKRLEDLKNVFPPEVAVFEPSEAEISHTQKATLVCLATGFYPDHVELSWWVNGKEVHSGVCTDPQPLKEQPALNDSRYCLSSRLRVSATFWQNPRNHFRCQVQFYGLSENDEWTQDRAKPVTQIVSAEAWGRADCDVKLVEKSFETDTNLNFQNLSVIGFRILLLKVAGFNLLMTLRLWSSRAKRSGSGATNFSLLKQAGDVEENPGPTSTMDWIWRILFLVGAATGAHSLFNQEVQIPLTESYCGPCPKNWICYKNNCYQFFDESKNWYESQASCMSQNASLLKVYSKEDQDLLKLVKSAHWMGLVHIPTNGSWQWEDGSILSPNLLTIIEMQKGDCALYASSFKGYIENCSTPNTYICMQRTVSGGGGSGGGGSGGGGDLFNQEVQIPLTESYCGPCPKNWICYKNNCYQFFDESKNWYESQASCMSQNASLLKVYSKEDQDLLKLVKSAHWMGLVHIPTNGSWQWEDGSILSPNLLTIIEMQKGDCALYASSFKGYIENCSTPNTYICMQRTVGSGGGGSGGGGSGGGGSFEEVQLVESGPGLVKPSETLSLTCTVSGFSLTRFGVHWVRQPPGKGLEWLGVIWRGGSTDYNAAFMSRLTISKDNSKNQVSLKLSSVTAADTAVYYCSNHYYGSSDYALDNWGQGTLVTVSSTRIQNPDPAVYQLRDSKSSDKSVCLFTDFDSQTNVSQSKDSDVYITDKCVLDMRSMDFKSNSAVAWSNKSDFACANAFNNSIIPEDTFFPSPESSCGFTSESYQQGVLSATILYEILLGKATLYAVLVSALVLMAMVKRKDSRGRAKRSGSGVKQTLNFDLLKLAGDVESNPGPSRGHMTEYKPTVRLATRDDVPRAVRTLAAAFADYPATRHTVDPDRHIERVTELQELFLTRVGLDIGKVWVADDGAAVAVWTTPESVEAGAVFAEIGPRMAELSGSRLAAQQQMEGLLAPHRPKEPAWFLATVGVSPDHQGKGLGSAVVLPGVEAAERAGVPAFLETSAPRNLPFYERLGFTVTADVEVPEGPRTWCMTRKPGA

SEQ ID NO: 45223 - protein, 621 aa, synthetic construct; identical to SEQ ID NO: 45180

SEQ ID NO: 45224 - protein, 625 aa, synthetic construct
MALPVTALLLPLALLLHAARPDIQMTQSPSSLSASVGDRVTITCRASQDVRNIVVWFQQKPGKAPKLLIYSGSYRYSGVPSRFSGSGSGTDFTLTISSLQPEDFATYYCQQHYSPPYTFGQGTKVEIKRLEIQNPDPAVYQLRDSKSSDKSVCLFTDFDSQTNVSQSKDSDVYITDKCVLDMRSMDFKSNSAVAWSNKSDFACANAFNNSIIPEDTFFPSPESSCDVKLVEKSFETDTNLNFQILYEILLGKATLYAVLVSALVLMAMVKRKDSRGRAKRSGSGVKQTLNFDLLKLAGDVESNPGPTSMDWIWRILFLVGAATGAHSFEEVQLVESGPGLVKPSETLSLTCTVSGFSLTRFGVHWVRQPPGKGLEWLGVIWRGGSTDYNAAFMSRLTISKDNSKNQVSLKLSSVTAADTAVYYCSNHYYGSSDYALDNWGQGTLVTVSSTREDLKNVFPPEVAVFEPSEAEISHTQKATLVCLATGFYPDHVELSWWVNGKEVHSGVCTDPQPLKEQPALNDSRYCLSSRLRVSATFWQNPRNHFRCQVQFYGLSENDEWTQDRAKPVTQIVSAEAWGRADCGFTSESYQQGVLSATNLSVIGFRILLLKVAGFNLLMTLRLWSS

SEQ ID NO: 45225 - protein, 756 aa, synthetic construct
MALPVTALLLPLALLLHAARPEVQLVESGGGLVQPGGSLRLSCAASGFSFSDFWMSWVRQAPGKGLEWVATISQAGSEKDYVDSVKGRFTISRDNAKKSLYLQMNSLRAEDTAVYYCASGVYSFDYRGQGTLVTVSSGTGGGGSGGGGSGGGGSEFDIQMTQSPSSLSASVGDRVTITCRASQDVRNIVVWFQQKPGKAPKLLIYSGSYRYSGVPSRFSGSGSGTDFTLTISSLQPEDFATYYCQQHYSPPYTFGQGTKVEIKRLEDLKNVFPPEVAVFEPSEAEISHTQKATLVCLATGFYPDHVELSWWVNGKEVHSGVCTDPQPLKEQPALNDSRYCLSSRLRVSATFWQNPRNHFRCQVQFYGLSENDEWTQDRAKPVTQIVSAEAWGRADCGFTSESYQQGVLSATNLSVIGFRILLLKVAGFNLLMTLRLWSSRAKRSGSGATNFSLLKQAGDVEENPGPTSMDWIWRILFLVGAATGAHSFEEVQLVESGPGLVKPSETLSLTCTVSGFSLTRFGVHWVRQPPGKGLEWLGVIWRGGSTDYNAAFMSRLTISKDNSKNQVSLKLSSVTAADTAVYYCSNHYYGSSDYALDNWGQGTLVTVSSTRIQNPDPAVYQLRDSKSSDKSVCLFTDFDSQTNVSQSKDSDVYITDKCVLDMRSMDFKSNSAVAWSNKSDFACANAFNNSIIPEDTFFPSPESSCDVKLVEKSFETDTNLNFQILYEILLGKATLYAVLVSALVLMAMVKRKDSRG

SEQ ID NO: 45226 - protein, 760 aa, synthetic construct
MALPVTALLLPLALLLHAARPEVQLVESGGGLVQPGGSLRLSCAASGFSFSDFWMSWVRQAPGKGLEWVATISQAGSEKDYVDSVKGRFTISRDNAKKSLYLQMNSLRAEDTAVYYCASGVYSFDYRGQGTLVTVSSGTGGGGSGGGGSGGGGSEFDIQMTQSPSSLSASVGDRVTITCRASQDVRNIVVWFQQKPGKAPKLLIYSGSYRYSGVPSRFSGSGSGTDFTLTISSLQPEDFATYYCQQHYSPPYTFGQGTKVEIKRLEIQNPDPAVYQLRDSKSSDKSVCLFTDFDSQTNVSQSKDSDVYITDKCVLDMRSMDFKSNSAVAWSNKSDFACANAFNNSIIPEDTFFPSPESSCDVKLVEKSFETDTNLNFQILYEILLGKATLYAVLVSALVLMAMVKRKDSRGRAKRSGSGVKQTLNFDLLKLAGDVESNPGPTSMDWIWRILFLVGAATGAHSFEEVQLVESGPGLVKPSETLSLTCTVSGFSLTRFGVHWVRQPPGKGLEWLGVIWRGGSTDYNAAFMSRLTISKDNSKNQVSLKLSSVTAADTAVYYCSNHYYGSSDYALDNWGQGTLVTVSSTREDLKNVFPPEVAVFEPSEAEISHTQKATLVCLATGFYPDHVELSWWVNGKEVHSGVCTDPQPLKEQPALNDSRYCLSSRLRVSATFWQNPRNHFRCQVQFYGLSENDEWTQDRAKPVTQIVSAEAWGRADCGFTSESYQQGVLSATNLSVIGFRILLLKVAGFNLLMTLRLWSS

SEQ ID NO: 45227 - protein, 893 aa, synthetic construct
MALPVTALLLPLALLLHAARPEVQLVESGGGLVQPGGSLRLSCAASGFSFSDFWMSWVRQAPGKGLEWVATISQAGSEKDYVDSVKGRFTISRDNAKKSLYLQMNSLRAEDTAVYYCASGVYSFDYRGQGTLVTVSSGTGGGGSGGGGSGGGGSEFDIQMTQSPSSLSASVGDRVTITCRASQDVRNIVVWFQQKPGKAPKLLIYSGSYRYSGVPSRFSGSGSGTDFTLTISSLQPEDFATYYCQQHYSPPYTFGQGTKVEIKRLEDLKNVFPPEVAVFEPSEAEISHTQKATLVCLATGFYPDHVELSWWVNGKEVHSGVCTDPQPLKEQPALNDSRYCLSSRLRVSATFWQNPRNHFRCQVQFYGLSENDEWTQDRAKPVTQIVSAEAWGRADCGFTSESYQQGVLSATNLSVIGFRILLLKVAGFNLLMTLRLWSSRAKRSGSGATNFSLLKQAGDVEENPGPTSMDWIWRILFLVGAATGAHSGPQLQLQESGPGLVKPSETLSLTCTVSGDSISSGDYYWGWIRQPPGKGLEWIGHIYYSGVTYYNPSLKSRVTISVDTSRNQFSLKLSSVTAADTAVYYCTREDSSNWRSRGQGTLVTVSSGSGGGGSGGGGSGGGGSFEEVQLVESGPGLVKPSETLSLTCTVSGFSLTRFGVHWVRQPPGKGLEWLGVIWRGGSTDYNAAFMSRLTISKDNSKNQVSLKLSSVTAADTAVYYCSNHYYGSSDYALDNWGQGTLVTVSSTRIQNPDPAVYQLRDSKSSDKSVCLFTDFDSQTNVSQSKDSDVYITDKCVLDMRSMDFKSNSAVAWSNKSDFACANAFNNSIIPEDTFFPSPESSCDVKLVEKSFETDTNLNFQILYEILLGKATLYAVLVSALVLMAMVKRKDSRG

SEQ ID NO: 45228 - protein, 897 aa, synthetic construct
MALPVTALLLPLALLLHAARPEVQLVESGGGLVQPGGSLRLSCAASGFSFSDFWMSWVRQAPGKGLEWVATISQAGSEKDYVDSVKGRFTISRDNAKKSLYLQMNSLRAEDTAVYYCASGVYSFDYRGQGTLVTVSSGTGGGGSGGGGSGGGGSEFDIQMTQSPSSLSASVGDRVTITCRASQDVRNIVVWFQQKPGKAPKLLIYSGSYRYSGVPSRFSGSGSGTDFTLTISSLQPEDFATYYCQQHYSPPYTFGQGTKVEIKRLEIQNPDPAVYQLRDSKSSDKSVCLFTDFDSQTNVSQSKDSDVYITDKCVLDMRSMDFKSNSAVAWSNKSDFACANAFNNSIIPEDTFFPSPESSCDVKLVEKSFETDTNLNFQILYEILLGKATLYAVLVSALVLMAMVKRKDSRGRAKRSGSGVKQTLNFDLLKLAGDVESNPGPTSMDWIWRILFLVGAATGAHSGPQLQLQESGPGLVKPSETLSLTCTVSGDSISSGDYYWGWIRQPPGKGLEWIGHIYYSGVTYYNPSLKSRVTISVDTSRNQFSLKLSSVTAADTAVYYCTREDSSNWRSRGQGTLVTVSSGSGGGGSGGGGSGGGGSFEEVQLVESGPGLVKPSETLSLTCTVSGFSLTRFGVHWVRQPPGKGLEWLGVIWRGGSTDYNAAFMSRLTISKDNSKNQVSLKLSSVTAADTAVYYCSNHYYGSSDYALDNWGQGTLVTVSSTREDLKNVFPPEVAVFEPSEAEISHTQKATLVCLATGFYPDHVELSWWVNGKEVHSGVCTDPQPLKEQPALNDSRYCLSSRLRVSATFWQNPRNHFRCQVQFYGLSENDEWTQDRAKPVTQIVSAEAWGRADCGFTSESYQQGVLSATNLSVIGFRILLLKVAGFNLLMTLRLWSS

SEQ ID NO: 45229 - protein, 725 aa, synthetic construct
MALPVTALLLPLALLLHAARPDIQMTQSPSSLSASVGDRVTITCRASQDVRNIVVWFQQKPGKAPKLLIYSGSYRYSGVPSRFSGSGSGTDFTLTISSLQPEDFATYYCQQHYSPPYTFGQGTKVEIKRLEDLKNVFPPEVAVFEPSEAEISHTQKATLVCLATGFYPDHVELSWWVNGKEVHSGVCTDPQPLKEQPALNDSRYCLSSRLRVSATFWQNPRNHFRCQVQFYGLSENDEWTQDRAKPVTQIVSAEAWGRADDVIKIHWQEKKSNTILGSQEGNTMKTNDTYMKFSWLTVPEKSLDKEHRCIVRHENNKNGVDQEIIFPPIKTDVITMDPKDNCSKDANDTLLLQLTNTSAYYMYLLLLLKSVVYFAIITCCLLMAMVKRKDSRGRAKRSGSGATNFSLLKQAGDVEENPGPTSMDWIWRILFLVGAATGAHSFEEVQLVESGPGLVKPSETLSLTCTVSGFSLTRFGVHWVRQPPGKGLEWLGVIWRGGSTDYNAAFMSRLTISKDNSKNQVSLKLSSVTAADTAVYYCSNHYYGSSDYALDNWGQGTLVTVSSTRIQNPDPAVYQLRDSKSSDKSVCLFTDFDSQTNVSQSKDSDVYITDKCVLDMRSMDFKSNSAVAWSNKSDFACANAFNNSIIPEDTFFPSPESSDSTDHVKPKETENTKQPSKSCHKPKAIVHTEKVNMMSLTVLGLRMLFAKTVAVNFLLTAKLFFLLTA

SEQ ID NO: 45230 - protein, 729 aa, synthetic construct
MALPVTALLLPLALLLHAARPDIQMTQSPSSLSASVGDRVTITCRASQDVRNIVVWFQQKPGKAPKLLIYSGSYRYSGVPSRFSGSGSGTDFTLTISSLQPEDFATYYCQQHYSPPYTFGQGTKVEIKRLEIQNPDPAVYQLRDSKSSDKSVCLFTDFDSQTNVSQSKDSDVYITDKCVLDMRSMDFKSNSAVAWSNKSDFACANAFNNSIIPEDTFFPSPESSDSTDHVKPKETENTKQPSKSCHKPKAIVHTEKVNMMSLTVLGLRMLFAKTVAVNFLLTAKLFFLLTARAKRSGSGVKQTLNFDLLKLAGDVESNPGPTSMDWIWRILFLVGAATGAHSFEEVQLVESGPGLVKPSETLSLTCTVSGFSLTRFGVHWVRQPPGKGLEWLGVIWRGGSTDYNAAFMSRLTISKDNSKNQVSLKLSSVTAADTAVYYCSNHYYGSSDYALDNWGQGTLVTVSSTREDLKNVFPPEVAVFEPSEAEISHTQKATLVCLATGFYPDHVELSWWVNGKEVHSGVCTDPQPLKEQPALNDSRYCLSSRLRVSATFWQNPRNHFRCQVQFYGLSENDEWTQDRAKPVTQIVSAEAWGRADDVIKIHWQEKKSNTILGSQEGNTMKTNDTYMKFSWLTVPEKSLDKEHRCIVRHENNKNGVDQEIIFPPIKTDVITMDPKDNCSKDANDTLLLQLTNTSAYYMYLLLLLKSVVYFAIITCCLLMAMVKRKDSRG

SEQ ID NO: 45231 - protein, 860 aa, synthetic construct
MALPVTALLLPLALLLHAARPEVQLVESGGGLVQPGGSLRLSCAASGFSFSDFWMSWVRQAPGKGLEWVATISQAGSEKDYVDSVKGRFTISRDNAKKSLYLQMNSLRAEDTAVYYCASGVYSFDYRGQGTLVTVSSGTGGGGSGGGGSGGGGSEFDIQMTQSPSSLSASVGDRVTITCRASQDVRNIVVWFQQKPGKAPKLLIYSGSYRYSGVPSRFSGSGSGTDFTLTISSLQPEDFATYYCQQHYSPPYTFGQGTKVEIKRLEDLKNVFPPEVAVFEPSEAEISHTQKATLVCLATGFYPDHVELSWWVNGKEVHSGVCTDPQPLKEQPALNDSRYCLSSRLRVSATFWQNPRNHFRCQVQFYGLSENDEWTQDRAKPVTQIVSAEAWGRADDVIKIHWQEKKSNTILGSQEGNTMKTNDTYMKFSWLTVPEKSLDKEHRCIVRHENNKNGVDQEIIFPPIKTDVITMDPKDNCSKDANDTLLLQLTNTSAYYMYLLLLLKSVVYFAIITCCLLMAMVKRKDSRGRAKRSGSGATNFSLLKQAGDVEENPGPTSMDWIWRILFLVGAATGAHSFEEVQLVESGPGLVKPSETLSLTCTVSGFSLTRFGVHWVRQPPGKGLEWLGVIWRGGSTDYNAAFMSRLTISKDNSKNQVSLKLSSVTAADTAVYYCSNHYYGSSDYALDNWGQGTLVTVSSTRIQNPDPAVYQLRDSKSSDKSVCLFTDFDSQTNVSQSKDSDVYITDKCVLDMRSMDFKSNSAVAWSNKSDFACANAFNNSIIPEDTFFPSPESSDSTDHVKPKETENTKQPSKSCHKPKAIVHTEKVNMMSLTVLGLRMLFAKTVAVNFLLTAKLFFLLTA

SEQ ID NO: 45232 - protein, 864 aa, synthetic construct
MALPVTALLLPLALLLHAARPEVQLVESGGGLVQPGGSLRLSCAASGFSFSDFWMSWVRQAPGKGLEWVATISQAGSEKDYVDSVKGRFTISRDNAKKSLYLQMNSLRAEDTAVYYCASGVYSFDYRGQGTLVTVSSGTGGGGSGGGGSGGGGSEFDIQMTQSPSSLSASVGDRVTITCRASQDVRNIVVWFQQKPGKAPKLLIYSGSYRYSGVPSRFSGSGSGTDFTLTISSLQPEDFATYYCQQHYSPPYTFGQGTKVEIKRLEIQNPDPAVYQLRDSKSSDKSVCLFTDFDSQTNVSQSKDSDVYITDKCVLDMRSMDFKSNSAVAWSNKSDFACANAFNNSIIPEDTFFPSPESSDSTDHVKPKETENTKQPSKSCHKPKAIVHTEKVNMMSLTVLGLRMLFAKTVAVNFLLTAKLFFLLTARAKRSGSGVKQTLNFDLLKLAGDVESNPGPTSMDWIWRILFLVGAATGAHSFEEVQLVESGPGLVKPSETLSLTCTVSGFSLTRFGVHWVRQPPGKGLEWLGVIWRGGSTDYNAAFMSRLTISKDNSKNQVSLKLSSVTAADTAVYYCSNHYYGSSDYALDNWGQGTLVTVSSTREDLKNVFPPEVAVFEPSEAEISHTQKATLVCLATGFYPDHVELSWWVNGKEVHSGVCTDPQPLKEQPALNDSRYCLSSRLRVSATFWQNPRNHFRCQVQFYGLSENDEWTQDRAKPVTQIVSAEAWGRADDVIKIHWQEKKSNTILGSQEGNTMKTNDTYMKFSWLTVPEKSLDKEHRCIVRHENNKNGVDQEIIFPPIKTDVITMDPKDNCSKDANDTLLLQLTNTSAYYMYLLLLLKSVVYFAIITCCLLMAMVKRKDSRG

SEQ ID NO: 45233 - protein, 997 aa, synthetic construct
MALPVTALLLPLALLLHAARPEVQLVESGGGLVQPGGSLRLSCAASGFSFSDFWMSWVRQAPGKGLEWVATISQAGSEKDYVDSVKGRFTISRDNAKKSLYLQMNSLRAEDTAVYYCASGVYSFDYRGQGTLVTVSSGTGGGGSGGGGSGGGGSEFDIQMTQSPSSLSASVGDRVTITCRASQDVRNIVVWFQQKPGKAPKLLIYSGSYRYSGVPSRFSGSGSGTDFTLTISSLQPEDFATYYCQQHYSPPYTFGQGTKVEIKRLEDLKNVFPPEVAVFEPSEAEISHTQKATLVCLATGFYPDHVELSWWVNGKEVHSGVCTDPQPLKEQPALNDSRYCLSSRLRVSATFWQNPRNHFRCQVQFYGLSENDEWTQDRAKPVTQIVSAEAWGRADDVIKIHWQEKKSNTILGSQEGNTMKTNDTYMKFSWLTVPEKSLDKEHRCIVRHENNKNGVDQEIIFPPIKTDVITMDPKDNCSKDANDTLLLQLTNTSAYYMYLLLLLKSVVYFAIITCCLLMAMVKRKDSRGRAKRSGSGATNFSLLKQAGDVEENPGPTSMDWIWRILFLVGAATGAHSGPQLQLQESGPGLVKPSETLSLTCTVSGDSISSGDYYWGWIRQPPGKGLEWIGHIYYSGVTYYNPSLKSRVTISVDTSRNQFSLKLSSVTAADTAVYYCTREDSSNWRSRGQGTLVTVSSGSGGGGSGGGGSGGGGSFEEVQLVESGPGLVKPSETLSLTCTVSGFSLTRFGVHWVRQPPGKGLEWLGVIWRGGSTDYNAAFMSRLTISKDNSKNQVSLKLSSVTAADTAVYYCSNHYYGSSDYALDNWGQGTLVTVSSTRIQNPDPAVYQLRDSKSSDKSVCLFTDFDSQTNVSQSKDSDVYITDKCVLDMRSMDFKSNSAVAWSNKSDFACANAFNNSIIPEDTFFPSPESSDSTDHVKPKETENTKQPSKSCHKPKAIVHTEKVNMMSLTVLGLRMLFAKTVAVNFLLTAKLFFLLTA

SEQ ID NO: 45234 - protein, 1001 aa, synthetic construct
MALPVTALLLPLALLLHAARPEVQLVESGGGLVQPGGSLRLSCAASGFSFSDFWMSWVRQAPGKGLEWVATISQAGSEKDYVDSVKGRFTISRDNAKKSLYLQMNSLRAEDTAVYYCASGVYSFDYRGQGTLVTVSSGTGGGGSGGGGSGGGGSEFDIQMTQSPSSLSASVGDRVTITCRASQDVRNIVVWFQQKPGKAPKLLIYSGSYRYSGVPSRFSGSGSGTDFTLTISSLQPEDFATYYCQQHYSPPYTFGQGTKVEIKRLEIQNPDPAVYQLRDSKSSDKSVCLFTDFDSQTNVSQSKDSDVYITDKCVLDMRSMDFKSNSAVAWSNKSDFACANAFNNSIIPEDTFFPSPESSDSTDHVKPKETENTKQPSKSCHKPKAIVHTEKVNMMSLTVLGLRMLFAKTVAVNFLLTAKLFFLLTARAKRSGSGVKQTLNFDLLKLAGDVESNPGPTSMDWIWRILFLVGAATGAHSGPQLQLQESGPGLVKPSETLSLTCTVSGDSISSGDYYWGWIRQPPGKGLEWIGHIYYSGVTYYNPSLKSRVTISVDTSRNQFSLKLSSVTAADTAVYYCTREDSSNWRSRGQGTLVTVSSGSGGGGSGGGGSGGGGSFEEVQLVESGPGLVKPSETLSLTCTVSGFSLTRFGVHWVRQPPGKGLEWLGVIWRGGSTDYNAAFMSRLTISKDNSKNQVSLKLSSVTAADTAVYYCSNHYYGSSDYALDNWGQGTLVTVSSTREDLKNVFPPEVAVFEPSEAEISHTQKATLVCLATGFYPDHVELSWWVNGKEVHSGVCTDPQPLKEQPALNDSRYCLSSRLRVSATFWQNPRNHFRCQVQFYGLSENDEWTQDRAKPVTQIVSAEAWGRADDVIKIHWQEKKSNTILGSQEGNTMKTNDTYMKFSWLTVPEKSLDKEHRCIVRHENNKNGVDQEIIFPPIKTDVITMDPKDNCSKDANDTLLLQLTNTSAYYMYLLLLLKSVVYFAIITCCLLMAMVKRKDSRG

SEQ ID NO: 45235 - protein, 723 aa, synthetic construct
MALPVTALLLPLALLLHAARPDIQMTQSPSSLSASVGDRVTITCRASQDVRNIVVWFQQKPGKAPKLLIYSGSYRYSGVPSRFSGSGSGTDFTLTISSLQPEDFATYYCQQHYSPPYTFGQGTKVEIKRLEDLKNVFPPEVAVFEPSEAEISHTQKATLVCLATGFYPDHVELSWWVNGKEVHSGVCTDPQPLKEQPALNDSRYCLSSRLRVSATFWQNPRNHFRCQVQFYGLSENDEWTQDRAKPVTQIVSAEAWGRADDVIKIHWQEKKSNTILGSQEGNTMKTNDTYMKFSWLTVPEKSLDKEHRCIVRHENNKNGVDQEIIFPPIKTDVITMDPKDNCSKDANDTLLLQLTNTSAYYMYLLLLLKSVVYFAIITCCLLRRTAFCCNGEKSRAKRSGSGATNFSLLKQAGDVEENPGPTSMDWIWRILFLVGAATGAHSFEEVQLVESGPGLVKPSETLSLTCTVSGFSLTRFGVHWVRQPPGKGLEWLGVIWRGGSTDYNAAFMSRLTISKDNSKNQVSLKLSSVTAADTAVYYCSNHYYGSSDYALDNWGQGTLVTVSSTRIQNPDPAVYQLRDSKSSDKSVCLFTDFDSQTNVSQSKDSDVYITDKCVLDMRSMDFKSNSAVAWSNKSDFACANAFNNSIIPEDTFFPSPESSDSTDHVKPKETENTKQPSKSCHKPKAIVHTEKVNMMSLTVLGLRMLFAKTVAVNFLLTAKLFFL

SEQ ID NO: 45236 - protein, 727 aa, synthetic construct
MALPVTALLLPLALLLHAARPDIQMTQSPSSLSASVGDRVTITCRASQDVRNIVVWFQQKPGKAPKLLIYSGSYRYSGVPSRFSGSGSGTDFTLTISSLQPEDFATYYCQQHYSPPYTFGQGTKVEIKRLEIQNPDPAVYQLRDSKSSDKSVCLFTDFDSQTNVSQSKDSDVYITDKCVLDMRSMDFKSNSAVAWSNKSDFACANAFNNSIIPEDTFFPSPESSDSTDHVKPKETENTKQPSKSCHKPKAIVHTEKVNMMSLTVLGLRMLFAKTVAVNFLLTAKLFFLRAKRSGSGVKQTLNFDLLKLAGDVESNPGPTSMDWIWRILFLVGAATGAHSFEEVQLVESGPGLVKPSETLSLTCTVSGFSLTRFGVHWVRQPPGKGLEWLGVIWRGGSTDYNAAFMSRLTISKDNSKNQVSLKLSSVTAADTAVYYCSNHYYGSSDYALDNWGQGTLVTVSSTREDLKNVFPPEVAVFEPSEAEISHTQKATLVCLATGFYPDHVELSWWVNGKEVHSGVCTDPQPLKEQPALNDSRYCLSSRLRVSATFWQNPRNHFRCQVQFYGLSENDEWTQDRAKPVTQIVSAEAWGRADDVIKIHWQEKKSNTILGSQEGNTMKTNDTYMKFSWLTVPEKSLDKEHRCIVRHENNKNGVDQEIIFPPIKTDVITMDPKDNCSKDANDTLLLQLTNTSAYYMYLLLLLKSVVYFAIITCCLLRRTAFCCNGEKS

SEQ ID NO: 45237 - protein, 858 aa, synthetic construct
MALPVTALLLPLALLLHAARPEVQLVESGGGLVQPGGSLRLSCAASGFSFSDFWMSWVRQAPGKGLEWVATISQAGSEKDYVDSVKGRFTISRDNAKKSLYLQMNSLRAEDTAVYYCASGVYSFDYRGQGTLVTVSSGTGGGGSGGGGSGGGGSEFDIQMTQSPSSLSASVGDRVTITCRASQDVRNIVVWFQQKPGKAPKLLIYSGSYRYSGVPSRFSGSGSGTDFTLTISSLQPEDFATYYCQQHYSPPYTFGQGTKVEIKRLEDLKNVFPPEVAVFEPSEAEISHTQKATLVCLATGFYPDHVELSWWVNGKEVHSGVCTDPQPLKEQPALNDSRYCLSSRLRVSATFWQNPRNHFRCQVQFYGLSENDEWTQDRAKPVTQIVSAEAWGRADDVIKIHWQEKKSNTILGSQEGNTMKTNDTYMKFSWLTVPEKSLDKEHRCIVRHENNKNGVDQEIIFPPIKTDVITMDPKDNCSKDANDTLLLQLTNTSAYYMYLLLLLKSVVYFAIITCCLLRRTAFCCNGEKSRAKRSGSGATNFSLLKQAGDVEENPGPTSMDWIWRILFLVGAATGAHSFEEVQLVESGPGLVKPSETLSLTCTVSGFSLTRFGVHWVRQPPGKGLEWLGVIWRGGSTDYNAAFMSRLTISKDNSKNQVSLKLSSVTAADTAVYYCSNHYYGSSDYALDNWGQGTLVTVSSTRIQNPDPAVYQLRDSKSSDKSVCLFTDFDSQTNVSQSKDSDVYITDKCVLDMRSMDFKSNSAVAWSNKSDFACANAFNNSIIPEDTFFPSPESSDSTDHVKPKETENTKQPSKSCHKPKAIVHTEKVNMMSLTVLGLRMLFAKTVAVNFLLTAKLFFL

SEQ ID NO: 45238 - protein, 995 aa, synthetic construct
MALPVTALLLPLALLLHAARPEVQLVESGGGLVQPGGSLRLSCAASGFSFSDFWMSWVRQAPGKGLEWVATISQAGSEKDYVDSVKGRFTISRDNAKKSLYLQMNSLRAEDTAVYYCASGVYSFDYRGQGTLVTVSSGTGGGGSGGGGSGGGGSEFDIQMTQSPSSLSASVGDRVTITCRASQDVRNIVVWFQQKPGKAPKLLIYSGSYRYSGVPSRFSGSGSGTDFTLTISSLQPEDFATYYCQQHYSPPYTFGQGTKVEIKRLEDLKNVFPPEVAVFEPSEAEISHTQKATLVCLATGFYPDHVELSWWVNGKEVHSGVCTDPQPLKEQPALNDSRYCLSSRLRVSATFWQNPRNHFRCQVQFYGLSENDEWTQDRAKPVTQIVSAEAWGRADDVIKIHWQEKKSNTILGSQEGNTMKTNDTYMKFSWLTVPEKSLDKEHRCIVRHENNKNGVDQEIIFPPIKTDVITMDPKDNCSKDANDTLLLQLTNTSAYYMYLLLLLKSVVYFAIITCCLLRRTAFCCNGEKSRAKRSGSGATNFSLLKQAGDVEENPGPTSMDWIWRILFLVGAATGAHSGPQLQLQESGPGLVKPSETLSLTCTVSGDSISSGDYYWGWIRQPPGKGLEWIGHIYYSGVTYYNPSLKSRVTISVDTSRNQFSLKLSSVTAADTAVYYCTREDSSNWRSRGQGTLVTVSSGSGGGGSGGGGSGGGGSFEEVQLVESGPGLVKPSETLSLTCTVSGFSLTRFGVHWVRQPPGKGLEWLGVIWRGGSTDYNAAFMSRLTISKDNSKNQVSLKLSSVTAADTAVYYCSNHYYGSSDYALDNWGQGTLVTVSSTRIQNPDPAVYQLRDSKSSDKSVCLFTDFDSQTNVSQSKDSDVYITDKCVLDMRSMDFKSNSAVAWSNKSDFACANAFNNSIIPEDTFFPSPESSDSTDHVKPKETENTKQPSKSCHKPKAIVHTEKVNMMSLTVLGLRMLFAKTVAVNFLLTAKLFFL

SEQ ID NO: 45239 - protein, 621 aa, synthetic construct
MALPVTALLLPLALLLHAARPDIQMTQSPSSLSASVGDRVTITCRASQDVRNIVVWFQQKPGKAPKLLIYSGSYRYSGVPSRFSGSGSGTDFTLTISSLQPEDFATYYCQQHYSPPYTFGQGTKVEIKRLEDLKNVFPPEVAVFEPSEAEISHTQKATLVCLATGFYPDHVELSWWVNGKEVHSGVSTDPQPLKEQPALNDSRYCLSSRLRVSATFWQNPRNHFRCQVQFYGLSENDEWTQDRAKPVTQIVSAEAWGRADCDVKLVEKSFETDTNLNFQNLSVIGFRILLLKVAGFNLLMTLRLWSSRAKRSGSGATNFSLLKQAGDVEENPGPTSMDWIWRILFLVGAATGAHSFEEVQLVESGPGLVKPSETLSLTCTVSGFSLTRFGVHWVRQPPGKGLEWLGVIWRGGSTDYNAAFMSRLTISKDNSKNQVSLKLSSVTAADTAVYYCSNHYYGSSDYALDNWGQGTLVTVSSTRIQNPDPAVYQLRDSKSSDKSVCLFTDFDSQTNVSQSKDSDVYITDKTVLDMRSMDFKSNSAVAWSNKSDFACANAFNNSIIPEDTFFPSPESSCGFTSESYQQGVLSATILYEILLGKATLYAVLVSALVLMAMVKRKDSRG

SEQ ID NO: 45240 - protein, 621 aa, synthetic construct
MALPVTALLLPLALLLHAARPDIQMTQSPSSLSASVGDRVTITCRASQDVRNIVVWFQQKPGKAPKLLIYSGSYRYSGVPSRFSGSGSGTDFTLTISSLQPEDFATYYCQQHYSPPYTFGQGTKVEIKRLEDLKNVFPPEVAVFEPSEAEISHTQKATLVCLATGFYPDHVELSWWVNGKEVHSGVSTDPQPLKEQPALNDSRYCLSSRLRVSATFWQNPRNHFRCQVQFYGLSENDEWTQDRAKPVTQIVSAEAWGRADCGFTSESYQQGVLSATNLSVIGFRILLLKVAGFNLLMTLRLWSSRAKRSGSGATNFSLLKQAGDVEENPGPTSMDWIWRILFLVGAATGAHSFEEVQLVESGPGLVKPSETLSLTCTVSGFSLTRFGVHWVRQPPGKGLEWLGVIWRGGSTDYNAAFMSRLTISKDNSKNQVSLKLSSVTAADTAVYYCSNHYYGSSDYALDNWGQGTLVTVSSTRIQNPDPAVYQLRDSKSSDKSVCLFTDFDSQTNVSQSKDSDVYITDKTVLDMRSMDFKSNSAVAWSNKSDFACANAFNNSIIPEDTFFPSPESSCDVKLVEKSFETDTNLNFQILYEILLGKATLYAVLVSALVLMAMVKRKDSRG

SEQ ID NO: 45241 - protein, 725 aa, synthetic construct
MALPVTALLLPLALLLHAARPDIQMTQSPSSLSASVGDRVTITCRASQDVRNIVVWFQQKPGKAPKLLIYSGSYRYSGVPSRFSGSGSGTDFTLTISSLQPEDFATYYCQQHYSPPYTFGQGTKVEIKRLEDLKNVFPPEVAVFEPSEAEISHTQKATLVCLATGFYPDHVELSWWVNGKEVHSGVSTDPQPLKEQPALNDSRYCLSSRLRVSATFWQNPRNHFRCQVQFYGLSENDEWTQDRAKPVTQIVSAEAWGRADDVIKIHWQEKKSNTILGSQEGNTMKTNDTYMKFSWLTVPEKSLDKEHRCIVRHENNKNGVDQEIIFPPIKTDVITMDPKDNCSKDANDTLLLQLTNTSAYYMYLLLLLKSVVYFAIITCCLLMAMVKRKDSRGRAKRSGSGATNFSLLKQAGDVEENPGPTSMDWIWRILFLVGAATGAHSFEEVQLVESGPGLVKPSETLSLTCTVSGFSLTRFGVHWVRQPPGKGLEWLGVIWRGGSTDYNAAFMSRLTISKDNSKNQVSLKLSSVTAADTAVYYCSNHYYGSSDYALDNWGQGTLVTVSSTRIQNPDPAVYQLRDSKSSDKSVCLFTDFDSQTNVSQSKDSDVYITDKTVLDMRSMDFKSNSAVAWSNKSDFACANAFNNSIIPEDTFFPSPESSDSTDHVKPKETENTKQPSKSCHKPKAIVHTEKVNMMSLTVLGLRMLFAKTVAVNFLLTAKLFFLLTA

SEQ ID NO: 45242 - protein, 723 aa, synthetic construct
MALPVTALLLPLALLLHAARPDIQMTQSPSSLSASVGDRVTITCRASQDVRNIVVWFQQKPGKAPKLLIYSGSYRYSGVPSRFSGSGSGTDFTLTISSLQPEDFATYYCQQHYSPPYTFGQGTKVEIKRLEDLKNVFPPEVAVFEPSEAEISHTQKATLVCLATGFYPDHVELSWWVNGKEVHSGVSTDPQPLKEQPALNDSRYCLSSRLRVSATFWQNPRNHFRCQVQFYGLSENDEWTQDRAKPVTQIVSAEAWGRADDVIKIHWQEKKSNTILGSQEGNTMKTNDTYMKFSWLTVPEKSLDKEHRCIVRHENNKNGVDQEIIFPPIKTDVITMDPKDNCSKDANDTLLLQLTNTSAYYMYLLLLLKSVVYFAIITCCLLRRTAFCCNGEKSRAKRSGSGATNFSLLKQAGDVEENPGPTSMDWIWRILFLVGAATGAHSFEEVQLVESGPGLVKPSETLSLTCTVSGFSLTRFGVHWVRQPPGKGLEWLGVIWRGGSTDYNAAFMSRLTISKDNSKNQVSLKLSSVTAADTAVYYCSNHYYGSSDYALDNWGQGTLVTVSSTRIQNPDPAVYQLRDSKSSDKSVCLFTDFDSQTNVSQSKDSDVYITDKTVLDMRSMDFKSNSAVAWSNKSDFACANAFNNSIIPEDTFFPSPESSDSTDHVKPKETENTKQPSKSCHKPKAIVHTEKVNMMSLTVLGLRMLFAKTVAVNFLLTAKLFFL

SEQ ID NO: 45243 - protein, 866 aa, synthetic construct
MALPVTALLLPLALLLHAARPLEEDLKNVFPPEVAVFEPSEAEISHTQKATLVCLATGFYPDHVELSWWVNGKEVHSGVCTDPQPLKEQPALNDSRYCLSSRLRVSATFWQNPRNHFRCQVQFYGLSENDEWTQDRAKPVTQIVSAEAWGRADCGFTSESYQQGVLSATNLSVIGFRILLLKVAGFNLLMTLRLWSSRAKRSGSGATNFSLLKQAGDVEENPGPTSMALPVTALLLPLALLLHAARPDIQMTQSPSSLSASVGDRVTITCRASQDVRNIVVWFQQKPGKAPKLLIYSGSYRYSGVPSRFSGSGSGTDFTLTISSLQPEDFATYYCQQHYSPPYTFGQGTKVEIKRGGGGSGGGGSGGGGSEVQLVESGPGLVKPSETLSLTCTVSGFSLTRFGVHWVRQPPGKGLEWLGVIWRGGSTDYNAAFMSRLTISKDNSKNQVSLKLSSVTAADTAVYYCSNHYYGSSDYALDNWGQGTLVTVSSTRIQNPDPAVYQLRDSKSSDKSVCLFTDFDSQTNVSQSKDSDVYITDKCVLDMRSMDFKSNSAVAWSNKSDFACANAFNNSIIPEDTFFPSPESSCDVKLVEKSFETDTNLNFQILYEVIGFRILLLKVAGFNLLMTLRLWSSRAKRSGSGVKQTLNFDLLKLAGDVESNPGPSRGHMTEYKPTVRLATRDDVPRAVRTLAAAFADYPATRHTVDPDRHIERVTELQELFLTRVGLDIGKVWVADDGAAVAVWTTPESVEAGAVFAEIGPRMAELSGSRLAAQQQMEGLLAPHRPKEPAWFLATVGVSPDHQGKGLGSAVVLPGVEAAERAGVPAFLETSAPRNLPFYERLGFTVTADVEVPEGPRTWCMTRKPGA

SEQ ID NO: 45244 - protein, 866 aa, synthetic construct
MALPVTALLLPLALLLHAARPLEIQNPDPAVYQLRDSKSSDKSVCLFTDFDSQTNVSQSKDSDVYITDKCVLDMRSMDFKSNSAVAWSNKSDFACANAFNNSIIPEDTFFPSPESSCDVKLVEKSFETDTNLNFQILYEVIGFRILLLKVAGFNLLMTLRLWSSRAKRSGSGATNFSLLKQAGDVEENPGPTSMALPVTALLLPLALLLHAARPDIQMTQSPSSLSASVGDRVTITCRASQDVRNIVVWFQQKPGKAPKLLIYSGSYRYSGVPSRFSGSGSGTDFTLTISSLQPEDFATYYCQQHYSPPYTFGQGTKVEIKRGGGGSGGGGSGGGGSEVQLVESGPGLVKPSETLSLTCTVSGFSLTRFGVHWVRQPPGKGLEWLGVIWRGGSTDYNAAFMSRLTISKDNSKNQVSLKLSSVTAADTAVYYCSNHYYGSSDYALDNWGQGTLVTVSSTREDLKNVFPPEVAVFEPSEAEISHTQKATLVCLATGFYPDHVELSWWVNGKEVHSGVCTDPQPLKEQPALNDSRYCLSSRLRVSATFWQNPRNHFRCQVQFYGLSENDEWTQDRAKPVTQIVSAEAWGRADCGFTSESYQQGVLSATNLSVIGFRILLLKVAGFNLLMTLRLWSSRAKRSGSGVKQTLNFDLLKLAGDVESNPGPSRGHMTEYKPTVRLATRDDVPRAVRTLAAAFADYPATRHTVDPDRHIERVTELQELFLTRVGLDIGKVWVADDGAAVAVWTTPESVEAGAVFAEIGPRMAELSGSRLAAQQQMEGLLAPHRPKEPAWFLATVGVSPDHQGKGLGSAVVLPGVEAAERAGVPAFLETSAPRNLPFYERLGFTVTADVEVPEGPRTWCMTRKPGA

SEQ ID NO: 45245 - protein, 866 aa, synthetic construct; identical to SEQ ID NO: 45243

SEQ ID NO: 45246 - protein, 974 aa, synthetic construct
MALPVTALLLPLALLLHAARPLEEDLKNVFPPEVAVFEPSEAEISHTQKATLVCLATGFYPDHVELSWWVNGKEVHSGVSTDPQPLKEQPALNDSRYCLSSRLRVSATFWQNPRNHFRCQVQFYGLSENDEWTQDRAKPVTQIVSAEAWGRADDVIKIHWQEKKSNTILGSQEGNTMKTNDTYMKFSWLTVPEKSLDKEHRCIVRHENNKNGVDQEIIFPPIKTDVITMDPKDNCSKDANDTLLLQLTNTSAYYMYLLLLLKSVVYFAIITCCLLMAMVKRKDSRGRAKRSGSGATNFSLLKQAGDVEENPGPTSMALPVTALLLPLALLLHAARPDIQMTQSPSSLSASVGDRVTITCRASQDVRNIVVWFQQKPGKAPKLLIYSGSYRYSGVPSRFSGSGSGTDFTLTISSLQPEDFATYYCQQHYSPPYTFGQGTKVEIKRGGGGSGGGGSGGGGSEVQLVESGPGLVKPSETLSLTCTVSGFSLTRFGVHWVRQPPGKGLEWLGVIWRGGSTDYNAAFMSRLTISKDNSKNQVSLKLSSVTAADTAVYYCSNHYYGSSDYALDNWGQGTLVTVSSTRIQNPDPAVYQLRDSKSSDKSVCLFTDFDSQTNVSQSKDSDVYITDKTVLDMRSMDFKSNSAVAWSNKSDFACANAFNNSIIPEDTFFPSPESSDSTDHVKPKETENTKQPSKSCHKPKAIVHTEKVNMMSLTVLGLRMLFAKTVAVNFLLTAKLFFLLTARAKRSGSGVKQTLNFDLLKLAGDVESNPGPSRGHMTEYKPTVRLATRDDVPRAVRTLAAAFADYPATRHTVDPDRHIERVTELQELFLTRVGLDIGKVWVADDGAAVAVWTTPESVEAGAVFAEIGPRMAELSGSRLAAQQQMEGLLAPHRPKEPAWFLATVGVSPDHQGKGLGSAVVLPGVEAAERAGVPAFLETSAPRNLPFYERLGFTVTADVEVPEGPRTWCMTRKPGA

SEQ ID NO: 45247 - protein, 974 aa, synthetic construct
MALPVTALLLPLALLLHAARPLEIQNPDPAVYQLRDSKSSDKSVCLFTDFDSQTNVSQSKDSDVYITDKTVLDMRSMDFKSNSAVAWSNKSDFACANAFNNSIIPEDTFFPSPESSDSTDHVKPKETENTKQPSKSCHKPKAIVHTEKVNMMSLTVLGLRMLFAKTVAVNFLLTAKLFFLLTARAKRSGSGATNFSLLKQAGDVEENPGPTSMALPVTALLLPLALLLHAARPDIQMTQSPSSLSASVGDRVTITCRASQDVRNIVVWFQQKPGKAPKLLIYSGSYRYSGVPSRFSGSGSGTDFTLTISSLQPEDFATYYCQQHYSPPYTFGQGTKVEIKRGGGGSGGGGSGGGGSEVQLVESGPGLVKPSETLSLTCTVSGFSLTRFGVHWVRQPPGKGLEWLGVIWRGGSTDYNAAFMSRLTISKDNSKNQVSLKLSSVTAADTAVYYCSNHYYGSSDYALDNWGQGTLVTVSSTREDLKNVFPPEVAVFEPSEAEISHTQKATLVCLATGFYPDHVELSWWVNGKEVHSGVSTDPQPLKEQPALNDSRYCLSSRLRVSATFWQNPRNHFRCQVQFYGLSENDEWTQDRAKPVTQIVSAEAWGRADDVIKIHWQEKKSNTILGSQEGNTMKTNDTYMKFSWLTVPEKSLDKEHRCIVRHENNKNGVDQEIIFPPIKTDVITMDPKDNCSKDANDTLLLQLTNTSAYYMYLLLLLKSVVYFAIITCCLLMAMVKRKDSRGRAKRSGSGVKQTLNFDLLKLAGDVESNPGPSRGHMTEYKPTVRLATRDDVPRAVRTLAAAFADYPATRHTVDPDRHIERVTELQELFLTRVGLDIGKVWVADDGAAVAVWTTPESVEAGAVFAEIGPRMAELSGSRLAAQQQMEGLLAPHRPKEPAWFLATVGVSPDHQGKGLGSAVVLPGVEAAERAGVPAFLETSAPRNLPFYERLGFTVTADVEVPEGPRTWCMTRKPGA

SEQ ID NO: 45248 - protein, 972 aa, synthetic construct
MALPVTALLLPLALLLHAARPLEEDLKNVFPPEVAVFEPSEAEISHTQKATLVCLATGFYPDHVELSWWVNGKEVHSGVCTDPQPLKEQPALNDSRYCLSSRLRVSATFWQNPRNHFRCQVQFYGLSENDEWTQDRAKPVTQIVSAEAWGRADDVIKIHWQEKKSNTILGSQEGNTMKTNDTYMKFSWLTVPEKSLDKEHRCIVRHENNKNGVDQEIIFPPIKTDVITMDPKDNCSKDANDTLLLQLTNTSAYYMYLLLLLKSVVYFAIITCCLLRRTAFCCNGEKSRAKRSGSGATNFSLLKQAGDVEENPGPTSMALPVTALLLPLALLLHAARPDIQMTQSPSSLSASVGDRVTITCRASQDVRNIVVWFQQKPGKAPKLLIYSGSYRYSGVPSRFSGSGSGTDFTLTISSLQPEDFATYYCQQHYSPPYTFGQGTKVEIKRGGGGSGGGGSGGGGSEVQLVESGPGLVKPSETLSLTCTVSGFSLTRFGVHWVRQPPGKGLEWLGVIWRGGSTDYNAAFMSRLTISKDNSKNQVSLKLSSVTAADTAVYYCSNHYYGSSDYALDNWGQGTLVTVSSTRIQNPDPAVYQLRDSKSSDKSVCLFTDFDSQTNVSQSKDSDVYITDKCVLDMRSMDFKSNSAVAWSNKSDFACANAFNNSIIPEDTFFPSPESSDSTDHVKPKETENTKQPSKSCHKPKAIVHTEKVNMMSLTVLGLRMLFAKTVAVNFLLTAKLFFLRAKRSGSGVKQTLNFDLLKLAGDVESNPGPSRGHMTEYKPTVRLATRDDVPRAVRTLAAAFADYPATRHTVDPDRHIERVTELQELFLTRVGLDIGKVWVADDGAAVAVWTTPESVEAGAVFAEIGPRMAELSGSRLAAQQQMEGLLAPHRPKEPAWFLATVGVSPDHQGKGLGSAVVLPGVEAAERAGVPAFLETSAPRNLPFYERLGFTVTADVEVPEGPRTWCMTRKPGA

SEQ ID NO: 45249 - protein, 972 aa, synthetic construct
MALPVTALLLPLALLLHAARPLEIQNPDPAVYQLRDSKSSDKSVCLFTDFDSQTNVSQSKDSDVYITDKCVLDMRSMDFKSNSAVAWSNKSDFACANAFNNSIIPEDTFFPSPESSDSTDHVKPKETENTKQPSKSCHKPKAIVHTEKVNMMSLTVLGLRMLFAKTVAVNFLLTAKLFFLRAKRSGSGATNFSLLKQAGDVEENPGPTSMALPVTALLLPLALLLHAARPDIQMTQSPSSLSASVGDRVTITCRASQDVRNIVVWFQQKPGKAPKLLIYSGSYRYSGVPSRFSGSGSGTDFTLTISSLQPEDFATYYCQQHYSPPYTFGQGTKVEIKRGGGGSGGGGSGGGGSEVQLVESGPGLVKPSETLSLTCTVSGFSLTRFGVHWVRQPPGKGLEWLGVIWRGGSTDYNAAFMSRLTISKDNSKNQVSLKLSSVTAADTAVYYCSNHYYGSSDYALDNWGQGTLVTVSSTREDLKNVFPPEVAVFEPSEAEISHTQKATLVCLATGFYPDHVELSWWVNGKEVHSGVCTDPQPLKEQPALNDSRYCLSSRLRVSATFWQNPRNHFRCQVQFYGLSENDEWTQDRAKPVTQIVSAEAWGRADDVIKIHWQEKKSNTILGSQEGNTMKTNDTYMKFSWLTVPEKSLDKEHRCIVRHENNKNGVDQEIIFPPIKTDVITMDPKDNCSKDANDTLLLQLTNTSAYYMYLLLLLKSVVYFAIITCCLLRRTAFCCNGEKSRAKRSGSGVKQTLNFDLLKLAGDVESNPGPSRGHMTEYKPTVRLATRDDVPRAVRTLAAAFADYPATRHTVDPDRHIERVTELQELFLTRVGLDIGKVWVADDGAAVAVWTTPESVEAGAVFAEIGPRMAELSGSRLAAQQQMEGLLAPHRPKEPAWFLATVGVSPDHQGKGLGSAVVLPGVEAAERAGVPAFLETSAPRNLPFYERLGFTVTADVEVPEGPRTWCMTRKPGA

SEQ ID NO: 45250 - protein, 972 aa, synthetic construct
MALPVTALLLPLALLLHAARPLEEDLKNVFPPEVAVFEPSEAEISHTQKATLVCLATGFYPDHVELSWWVNGKEVHSGVSTDPQPLKEQPALNDSRYCLSSRLRVSATFWQNPRNHFRCQVQFYGLSENDEWTQDRAKPVTQIVSAEAWGRADDVIKIHWQEKKSNTILGSQEGNTMKTNDTYMKFSWLTVPEKSLDKEHRCIVRHENNKNGVDQEIIFPPIKTDVITMDPKDNCSKDANDTLLLQLTNTSAYYMYLLLLLKSVVYFAIITCCLLRRTAFCCNGEKSRAKRSGSGATNFSLLKQAGDVEENPGPTSMALPVTALLLPLALLLHAARPDIQMTQSPSSLSASVGDRVTITCRASQDVRNIVVWFQQKPGKAPKLLIYSGSYRYSGVPSRFSGSGSGTDFTLTISSLQPEDFATYYCQQHYSPPYTFGQGTKVEIKRGGGGSGGGGSGGGGSEVQLVESGPGLVKPSETLSLTCTVSGFSLTRFGVHWVRQPPGKGLEWLGVIWRGGSTDYNAAFMSRLTISKDNSKNQVSLKLSSVTAADTAVYYCSNHYYGSSDYALDNWGQGTLVTVSSTRIQNPDPAVYQLRDSKSSDKSVCLFTDFDSQTNVSQSKDSDVYITDKTVLDMRSMDFKSNSAVAWSNKSDFACANAFNNSIIPEDTFFPSPESSDSTDHVKPKETENTKQPSKSCHKPKAIVHTEKVNMMSLTVLGLRMLFAKTVAVNFLLTAKLFFLRAKRSGSGVKQTLNFDLLKLAGDVESNPGPSRGHMTEYKPTVRLATRDDVPRAVRTLAAAFADYPATRHTVDPDRHIERVTELQELFLTRVGLDIGKVWVADDGAAVAVWTTPESVEAGAVFAEIGPRMAELSGSRLAAQQQMEGLLAPHRPKEPAWFLATVGVSPDHQGKGLGSAVVLPGVEAAERAGVPAFLETSAPRNLPFYERLGFTVTADVEVPEGPRTWCMTRKPGA

SEQ ID NO: 45251 - protein, 972 aa, synthetic construct
MALPVTALLLPLALLLHAARPLEIQNPDPAVYQLRDSKSSDKSVCLFTDFDSQTNVSQSKDSDVYITDKTVLDMRSMDFKSNSAVAWSNKSDFACANAFNNSIIPEDTFFPSPESSDSTDHVKPKETENTKQPSKSCHKPKAIVHTEKVNMMSLTVLGLRMLFAKTVAVNFLLTAKLFFLRAKRSGSGATNFSLLKQAGDVEENPGPTSMALPVTALLLPLALLLHAARPDIQMTQSPSSLSASVGDRVTITCRASQDVRNIVVWFQQKPGKAPKLLIYSGSYRYSGVPSRFSGSGSGTDFTLTISSLQPEDFATYYCQQHYSPPYTFGQGTKVEIKRGGGGSGGGGSGGGGSEVQLVESGPGLVKPSETLSLTCTVSGFSLTRFGVHWVRQPPGKGLEWLGVIWRGGSTDYNAAFMSRLTISKDNSKNQVSLKLSSVTAADTAVYYCSNHYYGSSDYALDNWGQGTLVTVSSTREDLKNVFPPEVAVFEPSEAEISHTQKATLVCLATGFYPDHVELSWWVNGKEVHSGVSTDPQPLKEQPALNDSRYCLSSRLRVSATFWQNPRNHFRCQVQFYGLSENDEWTQDRAKPVTQIVSAEAWGRADDVIKIHWQEKKSNTILGSQEGNTMKTNDTYMKFSWLTVPEKSLDKEHRCIVRHENNKNGVDQEIIFPPIKTDVITMDPKDNCSKDANDTLLLQLTNTSAYYMYLLLLLKSVVYFAIITCCLLRRTAFCCNGEKSRAKRSGSGVKQTLNFDLLKLAGDVESNPGPSRGHMTEYKPTVRLATRDDVPRAVRTLAAAFADYPATRHTVDPDRHIERVTELQELFLTRVGLDIGKVWVADDGAAVAVWTTPESVEAGAVFAEIGPRMAELSGSRLAAQQQMEGLLAPHRPKEPAWFLATVGVSPDHQGKGLGSAVVLPGVEAAERAGVPAFLETSAPRNLPFYERLGFTVTADVEVPEGPRTWCMTRKPGA

SEQ ID NO: 45252 - protein, 870 aa, synthetic construct
MALPVTALLLPLALLLHAARPLEEDLKNVFPPEVAVFEPSKAEIAHTQKATLVCLATGFYPDHVELSWWVNGKEVHSGVCTDPQPLKEQPALNDSRYCLSSRLRVSATFWQNPRNHFRCQVQFYGLSENDEWTQDRAKPVTQIVSAEAWGRADCGITSASYHQGVLSATILYEILLGKATLYAVLVSALVLMAMVKRKDSRGRAKRSGSGATNFSLLKQAGDVEENPGPTSMALPVTALLLPLALLLHAARPDIQMTQSPSSLSASVGDRVTITCRASQDVRNIVVWFQQKPGKAPKLLIYSGSYRYSGVPSRFSGSGSGTDFTLTISSLQPEDFATYYCQQHYSPPYTFGQGTKVEIKRGGGGSGGGGSGGGGSEVQLVESGPGLVKPSETLSLTCTVSGFSLTRFGVHWVRQPPGKGLEWLGVIWRGGSTDYNAAFMSRLTISKDNSKNQVSLKLSSVTAADTAVYYCSNHYYGSSDYALDNWGQGTLVTVSSTRIQNPDPAVYQLRDSKSSDKSVCLFTDFDSQTNVSQSKDSDVYITDKCVLDMRSMDFKSNSAVAWSNKSDFACANAFNNSIIPEDTFFPSSDVPCDVKLVEKSFETDTNLNFQNLSVIGFRILLLKVAGFNLLMTLRLWSSRAKRSGSGVKQTLNFDLLKLAGDVESNPGPSRGHMTEYKPTVRLATRDDVPRAVRTLAAAFADYPATRHTVDPDRHIERVTELQELFLTRVGLDIGKVWVADDGAAVAVWTTPESVEAGAVFAEIGPRMAELSGSRLAAQQQMEGLLAPHRPKEPAWFLATVGVSPDHQGKGLGSAVVLPGVEAAERAGVPAFLETSAPRNLPFYERLGFTVTADVEVPEGPRTWCMTRKPGA

SEQ ID NO: 45253 - protein, 870 aa, synthetic construct
MALPVTALLLPLALLLHAARPLEIQNPDPAVYQLRDSKSSDKSVCLFTDFDSQTNVSQSKDSDVYITDKCVLDMRSMDFKSNSAVAWSNKSDFACANAFNNSIIPEDTFFPSSDVPCDVKLVEKSFETDTNLNFQNLSVIGFRILLLKVAGFNLLMTLRLWSSRAKRSGSGATNFSLLKQAGDVEENPGPTSMALPVTALLLPLALLLHAARPDIQMTQSPSSLSASVGDRVTITCRASQDVRNIVVWFQQKPGKAPKLLIYSGSYRYSGVPSRFSGSGSGTDFTLTISSLQPEDFATYYCQQHYSPPYTFGQGTKVEIKRGGGGSGGGGSGGGGSEVQLVESGPGLVKPSETLSLTCTVSGFSLTRFGVHWVRQPPGKGLEWLGVIWRGGSTDYNAAFMSRLTISKDNSKNQVSLKLSSVTAADTAVYYCSNHYYGSSDYALDNWGQGTLVTVSSTREDLKNVFPPEVAVFEPSKAEIAHTQKATLVCLATGFYPDHVELSWWVNGKEVHSGVCTDPQPLKEQPALNDSRYCLSSRLRVSATFWQNPRNHFRCQVQFYGLSENDEWTQDRAKPVTQIVSAEAWGRADCGITSASYHQGVLSATILYEILLGKATLYAVLVSALVLMAMVKRKDSRGRAKRSGSGVKQTLNFDLLKLAGDVESNPGPSRGHMTEYKPTVRLATRDDVPRAVRTLAAAFADYPATRHTVDPDRHIERVTELQELFLTRVGLDIGKVWVADDGAAVAVWTTPESVEAGAVFAEIGPRMAELSGSRLAAQQQMEGLLAPHRPKEPAWFLATVGVSPDHQGKGLGSAVVLPGVEAAERAGVPAFLETSAPRNLPFYERLGFTVTADVEVPEGPRTWCMTRKPGA

SEQ ID NO: 45254 - protein, 763 aa, synthetic construct
MALPVTALLLPLALLLHAARPLEQSFGLLDPKLCYLLDGILFIYGVILTALFLRVKFSRSADAPAYQQGQNQLYNELNLGRREEYDVLDKRRGRDPEMGGKPQRRKNPQEGLYNELQKDKMAEAYSEIGMKGERRRGKGHDGLYQGLSTATKDTYDALHMQALPPRRAKRSGSGATNFSLLKQAGDVEENPGPTSMALPVTALLLPLALLLHAARPDIQMTQSPSSLSASVGDRVTITCRASQDVRNIVVWFQQKPGKAPKLLIYSGSYRYSGVPSRFSGSGSGTDFTLTISSLQPEDFATYYCQQHYSPPYTFGQGTKVEIKRGGGGSGGGGSGGGGSEVQLVESGPGLVKPSETLSLTCTVSGFSLTRFGVHWVRQPPGKGLEWLGVIWRGGSTDYNAAFMSRLTISKDNSKNQVSLKLSSVTAADTAVYYCSNHYYGSSDYALDNWGQGTLVTVSSTRELGEPQLCYILDAILFLYGIVLTLLYCRLKIQVRKAAITSYEKSDGVYTGLSTRNQETYETLKHEKPPQRAKRSGSGVKQTLNFDLLKLAGDVESNPGPSRGHMTEYKPTVRLATRDDVPRAVRTLAAAFADYPATRHTVDPDRHIERVTELQELFLTRVGLDIGKVWVADDGAAVAVWTTPESVEAGAVFAEIGPRMAELSGSRLAAQQQMEGLLAPHRPKEPAWFLATVGVSPDHQGKGLGSAVVLPGVEAAERAGVPAFLETSAPRNLPFYERLGFTVTADVEVPEGPRTWCMTRKPGA

SEQ ID NO: 45255 - protein, 974 aa, synthetic construct; identical to SEQ ID NO: 45246

SEQ ID NO: 45256 - protein, 974 aa, synthetic construct; identical to SEQ ID NO: 45247

SEQ ID NO: 45257 - protein, 973 aa, synthetic construct
MALPVTALLLPLALLLHAARPLEEEDLKNVFPPEVAVFEPSEAEISHTQKATLVCLATGFYPDHVELSWWVNGKEVHSGVCTDPQPLKEQPALNDSRYCLSSRLRVSATFWQNPRNHFRCQVQFYGLSENDEWTQDRAKPVTQIVSAEAWGRADDVIKIHWQEKKSNTILGSQEGNTMKTNDTYMKFSWLTVPEKSLDKEHRCIVRHENNKNGVDQEIIFPPIKTDVITMDPKDNCSKDANDTLLLQLTNTSAYYMYLLLLLKSVVYFAIITCCLLRRTAFCCNGEKSRAKRSGSGATNFSLLKQAGDVEENPGPTSMALPVTALLLPLALLLHAARPDIQMTQSPSSLSASVGDRVTITCRASQDVRNIVVWFQQKPGKAPKLLIYSGSYRYSGVPSRFSGSGSGTDFTLTISSLQPEDFATYYCQQHYSPPYTFGQGTKVEIKRGGGGSGGGGSGGGGSEVQLVESGPGLVKPSETLSLTCTVSGFSLTRFGVHWVRQPPGKGLEWLGVIWRGGSTDYNAAFMSRLTISKDNSKNQVSLKLSSVTAADTAVYYCSNHYYGSSDYALDNWGQGTLVTVSSTRIQNPDPAVYQLRDSKSSDKSVCLFTDFDSQTNVSQSKDSDVYITDKCVLDMRSMDFKSNSAVAWSNKSDFACANAFNNSIIPEDTFFPSPESSDSTDHVKPKETENTKQPSKSCHKPKAIVHTEKVNMMSLTVLGLRMLFAKTVAVNFLLTAKLFFLRAKRSGSGVKQTLNFDLLKLAGDVESNPGPSRGHMTEYKPTVRLATRDDVPRAVRTLAAAFADYPATRHTVDPDRHIERVTELQELFLTRVGLDIGKVWVADDGAAVAVWTTPESVEAGAVFAEIGPRMAELSGSRLAAQQQMEGLLAPHRPKEPAWFLATVGVSPDHQGKGLGSAVVLPGVEAAERAGVPAFLETSAPRNLPFYERLGFTVTADVEVPEGPRTWCMTRKPGA

SEQ ID NO: 45258 - protein, 973 aa, synthetic construct
MALPVTALLLPLALLLHAARPLEIQNPDPAVYQLRDSKSSDKSVCLFTDFDSQTNVSQSKDSDVYITDKCVLDMRSMDFKSNSAVAWSNKSDFACANAFNNSIIPEDTFFPSPESSDSTDHVKPKETENTKQPSKSCHKPKAIVHTEKVNMMSLTVLGLRMLFAKTVAVNFLLTAKLFFLRAKRSGSGATNFSLLKQAGDVEENPGPTSMALPVTALLLPLALLLHAARPDIQMTQSPSSLSASVGDRVTITCRASQDVRNIVVWFQQKPGKAPKLLIYSGSYRYSGVPSRFSGSGSGTDFTLTISSLQPEDFATYYCQQHYSPPYTFGQGTKVEIKRGGGGSGGGGSGGGGSEVQLVESGPGLVKPSETLSLTCTVSGFSLTRFGVHWVRQPPGKGLEWLGVIWRGGSTDYNAAFMSRLTISKDNSKNQVSLKLSSVTAADTAVYYCSNHYYGSSDYALDNWGQGTLVTVSSTREEDLKNVFPPEVAVFEPSEAEISHTQKATLVCLATGFYPDHVELSWWVNGKEVHSGVCTDPQPLKEQPALNDSRYCLSSRLRVSATFWQNPRNHFRCQVQFYGLSENDEWTQDRAKPVTQIVSAEAWGRADDVIKIHWQEKKSNTILGSQEGNTMKTNDTYMKFSWLTVPEKSLDKEHRCIVRHENNKNGVDQEIIFPPIKTDVITMDPKDNCSKDANDTLLLQLTNTSAYYMYLLLLLKSVVYFAIITCCLLRRTAFCCNGEKSRAKRSGSGVKQTLNFDLLKLAGDVESNPGPSRGHMTEYKPTVRLATRDDVPRAVRTLAAAFADYPATRHTVDPDRHIERVTELQELFLTRVGLDIGKVWVADDGAAVAVWTTPESVEAGAVFAEIGPRMAELSGSRLAAQQQMEGLLAPHRPKEPAWFLATVGVSPDHQGKGLGSAVVLPGVEAAERAGVPAFLETSAPRNLPFYERLGFTVTADVEVPEGPRTWCMTRKPGA

SEQ ID NO: 45259 - protein, 870 aa, synthetic construct
MALPVTALLLPLALLLHAARPLEEDLKNVFPPEVAVFEPSEAEISHTQKATLVCLATGFYPDHVELSWWVNGKEVHSGVSTDPQPLKEQPALNDSRYCLSSRLRVSATFWQNPRNHFRCQVQFYGLSENDEWTQDRAKPVTQIVSAEAWGRADCGFTSESYQQGVLSATNLSVIGFRILLLKVAGFNLLMTLRLWSSRAKRSGSGATNFSLLKQAGDVEENPGPTSMALPVTALLLPLALLLHAARPDIQMTQSPSSLSASVGDRVTITCRASQDVRNIVVWFQQKPGKAPKLLIYSGSYRYSGVPSRFSGSGSGTDFTLTISSLQPEDFATYYCQQHYSPPYTFGQGTKVEIKRGGGGSGGGGSGGGGSEVQLVESGPGLVKPSETLSLTCTVSGFSLTRFGVHWVRQPPGKGLEWLGVIWRGGSTDYNAAFMSRLTISKDNSKNQVSLKLSSVTAADTAVYYCSNHYYGSSDYALDNWGQGTLVTVSSTRIQNPDPAVYQLRDSKSSDKSVCLFTDFDSQTNVSQSKDSDVYITDKTVLDMRSMDFKSNSAVAWSNKSDFACANAFNNSIIPEDTFFPSPESSCDVKLVEKSFETDTNLNFQILYEILLGKATLYAVLVSALVLMAMVKRKDSRGRAKRSGSGVKQTLNFDLLKLAGDVESNPGPSRGHMTEYKPTVRLATRDDVPRAVRTLAAAFADYPATRHTVDPDRHIERVTELQELFLTRVGLDIGKVWVADDGAAVAVWTTPESVEAGAVFAEIGPRMAELSGSRLAAQQQMEGLLAPHRPKEPAWFLATVGVSPDHQGKGLGSAVVLPGVEAAERAGVPAFLETSAPRNLPFYERLGFTVTADVEVPEGPRTWCMTRKPGA

SEQ ID NO: 45260 - protein, 870 aa, synthetic construct
MALPVTALLLPLALLLHAARPLEIQNPDPAVYQLRDSKSSDKSVCLFTDFDSQTNVSQSKDSDVYITDKTVLDMRSMDFKSNSAVAWSNKSDFACANAFNNSIIPEDTFFPSPESSCDVKLVEKSFETDTNLNFQILYEILLGKATLYAVLVSALVLMAMVKRKDSRGRAKRSGSGATNFSLLKQAGDVEENPGPTSMALPVTALLLPLALLLHAARPDIQMTQSPSSLSASVGDRVTITCRASQDVRNIVVWFQQKPGKAPKLLIYSGSYRYSGVPSRFSGSGSGTDFTLTISSLQPEDFATYYCQQHYSPPYTFGQGTKVEIKRGGGGSGGGGSGGGGSEVQLVESGPGLVKPSETLSLTCTVSGFSLTRFGVHWVRQPPGKGLEWLGVIWRGGSTDYNAAFMSRLTISKDNSKNQVSLKLSSVTAADTAVYYCSNHYYGSSDYALDNWGQGTLVTVSSTREDLKNVFPPEVAVFEPSEAEISHTQKATLVCLATGFYPDHVELSWWVNGKEVHSGVSTDPQPLKEQPALNDSRYCLSSRLRVSATFWQNPRNHFRCQVQFYGLSENDEWTQDRAKPVTQIVSAEAWGRADCGFTSESYQQGVLSATNLSVIGFRILLLKVAGFNLLMTLRLWSSRAKRSGSGVKQTLNFDLLKLAGDVESNPGPSRGHMTEYKPTVRLATRDDVPRAVRTLAAAFADYPATRHTVDPDRHIERVTELQELFLTRVGLDIGKVWVADDGAAVAVWTTPESVEAGAVFAEIGPRMAELSGSRLAAQQQMEGLLAPHRPKEPAWFLATVGVSPDHQGKGLGSAVVLPGVEAAERAGVPAFLETSAPRNLPFYERLGFTVTADVEVPEGPRTWCMTRKPGA

SEQ ID NO: 45261 - protein, 870 aa, synthetic construct
MALPVTALLLPLALLLHAARPLEEDLKNVFPPEVAVFEPSEAEISHTQKATLVCLATGFYPDHVELSWWVNGKEVHSGVCTDPQPLKEQPALNDSRYCLSSRLRVSATFWQNPRNHFRCQVQFYGLSENDEWTQDRAKPVTQIVSAEAWGRADCDVKLVEKSFETDTNLNFQNLSVIGFRILLLKVAGFNLLMTLRLWSSRAKRSGSGATNFSLLKQAGDVEENPGPTSMALPVTALLLPLALLLHAARPDIQMTQSPSSLSASVGDRVTITCRASQDVRNIVVWFQQKPGKAPKLLIYSGSYRYSGVPSRFSGSGSGTDFTLTISSLQPEDFATYYCQQHYSPPYTFGQGTKVEIKRGGGGSGGGGSGGGGSEVQLVESGPGLVKPSETLSLTCTVSGFSLTRFGVHWVRQPPGKGLEWLGVIWRGGSTDYNAAFMSRLTISKDNSKNQVSLKLSSVTAADTAVYYCSNHYYGSSDYALDNWGQGTLVTVSSTRIQNPDPAVYQLRDSKSSDKSVCLFTDFDSQTNVSQSKDSDVYITDKCVLDMRSMDFKSNSAVAWSNKSDFACANAFNNSIIPEDTFFPSPESSCGFTSESYQQGVLSATILYEILLGKATLYAVLVSALVLMAMVKRKDSRGRAKRSGSGVKQTLNFDLLKLAGDVESNPGPSRGHMTEYKPTVRLATRDDVPRAVRTLAAAFADYPATRHTVDPDRHIERVTELQELFLTRVGLDIGKVWVADDGAAVAVWTTPESVEAGAVFAEIGPRMAELSGSRLAAQQQMEGLLAPHRPKEPAWFLATVGVSPDHQGKGLGSAVVLPGVEAAERAGVPAFLETSAPRNLPFYERLGFTVTADVEVPEGPRTWCMTRKPGA

SEQ ID NO: 45262 - protein, 870 aa, synthetic construct
MALPVTALLLPLALLLHAARPLEEDLKNVFPPEVAVFEPSEAEISHTQKATLVCLATGFYPDHVELSWWVNGKEVHSGVSTDPQPLKEQPALNDSRYCLSSRLRVSATFWQNPRNHFRCQVQFYGLSENDEWTQDRAKPVTQIVSAEAWGRADCDVKLVEKSFETDTNLNFQNLSVIGFRILLLKVAGFNLLMTLRLWSSRAKRSGSGATNFSLLKQAGDVEENPGPTSMALPVTALLLPLALLLHAARPDIQMTQSPSSLSASVGDRVTITCRASQDVRNIVVWFQQKPGKAPKLLIYSGSYRYSGVPSRFSGSGSGTDFTLTISSLQPEDFATYYCQQHYSPPYTFGQGTKVEIKRGGGGSGGGGSGGGGSEVQLVESGPGLVKPSETLSLTCTVSGFSLTRFGVHWVRQPPGKGLEWLGVIWRGGSTDYNAAFMSRLTISKDNSKNQVSLKLSSVTAADTAVYYCSNHYYGSSDYALDNWGQGTLVTVSSTRIQNPDPAVYQLRDSKSSDKSVCLFTDFDSQTNVSQSKDSDVYITDKTVLDMRSMDFKSNSAVAWSNKSDFACANAFNNSIIPEDTFFPSPESSCGFTSESYQQGVLSATILYEILLGKATLYAVLVSALVLMAMVKRKDSRGRAKRSGSGVKQTLNFDLLKLAGDVESNPGPSRGHMTEYKPTVRLATRDDVPRAVRTLAAAFADYPATRHTVDPDRHIERVTELQELFLTRVGLDIGKVWVADDGAAVAVWTTPESVEAGAVFAEIGPRMAELSGSRLAAQQQMEGLLAPHRPKEPAWFLATVGVSPDHQGKGLGSAVVLPGVEAAERAGVPAFLETSAPRNLPFYERLGFTVTADVEVPEGPRTWCMTRKPGA

SEQ ID NO: 45263 - protein, 973 aa, synthetic construct
MALPVTALLLPLALLLHAARPLEEEDLKNVFPPEVAVFEPSEAEISHTQKATLVCLATGFYPDHVELSWWVNGKEVHSGVSTDPQPLKEQPALNDSRYCLSSRLRVSATFWQNPRNHFRCQVQFYGLSENDEWTQDRAKPVTQIVSAEAWGRADDVIKIHWQEKKSNTILGSQEGNTMKTNDTYMKFSWLTVPEKSLDKEHRCIVRHENNKNGVDQEIIFPPIKTDVITMDPKDNCSKDANDTLLLQLTNTSAYYMYLLLLLKSVVYFAIITCCLLRRTAFCCNGEKSRAKRSGSGATNFSLLKQAGDVEENPGPTSMALPVTALLLPLALLLHAARPDIQMTQSPSSLSASVGDRVTITCRASQDVRNIVVWFQQKPGKAPKLLIYSGSYRYSGVPSRFSGSGSGTDFTLTISSLQPEDFATYYCQQHYSPPYTFGQGTKVEIKRGGGGSGGGGSGGGGSEVQLVESGPGLVKPSETLSLTCTVSGFSLTRFGVHWVRQPPGKGLEWLGVIWRGGSTDYNAAFMSRLTISKDNSKNQVSLKLSSVTAADTAVYYCSNHYYGSSDYALDNWGQGTLVTVSSTRIQNPDPAVYQLRDSKSSDKSVCLFTDFDSQTNVSQSKDSDVYITDKTVLDMRSMDFKSNSAVAWSNKSDFACANAFNNSIIPEDTFFPSPESSDSTDHVKPKETENTKQPSKSCHKPKAIVHTEKVNMMSLTVLGLRMLFAKTVAVNFLLTAKLFFLRAKRSGSGVKQTLNFDLLKLAGDVESNPGPSRGHMTEYKPTVRLATRDDVPRAVRTLAAAFADYPATRHTVDPDRHIERVTELQELFLTRVGLDIGKVWVADDGAAVAVWTTPESVEAGAVFAEIGPRMAELSGSRLAAQQQMEGLLAPHRPKEPAWFLATVGVSPDHQGKGLGSAVVLPGVEAAERAGVPAFLETSAPRNLPFYERLGFTVTADVEVPEGPRTWCMTRKPGA

SEQ ID NO: 45264 - protein, 870 aa, synthetic construct
MALPVTALLLPLALLLHAARPLEEDLKNVFPPEVAVFEPSEAEISHTQKATLVCLATGFYPDHVELSWWVNGKEVHSGVCTDPQPLKEQPALNDSRYCLSSRLRVSATFWQNPRNHFRCQVQFYGLSENDEWTQDRAKPVTQIVSAEAWGRADCGFTSESYQQGVLSATNLSVIGFRILLLKVAGFNLLMTLRLWSSRAKRSGSGATNFSLLKQAGDVEENPGPTSMALPVTALLLPLALLLHAARPDIQMTQSPSSLSASVGDRVTITCRASQDVRNIVVWFQQKPGKAPKLLIYSGSYRYSGVPSRFSGSGSGTDFTLTISSLQPEDFATYYCQQHYSPPYTFGQGTKVEIKRGGGGSGGGGSGGGGSEVQLVESGPGLVKPSETLSLTCTVSGFSLTRFGVHWVRQPPGKGLEWLGVIWRGGSTDYNAAFMSRLTISKDNSKNQVSLKLSSVTAADTAVYYCSNHYYGSSDYALDNWGQGTLVTVSSTRIQNPDPAVYQLRDSKSSDKSVCLFTDFDSQTNVSQSKDSDVYITDKCVLDMRSMDFKSNSAVAWSNKSDFACANAFNNSIIPEDTFFPSPESSCDVKLVEKSFETDTNLNFQILYEILLGKATLYAVLVSALVLMAMVKRKDSRGRAKRSGSGVKQTLNFDLLKLAGDVESNPGPSRGHMTEYKPTVRLATRDDVPRAVRTLAAAFADYPATRHTVDPDRHIERVTELQELFLTRVGLDIGKVWVADDGAAVAVWTTPESVEAGAVFAEIGPRMAELSGSRLAAQQQMEGLLAPHRPKEPAWFLATVGVSPDHQGKGLGSAVVLPGVEAAERAGVPAFLETSAPRNLPFYERLGFTVTADVEVPEGPRTWCMTRKPGA

SEQ ID NO: 45265 - protein, 899 aa, synthetic construct
MALPVTALLLPLALLLHAARPLEEEDLKNVFPPEVAVFEPSEAEISHTQKATLVCLATGFYPDHVELSWWVNGKEVHSGVCTDPQPLKEQPALNDSRYCLSSRLRVSATFWQNPRNHFRCQVQFYGLSENDEWTQDRAKPVTQIVSAEAWGRADCGFTSESYQQGVLSATNLSVIGFRILLLKVAGFNLLMTLRLWSSRAKRSGSGATNFSLLKQAGDVEENPGPTSMALPVTALLLPLALLLHAARPDIQMTQSPSSLSASVGDRVTITCRASQDVRNIVVWFQQKPGKAPKLLIYSGSYRYSGVPSRFSGSGSGTDFTLTISSLQPEDFATYYCQQHYSPPYTFGQGTKVEIKRGGGGSGGGGSGGGGSEVQLVESGPGLVKPSETLSLTCTVSGFSLTRFGVHWVRQPPGKGLEWLGVIWRGGSTDYNAAFMSRLTISKDNSKNQVSLKLSSVTAADTAVYYCSNHYYGSSDYALDNWGQGTLVTVSSTRGQPKANPTVTLFPPSSEELQANKATLVCLISDFYPGAVTVAWKADGSPVKAGVETTKPSKQSNNKYAASSYLSLTPEQWKSHRSYSCQVTHEGSTVEKTVAPTECSPIKTDVITMDPKDNCSKDANDTLLLQLTNTSAYYMYLLLLLKSVVYFAIITCCLLRRTAFCCNGEKSRAKRSGSGVKQTLNFDLLKLAGDVESNPGPSRGHMTEYKPTVRLATRDDVPRAVRTLAAAFADYPATRHTVDPDRHIERVTELQELFLTRVGLDIGKVWVADDGAAVAVWTTPESVEAGAVFAEIGPRMAELSGSRLAAQQQMEGLLAPHRPKEPAWFLATVGVSPDHQGKGLGSAVVLPGVEAAERAGVPAFLETSAPRNLPFYERLGFTVTADVEVPEGPRTWCMTRKPGA

SEQ ID NO: 45266 - protein, 899 aa, synthetic construct
MALPVTALLLPLALLLHAARPLEGQPKANPTVTLFPPSSEELQANKATLVCLISDFYPGAVTVAWKADGSPVKAGVETTKPSKQSNNKYAASSYLSLTPEQWKSHRSYSCQVTHEGSTVEKTVAPTECSPIKTDVITMDPKDNCSKDANDTLLLQLTNTSAYYMYLLLLLKSVVYFAIITCCLLRRTAFCCNGEKSRAKRSGSGATNFSLLKQAGDVEENPGPTSMALPVTALLLPLALLLHAARPDIQMTQSPSSLSASVGDRVTITCRASQDVRNIVVWFQQKPGKAPKLLIYSGSYRYSGVPSRFSGSGSGTDFTLTISSLQPEDFATYYCQQHYSPPYTFGQGTKVEIKRGGGGSGGGGSGGGGSEVQLVESGPGLVKPSETLSLTCTVSGFSLTRFGVHWVRQPPGKGLEWLGVIWRGGSTDYNAAFMSRLTISKDNSKNQVSLKLSSVTAADTAVYYCSNHYYGSSDYALDNWGQGTLVTVSSTREEDLKNVFPPEVAVFEPSEAEISHTQKATLVCLATGFYPDHVELSWWVNGKEVHSGVCTDPQPLKEQPALNDSRYCLSSRLRVSATFWQNPRNHFRCQVQFYGLSENDEWTQDRAKPVTQIVSAEAWGRADCGFTSESYQQGVLSATNLSVIGFRILLLKVAGFNLLMTLRLWSSRAKRSGSGVKQTLNFDLLKLAGDVESNPGPSRGHMTEYKPTVRLATRDDVPRAVRTLAAAFADYPATRHTVDPDRHIERVTELQELFLTRVGLDIGKVWVADDGAAVAVWTTPESVEAGAVFAEIGPRMAELSGSRLAAQQQMEGLLAPHRPKEPAWFLATVGVSPDHQGKGLGSAVVLPGVEAAERAGVPAFLETSAPRNLPFYERLGFTVTADVEVPEGPRTWCMTRKPGA

SEQ ID NO: 45267 - protein, 896 aa, synthetic construct
MALPVTALLLPLALLLHAARPLEEASTKGPSVFPLAPSSKSTSGGTAALGCLVKDYFPEPVTVSWNSGALTSGVHTFPAVLQSSGLYSLSSVVTVPSSSLGTQTYICNVNHKPSNTKVDKRVEPKSCPIKTDVITMDPKDNCSKDANDTLLLQLTNTSAYYMYLLLLLKSVVYFAIITCCLLRRTAFCCNGEKSRAKRSGSGATNFSLLKQAGDVEENPGPTSMALPVTALLLPLALLLHAARPDIQMTQSPSSLSASVGDRVTITCRASQDVRNIVVWFQQKPGKAPKLLIYSGSYRYSGVPSRFSGSGSGTDFTLTISSLQPEDFATYYCQQHYSPPYTFGQGTKVEIKRGGGGSGGGGSGGGGSEVQLVESGPGLVKPSETLSLTCTVSGFSLTRFGVHWVRQPPGKGLEWLGVIWRGGSTDYNAAFMSRLTISKDNSKNQVSLKLSSVTAADTAVYYCSNHYYGSSDYALDNWGQGTLVTVSSTRGQPKANPTVTLFPPSSEELQANKATLVCLISDFYPGAVTVAWKADGSPVKAGVETTKPSKQSNNKYAASSYLSLTPEQWKSHRSYSCQVTHEGSTVEKTVAPTECSEVKTDSTDHVKPKETENTKQPSKSCHKPKAIVHTEKVNMMSLTVLGLRMLFAKTVAVNFLLTAKLFFLRAKRSGSGVKQTLNFDLLKLAGDVESNPGPSRGHMTEYKPTVRLATRDDVPRAVRTLAAAFADYPATRHTVDPDRHIERVTELQELFLTRVGLDIGKVWVADDGAAVAVWTTPESVEAGAVFAEIGPRMAELSGSRLAAQQQMEGLLAPHRPKEPAWFLATVGVSPDHQGKGLGSAVVLPGVEAAERAGVPAFLETSAPRNLPFYERLGFTVTADVEVPEGPRTWCMTRKPGA

SEQ ID NO: 45268 - protein, 874 aa, synthetic construct
MALPVTALLLPLALLLHAARPLEEASTKGPSVFPLAPSSKSTSGGTAALGCLVKDYFPEPVTVSWNSGALTSGVHTFPAVLQSSGLYSLSSVVTVPSSSLGTQTYICNVNHKPSNTKVDKRVEPKSCGRADCGFTSESYQQGVLSATILYEILLGKATLYAVLVSALVLMAMVKRKDSRGRAKRSGSGATNFSLLKQAGDVEENPGPTSMALPVTALLLPLALLLHAARPDIQMTQSPSSLSASVGDRVTITCRASQDVRNIVVWFQQKPGKAPKLLIYSGSYRYSGVPSRFSGSGSGTDFTLTISSLQPEDFATYYCQQHYSPPYTFGQGTKVEIKRGGGGSGGGGSGGGGSEVQLVESGPGLVKPSETLSLTCTVSGFSLTRFGVHWVRQPPGKGLEWLGVIWRGGSTDYNAAFMSRLTISKDNSKNQVSLKLSSVTAADTAVYYCSNHYYGSSDYALDNWGQGTLVTVSSTRGQPKANPTVTLFPPSSEELQANKATLVCLISDFYPGAVTVAWKADGSPVKAGVETTKPSKQSNNKYAASSYLSLTPEQWKSHRSYSCQVTHEGSTVEKTVAPTECSIPEDTFFPSPESSCDVKLVEKSFETDTNLNFQNLSVIGFRILLLKVAGFNLLMTLRLWSSRAKRSGSGVKQTLNFDLLKLAGDVESNPGPSRGHMTEYKPTVRLATRDDVPRAVRTLAAAFADYPATRHTVDPDRHIERVTELQELFLTRVGLDIGKVWVADDGAAVAVWTTPESVEAGAVFAEIGPRMAELSGSRLAAQQQMEGLLAPHRPKEPAWFLATVGVSPDHQGKGLGSAVVLPGVEAAERAGVPAFLETSAPRNLPFYERLGFTVTADVEVPEGPRTWCMTRKPGA

SEQ ID NO: 45269 - protein, 874 aa, synthetic construct
MALPVTALLLPLALLLHAARPLEEASTKGPSVFPLAPSSKSTSGGTAALGCLVKDYFPEPVTVSWNSGALTSGVHTFPAVLQSSGLYSLSSVVTVPSSSLGTQTYICNVNHKPSNTKVDKRVEPKSCIPEDTFFPSPESSCDVKLVEKSFETDTNLNFQNLSVIGFRILLLKVAGFNLLMTLRLWSSRAKRSGSGATNFSLLKQAGDVEENPGPTSMALPVTALLLPLALLLHAARPDIQMTQSPSSLSASVGDRVTITCRASQDVRNIVVWFQQKPGKAPKLLIYSGSYRYSGVPSRFSGSGSGTDFTLTISSLQPEDFATYYCQQHYSPPYTFGQGTKVEIKRGGGGSGGGGSGGGGSEVQLVESGPGLVKPSETLSLTCTVSGFSLTRFGVHWVRQPPGKGLEWLGVIWRGGSTDYNAAFMSRLTISKDNSKNQVSLKLSSVTAADTAVYYCSNHYYGSSDYALDNWGQGTLVTVSSTRGQPKANPTVTLFPPSSEELQANKATLVCLISDFYPGAVTVAWKADGSPVKAGVETTKPSKQSNNKYAASSYLSLTPEQWKSHRSYSCQVTHEGSTVEKTVAPTECSGRADCGFTSESYQQGVLSATILYEILLGKATLYAVLVSALVLMAMVKRKDSRGRAKRSGSGVKQTLNFDLLKLAGDVESNPGPSRGHMTEYKPTVRLATRDDVPRAVRTLAAAFADYPATRHTVDPDRHIERVTELQELFLTRVGLDIGKVWVADDGAAVAVWTTPESVEAGAVFAEIGPRMAELSGSRLAAQQQMEGLLAPHRPKEPAWFLATVGVSPDHQGKGLGSAVVLPGVEAAERAGVPAFLETSAPRNLPFYERLGFTVTADVEVPEGPRTWCMTRKPGA

SEQ ID NO: 45270 - protein, 621 aa, synthetic construct
MALPVTALLLPLALLLHAARPDIQMTQSPSSLSASVGDRVTITCRASQDVRNIVVWFQQKPGKAPKLLIYSGSYRYSGVPSRFSGSGSGTDFTLTISSLQPEDFATYYCQQHYSPPYTFGQGTKVEIKRLEDLKNVFPPEVAVFEPSEAEISHTQKATLVCLATGFYPDHVELSWWVNGKEVHSGVCTDPQPLKEQPALNDSRYCLSSRLRVSATFWQNPRNHFRCQVQFYGLSENDEWTQDRAKPVTQIVSAEAWGRADSGFTSESYQQGVLSATILYEILLGKATLYAVLVSALVLMAMVKRKDSRGRAKRSGSGATNFSLLKQAGDVEENPGPTSMDWIWRILFLVGAATGAHSFEEVQLVESGPGLVKPSETLSLTCTVSGFSLTRFGVHWVRQPPGKGLEWLGVIWRGGSTDYNAAFMSRLTISKDNSKNQVSLKLSSVTAADTAVYYCSNHYYGSSDYALDNWGQGTLVTVSSTRIQNPDPAVYQLRDSKSSDKSVCLFTDFDSQTNVSQSKDSDVYITDKCVLDMRSMDFKSNSAVAWSNKSDFACANAFNNSIIPEDTFFPSPESSSDVKLVEKSFETDTNLNFQNLSVIGFRILLLKVAGFNLLMTLRLWSS

SEQ ID NO: 45271 - protein, 900 aa, synthetic construct
MALPVTALLLPLALLLHAARPEVQLLESGGGLVQPGGSLRLSCAASGRTFSMGWYRQAPGKGLEFVSAITYSGGSPYYADSVKGRFTISRDNSKNTVYLQMNSLRAEDTAVYYCAANPTYGSDWNAENWGQGTLVTVSSGTGGGGSGGGGSGGGGSEFDIQMTQSPSSLSASVGDRVTITCRASQDVRNIVVWFQQKPGKAPKLLIYSGSYRYSGVPSRFSGSGSGTDFTLTISSLQPEDFATYYCQQHYSPPYTFGQGTKVEIKRLEIQNPDPAVYQLRDSKSSDKSVCLFTDFDSQTNVSQSKDSDVYITDKCVLDMRSMDFKSNSAVAWSNKSDFACANAFNNSIIPEDTFFPSSDVPCDVKLVEKSFETDTNLNFQNLSVIGFRILLLKVAGFNLLMTLRLWSSRAKRSGSGVKQTLNFDLLKLAGDVESNPGPTSTMDWIWRILFLVGAATGTHSGPEVQLVESGGGLVQPGGSLRLSCAASGRTFTMGWYRQAPGKEREFVAAISLSPTLAYYADSVKGRFTISRDNSKNTVVLQMNSLRAEDTALYYCAADRKSVMSIRPDYWGQGTLVTVSSGSGGGGSGGGGSGGGGSFEEVQLVESGPGLVKPSETLSLTCTVSGFSLTRFGVHWVRQPPGKGLEWLGVIWRGGSTDYNAAFMSRLTISKDNSKNQVSLKLSSVTAADTAVYYCSNHYYGSSDYALDNWGQGTLVTVSSTREDLKNVFPPEVAVFEPSKAEIAHTQKATLVCLATGFYPDHVELSWWVNGKEVHSGVCTDPQPLKEQPALNDSRYCLSSRLRVSATFWQNPRNHFRCQVQFYGLSENDEWTQDRAKPVTQIVSAEAWGRADCGITSASYHQGVLSATILYEILLGKATLYAVLVSALVLMAMVKRKDSRG

SEQ ID NO: 45272 - protein, 900 aa, synthetic construct
MALPVTALLLPLALLLHAARPEVQLVESGGGLVQAGGSLRLSCAASGRTFSMGWFRQAPGKEREFVAAITYSGGSPYYADSVKGRFTISRDNAKNTVYLQMNSLKPEDTAVYYCAANPTYGSDWNAENWGQGTQVTVSSGTGGGGSGGGGSGGGGSEFDIQMTQSPSSLSASVGDRVTITCRASQDVRNIVVWFQQKPGKAPKLLIYSGSYRYSGVPSRFSGSGSGTDFTLTISSLQPEDFATYYCQQHYSPPYTFGQGTKVEIKRLEIQNPDPAVYQLRDSKSSDKSVCLFTDFDSQTNVSQSKDSDVYITDKCVLDMRSMDFKSNSAVAWSNKSDFACANAFNNSIIPEDTFFPSSDVPCDVKLVEKSFETDTNLNFQNLSVIGFRILLLKVAGFNLLMTLRLWSSRAKRSGSGVKQTLNFDLLKLAGDVESNPGPTSTMDWIWRILFLVGAATGAHSGPEVQLVESGGGLVQPGGSLRLSCAASGRTFTMGWYRQAPGKEREFVAAISLSPTLAYYADSVKGRFTISRDNSKNTVVLQMNSLRAEDTALYYCAADRKSVMSIRPDYWGQGTLVTVSSGSGGGGSGGGGSGGGGSFEEVQLVESGPGLVKPSETLSLTCTVSGFSLTRFGVHWVRQPPGKGLEWLGVIWRGGSTDYNAAFMSRLTISKDNSKNQVSLKLSSVTAADTAVYYCSNHYYGSSDYALDNWGQGTLVTVSSTREDLKNVFPPEVAVFEPSKAEIAHTQKATLVCLATGFYPDHVELSWWVNGKEVHSGVCTDPQPLKEQPALNDSRYCLSSRLRVSATFWQNPRNHFRCQVQFYGLSENDEWTQDRAKPVTQIVSAEAWGRADCGITSASYHQGVLSATILYEILLGKATLYAVLVSALVLMAMVKRKDSRG

SEQ ID NO: 45273 - protein, 897 aa, synthetic construct
MALPVTALLLPLALLLHAARPEVQLVESGGGLVQAGGSLRLSCAASGRTFSMGWFRQAPGKEREFVAAITYSGGSPYYADSVKGRFTISRDNAKNTVYLQMNSLKPEDTAVYYCAANPTYGSDWNAENWGQGTQVTVSSGTGGGGSGGGGSGGGGSEFDIQMTQSPSSLSASVGDRVTITCRASQDVRNIVVWFQQKPGKAPKLLIYSGSYRYSGVPSRFSGSGSGTDFTLTISSLQPEDFATYYCQQHYSPPYTFGQGTKVEIKRLEDLKNVFPPEVAVFEPSEAEISHTQKATLVCLATGFYPDHVELSWWVNGKEVHSGVCTDPQPLKEQPALNDSRYCLSSRLRVSATFWQNPRNHFRCQVQFYGLSENDEWTQDRAKPVTQIVSAEAWGRADCGFTSESYQQGVLSATILYEILLGKATLYAVLVSALVLMAMVKRKDSRGRAKRSGSGATNFSLLKQAGDVEENPGPTSATMDWIWRILFLVGAATGAHSGPEVQLVESGGGLVQAGGSLRLSCAASGRTFTMGWFRQAPGKEREFVAAISLSPTLAYYADSVKGRFTISRDNAKNTVVLQMNSLKPEDTALYYCAADRKSVMSIRPDYWGQGTQVTVSSGSGGGGSGGGGSGGGGSFEEVQLVESGPGLVKPSETLSLTCTVSGFSLTRFGVHWVRQPPGKGLEWLGVIWRGGSTDYNAAFMSRLTISKDNSKNQVSLKLSSVTAADTAVYYCSNHYYGSSDYALDNWGQGTLVTVSSTRIQNPDPAVYQLRDSKSSDKSVCLFTDFDSQTNVSQSKDSDVYITDKCVLDMRSMDFKSNSAVAWSNKSDFACANAFNNSIIPEDTFFPSPESSCDVKLVEKSFETDTNLNFQNLSVIGFRILLLKVAGFNLLMTLRLWSS

SEQ ID NO: 45274 - protein, 768 aa, synthetic construct
MALPVTALLLPLALLLHAARPEVQLVESGGGLVQPGGSLRLSCEASGFASDDYIIGWFRQAPGKEREGVSCISSKYANTVYTDSVKGRFRLSRGTAKNTVYLQMSALKPEDTAVYYCAMDSRRVTCPEISTMHRNFDSWGQGTLVTVSSGTGGGGSGGGGSGGGGSEFDIQMTQSPSSLSASVGDRVTITCRASQDVRNIVVWFQQKPGKAPKLLIYSGSYRYSGVPSRFSGSGSGTDFTLTISSLQPEDFATYYCQQHYSPPYTFGQGTKVEIKRLEDLKNVFPPEVAVFEPSKAEIAHTQKATLVCLATGFYPDHVELSWWVNGKEVHSGVCTDPQPLKEQPALNDSRYCLSSRLRVSATFWQNPRNHFRCQVQFYGLSENDEWTQDRAKPVTQIVSAEAWGRADCGITSASYHQGVLSATILYEILLGKATLYAVLVSALVLMAMVKRKDSRGRAKRSGSGATNFSLLKQAGDVEENPGPTSMDWIWRILFLVGAATGAHSFEEVQLVESGPGLVKPSETLSLTCTVSGFSLTRFGVHWVRQPPGKGLEWLGVIWRGGSTDYNAAFMSRLTISKDNSKNQVSLKLSSVTAADTAVYYCSNHYYGSSDYALDNWGQGTLVTVSSTRIQNPDPAVYQLRDSKSSDKSVCLFTDFDSQTNVSQSKDSDVYITDKCVLDMRSMDFKSNSAVAWSNKSDFACANAFNNSIIPEDTFFPSSDVPCDVKLVEKSFETDTNLNFQNLSVIGFRILLLKVAGFNLLMTLRLWSS

SEQ ID NO: 45275 - protein, 759 aa, synthetic construct
MALPVTALLLPLALLLHAARPDIQMTQSPSSLSASVGDRVTITCRASQDVRNIVVWFQQKPGKAPKLLIYSGSYRYSGVPSRFSGSGSGTDFTLTISSLQPEDFATYYCQQHYSPPYTFGQGTKVEIKRLEDLKNVFPPEVAVFEPSEAEISHTQKATLVCLATGFYPDHVELSWWVNGKEVHSGVCTDPQPLKEQPALNDSRYCLSSRLRVSATFWQNPRNHFRCQVQFYGLSENDEWTQDRAKPVTQIVSAEAWGRADCGFTSESYQQGVLSATILYEILLGKATLYAVLVSALVLMAMVKRKDSRGRAKRSGSGATNFSLLKQAGDVEENPGPTSTMDWIWRILFLVGAATGAHSGPEVQLVESGGGLVQPGGSLRLSCAASGRTFTMGWYRQAPGKEREFVAAISLSPTLAYYADSVKGRFTISRDNSKNTVVLQMNSLRAEDTALYYCAADRKSVMSIRPDYWGQGTLVTVSSGSGGGGSGGGGSGGGGSFEEVQLVESGPGLVKPSETLSLTCTVSGFSLTRFGVHWVRQPPGKGLEWLGVIWRGGSTDYNAAFMSRLTISKDNSKNQVSLKLSSVTAADTAVYYCSNHYYGSSDYALDNWGQGTLVTVSSTRIQNPDPAVYQLRDSKSSDKSVCLFTDFDSQTNVSQSKDSDVYITDKCVLDMRSMDFKSNSAVAWSNKSDFACANAFNNSIIPEDTFFPSPESSCDVKLVEKSFETDTNLNFQNLSVIGFRILLLKVAGFNLLMTLRLWSS

SEQ ID NO: 45276 - protein, 766 aa, synthetic construct
MALPVTALLLPLALLLHAARPDIQMTQSPSSLSASVGDRVTITCRASQDVRNIVVWFQQKPGKAPKLLIYSGSYRYSGVPSRFSGSGSGTDFTLTISSLQPEDFATYYCQQHYSPPYTFGQGTKVEIKRLEDLKNVFPPEVAVFEPSEAEISHTQKATLVCLATGFYPDHVELSWWVNGKEVHSGVCTDPQPLKEQPALNDSRYCLSSRLRVSATFWQNPRNHFRCQVQFYGLSENDEWTQDRAKPVTQIVSAEAWGRADCGFTSESYQQGVLSATILYEILLGKATLYAVLVSALVLMAMVKRKDSRGRAKRSGSGATNFSLLKQAGDVEENPGPTSTMDWIWRILFLVGAATGAHSGPQVQLVESGGGLVQPGGSLRLSCAASGNINSRNCMGWFRQAPGKGREGVAAIGQVTGRTYYVDSVKGRFTISLDNSKNTLYLQMNSLRAEDTAVYYCAAAPGCLLSALRSADYRNWGQGTLVTVSSGSGGGGSGGGGSGGGGSFEEVQLVESGPGLVKPSETLSLTCTVSGFSLTRFGVHWVRQPPGKGLEWLGVIWRGGSTDYNAAFMSRLTISKDNSKNQVSLKLSSVTAADTAVYYCSNHYYGSSDYALDNWGQGTLVTVSSTRIQNPDPAVYQLRDSKSSDKSVCLFTDFDSQTNVSQSKDSDVYITDKCVLDMRSMDFKSNSAVAWSNKSDFACANAFNNSIIPEDTFFPSPESSCDVKLVEKSFETDTNLNFQNLSVIGFRILLLKVAGFNLLMTLRLWSS

SEQ ID NO: 45277 - protein, 766 aa, synthetic construct
MALPVTALLLPLALLLHAARPDIQMTQSPSSLSASVGDRVTITCRASQDVRNIVVWFQQKPGKAPKLLIYSGSYRYSGVPSRFSGSGSGTDFTLTISSLQPEDFATYYCQQHYSPPYTFGQGTKVEIKRLEDLKNVFPPEVAVFEPSEAEISHTQKATLVCLATGFYPDHVELSWWVNGKEVHSGVCTDPQPLKEQPALNDSRYCLSSRLRVSATFWQNPRNHFRCQVQFYGLSENDEWTQDRAKPVTQIVSAEAWGRADCGFTSESYQQGVLSATILYEILLGKATLYAVLVSALVLMAMVKRKDSRGRAKRSGSGATNFSLLKQAGDVEENPGPTSTMDWIWRILFLVGAATGAHSGPQVQLVESGGGSVQAGGSLRLSCGASGNISSRNCMGWFRQAPGKEREGVAAIGQVTGRSYYVDSVKGRFTISLDNAKNTLYLQMNTLKPEDTAMYYCAAAPGCLLSALRSADYRNWGQGTQVTVSSGSGGGGSGGGGSGGGGSFEEVQLVESGPGLVKPSETLSLTCTVSGFSLTRFGVHWVRQPPGKGLEWLGVIWRGGSTDYNAAFMSRLTISKDNSKNQVSLKLSSVTAADTAVYYCSNHYYGSSDYALDNWGQGTLVTVSSTRIQNPDPAVYQLRDSKSSDKSVCLFTDFDSQTNVSQSKDSDVYITDKCVLDMRSMDFKSNSAVAWSNKSDFACANAFNNSIIPEDTFFPSPESSCDVKLVEKSFETDTNLNFQNLSVIGFRILLLKVAGFNLLMTLRLWSS

SEQ ID NO: 45278 - protein, 907 aa, synthetic construct
MALPVTALLLPLALLLHAARPEVQLVESGGGLVQAGGSLRLSCAASGRTFSMGWFRQAPGKEREFVAAITYSGGSPYYADSVKGRFTISRDNAKNTVYLQMNSLKPEDTAVYYCAANPTYGSDWNAENWGQGTQVTVSSGTGGGGSGGGGSGGGGSEFDIQMTQSPSSLSASVGDRVTITCRASQDVRNIVVWFQQKPGKAPKLLIYSGSYRYSGVPSRFSGSGSGTDFTLTISSLQPEDFATYYCQQHYSPPYTFGQGTKVEIKRLEIQNPDPAVYQLRDSKSSDKSVCLFTDFDSQTNVSQSKDSDVYITDKCVLDMRSMDFKSNSAVAWSNKSDFACANAFNNSIIPEDTFFPSSDVPCDVKLVEKSFETDTNLNFQNLSVIGFRILLLKVAGFNLLMTLRLWSSRAKRSGSGVKQTLNFDLLKLAGDVESNPGPTSTMDWIWRILFLVGAATGAHSGPQVQLVESGGGSVQAGGSLRLSCGASGNISSRNCMGWFRQAPGKEREGVAAIGQVTGRSYYVDSVKGRFTISLDNAKNTLYLQMNTLKPEDTAMYYCAAAPGCLLSALRSADYRNWGQGTQVTVSSGSGGGGSGGGGSGGGGSFEEVQLVESGPGLVKPSETLSLTCTVSGFSLTRFGVHWVRQPPGKGLEWLGVIWRGGSTDYNAAFMSRLTISKDNSKNQVSLKLSSVTAADTAVYYCSNHYYGSSDYALDNWGQGTLVTVSSTREDLKNVFPPEVAVFEPSKAEIAHTQKATLVCLATGFYPDHVELSWWVNGKEVHSGVCTDPQPLKEQPALNDSRYCLSSRLRVSATFWQNPRNHFRCQVQFYGLSENDEWTQDRAKPVTQIVSAEAWGRADCGITSASYHQGVLSATILYEILLGKATLYAVLVSALVLMAMVKRKDSRG

SEQ ID NO: 45279 - protein, 904 aa, synthetic construct
MALPVTALLLPLALLLHAARPQVQLVESGGGSVQAGGSLRLSCGASGNISSRNCMGWFRQAPGKEREGVAAIGQVTGRSYYVDSVKGRFTISLDNAKNTLYLQMNTLKPEDTAMYYCAAAPGCLLSALRSADYRNWGQGTQVTVSSGTGGGGSGGGGSGGGGSEFDIQMTQSPSSLSASVGDRVTITCRASQDVRNIVVWFQQKPGKAPKLLIYSGSYRYSGVPSRFSGSGSGTDFTLTISSLQPEDFATYYCQQHYSPPYTFGQGTKVEIKRLEDLKNVFPPEVAVFEPSEAEISHTQKATLVCLATGFYPDHVELSWWVNGKEVHSGVCTDPQPLKEQPALNDSRYCLSSRLRVSATFWQNPRNHFRCQVQFYGLSENDEWTQDRAKPVTQIVSAEAWGRADCGFTSESYQQGVLSATILYEILLGKATLYAVLVSALVLMAMVKRKDSRGRAKRSGSGATNFSLLKQAGDVEENPGPTSATMDWIWRILFLVGAATGAHSGPEVQLVESGGGLVQAGGSLRLSCAASGRTFTMGWFRQAPGKEREFVAAISLSPTLAYYADSVKGRFTISRDNAKNTVVLQMNSLKPEDTALYYCAADRKSVMSIRPDYWGQGTQVTVSSGSGGGGSGGGGSGGGGSFEEVQLVESGPGLVKPSETLSLTCTVSGFSLTRFGVHWVRQPPGKGLEWLGVIWRGGSTDYNAAFMSRLTISKDNSKNQVSLKLSSVTAADTAVYYCSNHYYGSSDYALDNWGQGTLVTVSSTRIQNPDPAVYQLRDSKSSDKSVCLFTDFDSQTNVSQSKDSDVYITDKCVLDMRSMDFKSNSAVAWSNKSDFACANAFNNSIIPEDTFFPSPESSCDVKLVEKSFETDTNLNFQNLSVIGFRILLLKVAGFNLLMTLRLWSS

SEQ ID NO: 45280 - protein, 767 aa, synthetic construct
MALPVTALLLPLALLLHAARPQVQLVESGGGSVQAGGSLRLSCGASGNISSRNCMGWFRQAPGKEREGVAAIGQVTGRSYYVDSVKGRFTISLDNAKNTLYLQMNTLKPEDTAMYYCAAAPGCLLSALRSADYRNWGQGTQVTVSSGTGGGGSGGGGSGGGGSEFDIQMTQSPSSLSASVGDRVTITCRASQDVRNIVVWFQQKPGKAPKLLIYSGSYRYSGVPSRFSGSGSGTDFTLTISSLQPEDFATYYCQQHYSPPYTFGQGTKVEIKRLEDLKNVFPPEVAVFEPSEAEISHTQKATLVCLATGFYPDHVELSWWVNGKEVHSGVCTDPQPLKEQPALNDSRYCLSSRLRVSATFWQNPRNHFRCQVQFYGLSENDEWTQDRAKPVTQIVSAEAWGRADCGFTSESYQQGVLSATILYEILLGKATLYAVLVSALVLMAMVKRKDSRGRAKRSGSGATNFSLLKQAGDVEENPGPTSATMDWIWRILFLVGAATGAHSFEEVQLVESGPGLVKPSETLSLTCTVSGFSLTRFGVHWVRQPPGKGLEWLGVIWRGGSTDYNAAFMSRLTISKDNSKNQVSLKLSSVTAADTAVYYCSNHYYGSSDYALDNWGQGTLVTVSSTRIQNPDPAVYQLRDSKSSDKSVCLFTDFDSQTNVSQSKDSDVYITDKCVLDMRSMDFKSNSAVAWSNKSDFACANAFNNSIIPEDTFFPSPESSCDVKLVEKSFETDTNLNFQNLSVIGFRILLLKVAGFNLLMTLRLWSS

SEQ ID NO: 45281 - protein, 767 aa, synthetic construct
MALPVTALLLPLALLLHAARPQVQLVESGGGVVQPGGSLRLSCAASGLSFSTYTVAWFRQAPGKGLEGVAAIPYTSQHMVYTDSVRGRFTISRDNSKNTLYLQMNSLRAEDTAVYYCATDRRPGTSMLAINGYNRWGQGTTVTVSSGTGGGGSGGGGSGGGGSEFDIQMTQSPSSLSASVGDRVTITCRASQDVRNIVVWFQQKPGKAPKLLIYSGSYRYSGVPSRFSGSGSGTDFTLTISSLQPEDFATYYCQQHYSPPYTFGQGTKVEIKRLEDLKNVFPPEVAVFEPSEAEISHTQKATLVCLATGFYPDHVELSWWVNGKEVHSGVCTDPQPLKEQPALNDSRYCLSSRLRVSATFWQNPRNHFRCQVQFYGLSENDEWTQDRAKPVTQIVSAEAWGRADCGFTSESYQQGVLSATILYEILLGKATLYAVLVSALVLMAMVKRKDSRGRAKRSGSGATNFSLLKQAGDVEENPGPTSATMDWIWRILFLVGAATGAHSFEEVQLVESGPGLVKPSETLSLTCTVSGFSLTRFGVHWVRQPPGKGLEWLGVIWRGGSTDYNAAFMSRLTISKDNSKNQVSLKLSSVTAADTAVYYCSNHYYGSSDYALDNWGQGTLVTVSSTRIQNPDPAVYQLRDSKSSDKSVCLFTDFDSQTNVSQSKDSDVYITDKCVLDMRSMDFKSNSAVAWSNKSDFACANAFNNSIIPEDTFFPSPESSCDVKLVEKSFETDTNLNFQNLSVIGFRILLLKVAGFNLLMTLRLWSS

SEQ ID NO: 45282 - protein, 766 aa, synthetic construct
MALPVTALLLPLALLLHAARPDIQMTQSPSSLSASVGDRVTITCRASQDVRNIVVWFQQKPGKAPKLLIYSGSYRYSGVPSRFSGSGSGTDFTLTISSLQPEDFATYYCQQHYSPPYTFGQGTKVEIKRLEDLKNVFPPEVAVFEPSEAEISHTQKATLVCLATGFYPDHVELSWWVNGKEVHSGVCTDPQPLKEQPALNDSRYCLSSRLRVSATFWQNPRNHFRCQVQFYGLSENDEWTQDRAKPVTQIVSAEAWGRADCGFTSESYQQGVLSATILYEILLGKATLYAVLVSALVLMAMVKRKDSRGRAKRSGSGATNFSLLKQAGDVEENPGPTSTMDWIWRILFLVGAATGAHSGPQVQLVESGGGVVQPGGSLRLSCAASGLSFSTYTVAWFRQAPGKGLEGVAAIPYTSQHMVYTDSVRGRFTISRDNSKNTLYLQMNSLRAEDTAVYYCATDRRPGTSMLAINGYNRWGQGTTVTVSSGSGGGGSGGGGSGGGGSFEEVQLVESGPGLVKPSETLSLTCTVSGFSLTRFGVHWVRQPPGKGLEWLGVIWRGGSTDYNAAFMSRLTISKDNSKNQVSLKLSSVTAADTAVYYCSNHYYGSSDYALDNWGQGTLVTVSSTRIQNPDPAVYQLRDSKSSDKSVCLFTDFDSQTNVSQSKDSDVYITDKCVLDMRSMDFKSNSAVAWSNKSDFACANAFNNSIIPEDTFFPSPESSCDVKLVEKSFETDTNLNFQNLSVIGFRILLLKVAGFNLLMTLRLWSS

SEQ ID NO: 45283 - protein, 768 aa, synthetic construct
MALPVTALLLPLALLLHAARPDIQMTQSPSSLSASVGDRVTITCRASQDVRNIVVWFQQKPGKAPKLLIYSGSYRYSGVPSRFSGSGSGTDFTLTISSLQPEDFATYYCQQHYSPPYTFGQGTKVEIKRLEDLKNVFPPEVAVFEPSEAEISHTQKATLVCLATGFYPDHVELSWWVNGKEVHSGVCTDPQPLKEQPALNDSRYCLSSRLRVSATFWQNPRNHFRCQVQFYGLSENDEWTQDRAKPVTQIVSAEAWGRADCGFTSESYQQGVLSATILYEILLGKATLYAVLVSALVLMAMVKRKDSRGRAKRSGSGATNFSLLKQAGDVEENPGPTSTMDWIWRILFLVGAATGAHSGPEVQLVESGGGSVQAGGSLRLSCAASGYTYSINCMGWFRQAPGKEREGVAAISTGGGRTDYRDSVKGRFTISQDNAKNTVYLQMNSLKPEDTAMYYCAGKTTYPGYGCGLGRSAYNYWGQGTQVTVSSGSGGGGSGGGGSGGGGSFEEVQLVESGPGLVKPSETLSLTCTVSGFSLTRFGVHWVRQPPGKGLEWLGVIWRGGSTDYNAAFMSRLTISKDNSKNQVSLKLSSVTAADTAVYYCSNHYYGSSDYALDNWGQGTLVTVSSTRIQNPDPAVYQLRDSKSSDKSVCLFTDFDSQTNVSQSKDSDVYITDKCVLDMRSMDFKSNSAVAWSNKSDFACANAFNNSIIPEDTFFPSPESSCDVKLVEKSFETDTNLNFQNLSVIGFRILLLKVAGFNLLMTLRLWSS

SEQ ID NO: 45284 - protein, 621 aa, synthetic construct
MALPVTALLLPLALLLHAARPDIQMTQSPSSLSASVGDRVTITCRASQDVRNIVVWFQQKPGKAPKLLIYSGSYRYSGVPSRFSGSGSGTDFTLTISSLQPEDFATYYCQQHYSPPYTFGQGTKVEIKRLEDLKHVFPPEVAVFEPSDAEIWHTQKATLVCLATGFYPDHVELSWWVNGKEVHSGVSTDPQPLKEQPALNDSRYCLSSRLRVSATFWQNPRNHFRCQVQFYGLSENDEWTQDRAKPVTQIVSAEAWGRADCGFTSESYQQGVLSATILYEILLGKATLYAVLVSALVLMAMVKRKDSRGRAKRSGSGATNFSLLKQAGDVEENPGPTSMDWIWRILFLVGAATGAHSFEEVQLVESGPGLVKPSETLSLTCTVSGFSLTRFGVHWVRQPPGKGLEWLGVIWRGGSTDYNAAFMSRLTISKDNSKNQVSLKLSSVTAADTAVYYCSNHYYGSSDYALDNWGQGTLVTVSSTRIQNPDPAVYQLRDSKSSDKSVCLFTDFDSQTNVSQSKDSDVYITDKTVLDMRSMDFKSNSAVAWSSKSDFACANAFNNSIIPEDTFFPSPEMACDVKLVEKSFETDTNLNFQNLLVIWLRILLLKVAGFNLLMTLRLWSS

SEQ ID NO: 45285 - protein, 621 aa, synthetic construct
MALPVTALLLPLALLLHAARPDIQMTQSPSSLSASVGDRVTITCRASQDVRNIVVWFQQKPGKAPKLLIYSGSYRYSGVPSRFSGSGSGTDFTLTISSLQPEDFATYYCQQHYSPPYTFGQGTKVEIKRLEDLKHVFPPEVAVFEPSDAEIWHTQKATLVCLATGFYPDHVELSWWVNGKEVHSGVSTDPQPLKEQPALNDSRYCLSSRLRVSATFWQNPRNHFRCQVQFYGLSENDEWTQDRAKPVTQIVSAEAWGRADCGFTSESYQQGVLSATILYEILLGKATLYAVLVSALVLMAMVKRKDSRGRAKRSGSGATNFSLLKQAGDVEENPGPTSMDWIWRILFLVGAATGAHSFEEVQLVESGPGLVKPSETLSLTCTVSGFSLTRFGVHWVRQPPGKGLEWLGVIWRGGSTDYNAAFMSRLTISKDNSKNQVSLKLSSVTAADTAVYYCSNHYYGSSDYALDNWGQGTLVTVSSTRIQNPDPAVYQLRDSKSSDKSVCLFTDFDSQTNVSQSKDSDVYITDKTVLDMRSMDFKSNSAVAWSTKSDFACANAFNNSIIPEDTFFPSPEVVCDVKLVEKSFETDTNLNFQNLVVIGARILLLKVAGFNLLMTLRLWSS

SEQ ID NO: 45286 - protein, 621 aa, synthetic construct
MALPVTALLLPLALLLHAARPDIQMTQSPSSLSASVGDRVTITCRASQDVRNIVVWFQQKPGKAPKLLIYSGSYRYSGVPSRFSGSGSGTDFTLTISSLQPEDFATYYCQQHYSPPYTFGQGTKVEIKRLEDLKNVFPPEVAVFEPSKAEISRTQKATLVCLATGFYPPHVELSWWVNGKEVHDGVCTDPQPLKEQPALNDSRYCLSSRLRVSATFWQNPRNHFRCQVQFYGLSENDEWTQDRAKPVTQIVSAEAWGRADCGFTSESYQQGVLSATILYEILLGKATLYAVLVSALVLMAMVKRKDSRGRAKRSGSGATNFSLLKQAGDVEENPGPTSMDWIWRILFLVGAATGAHSFEEVQLVESGPGLVKPSETLSLTCTVSGFSLTRFGVHWVRQPPGKGLEWLGVIWRGGSTDYNAAFMSRLTISKDNSKNQVSLKLSSVTAADTAVYYCSNHYYGSSDYALDNWGQGTLVTVSSTRIQNPDPAVYQLRDSKSSDKFVCLFTDFDSQINVSQSKDSDVYITDKCVLDMRSMDFKSNSAVAWSNKSDFTCANAFNNSIIPEDTFFPSPESSCDVKLVEKSFETDTNLNFQNLSVIGFRILLLKVAGFNLLMTLRLWSS

SEQ ID NO: 45287 - protein, 763 aa, synthetic construct
MALPVTALLLPLALLLHAARPDIQMTQSPSSLSASVGDRVTITCRASQDVRNIVVWFQQKPGKAPKLLIYSGSYRYSGVPSRFSGSGSGTDFTLTISSLQPEDFATYYCQQHYSPPYTFGQGTKVEIKRLEDLKNVFPPEVAVFEPSEAEISHTQKATLVCLATGFYPDHVELSWWVNGKEVHSGVCTDPQPLKEQPALNDSRYCLSSRLRVSATFWQNPRNHFRCQVQFYGLSENDEWTQDRAKPVTQIVSAEAWGRADCGFTSESYQQGVLSATILYEILLGKATLYAVLVSALVLMAMVKRKDSRGRAKRSGSGATNFSLLKQAGDVEENPGPTSTMDWIWRILFLVGAATGAHSGPQVQLQESGPGLVKPSQTLSLTCTVSGASITTGEYYWNWFRQPPGKGLEWMGAIAASGSTTYSPSFESRTSISRDTSKNQFSLKLSSVTAADTAVYYCGRSFGVAAVTTGQNRGQGTLVTVSSGSGGGGSGGGGSGGGGSFEEVQLVESGPGLVKPSETLSLTCTVSGFSLTRFGVHWVRQPPGKGLEWLGVIWRGGSTDYNAAFMSRLTISKDNSKNQVSLKLSSVTAADTAVYYCSNHYYGSSDYALDNWGQGTLVTVSSTRIQNPDPAVYQLRDSKSSDKSVCLFTDFDSQTNVSQSKDSDVYITDKCVLDMRSMDFKSNSAVAWSNKSDFACANAFNNSIIPEDTFFPSPESSCDVKLVEKSFETDTNLNFQNLSVIGFRILLLKVAGFNLLMTLRLWSS

SEQ ID NO: 45288 - protein, 904 aa, synthetic construct
MALPVTALLLPLALLLHAARPQVQLQESGPGLVKPSQTLSLTCTVSGGSITTGEFYWNWFRQPPGKGLEWMGAIAASGSTTYSPSFESRTSISRDTSKNQFSLKLSSVTAADTAVYYCGRSFGVAAVTTGQNRGQGTLVTVSSGTGGGGSGGGGSGGGGSEFDIQMTQSPSSLSASVGDRVTITCRASQDVRNIVVWFQQKPGKAPKLLIYSGSYRYSGVPSRFSGSGSGTDFTLTISSLQPEDFATYYCQQHYSPPYTFGQGTKVEIKRLEIQNPDPAVYQLRDSKSSDKSVCLFTDFDSQTNVSQSKDSDVYITDKCVLDMRSMDFKSNSAVAWSNKSDFACANAFNNSIIPEDTFFPSSDVPCDVKLVEKSFETDTNLNFQNLSVIGFRILLLKVAGFNLLMTLRLWSSRAKRSGSGVKQTLNFDLLKLAGDVESNPGPTSTMDWIWRILFLVGAATGAHSGPEVQLVESGGGLVQPGGSLRLSCAASGRTFTMGWYRQAPGKEREFVAAISLSPTLAYYADSVKGRFTISRDNSKNTVVLQMNSLRAEDTALYYCAADRKSVMSIRPDYWGQGTLVTVSSGSGGGGSGGGGSGGGGSFEEVQLVESGPGLVKPSETLSLTCTVSGFSLTRFGVHWVRQPPGKGLEWLGVIWRGGSTDYNAAFMSRLTISKDNSKNQVSLKLSSVTAADTAVYYCSNHYYGSSDYALDNWGQGTLVTVSSTREDLKNVFPPEVAVFEPSKAEIAHTQKATLVCLATGFYPDHVELSWWVNGKEVHSGVCTDPQPLKEQPALNDSRYCLSSRLRVSATFWQNPRNHFRCQVQFYGLSENDEWTQDRAKPVTQIVSAEAWGRADCGITSASYHQGVLSATILYEILLGKATLYAVLVSALVLMAMVKRKDSRG

SEQ ID NO: 45289 - protein, 767 aa, synthetic construct
MALPVTALLLPLALLLHAARPQVQLQESGPGLVKPSQTLSLTCTVSGGSITTGEFYWNWFRQPPGKGLEWMGAIAASGSTTYSPSFESRTSISRDTSKNQFSLKLSSVTAADTAVYYCGRSFGVAAVTTGQNRGQGTLVTVSSGTGGGGSGGGGSGGGGSEFDIQMTQSPSSLSASVGDRVTITCRASQDVRNIVVWFQQKPGKAPKLLIYSGSYRYSGVPSRFSGSGSGTDFTLTISSLQPEDFATYYCQQHYSPPYTFGQGTKVEIKRLEIQNPDPAVYQLRDSKSSDKSVCLFTDFDSQTNVSQSKDSDVYITDKCVLDMRSMDFKSNSAVAWSNKSDFACANAFNNSIIPEDTFFPSSDVPCDVKLVEKSFETDTNLNFQNLSVIGFRILLLKVAGFNLLMTLRLWSSRAKRSGSGVKQTLNFDLLKLAGDVESNPGPTSTMDWIWRILFLVGAATGAHSFEEVQLVESGPGLVKPSETLSLTCTVSGFSLTRFGVHWVRQPPGKGLEWLGVIWRGGSTDYNAAFMSRLTISKDNSKNQVSLKLSSVTAADTAVYYCSNHYYGSSDYALDNWGQGTLVTVSSTREDLKNVFPPEVAVFEPSKAEIAHTQKATLVCLATGFYPDHVELSWWVNGKEVHSGVCTDPQPLKEQPALNDSRYCLSSRLRVSATFWQNPRNHFRCQVQFYGLSENDEWTQDRAKPVTQIVSAEAWGRADCGITSASYHQGVLSATILYEILLGKATLYAVLVSALVLMAMVKRKDSRG

SEQ ID NO: 45290 - protein, 900 aa, synthetic construct
MALPVTALLLPLALLLHAARPEVQLVESGGGLVQAGGSLRLSCAASGRTFSMGWFRQAPGKEREFVAAITYSGGSPYYADSVKGRFTISRDNAKNTVYLQMNSLKPEDTAVYYCAANPTYGSDWNAENWGQGTQVTVSSGTGGGGSGGGGSGGGGSEFDIQMTQSPSSLSASVGDRVTITCRASQDVRNIVVWFQQKPGKAPKLLIYSGSYRYSGVPSRFSGSGSGTDFTLTISSLQPEDFATYYCQQHYSPPYTFGQGTKVEIKRLEDLKNVFPPEVAVFEPSEAEISHTQKATLVCLATGFYPDHVELSWWVNGKEVHSGVCTDPQPLKEQPALNDSRYCLSSRLRVSATFWQNPRNHFRCQVQFYGLSENDEWTQDRAKPVTQIVSAEAWGRADCGFTSESYQQGVLSATILYEILLGKATLYAVLVSALVLMAMVKRKDSRGRAKRSGSGATNFSLLKQAGDVEENPGPTSTMDWIWRILFLVGAATGAHSGPQVQLQESGPGLVKPSQTLSLTCTVSGASITTGEYYWNWFRQPPGKGLEWMGAIAASGSTTYSPSFESRTSISRDTSKNQFSLKLSSVTAADTAVYYCGRSFGVAAVTTGQNRGQGTLVTVSSGSGGGGSGGGGSGGGGSFEEVQLVESGPGLVKPSETLSLTCTVSGFSLTRFGVHWVRQPPGKGLEWLGVIWRGGSTDYNAAFMSRLTISKDNSKNQVSLKLSSVTAADTAVYYCSNHYYGSSDYALDNWGQGTLVTVSSTRIQNPDPAVYQLRDSKSSDKSVCLFTDFDSQTNVSQSKDSDVYITDKCVLDMRSMDFKSNSAVAWSNKSDFACANAFNNSIIPEDTFFPSPESSCDVKLVEKSFETDTNLNFQNLSVIGFRILLLKVAGFNLLMTLRLWSS

SEQ ID NO: 45291 - protein, 907 aa, synthetic construct
MALPVTALLLPLALLLHAARPEVQLVESGGGLVQAGGSLRLSCAASGRTFSMGWFRQAPGKEREFVAAITYSGGSPYYADSVKGRFTISRDNAKNTVYLQMNSLKPEDTAVYYCAANPTYGSDWNAENWGQGTQVTVSSGTGGGGSGGGGSGGGGSEFDIQMTQSPSSLSASVGDRVTITCRASQDVRNIVVWFQQKPGKAPKLLIYSGSYRYSGVPSRFSGSGSGTDFTLTISSLQPEDFATYYCQQHYSPPYTFGQGTKVEIKRLEIQNPDPAVYQLRDSKSSDKSVCLFTDFDSQTNVSQSKDSDVYITDKCVLDMRSMDFKSNSAVAWSNKSDFACANAFNNSIIPEDTFFPSSDVPCDVKLVEKSFETDTNLNFQNLSVIGFRILLLKVAGFNLLMTLRLWSSRAKRSGSGVKQTLNFDLLKLAGDVESNPGPTSTMDWIWRILFLVGAATGAHSGPQVQLVESGGGLVQPGGSLRLSCAASGNINSRNCMGWFRQAPGKGREGVAAIGQVTGRTYYVDSVKGRFTISLDNSKNTLYLQMNSLRAEDTAVYYCAAAPGCLLSALRSADYRNWGQGTLVTVSSGSGGGGSGGGGSGGGGSFEEVQLVESGPGLVKPSETLSLTCTVSGFSLTRFGVHWVRQPPGKGLEWLGVIWRGGSTDYNAAFMSRLTISKDNSKNQVSLKLSSVTAADTAVYYCSNHYYGSSDYALDNWGQGTLVTVSSTREDLKNVFPPEVAVFEPSKAEIAHTQKATLVCLATGFYPDHVELSWWVNGKEVHSGVCTDPQPLKEQPALNDSRYCLSSRLRVSATFWQNPRNHFRCQVQFYGLSENDEWTQDRAKPVTQIVSAEAWGRADCGITSASYHQGVLSATILYEILLGKATLYAVLVSALVLMAMVKRKDSRG

SEQ ID NO: 45292 - protein, 903 aa, synthetic construct
MALPVTALLLPLALLLHAARPEVQLVESGGGLVQAGGSLRLSCAASGRTFSMGWFRQAPGKEREFVAAITYSGGSPYYADSVKGRFTISRDNAKNTVYLQMNSLKPEDTAVYYCAANPTYGSDWNAENWGQGTQVTVSSGTGGGGSGGGGSGGGGSEFDIQMTQSPSSLSASVGDRVTITCRASQDVRNIVVWFQQKPGKAPKLLIYSGSYRYSGVPSRFSGSGSGTDFTLTISSLQPEDFATYYCQQHYSPPYTFGQGTKVEIKRLEDLKNVFPPEVAVFEPSEAEISHTQKATLVCLATGFYPDHVELSWWVNGKEVHSGVCTDPQPLKEQPALNDSRYCLSSRLRVSATFWQNPRNHFRCQVQFYGLSENDEWTQDRAKPVTQIVSAEAWGRADCGFTSESYQQGVLSATILYEILLGKATLYAVLVSALVLMAMVKRKDSRGRAKRSGSGATNFSLLKQAGDVEENPGPTSTMDWIWRILFLVGAATGAHSGPQVQLVESGGGLVQPGGSLRLSCAASGNINSRNCMGWFRQAPGKGREGVAAIGQVTGRTYYVDSVKGRFTISLDNSKNTLYLQMNSLRAEDTAVYYCAAAPGCLLSALRSADYRNWGQGTLVTVSSGSGGGGSGGGGSGGGGSFEEVQLVESGPGLVKPSETLSLTCTVSGFSLTRFGVHWVRQPPGKGLEWLGVIWRGGSTDYNAAFMSRLTISKDNSKNQVSLKLSSVTAADTAVYYCSNHYYGSSDYALDNWGQGTLVTVSSTRIQNPDPAVYQLRDSKSSDKSVCLFTDFDSQTNVSQSKDSDVYITDKCVLDMRSMDFKSNSAVAWSNKSDFACANAFNNSIIPEDTFFPSPESSCDVKLVEKSFETDTNLNFQNLSVIGFRILLLKVAGFNLLMTLRLWSS

SEQ ID NO: 45293 - protein, 903 aa, synthetic construct
MALPVTALLLPLALLLHAARPEVQLVESGGGLVQAGGSLRLSCAASGRTFTMGWFRQAPGKEREFVAAISLSPTLAYYADSVKGRFTISRDNAKNTVVLQMNSLKPEDTALYYCAADRKSVMSIRPDYWGQGTQVTVSSGTGGGGSGGGGSGGGGSEFDIQMTQSPSSLSASVGDRVTITCRASQDVRNIVVWFQQKPGKAPKLLIYSGSYRYSGVPSRFSGSGSGTDFTLTISSLQPEDFATYYCQQHYSPPYTFGQGTKVEIKRLEDLKNVFPPEVAVFEPSEAEISHTQKATLVCLATGFYPDHVELSWWVNGKEVHSGVCTDPQPLKEQPALNDSRYCLSSRLRVSATFWQNPRNHFRCQVQFYGLSENDEWTQDRAKPVTQIVSAEAWGRADCGFTSESYQQGVLSATILYEILLGKATLYAVLVSALVLMAMVKRKDSRGRAKRSGSGATNFSLLKQAGDVEENPGPTSTMDWIWRILFLVGAATGAHSGPQVQLVESGGGLVQPGGSLRLSCAASGNINSRNCMGWFRQAPGKGREGVAAIGQVTGRTYYVDSVKGRFTISLDNSKNTLYLQMNSLRAEDTAVYYCAAAPGCLLSALRSADYRNWGQGTLVTVSSGSGGGGSGGGGSGGGGSFEEVQLVESGPGLVKPSETLSLTCTVSGFSLTRFGVHWVRQPPGKGLEWLGVIWRGGSTDYNAAFMSRLTISKDNSKNQVSLKLSSVTAADTAVYYCSNHYYGSSDYALDNWGQGTLVTVSSTRIQNPDPAVYQLRDSKSSDKSVCLFTDFDSQTNVSQSKDSDVYITDKCVLDMRSMDFKSNSAVAWSNKSDFACANAFNNSIIPEDTFFPSPESSCDVKLVEKSFETDTNLNFQNLSVIGFRILLLKVAGFNLLMTLRLWSS

SEQ ID NO: 45294 - protein, 907 aa, synthetic construct
MALPVTALLLPLALLLHAARPQVQLQESGPGLVKPSQTLSLTCTVSGGSITTGEFYWNWFRQPPGKGLEWMGAIAASGSTTYSPSFESRTSISRDTSKNQFSLKLSSVTAADTAVYYCGRSFGVAAVTTGQNRGQGTLVTVSSGTGGGGSGGGGSGGGGSEFDIQMTQSPSSLSASVGDRVTITCRASQDVRNIVVWFQQKPGKAPKLLIYSGSYRYSGVPSRFSGSGSGTDFTLTISSLQPEDFATYYCQQHYSPPYTFGQGTKVEIKRLEDLKNVFPPEVAVFEPSEAEISHTQKATLVCLATGFYPDHVELSWWVNGKEVHSGVCTDPQPLKEQPALNDSRYCLSSRLRVSATFWQNPRNHFRCQVQFYGLSENDEWTQDRAKPVTQIVSAEAWGRADCGFTSESYQQGVLSATILYEILLGKATLYAVLVSALVLMAMVKRKDSRGRAKRSGSGATNFSLLKQAGDVEENPGPTSTMDWIWRILFLVGAATGAHSGPQVQLVESGGGLVQPGGSLRLSCAASGNINSRNCMGWFRQAPGKGREGVAAIGQVTGRTYYVDSVKGRFTISLDNSKNTLYLQMNSLRAEDTAVYYCAAAPGCLLSALRSADYRNWGQGTLVTVSSGSGGGGSGGGGSGGGGSFEEVQLVESGPGLVKPSETLSLTCTVSGFSLTRFGVHWVRQPPGKGLEWLGVIWRGGSTDYNAAFMSRLTISKDNSKNQVSLKLSSVTAADTAVYYCSNHYYGSSDYALDNWGQGTLVTVSSTRIQNPDPAVYQLRDSKSSDKSVCLFTDFDSQTNVSQSKDSDVYITDKCVLDMRSMDFKSNSAVAWSNKSDFACANAFNNSIIPEDTFFPSPESSCDVKLVEKSFETDTNLNFQNLSVIGFRILLLKVAGFNLLMTLRLWSS

SEQ ID NO: 45295 - protein, 488 aa, synthetic construct
MALPVTALLLPLALLLHAARPDIVLTQSPLSLAVSLGQPAIISCRASQSVSFAGTSLMHWYHQKPGQQPRLLIYRASNLEAGVPDRFSGSGSKTDFTLTISPVEAEDAATYYCQQSREYPYTFGGGTKLEIKRGGGGSGGGGSGGGGSQVQLVQSGAEVVKPGASVKISCKASGYTFTGYFMHWVKQSPGQSLEWIGRIHPYDGDTFYNQKFQGKATLTVDKSSNTAHMELLSLTSEDFAVYYCTRYDGSRAMDYWGQGTTVTVSSTRKIEVMYPPPYLDNEKSNGTIIHVKGKHLCPSPLFPGPSKPFWVLVVVGGVLACYSLLVTVAFIIFWVRSKRSRLLHSDYMNMTPRRPGPTRKHYQPYAPPRDFAAYRSRVKFSRSADAPAYQQGQNQLYNELNLGRREEYDVLDKRRGRDPEMGGKPRRKNPQEGLYNELQKDKMAEAYSEIGMKGERRRGKGHDGLYQGLSTATKDTYDALHMQALPPR

SEQ ID NO: 45296 - protein, 494 aa, synthetic construct
MALPVTALLLPLALLLHAARPDIVLTQSPLSLAVSLGQPAIISCRASQSVSFAGTSLMHWYHQKPGQQPRLLIYRASNLEAGVPDRFSGSGSKTDFTLTISPVEAEDAATYYCQQSREYPYTFGGGTKLEIKRGGGGSGGGGSGGGGSQVQLVQSGAEVVKPGASVKISCKASGYTFTGYFMHWVKQSPGQSLEWIGRIHPYDGDTFYNQKFQGKATLTVDKSSNTAHMELLSLTSEDFAVYYCTRYDGSRAMDYWGQGTTVTVSSTRAKPTTTPAPRPPTPAPTIASQPLSLRPEACRPAAGGAVHTRGLDFACDIYIWAPLAGTCGVLLLSLVITLYCKRGRKKLLYIFKQPFMRPVQTTQEEDGCSCRFPEEEEGGCELRVKFSRSADAPAYQQGQNQLYNELNLGRREEYDVLDKRRGRDPEMGGKPRRKNPQEGLYNELQKDKMAEAYSEIGMKGERRRGKGHDGLYQGLSTATKDTYDALHMQALPPR

SEQ ID NO: 45297 - protein, 494 aa, synthetic construct
MALPVTALLLPLALLLHAARPQVQLVQSGAEVVKPGASVKISCKASGYTFTGYFMHWVKQSPGQSLEWIGRIHPYDGDTFYNQKFQGKATLTVDKSSNTAHMELLSLTSEDFAVYYCTRYDGSRAMDYWGQGTTVTVSSGGGGSGGGGSGGGGSDIVLTQSPLSLAVSLGQPAIISCRASQSVSFAGTSLMHWYHQKPGQQPRLLIYRASNLEAGVPDRFSGSGSKTDFTLTISPVEAEDAATYYCQQSREYPYTFGGGTKLEIKRTRAKPTTTPAPRPPTPAPTIASQPLSLRPEACRPAAGGAVHTRGLDFACDIYIWAPLAGTCGVLLLSLVITLYCKRGRKKLLYIFKQPFMRPVQTTQEEDGCSCRFPEEEEGGCELRVKFSRSADAPAYQQGQNQLYNELNLGRREEYDVLDKRRGRDPEMGGKPRRKNPQEGLYNELQKDKMAEAYSEIGMKGERRRGKGHDGLYQGLSTATKDTYDALHMQALPPR

SEQ ID NO: 45298 - protein, 627 aa, synthetic construct
MALPVTALLLPLALLLHAARPDIVLTQSPLSLAVSLGQPAIISCRASQSVSFAGTSLMHWYHQKPGQQPRLLIYRASNLEAGVPDRFSGSGSKTDFTLTISPVEAEDAATYYCQQSREYPYTFGGGTKLEIKRLEIQNPDPAVYQLRDSKSSDKSVCLFTDFDSQTNVSQSKDSDVYITDKCVLDMRSMDFKSNSAVAWSNKSDFACANAFNNSIIPEDTFFPSSDVPCDVKLVEKSFETDTNLNFQNLSVIGFRILLLKVAGFNLLMTLRLWSSRAKRSGSGVKQTLNFDLLKLAGDVESNPGPTSMDWIWRILFLVGAATGAHSFEQVQLVQSGAEVVKPGASVKISCKASGYTFTGYFMHWVKQSPGQSLEWIGRIHPYDGDTFYNQKFQGKATLTVDKSSNTAHMELLSLTSEDFAVYYCTRYDGSRAMDYWGQGTTVTVSSTREDLKNVFPPEVAVFEPSKAEIAHTQKATLVCLATGFYPDHVELSWWVNGKEVHSGVCTDPQPLKEQPALNDSRYCLSSRLRVSATFWQNPRNHFRCQVQFYGLSENDEWTQDRAKPVTQIVSAEAWGRADCGITSASYHQGVLSATILYEILLGKATLYAVLVSALVLMAMVKRKDSRG

SEQ ID NO: 45299 - protein, 623 aa, synthetic construct
MALPVTALLLPLALLLHAARPDIVLTQSPLSLAVSLGQPAIISCRASQSVSFAGTSLMHWYHQKPGQQPRLLIYRASNLEAGVPDRFSGSGSKTDFTLTISPVEAEDAATYYCQQSREYPYTFGGGTKLEIKRLEDLKNVFPPEVAVFEPSKAEIAHTQKATLVCLATGFYPDHVELSWWVNGKEVHSGVCTDPQPLKEQPALNDSRYCLSSRLRVSATFWQNPRNHFRCQVQFYGLSENDEWTQDRAKPVTQIVSAEAWGRADCGITSASYHQGVLSATILYEILLGKATLYAVLVSALVLMAMVKRKDSRGRAKRSGSGATNFSLLKQAGDVEENPGPTSMDWIWRILFLVGAATGAHSFEQVQLVQSGAEVVKPGASVKISCKASGYTFTGYFMHWVKQSPGQSLEWIGRIHPYDGDTFYNQKFQGKATLTVDKSSNTAHMELLSLTSEDFAVYYCTRYDGSRAMDYWGQGTTVTVSSTRIQNPDPAVYQLRDSKSSDKSVCLFTDFDSQTNVSQSKDSDVYITDKCVLDMRSMDFKSNSAVAWSNKSDFACANAFNNSIIPEDTFFPSSDVPCDVKLVEKSFETDTNLNFQNLSVIGFRILLLKVAGFNLLMTLRLWSS

SEQ ID NO: 45300 - protein, 623 aa, synthetic construct
MALPVTALLLPLALLLHAARPDIVLTQSPLSLAVSLGQPAIISCRASQSVSFAGTSLMHWYHQKPGQQPRLLIYRASNLEAGVPDRFSGSGSKTDFTLTISPVEAEDAATYYCQQSREYPYTFGGGTKLEIKRLEDLKNVFPPEVAVFEPSEAEISHTQKATLVCLATGFYPDHVELSWWVNGKEVHSGVCTDPQPLKEQPALNDSRYCLSSRLRVSATFWQNPRNHFRCQVQFYGLSENDEWTQDRAKPVTQIVSAEAWGRADCGFTSESYQQGVLSATILYEILLGKATLYAVLVSALVLMAMVKRKDSRGRAKRSGSGATNFSLLKQAGDVEENPGPTSMDWIWRILFLVGAATGAHSFEQVQLVQSGAEVVKPGASVKISCKASGYTFTGYFMHWVKQSPGQSLEWIGRIHPYDGDTFYNQKFQGKATLTVDKSSNTAHMELLSLTSEDFAVYYCTRYDGSRAMDYWGQGTTVTVSSTRIQNPDPAVYQLRDSKSSDKSVCLFTDFDSQTNVSQSKDSDVYITDKCVLDMRSMDFKSNSAVAWSNKSDFACANAFNNSIIPEDTFFPSPESSCDVKLVEKSFETDTNLNFQNLSVIGFRILLLKVAGFNLLMTLRLWSS

SEQ ID NO: 45301 - protein, 627 aa, synthetic construct
MALPVTALLLPLALLLHAARPDIVLTQSPLSLAVSLGQPAIISCRASQSVSFAGTSLMHWYHQKPGQQPRLLIYRASNLEAGVPDRFSGSGSKTDFTLTISPVEAEDAATYYCQQSREYPYTFGGGTKLEIKRLEIQNPDPAVYQLRDSKSSDKSVCLFTDFDSQTNVSQSKDSDVYITDKCVLDMRSMDFKSNSAVAWSNKSDFACANAFNNSIIPEDTFFPSPESSCDVKLVEKSFETDTNLNFQNLSVIGFRILLLKVAGFNLLMTLRLWSSRAKRSGSGVKQTLNFDLLKLAGDVESNPGPTSMDWIWRILFLVGAATGAHSFEQVQLVQSGAEVVKPGASVKISCKASGYTFTGYFMHWVKQSPGQSLEWIGRIHPYDGDTFYNQKFQGKATLTVDKSSNTAHMELLSLTSEDFAVYYCTRYDGSRAMDYWGQGTTVTVSSTREDLKNVFPPEVAVFEPSEAEISHTQKATLVCLATGFYPDHVELSWWVNGKEVHSGVCTDPQPLKEQPALNDSRYCLSSRLRVSATFWQNPRNHFRCQVQFYGLSENDEWTQDRAKPVTQIVSAEAWGRADCGFTSESYQQGVLSATILYEILLGKATLYAVLVSALVLMAMVKRKDSRG

SEQ ID NO: 45302 - protein, 639 aa, synthetic construct
MALPVTALLLPLALLLHAARPLEEDLKNVFPPEVAVFEPSKAEIAHTQKATLVCLATGFYPDHVELSWWVNGKEVHSGVCTDPQPLKEQPALNDSRYCLSSRLRVSATFWQNPRNHFRCQVQFYGLSENDEWTQDRAKPVTQIVSAEAWGRADCGITSASYHQGVLSATILYEILLGKATLYAVLVSALVLMAMVKRKDSRGRAKRSGSGATNFSLLKQAGDVEENPGPTSMALPVTALLLPLALLLHAARPDIVLTQSPLSLAVSLGQPAIISCRASQSVSFAGTSLMHWYHQKPGQQPRLLIYRASNLEAGVPDRFSGSGSKTDFTLTISPVEAEDAATYYCQQSREYPYTFGGGTKLEIKRGGGGSGGGGSGGGGSQVQLVQSGAEVVKPGASVKISCKASGYTFTGYFMHWVKQSPGQSLEWIGRIHPYDGDTFYNQKFQGKATLTVDKSSNTAHMELLSLTSEDFAVYYCTRYDGSRAMDYWGQGTTVTVSSTRIQNPDPAVYQLRDSKSSDKSVCLFTDFDSQTNVSQSKDSDVYITDKCVLDMRSMDFKSNSAVAWSNKSDFACANAFNNSIIPEDTFFPSSDVPCDVKLVEKSFETDTNLNFQNLSVIGFRILLLKVAGFNLLMTLRLWSS

SEQ ID NO: 45303 - protein, 646 aa, synthetic construct
MALPVTALLLPLALLLHAARPLEGSGDRPDPAVYQLRDSKSSDKSVCLFTDFDSQTNVSQSKDSDVYITDKCVLDMRSMDFKSNSAVAWSNKSDFACANAFNNSIIPEDTFFPSPESSCDVKLVEKSFETDTNLNFQNLSVIGFRILLLKVAGFNLLMTLRLWSSSSRAKRSGSGVKQTLNFDLLKLAGDVESNPGPTSMALPVTALLLPLALLLHAARPDIVLTQSPLSLAVSLGQPAIISCRASQSVSFAGTSLMHWYHQKPGQQPRLLIYRASNLEAGVPDRFSGSGSKTDFTLTISPVEAEDAATYYCQQSREYPYTFGGGTKLEIKRGGGGSGGGGSGGGGSQVQLVQSGAEVVKPGASVKISCKASGYTFTGYFMHWVKQSPGQSLEWIGRIHPYDGDTFYNQKFQGKATLTVDKSSNTAHMELLSLTSEDFAVYYCTRYDGSRAMDYWGQGTTVTVSSTREDLKNVFPPEVAVFEPSEAEISHTQKATLVCLATGFYPDHVELSWWVNGKEVHSGVCTDPQPLKEQPALNDSRYCLSSRLRVSATFWQNPRNHFRCQVQFYGLSENDEWTQDRAKPVTQIVSAEAWGRADCGFTSESYQQGVLSATILYEILLGKATLYAVLVSALVLMAMVKRKDSRG

SEQ ID NO: 45304 - protein, 623 aa, synthetic construct
MALPVTALLLPLALLLHAARPDIVLTQSPLSLAVSLGQPAIISCRASQSVSFAGTSLMHWYHQKPGQQPRLLIYRASNLEAGVPDRFSGSGSKTDFTLTISPVEAEDAATYYCQQSREYPYTFGGGTKLEIKRLEDLKNVFPPEVAVFEPSEAEISHTQKATLVCLATGFYPDHVELSWWVNGKEVHSGVSTDPQPLKEQPALNDSRYCLSSRLRVSATFWQNPRNHFRCQVQFYGLSENDEWTQDRAKPVTQIVSAEAWGRADCGFTSESYQQGVLSATILYEILLGKATLYAVLVSALVLMAMVKRKDSRGRAKRSGSGATNFSLLKQAGDVEENPGPTSMDWIWRILFLVGAATGAHSFEQVQLVQSGAEVVKPGASVKISCKASGYTFTGYFMHWVKQSPGQSLEWIGRIHPYDGDTFYNQKFQGKATLTVDKSSNTAHMELLSLTSEDFAVYYCTRYDGSRAMDYWGQGTTVTVSSTRIQNPDPAVYQLRDSKSSDKSVCLFTDFDSQTNVSQSKDSDVYITDKTVLDMRSMDFKSNSAVAWSNKSDFACANAFNNSIIPEDTFFPSPESSCDVKLVEKSFETDTNLNFQNLSVIGFRILLLKVAGFNLLMTLRLWSS

SEQ ID NO: 45305 - protein, 631 aa, synthetic construct
MALPVTALLLPLALLLHAARPDIVLTQSPLSLAVSLGQPAIISCRASQSVSFAGTSLMHWYHQKPGQQPRLLIYRASNLEAGVPDRFSGSGSKTDFTLTISPVEAEDAATYYCQQSREYPYTFGGGTKLEIKRLEDKQLDADVSPKPTIFLPSIAETKLQKAGTYLCLLEKFFPDVIKIHWQEKKSNTILGSQEGNTMKTNDTYMKFSWLTVPEKSLDKEHRCIVRHENNKNGVDQEIIFPPIKTDVITMDPKDNCSKDANDTLLLQLTNTSAYYMYLLLLLKSVVYFAIITCCLLRRTAFCCNGEKSRAKRSGSGATNFSLLKQAGDVEENPGPTSMDWIWRILFLVGAATGAHSFEQVQLVQSGAEVVKPGASVKISCKASGYTFTGYFMHWVKQSPGQSLEWIGRIHPYDGDTFYNQKFQGKATLTVDKSSNTAHMELLSLTSEDFAVYYCTRYDGSRAMDYWGQGTTVTVSSTRSQPHTKPSVFVMKNGTNVACLVKEFYPKDIRINLVSSKKITEFDPAIVISPSGKYNAVKLGKYEDSNSVTCSVQHDNKTVHSTDFEVKTDSTDHVKPKETENTKQPSKSCHKPKAIVHTEKVNMMSLTVLGLRMLFAKTVAVNFLLTAKLFFL

SEQ ID NO: 45306 - protein, 631 aa, synthetic construct
MALPVTALLLPLALLLHAARPDIVLTQSPLSLAVSLGQPAIISCRASQSVSFAGTSLMHWYHQKPGQQPRLLIYRASNLEAGVPDRFSGSGSKTDFTLTISPVEAEDAATYYCQQSREYPYTFGGGTKLEIKRLESQPHTKPSVFVMKNGTNVACLVKEFYPKDIRINLVSSKKITEFDPAIVISPSGKYNAVKLGKYEDSNSVTCSVQHDNKTVHSTDFEVKTDSTDHVKPKETENTKQPSKSCHKPKAIVHTEKVNMMSLTVLGLRMLFAKTVAVNFLLTAKLFFLRAKRSGSGATNFSLLKQAGDVEENPGPTSMDWIWRILFLVGAATGAHSFEQVQLVQSGAEVVKPGASVKISCKASGYTFTGYFMHWVKQSPGQSLEWIGRIHPYDGDTFYNQKFQGKATLTVDKSSNTAHMELLSLTSEDFAVYYCTRYDGSRAMDYWGQGTTVTVSSTRDKQLDADVSPKPTIFLPSIAETKLQKAGTYLCLLEKFFPDVIKIHWQEKKSNTILGSQEGNTMKTNDTYMKFSWLTVPEKSLDKEHRCIVRHENNKNGVDQEIIFPPIKTDVITMDPKDNCSKDANDTLLLQLTNTSAYYMYLLLLLKSVVYFAIITCCLLRRTAFCCNGEKS

SEQ ID NO: 45307 - protein, 646 aa, synthetic construct
MALPVTALLLPLALLLHAARPLEDKQLDADVSPKPTIFLPSIAETKLQKAGTYLCLLEKFFPDVIKIHWQEKKSNTILGSQEGNTMKTNDTYMKFSWLTVPEKSLDKEHRCIVRHENNKNGVDQEIIFPPIKTDVITMDPKDNCSKDANDTLLLQLTNTSAYYMYLLLLLKSVVYFAIITCCLLRRTAFCCNGEKSRAKRSGSGATNFSLLKQAGDVEENPGPTSMALPVTALLLPLALLLHAARPDIVLTQSPLSLAVSLGQPAIISCRASQSVSFAGTSLMHWYHQKPGQQPRLLIYRASNLEAGVPDRFSGSGSKTDFTLTISPVEAEDAATYYCQQSREYPYTFGGGTKLEIKRGGGGSGGGGSGGGGSQVQLVQSGAEVVKPGASVKISCKASGYTFTGYFMHWVKQSPGQSLEWIGRIHPYDGDTFYNQKFQGKATLTVDKSSNTAHMELLSLTSEDFAVYYCTRYDGSRAMDYWGQGTTVTVSSTRSQPHTKPSVFVMKNGTNVACLVKEFYPKDIRINLVSSKKITEFDPAIVISPSGKYNAVKLGKYEDSNSVTCSVQHDNKTVHSTDFEVKTDSTDHVKPKETENTKQPSKSCHKPKAIVHTEKVNMMSLTVLGLRMLFAKTVAVNFLLTAKLFFL

SEQ ID NO: 45308 - protein, 800 aa, synthetic construct
MALPVTALLLPLALLLHAARPDIVLTQSPLSLAVSLGQPAIISCRASQSVSFAGTSLMHWYHQKPGQQPRLLIYRASNLEAGVPDRFSGSGSKTDFTLTISPVEAEDAATYYCQQSREYPYTFGGGTKLEIKRGQPKANPTVTLFPPSSEELQANKATLVCLISDFYPGAVTVAWKADGSPVKAGVETTKPSKQSNNKYAASSYLSLTPEQWKSHRSYSCQVTHEGSTVEKTVAPTECSGSQSFGLLDPKLCYLLDGILFIYGVILTALFLRVKFSRSADAPAYQQGQNQLYNELNLGRREEYDVLDKRRGRDPEMGGKPQRRKNPQEGLYNELQKDKMAEAYSEIGMKGERRRGKGHDGLYQGLSTATKDTYDALHMQALPPRRAKRSGSGATNFSLLKQAGDVEENPGPTSMDWIWRILFLVGAATGAHSFEQVQLVQSGAEVVKPGASVKISCKASGYTFTGYFMHWVKQSPGQSLEWIGRIHPYDGDTFYNQKFQGKATLTVDKSSNTAHMELLSLTSEDFAVYYCTRYDGSRAMDYWGQGTTVTVSSASTKGPSVFPLAPSSKSTSGGTAALGCLVKDYFPEPVTVSWNSGALTSGVHTFPAVLQSSGLYSLSSVVTVPSSSLGTQTYICNVNHKPSNTKVDKRVEPKSCGTQSFGLLDPKLCYLLDGILFIYGVILTALFLRVKFSRSADAPAYQQGQNQLYNELNLGRREEYDVLDKRRGRDPEMGGKPQRRKNPQEGLYNELQKDKMAEAYSEIGMKGERRRGKGHDGLYQGLSTATKDTYDALHMQALPPR

SEQ ID NO: 45309 - protein, 819 aa, synthetic construct
MALPVTALLLPLALLLHAARPDIVLTQSPLSLAVSLGQPAIISCRASQSVSFAGTSLMHWYHQKPGQQPRLLIYRASNLEAGVPDRFSGSGSKTDFTLTISPVEAEDAATYYCQQSREYPYTFGGGTKLEIKRLEDLKNVFPPEVAVFEPSEAEISHTQKATLVCLATGFYPDHVELSWWVNGKEVHSGVSTDPQPLKEQPALNDSRYCLSSRLRVSATFWQNPRNHFRCQVQFYGLSENDEWTQDRAKPVTQIVSAEAWGRADCGSQSFGLLDPKLCYLLDGILFIYGVILTALFLRVKFSRSADAPAYQQGQNQLYNELNLGRREEYDVLDKRRGRDPEMGGKPQRRKNPQEGLYNELQKDKMAEAYSEIGMKGERRRGKGHDGLYQGLSTATKDTYDALHMQALPPRRAKRSGSGATNFSLLKQAGDVEENPGPTSMDWIWRILFLVGAATGAHSFEQVQLVQSGAEVVKPGASVKISCKASGYTFTGYFMHWVKQSPGQSLEWIGRIHPYDGDTFYNQKFQGKATLTVDKSSNTAHMELLSLTSEDFAVYYCTRYDGSRAMDYWGQGTTVTVSSTRIQNPDPAVYQLRDSKSSDKSVCLFTDFDSQTNVSQSKDSDVYITDKTVLDMRSMDFKSNSAVAWSNKSDFACANAFNNSIIPEDTFFPSPESSCGTQSFGLLDPKLCYLLDGILFIYGVILTALFLRVKFSRSADAPAYQQGQNQLYNELNLGRREEYDVLDKRRGRDPEMGGKPQRRKNPQEGLYNELQKDKMAEAYSEIGMKGERRRGKGHDGLYQGLSTATKDTYDALHMQALPPR

SEQ ID NO: 45310 - protein, 861 aa, synthetic construct
MALPVTALLLPLALLLHAARPDIVLTQSPLSLAVSLGQPAIISCRASQSVSFAGTSLMHWYHQKPGQQPRLLIYRASNLEAGVPDRFSGSGSKTDFTLTISPVEAEDAATYYCQQSREYPYTFGGGTKLEIKRLEEDLKNVFPPEVAVFEPSEAEISHTQKATLVCLATGFYPDHVELSWWVNGKEVHSGVSTDPQPLKEQPALNDSRYCLSSRLRVSATFWQNPRNHFRCQVQFYGLSENDEWTQDRAKPVTQIVSAEAWGRADCGSQSFGLLDPKLCYLLDGILFIYGVILTALFLRVKFSRSADAPAYQQGQNQLYNELNLGRREEYDVLDKRRGRDPEMGGKPQRRKNPQEGLYNELQKDKMAEAYSEIGMKGERRRGKGHDGLYQGLSTATKDTYDALHMQALPPRRAKRSGSGATNFSLLKQAGDVEENPGPTSMDWIWRILFLVGAATGAHSFEQVQLVQSGAEVVKPGASVKISCKASGYTFTGYFMHWVKQSPGQSLEWIGRIHPYDGDTFYNQKFQGKATLTVDKSSNTAHMELLSLTSEDFAVYYCTRYDGSRAMDYWGQGTTVTVSSTRIQNPDPAVYQLRDSKSSDKSVCLFTDFDSQTNVSQSKDSDVYITDKTVLDMRSMDFKSNSAVAWSNKSDFACANAFNNSIIPEDTFFPSPESSCGTQSFGLLDPKLCYLLDGILFIYGVILTALFLRSKRSRLLHSDYMNMTPRRPGPTRKHYQPYAPPRDFAAYRSRVKFSRSADAPAYQQGQNQLYNELNLGRREEYDVLDKRRGRDPEMGGKPQRRKNPQEGLYNELQKDKMAEAYSEIGMKGERRRGKGHDGLYQGLSTATKDTYDALHMQALPPR

SEQ ID NO: 45311 - protein, 904 aa, synthetic construct
MALPVTALLLPLALLLHAARPDIVLTQSPLSLAVSLGQPAIISCRASQSVSFAGTSLMHWYHQKPGQQPRLLIYRASNLEAGVPDRFSGSGSKTDFTLTISPVEAEDAATYYCQQSREYPYTFGGGTKLEIKRLEEDLKNVFPPEVAVFEPSEAEISHTQKATLVCLATGFYPDHVELSWWVNGKEVHSGVSTDPQPLKEQPALNDSRYCLSSRLRVSATFWQNPRNHFRCQVQFYGLSENDEWTQDRAKPVTQIVSAEAWGRADCGSQSFGLLDPKLCYLLDGILFIYGVILTALFLKRGRKKLLYIFKQPFMRPVQTTQEEDGCSCRFPEEEEGGCELRVKFSRSADAPAYQQGQNQLYNELNLGRREEYDVLDKRRGRDPEMGGKPQRRKNPQEGLYNELQKDKMAEAYSEIGMKGERRRGKGHDGLYQGLSTATKDTYDALHMQALPPRRAKRSGSGATNFSLLKQAGDVEENPGPTSMDWIWRILFLVGAATGAHSFEQVQLVQSGAEVVKPGASVKISCKASGYTFTGYFMHWVKQSPGQSLEWIGRIHPYDGDTFYNQKFQGKATLTVDKSSNTAHMELLSLTSEDFAVYYCTRYDGSRAMDYWGQGTTVTVSSTRIQNPDPAVYQLRDSKSSDKSVCLFTDFDSQTNVSQSKDSDVYITDKTVLDMRSMDFKSNSAVAWSNKSDFACANAFNNSIIPEDTFFPSPESSCGTQSFGLLDPKLCYLLDGILFIYGVILTALFLKRGRKKLLYIFKQPFMRPVQTTQEEDGCSCRFPEEEEGGCELRVKFSRSADAPAYQQGQNQLYNELNLGRREEYDVLDKRRGRDPEMGGKPQRRKNPQEGLYNELQKDKMAEAYSEIGMKGERRRGKGHDGLYQGLSTATKDTYDALHMQALPPR

SEQ ID NO: 45312 - protein, 591 aa, synthetic construct
MALPVTALLLPLALLLHAARPDIVLTQSPLSLAVSLGQPAIISCRASQSVSFAGTSLMHWYHQKPGQQPRLLIYRASNLEAGVPDRFSGSGSKTDFTLTISPVEAEDAATYYCQQSREYPYTFGGGTKLEIKRLEQSFGLLDPKLCYLLDGILFIYGVILTALFLRVKFSRSADAPAYQQGQNQLYNELNLGRREEYDVLDKRRGRDPEMGGKPQRRKNPQEGLYNELQKDKMAEAYSEIGMKGERRRGKGHDGLYQGLSTATKDTYDALHMQALPPRRAKRSGSGATNFSLLKQAGDVEENPGPTSMDWIWRILFLVGAATGAHSFEQVQLVQSGAEVVKPGASVKISCKASGYTFTGYFMHWVKQSPGQSLEWIGRIHPYDGDTFYNQKFQGKATLTVDKSSNTAHMELLSLTSEDFAVYYCTRYDGSRAMDYWGQGTTVTVSSTRQSFGLLDPKLCYLLDGILFIYGVILTALFLRVKFSRSADAPAYQQGQNQLYNELNLGRREEYDVLDKRRGRDPEMGGKPQRRKNPQEGLYNELQKDKMAEAYSEIGMKGERRRGKGHDGLYQGLSTATKDTYDALHMQALPPR

SEQ ID NO: 45313 - protein, 649 aa, synthetic construct
MALPVTALLLPLALLLHAARPDIVLTQSPLSLAVSLGQPAIISCRASQSVSFAGTSLMHWYHQKPGQQPRLLIYRASNLEAGVPDRFSGSGSKTDFTLTISPVEAEDAATYYCQQSREYPYTFGGGTKLEIKRLEGQPKANPTVTLFPPSSEELQANKATLVCLISDFYPGAVTVAWKADGSPVKAGVETTKPSKQSNNKYAASSYLSLTPEQWKSHRSYSCQVTHEGSTVEKTVAPTECSPIKTDVITMDPKDNCSKDANDTLLLQLTNTSAYYMYLLLLLKSVVYFAIITCCLLRRTAFCCNGEKSRAKRSGSGATNFSLLKQAGDVEENPGPTSMDWIWRILFLVGAATGAHSFEQVQLVQSGAEVVKPGASVKISCKASGYTFTGYFMHWVKQSPGQSLEWIGRIHPYDGDTFYNQKFQGKATLTVDKSSNTAHMELLSLTSEDFAVYYCTRYDGSRAMDYWGQGTTVTVSSTRASTKGPSVFPLAPSSKSTSGGTAALGCLVKDYFPEPVTVSWNSGALTSGVHTFPAVLQSSGLYSLSSVVTVPSSSLGTQTYICNVNHKPSNTKVDKRVEPKSCEVKTDSTDHVKPKETENTKQPSKSCHKPKAIVHTEKVNMMSLTVLGLRMLFAKTVAVNFLLTAKLFFL

SEQ ID NO: 45314 - protein, 627 aa, synthetic construct
MALPVTALLLPLALLLHAARPDIVLTQSPLSLAVSLGQPAIISCRASQSVSFAGTSLMHWYHQKPGQQPRLLIYRASNLEAGVPDRFSGSGSKTDFTLTISPVEAEDAATYYCQQSREYPYTFGGGTKLEIKRLEGQPKANPTVTLFPPSSEELQANKATLVCLISDFYPGAVTVAWKADGSPVKAGVETTKPSKQSNNKYAASSYLSLTPEQWKSHRSYSCQVTHEGSTVEKTVAPTECSGRADCGITSASYHQGVLSATILYEILLGKATLYAVLVSALVLMAMVKRKDSRGRAKRSGSGATNFSLLKQAGDVEENPGPTSMDWIWRILFLVGAATGAHSFEQVQLVQSGAEVVKPGASVKISCKASGYTFTGYFMHWVKQSPGQSLEWIGRIHPYDGDTFYNQKFQGKATLTVDKSSNTAHMELLSLTSEDFAVYYCTRYDGSRAMDYWGQGTTVTVSSTRASTKGPSVFPLAPSSKSTSGGTAALGCLVKDYFPEPVTVSWNSGALTSGVHTFPAVLQSSGLYSLSSVVTVPSSSLGTQTYICNVNHKPSNTKVDKRVEPKSCIPEDTFFPSSDVPCDVKLVEKSFETDTNLNFQNLSVIGFRILLLKVAGFNLLMTLRLWSS

SEQ ID NO: 45315 - protein, 627 aa, synthetic construct
MALPVTALLLPLALLLHAARPDIVLTQSPLSLAVSLGQPAIISCRASQSVSFAGTSLMHWYHQKPGQQPRLLIYRASNLEAGVPDRFSGSGSKTDFTLTISPVEAEDAATYYCQQSREYPYTFGGGTKLEIKRLEGQPKANPTVTLFPPSSEELQANKATLVCLISDFYPGAVTVAWKADGSPVKAGVETTKPSKQSNNKYAASSYLSLTPEQWKSHRSYSCQVTHEGSTVEKTVAPTECSGRADCGFTSESYQQGVLSATILYEILLGKATLYAVLVSALVLMAMVKRKDSRGRAKRSGSGATNFSLLKQAGDVEENPGPTSMDWIWRILFLVGAATGAHSFEQVQLVQSGAEVVKPGASVKISCKASGYTFTGYFMHWVKQSPGQSLEWIGRIHPYDGDTFYNQKFQGKATLTVDKSSNTAHMELLSLTSEDFAVYYCTRYDGSRAMDYWGQGTTVTVSSTRASTKGPSVFPLAPSSKSTSGGTAALGCLVKDYFPEPVTVSWNSGALTSGVHTFPAVLQSSGLYSLSSVVTVPSSSLGTQTYICNVNHKPSNTKVDKRVEPKSCIPEDTFFPSPESSCDVKLVEKSFETDTNLNFQNLSVIGFRILLLKVAGFNLLMTLRLWSS

SEQ ID NO: 45316 - protein, 453 aa, synthetic construct
MALPVTALLLPLALLLHAARPDIVLTQSPLSLAVSLGQPAIISCRASQSVSFAGTSLMHWYHQKPGQQPRLLIYRASNLEAGVPDRFSGSGSKTDFTLTISPVEAEDAATYYCQQSREYPYTFGGGTKLEIKRGGGGSGGGGSGGGGSQVQLVQSGAEVVKPGASVKISCKASGYTFTGYFMHWVKQSPGQSLEWIGRIHPYDGDTFYNQKFQGKATLTVDKSSNTAHMELLSLTSEDFAVYYCTRYDGSRAMDYWGQGTTVTVSSTRDGNEEMGGITQTPYKVSISGTTVILTCPQYPGSEILWQHNDKNIGGDEDDKNIGSDEDHLSLKEFSELEQSGYYVCYPRGSKPEDANFYLYLRARVCENCMEMDVMSVATIVIVDICITGGLLLLVYYWSKNRKAKAKPVTRGAGAGGRQRGQNKERPPPVPNPDYEPIRKGQRDLYSGLNQRRI

SEQ ID NO: 45317 - protein, 418 aa, synthetic construct
MALPVTALLLPLALLLHAARPDIVLTQSPLSLAVSLGQPAIISCRASQSVSFAGTSLMHWYHQKPGQQPRLLIYRASNLEAGVPDRFSGSGSKTDFTLTISPVEAEDAATYYCQQSREYPYTFGGGTKLEIKRGGGGSGGGGSGGGGSQVQLVQSGAEVVKPGASVKISCKASGYTFTGYFMHWVKQSPGQSLEWIGRIHPYDGDTFYNQKFQGKATLTVDKSSNTAHMELLSLTSEDFAVYYCTRYDGSRAMDYWGQGTTVTVSSTRFKIPIEELEDRVFVNCNTSITWVEGTVGTLLSDITRLDLGKRILDPRGIYRCNGTDIYKDKESTVQVHYRMCQSCVELDPATVAGIIVTDVIATLLLALGVFCFAGHETGRLSGAADTQALLRNDQVYQPLRDRDDAQYSHLGGNWARNK

SEQ ID NO: 45318 - protein, 428 aa, synthetic construct
MALPVTALLLPLALLLHAARPDIVLTQSPLSLAVSLGQPAIISCRASQSVSFAGTSLMHWYHQKPGQQPRLLIYRASNLEAGVPDRFSGSGSKTDFTLTISPVEAEDAATYYCQQSREYPYTFGGGTKLEIKRGGGGSGGGGSGGGGSQVQLVQSGAEVVKPGASVKISCKASGYTFTGYFMHWVKQSPGQSLEWIGRIHPYDGDTFYNQKFQGKATLTVDKSSNTAHMELLSLTSEDFAVYYCTRYDGSRAMDYWGQGTTVTVSSTRQSIKGNHLVKVYDYQEDGSVLLTCDAEAKNITWFKDGKMIGFLTEDKKKWNLGSNAKDPRGMYQCKGSQNKSKPLQVYYRMCQNCIELNAATISGFLFAEIVSIFVLAVGVYFIAGQDGVRQSRASDKQTLLPNDQLYQPLKDREDDQYSHLQGNQLRRN

SEQ ID NO: 45319 - protein, 411 aa, synthetic construct
MALPVTALLLPLALLLHAARPDIVLTQSPLSLAVSLGQPAIISCRASQSVSFAGTSLMHWYHQKPGQQPRLLIYRASNLEAGVPDRFSGSGSKTDFTLTISPVEAEDAATYYCQQSREYPYTFGGGTKLEIKRGGGGSGGGGSGGGGSQVQLVQSGAEVVKPGASVKISCKASGYTFTGYFMHWVKQSPGQSLEWIGRIHPYDGDTFYNQKFQGKATLTVDKSSNTAHMELLSLTSEDFAVYYCTRYDGSRAMDYWGQGTTVTVSSTRQSFGLLDPKLCYLLDGILFIYGVILTALFLRVKFSRSADAPAYQQGQNQLYNELNLGRREEYDVLDKRRGRDPEMGGKPQRRKNPQEGLYNELQKDKMAEAYSEIGMKGERRRGKGHDGLYQGLSTATKDTYDALHMQALPPR

SEQ ID NO: 45320 - protein, 506 aa, synthetic construct
MALPVTALLLPLALLLHAARPDIVLTQSPLSLAVSLGQPAIISCRASQSVSFAGTSLMHWYHQKPGQQPRLLIYRASNLEAGVPDRFSGSGSKTDFTLTISPVEAEDAATYYCQQSREYPYTFGGGTKLEIKRGGGGSGGGGSGGGGSQVQLVQSGAEVVKPGASVKISCKASGYTFTGYFMHWVKQSPGQSLEWIGRIHPYDGDTFYNQKFQGKATLTVDKSSNTAHMELLSLTSEDFAVYYCTRYDGSRAMDYWGQGTTVTVSSTRGMRTEDLPKAVVFLEPQWYRVLEKDSVTLKCQGAYSPEDNSTQWFHNESLISSQASSYFIDAATVDDSGEYRCQTNLSTLSDPVQLEVHIGWLLLQAPRWVFKEEDPIHLRCHSWKNTALHKVTYLQNGKGRKYFHHNSDFYIPKATLKDSGSYFCRGLVGSKNVSSETVNITITQGLAVPTISSFFPPGYQVSFCLVMVLLFAVDTGLYFSVKTNIRSSTRDWKDHKFKWRKDPQDK

SEQ ID NO: 45321 - protein, 481 aa, synthetic construct
MALPVTALLLPLALLLHAARPDIVLTQSPLSLAVSLGQPAIISCRASQSVSFAGTSLMHWYHQKPGQQPRLLIYRASNLEAGVPDRFSGSGSKTDFTLTISPVEAEDAATYYCQQSREYPYTFGGGTKLEIKRGGGGSGGGGSGGGGSQVQLVQSGAEVVKPGASVKISCKASGYTFTGYFMHWVKQSPGQSLEWIGRIHPYDGDTFYNQKFQGKATLTVDKSSNTAHMELLSLTSEDFAVYYCTRYDGSRAMDYWGQGTTVTVSSTRGMRTEDLPKAVVFLEPQWYRVLEKDSVTLKCQGAYSPEDNSTQWFHNESLISSQASSYFIDAATVDDSGEYRCQTNLSTLSDPVQLEVHIGWLLLQAPRWVFKEEDPIHLRCHSWKNTALHKVTYLQNGKGRKYFHHNSDFYIPKATLKDSGSYFCRGLVGSKNVSSETVNITITQGLAVPTISSFFPPGYQVSFCLVMVLLFAVDTGLYFSV

SEQ ID NO: 45322 - protein, 482 aa, synthetic construct
MALPVTALLLPLALLLHAARPDIVLTQSPLSLAVSLGQPAIISCRASQSVSFAGTSLMHWYHQKPGQQPRLLIYRASNLEAGVPDRFSGSGSKTDFTLTISPVEAEDAATYYCQQSREYPYTFGGGTKLEIKRGGGGSGGGGSGGGGSQVQLVQSGAEVVKPGASVKISCKASGYTFTGYFMHWVKQSPGQSLEWIGRIHPYDGDTFYNQKFQGKATLTVDKSSNTAHMELLSLTSEDFAVYYCTRYDGSRAMDYWGQGTTVTVSSTRGMRTEDLPKAVVFLEPQWYRVLEKDSVTLKCQGAYSPEDNSTQWFHNESLISSQASSYFIDAATVDDSGEYRCQTNLSTLSDPVQLEVHIGWLLLQAPRWVFKEEDPIHLRCHSWKNTALHKVTYLQNGKGRKYFHHNSDFYIPKATLKDSGSYFCRGLVGSKNVSSETVNITITQGLAVPTISSFFPPGYQVSFCLVMVLLFAVDTGLYFSVK

SEQ ID NO: 45323 - protein, 726 aa, synthetic construct
MALPVTALLLPLALLLHAARPDIVLTQSPLSLAVSLGQPAIISCRASQSVSFAGTSLMHWYHQKPGQQPRLLIYRASNLEAGVPDRFSGSGSKTDFTLTISPVEAEDAATYYCQQSREYPYTFGGGTKLEIKRLEGQPKANPTVTLFPPSSEELQANKATLVCLISDFYPGAVTVAWKADGSPVKAGVETTKPSKQSNNKYAASSYLSLTPEQWKSHRSYSCQVTHEGSTVEKTVAPTECSGSQSFGLLDPKLCYLLDGILFIYGVILTALFLRVKFSRSADAPAYQQGQNQLYNELNLGRREEYDVLDKRRGRDPEMGGKPQRRKNPQEGLYNELQKDKMAEAYSEIGMKGERRRGKGHDGLYQGLSTATKDTYDALHMQALPPRRAKRSGSGATNFSLLKQAGDVEENPGPTSMDWIWRILFLVGAATGAHSFEQVQLVQSGAEVVKPGASVKISCKASGYTFTGYFMHWVKQSPGQSLEWIGRIHPYDGDTFYNQKFQGKATLTVDKSSNTAHMELLSLTSEDFAVYYCTRYDGSRAMDYWGQGTTVTVSSTRASTKGPSVFPLAPSSKSTSGGTAALGCLVKDYFPEPVTVSWNSGALTSGVHTFPAVLQSSGLYSLSSVVTVPSSSLGTQTYICNVNHKPSNTKVDKRVEPKSCGTITQGLAVSTISSFFPPGYQVSFCLVMVLLFAVDTGLYFSVKTNIRSSTRDWKDHKFKWRKDPQDK

SEQ ID NO: 45324 - protein, 741 aa, synthetic construct
MALPVTALLLPLALLLHAARPDIVLTQSPLSLAVSLGQPAIISCRASQSVSFAGTSLMHWYHQKPGQQPRLLIYRASNLEAGVPDRFSGSGSKTDFTLTISPVEAEDAATYYCQQSREYPYTFGGGTKLEIKRLEDLKNVFPPEVAVFEPSEAEISHTQKATLVCLATGFYPDHVELSWWVNGKEVHSGVSTDPQPLKEQPALNDSRYCLSSRLRVSATFWQNPRNHFRCQVQFYGLSENDEWTQDRAKPVTQIVSAEAWGRADCGSQSFGLLDPKLCYLLDGILFIYGVILTALFLRVKFSRSADAPAYQQGQNQLYNELNLGRREEYDVLDKRRGRDPEMGGKPQRRKNPQEGLYNELQKDKMAEAYSEIGMKGERRRGKGHDGLYQGLSTATKDTYDALHMQALPPRRAKRSGSGATNFSLLKQAGDVEENPGPTSMDWIWRILFLVGAATGAHSFEQVQLVQSGAEVVKPGASVKISCKASGYTFTGYFMHWVKQSPGQSLEWIGRIHPYDGDTFYNQKFQGKATLTVDKSSNTAHMELLSLTSEDFAVYYCTRYDGSRAMDYWGQGTTVTVSSTRIQNPDPAVYQLRDSKSSDKSVCLFTDFDSQTNVSQSKDSDVYITDKTVLDMRSMDFKSNSAVAWSNKSDFACANAFNNSIIPEDTFFPSPESSCGTITQGLAVSTISSFFPPGYQVSFCLVMVLLFAVDTGLYFSVKTNIRSSTRDWKDHKFKWRKDPQDK

SEQ ID NO: 45325 - protein, 716 aa, synthetic construct
MALPVTALLLPLALLLHAARPDIVLTQSPLSLAVSLGQPAIISCRASQSVSFAGTSLMHWYHQKPGQQPRLLIYRASNLEAGVPDRFSGSGSKTDFTLTISPVEAEDAATYYCQQSREYPYTFGGGTKLEIKRLEDLKNVFPPEVAVFEPSEAEISHTQKATLVCLATGFYPDHVELSWWVNGKEVHSGVSTDPQPLKEQPALNDSRYCLSSRLRVSATFWQNPRNHFRCQVQFYGLSENDEWTQDRAKPVTQIVSAEAWGRADCGSQSFGLLDPKLCYLLDGILFIYGVILTALFLRVKFSRSADAPAYQQGQNQLYNELNLGRREEYDVLDKRRGRDPEMGGKPQRRKNPQEGLYNELQKDKMAEAYSEIGMKGERRRGKGHDGLYQGLSTATKDTYDALHMQALPPRRAKRSGSGATNFSLLKQAGDVEENPGPTSMDWIWRILFLVGAATGAHSFEQVQLVQSGAEVVKPGASVKISCKASGYTFTGYFMHWVKQSPGQSLEWIGRIHPYDGDTFYNQKFQGKATLTVDKSSNTAHMELLSLTSEDFAVYYCTRYDGSRAMDYWGQGTTVTVSSTRIQNPDPAVYQLRDSKSSDKSVCLFTDFDSQTNVSQSKDSDVYITDKTVLDMRSMDFKSNSAVAWSNKSDFACANAFNNSIIPEDTFFPSPESSCGTITQGLAVSTISSFFPPGYQVSFCLVMVLLFAVDTGLYFSV

SEQ ID NO: 45326 - protein, 717 aa, synthetic construct
MALPVTALLLPLALLLHAARPDIVLTQSPLSLAVSLGQPAIISCRASQSVSFAGTSLMHWYHQKPGQQPRLLIYRASNLEAGVPDRFSGSGSKTDFTLTISPVEAEDAATYYCQQSREYPYTFGGGTKLEIKRLEDLKNVFPPEVAVFEPSEAEISHTQKATLVCLATGFYPDHVELSWWVNGKEVHSGVSTDPQPLKEQPALNDSRYCLSSRLRVSATFWQNPRNHFRCQVQFYGLSENDEWTQDRAKPVTQIVSAEAWGRADCGSQSFGLLDPKLCYLLDGILFIYGVILTALFLRVKFSRSADAPAYQQGQNQLYNELNLGRREEYDVLDKRRGRDPEMGGKPQRRKNPQEGLYNELQKDKMAEAYSEIGMKGERRRGKGHDGLYQGLSTATKDTYDALHMQALPPRRAKRSGSGATNFSLLKQAGDVEENPGPTSMDWIWRILFLVGAATGAHSFEQVQLVQSGAEVVKPGASVKISCKASGYTFTGYFMHWVKQSPGQSLEWIGRIHPYDGDTFYNQKFQGKATLTVDKSSNTAHMELLSLTSEDFAVYYCTRYDGSRAMDYWGQGTTVTVSSTRIQNPDPAVYQLRDSKSSDKSVCLFTDFDSQTNVSQSKDSDVYITDKTVLDMRSMDFKSNSAVAWSNKSDFACANAFNNSIIPEDTFFPSPESSCGTITQGLAVSTISSFFPPGYQVSFCLVMVLLFAVDTGLYFSVK

SEQ ID NO: 45327 - protein, 718 aa, synthetic construct
MALPVTALLLPLALLLHAARPDIVLTQSPLSLAVSLGQPAIISCRASQSVSFAGTSLMHWYHQKPGQQPRLLIYRASNLEAGVPDRFSGSGSKTDFTLTISPVEAEDAATYYCQQSREYPYTFGGGTKLEIKRLEDLKNVFPPEVAVFEPSEAEISHTQKATLVCLATGFYPDHVELSWWVNGKEVHSGVSTDPQPLKEQPALNDSRYCLSSRLRVSATFWQNPRNHFRCQVQFYGLSENDEWTQDRAKPVTQIVSAEAWGRADCGSQSFGLLDPKLCYLLDGILFIYGVILTALFLRVKFSRSADAPAYQQGQNQLYNELNLGRREEYDVLDKRRGRDPEMGGKPQRRKNPQEGLYNELQKDKMAEAYSEIGMKGERRRGKGHDGLYQGLSTATKDTYDALHMQALPPRRAKRSGSGATNFSLLKQAGDVEENPGPTSMDWIWRILFLVGAATGAHSFEQVQLVQSGAEVVKPGASVKISCKASGYTFTGYFMHWVKQSPGQSLEWIGRIHPYDGDTFYNQKFQGKATLTVDKSSNTAHMELLSLTSEDFAVYYCTRYDGSRAMDYWGQGTTVTVSSTRIQNPDPAVYQLRDSKSSDKSVCLFTDFDSQTNVSQSKDSDVYITDKTVLDMRSMDFKSNSAVAWSNKSDFACANAFNNSIIPEDTFFPSPESSCGTITQGLAVSTISSFFPPGYQVSFCLVMVLLFAVDTGLYFSVKT

SEQ ID NO: 45328 - protein, 654 aa, synthetic construct
MALPVTALLLPLALLLHAARPDIVLTQSPLSLAVSLGQPAIISCRASQSVSFAGTSLMHWYHQKPGQQPRLLIYRASNLEAGVPDRFSGSGSKTDFTLTISPVEAEDAATYYCQQSREYPYTFGGGTKLEIKRLEGQPKANPTVTLFPPSSEELQANKATLVCLISDFYPGAVTVAWKADGSPVKAGVETTKPSKQSNNKYAASSYLSLTPEQWKSHRSYSCQVTHEGSTVEKTVAPTECSGSLGEPQLCYILDAILFLYGIVLTLLYCRLKIQVRKAAITSYEKSDGVYTGLSTRNQETYETLKHEKPPQRAKRSGSGATNFSLLKQAGDVEENPGPTSMDWIWRILFLVGAATGAHSFEQVQLVQSGAEVVKPGASVKISCKASGYTFTGYFMHWVKQSPGQSLEWIGRIHPYDGDTFYNQKFQGKATLTVDKSSNTAHMELLSLTSEDFAVYYCTRYDGSRAMDYWGQGTTVTVSSTRASTKGPSVFPLAPSSKSTSGGTAALGCLVKDYFPEPVTVSWNSGALTSGVHTFPAVLQSSGLYSLSSVVTVPSSSLGTQTYICNVNHKPSNTKVDKRVEPKSCGTLGEPQLCYILDAILFLYGIVLTLLYCRLKIQVRKAAITSYEKSDGVYTGLSTRNQETYETLKHEKPPQ

SEQ ID NO: 45329 - protein, 624 aa, synthetic construct
MALPVTALLLPLALLLHAARPDIVLTQSPLSLAVSLGQPAIISCRASQSVSFAGTSLMHWYHQKPGQQPRLLIYRASNLEAGVPDRFSGSGSKTDFTLTISPVEAEDAATYYCQQSREYPYTFGGGTKLEIKRLEDLKNVFPPEVAVFEPSEAEISHTQKATLVCLATGFYPDHVELSWWVNGKEVHSGVCTDPQPLKEQPALNDSRYCLSSRLRVSATFWQNPRNHFRCQVQFYGLSENDEWTQDRAKPVTQIVSAEAWGRADCGFTSESYQQGVLSAYYMYLLLLLKSVVYFAIITCCLLRRTAFCCNGEKSRAKRSGSGATNFSLLKQAGDVEENPGPTSMDWIWRILFLVGAATGAHSFEQVQLVQSGAEVVKPGASVKISCKASGYTFTGYFMHWVKQSPGQSLEWIGRIHPYDGDTFYNQKFQGKATLTVDKSSNTAHMELLSLTSEDFAVYYCTRYDGSRAMDYWGQGTTVTVSSTRIQNPDPAVYQLRDSKSSDKSVCLFTDFDSQTNVSQSKDSDVYITDKCVLDMRSMDFKSNSAVAWSNKSDFACANAFNNSIIPEDTFFPSPESSCDVKLVEKSFETDTNLNFQNLSVIGFRILLLKVAGFNLLMTLRLWSS

SEQ ID NO: 45330 - protein, 630 aa, synthetic construct
MALPVTALLLPLALLLHAARPDIVLTQSPLSLAVSLGQPAIISCRASQSVSFAGTSLMHWYHQKPGQQPRLLIYRASNLEAGVPDRFSGSGSKTDFTLTISPVEAEDAATYYCQQSREYPYTFGGGTKLEIKRLEDKQLDADVSPKPTIFLPSIAETKLQKAGTYLCLLEKFFPDVIKIHWQEKKSNTILGSQEGNTMKTNDTYMKFSWLTVPEKSLDKEHRCIVRHENNKNGVDQEIIFPPIKTDVITMDPKDNCSKDANDTLLLQLTNTSAYYMYEILLGKATLYAVLVSALVLMAMVKRKDSRGRAKRSGSGATNFSLLKQAGDVEENPGPTSMDWIWRILFLVGAATGAHSFEQVQLVQSGAEVVKPGASVKISCKASGYTFTGYFMHWVKQSPGQSLEWIGRIHPYDGDTFYNQKFQGKATLTVDKSSNTAHMELLSLTSEDFAVYYCTRYDGSRAMDYWGQGTTVTVSSTRSQPHTKPSVFVMKNGTNVACLVKEFYPKDIRINLVSSKKITEFDPAIVISPSGKYNAVKLGKYEDSNSVTCSVQHDNKTVHSTDFEVKTDSTDHVKPKETENTKQPSKSCHKPKAIVHTEKVNMMSLTVIGFRILLLKVAGFNLLMTLRLWSS

SEQ ID NO: 45331 - protein, 630 aa, synthetic construct
MALPVTALLLPLALLLHAARPDIVLTQSPLSLAVSLGQPAIISCRASQSVSFAGTSLMHWYHQKPGQQPRLLIYRASNLEAGVPDRFSGSGSKTDFTLTISPVEAEDAATYYCQQSREYPYTFGGGTKLEIKRLEDKQLDADVSPKPTIFLPSIAETKLQKAGTYLCLLEKFFPDVIKIHWQEKKSNTILGSQEGNTMKTNDTYMKFSWLTVPEKSLDKEHRCIVRHENNKNGVDQEIIFPPIKTDVITMDPKDNCSKDANDTLLLQLTNTSATILYEILLGKATLYAVLVSALVLMAMVKRKDSRGRAKRSGSGATNFSLLKQAGDVEENPGPTSMDWIWRILFLVGAATGAHSFEQVQLVQSGAEVVKPGASVKISCKASGYTFTGYFMHWVKQSPGQSLEWIGRIHPYDGDTFYNQKFQGKATLTVDKSSNTAHMELLSLTSEDFAVYYCTRYDGSRAMDYWGQGTTVTVSSTRSQPHTKPSVFVMKNGTNVACLVKEFYPKDIRINLVSSKKITEFDPAIVISPSGKYNAVKLGKYEDSNSVTCSVQHDNKTVHSTDFEVKTDSTDHVKPKETENTKQPSKSCHKPKAIVHTEKVNMMSLTVIGFRILLLKVAGFNLLMTLRLWSS

SEQ ID NO: 45332 - protein, 630 aa, synthetic construct
MALPVTALLLPLALLLHAARPDIVLTQSPLSLAVSLGQPAIISCRASQSVSFAGTSLMHWYHQKPGQQPRLLIYRASNLEAGVPDRFSGSGSKTDFTLTISPVEAEDAATYYCQQSREYPYTFGGGTKLEIKRLEDKQLDADVSPKPTIFLPSIAETKLQKAGTYLCLLEKFFPDVIKIHWQEKKSNTILGSQEGNTMKTNDTYMKFSWLTVPEKSLDKEHRCIVRHENNKNGVDQEIIFPPIKTDVITMDPKDNCSKDANDTLLLQLTNTSAYYMYEILLGKATLYAVLVSALVLMAMVKRKDSRGRAKRSGSGATNFSLLKQAGDVEENPGPTSMDWIWRILFLVGAATGAHSFEQVQLVQSGAEVVKPGASVKISCKASGYTFTGYFMHWVKQSPGQSLEWIGRIHPYDGDTFYNQKFQGKATLTVDKSSNTAHMELLSLTSEDFAVYYCTRYDGSRAMDYWGQGTTVTVSSTRSQPHTKPSVFVMKNGTNVACLVKEFYPKDIRINLVSSKKITEFDPAIVISPSGKYNAVKLGKYEDSNSVTCSVQHDNKTVHSTDFEVKTDSTDHVKPKETENTKQPSKSCHKPKAIVHTEKVNMMSLTVLGFRILLLKVAGFNLLMTLRLWSS

SEQ ID NO: 45333 - protein, 630 aa, synthetic construct
MALPVTALLLPLALLLHAARPDIVLTQSPLSLAVSLGQPAIISCRASQSVSFAGTSLMHWYHQKPGQQPRLLIYRASNLEAGVPDRFSGSGSKTDFTLTISPVEAEDAATYYCQQSREYPYTFGGGTKLEIKRLEDKQLDADVSPKPTIFLPSIAETKLQKAGTYLCLLEKFFPDVIKIHWQEKKSNTILGSQEGNTMKTNDTYMKFSWLTVPEKSLDKEHRCIVRHENNKNGVDQEIIFPPIKTDVITMDPKDNCSKDANDTLLLQLTNTSATILYEILLGKATLYAVLVSALVLMAMVKRKDSRGRAKRSGSGATNFSLLKQAGDVEENPGPTSMDWIWRILFLVGAATGAHSFEQVQLVQSGAEVVKPGASVKISCKASGYTFTGYFMHWVKQSPGQSLEWIGRIHPYDGDTFYNQKFQGKATLTVDKSSNTAHMELLSLTSEDFAVYYCTRYDGSRAMDYWGQGTTVTVSSTRSQPHTKPSVFVMKNGTNVACLVKEFYPKDIRINLVSSKKITEFDPAIVISPSGKYNAVKLGKYEDSNSVTCSVQHDNKTVHSTDFEVKTDSTDHVKPKETENTKQPSKSCHKPKAIVHTEKVNMMSLTVLGFRILLLKVAGFNLLMTLRLWSS

SEQ ID NO: 45334 - protein, 624 aa, synthetic construct
MALPVTALLLPLALLLHAARPDIVLTQSPLSLAVSLGQPAIISCRASQSVSFAGTSLMHWYHQKPGQQPRLLIYRASNLEAGVPDRFSGSGSKTDFTLTISPVEAEDAATYYCQQSREYPYTFGGGTKLEIKRLEDLKNVFPPEVAVFEPSEAEISHTQKATLVCLATGFYPDHVELSWWVNGKEVHSGVCTDPQPLKEQPALNDSRYCLSSRLRVSATFWQNPRNHFRCQVQFYGLSENDEWTQDRAKPVTQIVSAEAWGRADCGFTSESYQQGVLSATILYLLLLLKSVVYFAIITCCLLRRTAFCCNGEKSRAKRSGSGATNFSLLKQAGDVEENPGPTSMDWIWRILFLVGAATGAHSFEQVQLVQSGAEVVKPGASVKISCKASGYTFTGYFMHWVKQSPGQSLEWIGRIHPYDGDTFYNQKFQGKATLTVDKSSNTAHMELLSLTSEDFAVYYCTRYDGSRAMDYWGQGTTVTVSSTRIQNPDPAVYQLRDSKSSDKSVCLFTDFDSQTNVSQSKDSDVYITDKCVLDMRSMDFKSNSAVAWSNKSDFACANAFNNSIIPEDTFFPSPESSCDVKLVEKSFETDTNLNFQNLSVIGLRMLFAKTVAVNFLLTAKLFFL

SEQ ID NO: 45335 - protein, 653 aa, synthetic construct
MALPVTALLLPLALLLHAARPDIVLTQSPLSLAVSLGQPAIISCRASQSVSFAGTSLMHWYHQKPGQQPRLLIYRASNLEAGVPDRFSGSGSKTDFTLTISPVEAEDAATYYCQQSREYPYTFGGGTKLEIKRLEDLKNVFPPEVAVFEPSEAEISHTQKATLVCLATGFYPDHVELSWWVNGKEVHSGVSTDPQPLKEQPALNDSRYCLSSRLRVSATFWQNPRNHFRCQVQFYGLSENDEWTQDRAKPVTQIVSAEAWGRADCGSSKDANDTLLLQLTNTSAYYMYLLLLLKSVVYFAIITCCLLRRTAFCCNGEKSRAKRSGSGATNFSLLKQAGDVEENPGPTSMDWIWRILFLVGAATGAHSFEQVQLVQSGAEVVKPGASVKISCKASGYTFTGYFMHWVKQSPGQSLEWIGRIHPYDGDTFYNQKFQGKATLTVDKSSNTAHMELLSLTSEDFAVYYCTRYDGSRAMDYWGQGTTVTVSSTRIQNPDPAVYQLRDSKSSDKSVCLFTDFDSQTNVSQSKDSDVYITDKTVLDMRSMDFKSNSAVAWSNKSDFACANAFNNSIIPEDTFFPSPESSCGTEVKTDSTDHVKPKETENTKQPSKSCHKPKAIVHTEKVNMMSLTVLGLRMLFAKTVAVNFLLTAKLFFL

SEQ ID NO: 45336 - protein, 623 aa, synthetic construct
MALPVTALLLPLALLLHAARPDIVLTQSPLSLAVSLGQPAIISCRASQSVSFAGTSLMHWYHQKPGQQPRLLIYRASNLEAGVPDRFSGSGSKTDFTLTISPVEAEDAATYYCQQSREYPYTFGGGTKLEIKRLEDLKNVFPPEVAVFEPSEAEISHTQKATLVCLATGFYPDHVELSWWVNGKEVHSGVCTDPQPLKEQPALNDSRYCLSSRLRVSATFWQNPRNHFRCQVQFYGLSENDEWTQDRAKPVTQIVSAEAWGRADCDVKLVEKSFETDTNLNFQNLSVIGFRILLLKVAGFNLLMTLRLWSSRAKRSGSGATNFSLLKQAGDVEENPGPTSMDWIWRILFLVGAATGAHSFEQVQLVQSGAEVVKPGASVKISCKASGYTFTGYFMHWVKQSPGQSLEWIGRIHPYDGDTFYNQKFQGKATLTVDKSSNTAHMELLSLTSEDFAVYYCTRYDGSRAMDYWGQGTTVTVSSTRIQNPDPAVYQLRDSKSSDKSVCLFTDFDSQTNVSQSKDSDVYITDKCVLDMRSMDFKSNSAVAWSNKSDFACANAFNNSIIPEDTFFPSPESSCGFTSESYQQGVLSATILYEILLGKATLYAVLVSALVLMAMVKRKDSRG

SEQ ID NO: 45337 - protein, 623 aa, synthetic construct
MALPVTALLLPLALLLHAARPDIVLTQSPLSLAVSLGQPAIISCRASQSVSFAGTSLMHWYHQKPGQQPRLLIYRASNLEAGVPDRFSGSGSKTDFTLTISPVEAEDAATYYCQQSREYPYTFGGGTKLEIKRLEDLKNVFPPEVAVFEPSEAEISHTQKATLVCLATGFYPDHVELSWWVNGKEVHSGVCTDPQPLKEQPALNDSRYCLSSRLRVSATFWQNPRNHFRCQVQFYGLSENDEWTQDRAKPVTQIVSAEAWGRADCGFTSESYQQGVLSATNLSVIGFRILLLKVAGFNLLMTLRLWSSRAKRSGSGATNFSLLKQAGDVEENPGPTSMDWIWRILFLVGAATGAHSFEQVQLVQSGAEVVKPGASVKISCKASGYTFTGYFMHWVKQSPGQSLEWIGRIHPYDGDTFYNQKFQGKATLTVDKSSNTAHMELLSLTSEDFAVYYCTRYDGSRAMDYWGQGTTVTVSSTRIQNPDPAVYQLRDSKSSDKSVCLFTDFDSQTNVSQSKDSDVYITDKCVLDMRSMDFKSNSAVAWSNKSDFACANAFNNSIIPEDTFFPSPESSCDVKLVEKSFETDTNLNFQILYEILLGKATLYAVLVSALVLMAMVKRKDSRG

SEQ ID NO: 45338 - protein, 623 aa, synthetic construct; identical to SEQ ID NO: 45336

SEQ ID NO: 45339 - protein, 623 aa, synthetic construct; identical to SEQ ID NO: 45337

SEQ ID NO: 45340 - protein, 623 aa, synthetic construct; identical to SEQ ID NO: 45336

SEQ ID NO: 45341 - protein, 626 aa, synthetic construct
MALPVTALLLPLALLLHAARPDIVLTQSPLSLAVSLGQPAIISCRASQSVSFAGTSLMHWYHQKPGQQPRLLIYRASNLEAGVPDRFSGSGSKTDFTLTISPVEAEDAATYYCQQSREYPYTFGGGTKLEIKRLEADVSPKPTIFLPSIAETKLQKAGTYLCLLEKFFPDVIKIHWQEKKSNTILGSQEGNTMKTNDTYMKFSWLTVPEKSLDKEHRCIVRHENNKNGVDQEIIFPPIKTDVITMDPKDNCSKDANDTLLLQLTNTSAYYMYLLLLLKSVVYFAIITCCLLRRTAFCCNGEKSRAKRSGSGATNFSLLKQAGDVEENPGPTSMDWIWRILFLVGAATGAHSFEQVQLVQSGAEVVKPGASVKISCKASGYTFTGYFMHWVKQSPGQSLEWIGRIHPYDGDTFYNQKFQGKATLTVDKSSNTAHMELLSLTSEDFAVYYCTRYDGSRAMDYWGQGTTVTVSSTRSQPHTKPSVFVMKNGTNVACLVKEFYPKDIRINLVSSKKITEFDPAIVISPSGKYNAVKLGKYEDSNSVTCSVQHDNKTVHSTDFEVKTDSTDHVKPKETENTKQPSKSCHKPKAIVHTEKVNMMSLTVIGFRILLLKVAGFNLLMTLRLWSS

SEQ ID NO: 45342 - protein, 626 aa, synthetic construct
MALPVTALLLPLALLLHAARPDIVLTQSPLSLAVSLGQPAIISCRASQSVSFAGTSLMHWYHQKPGQQPRLLIYRASNLEAGVPDRFSGSGSKTDFTLTISPVEAEDAATYYCQQSREYPYTFGGGTKLEIKRLEADVSPKPTIFLPSIAETKLQKAGTYLCLLEKFFPDVIKIHWQEKKSNTILGSQEGNTMKTNDTYMKFSWLTVPEKSLDKEHRCIVRHENNKNGVDQEIIFPPIKTDVITMDPKDNCSKDANDTLLLQLTNTSAYYMYLLLLLKSVVYFAIITCCLLRRTAFCCNGEKSRAKRSGSGATNFSLLKQAGDVEENPGPTSMDWIWRILFLVGAATGAHSFEQVQLVQSGAEVVKPGASVKISCKASGYTFTGYFMHWVKQSPGQSLEWIGRIHPYDGDTFYNQKFQGKATLTVDKSSNTAHMELLSLTSEDFAVYYCTRYDGSRAMDYWGQGTTVTVSSTRSQPHTKPSVFVMKNGTNVACLVKEFYPKDIRINLVSSKKITEFDPAIVISPSGKYNAVKLGKYEDSNSVTCSVQHDNKTVHSTDFEVKTDSTDHVKPKETENTKQPSKSCHKPKAIVHTEKVNMMSLTVLGFRILLLKVAGFNLLMTLRLWSS

SEQ ID NO: 45343 - protein, 623 aa, synthetic construct; identical to SEQ ID NO: 45336

SEQ ID NO: 45344 - protein, 627 aa, synthetic construct
MALPVTALLLPLALLLHAARPDIVLTQSPLSLAVSLGQPAIISCRASQSVSFAGTSLMHWYHQKPGQQPRLLIYRASNLEAGVPDRFSGSGSKTDFTLTISPVEAEDAATYYCQQSREYPYTFGGGTKLEIKRLEIQNPDPAVYQLRDSKSSDKSVCLFTDFDSQTNVSQSKDSDVYITDKCVLDMRSMDFKSNSAVAWSNKSDFACANAFNNSIIPEDTFFPSPESSCGFTSESYQQGVLSATILYEILLGKATLYAVLVSALVLMAMVKRKDSRGRAKRSGSGVKQTLNFDLLKLAGDVESNPGPTSMDWIWRILFLVGAATGAHSFEQVQLVQSGAEVVKPGASVKISCKASGYTFTGYFMHWVKQSPGQSLEWIGRIHPYDGDTFYNQKFQGKATLTVDKSSNTAHMELLSLTSEDFAVYYCTRYDGSRAMDYWGQGTTVTVSSTREDLKNVFPPEVAVFEPSEAEISHTQKATLVCLATGFYPDHVELSWWVNGKEVHSGVCTDPQPLKEQPALNDSRYCLSSRLRVSATFWQNPRNHFRCQVQFYGLSENDEWTQDRAKPVTQIVSAEAWGRADCDVKLVEKSFETDTNLNFQNLSVIGFRILLLKVAGFNLLMTLRLWSS

SEQ ID NO: 45345 - protein, 758 aa, synthetic construct
MALPVTALLLPLALLLHAARPEVQLVESGGGLVQPGGSLRLSCAASGFSFSDFWMSWVRQAPGKGLEWVATISQAGSEKDYVDSVKGRFTISRDNAKKSLYLQMNSLRAEDTAVYYCASGVYSFDYRGQGTLVTVSSGTGGGGSGGGGSGGGGSEFDIVLTQSPLSLAVSLGQPAIISCRASQSVSFAGTSLMHWYHQKPGQQPRLLIYRASNLEAGVPDRFSGSGSKTDFTLTISPVEAEDAATYYCQQSREYPYTFGGGTKLEIKRLEDLKNVFPPEVAVFEPSEAEISHTQKATLVCLATGFYPDHVELSWWVNGKEVHSGVCTDPQPLKEQPALNDSRYCLSSRLRVSATFWQNPRNHFRCQVQFYGLSENDEWTQDRAKPVTQIVSAEAWGRADCDVKLVEKSFETDTNLNFQNLSVIGFRILLLKVAGFNLLMTLRLWSSRAKRSGSGATNFSLLKQAGDVEENPGPTSMDWIWRILFLVGAATGAHSFEQVQLVQSGAEVVKPGASVKISCKASGYTFTGYFMHWVKQSPGQSLEWIGRIHPYDGDTFYNQKFQGKATLTVDKSSNTAHMELLSLTSEDFAVYYCTRYDGSRAMDYWGQGTTVTVSSTRIQNPDPAVYQLRDSKSSDKSVCLFTDFDSQTNVSQSKDSDVYITDKCVLDMRSMDFKSNSAVAWSNKSDFACANAFNNSIIPEDTFFPSPESSCGFTSESYQQGVLSATILYEILLGKATLYAVLVSALVLMAMVKRKDSRG

SEQ ID NO: 45346 - protein, 762 aa, synthetic construct
MALPVTALLLPLALLLHAARPEVQLVESGGGLVQPGGSLRLSCAASGFSFSDFWMSWVRQAPGKGLEWVATISQAGSEKDYVDSVKGRFTISRDNAKKSLYLQMNSLRAEDTAVYYCASGVYSFDYRGQGTLVTVSSGTGGGGSGGGGSGGGGSEFDIVLTQSPLSLAVSLGQPAIISCRASQSVSFAGTSLMHWYHQKPGQQPRLLIYRASNLEAGVPDRFSGSGSKTDFTLTISPVEAEDAATYYCQQSREYPYTFGGGTKLEIKRLEIQNPDPAVYQLRDSKSSDKSVCLFTDFDSQTNVSQSKDSDVYITDKCVLDMRSMDFKSNSAVAWSNKSDFACANAFNNSIIPEDTFFPSPESSCGFTSESYQQGVLSATILYEILLGKATLYAVLVSALVLMAMVKRKDSRGRAKRSGSGVKQTLNFDLLKLAGDVESNPGPTSMDWIWRILFLVGAATGAHSFEQVQLVQSGAEVVKPGASVKISCKASGYTFTGYFMHWVKQSPGQSLEWIGRIHPYDGDTFYNQKFQGKATLTVDKSSNTAHMELLSLTSEDFAVYYCTRYDGSRAMDYWGQGTTVTVSSTREDLKNVFPPEVAVFEPSEAEISHTQKATLVCLATGFYPDHVELSWWVNGKEVHSGVCTDPQPLKEQPALNDSRYCLSSRLRVSATFWQNPRNHFRCQVQFYGLSENDEWTQDRAKPVTQIVSAEAWGRADCDVKLVEKSFETDTNLNFQNLSVIGFRILLLKVAGFNLLMTLRLWSS

SEQ ID NO: 45347 - protein, 895 aa, synthetic construct
MALPVTALLLPLALLLHAARPEVQLVESGGGLVQPGGSLRLSCAASGFSFSDFWMSWVRQAPGKGLEWVATISQAGSEKDYVDSVKGRFTISRDNAKKSLYLQMNSLRAEDTAVYYCASGVYSFDYRGQGTLVTVSSGTGGGGSGGGGSGGGGSEFDIVLTQSPLSLAVSLGQPAIISCRASQSVSFAGTSLMHWYHQKPGQQPRLLIYRASNLEAGVPDRFSGSGSKTDFTLTISPVEAEDAATYYCQQSREYPYTFGGGTKLEIKRLEDLKNVFPPEVAVFEPSEAEISHTQKATLVCLATGFYPDHVELSWWVNGKEVHSGVCTDPQPLKEQPALNDSRYCLSSRLRVSATFWQNPRNHFRCQVQFYGLSENDEWTQDRAKPVTQIVSAEAWGRADCDVKLVEKSFETDTNLNFQNLSVIGFRILLLKVAGFNLLMTLRLWSSRAKRSGSGATNFSLLKQAGDVEENPGPTSMDWIWRILFLVGAATGAHSGPQLQLQESGPGLVKPSETLSLTCTVSGDSISSGDYYWGWIRQPPGKGLEWIGHIYYSGVTYYNPSLKSRVTISVDTSRNQFSLKLSSVTAADTAVYYCTREDSSNWRSRGQGTLVTVSSGSGGGGSGGGGSGGGGSFEQVQLVQSGAEVVKPGASVKISCKASGYTFTGYFMHWVKQSPGQSLEWIGRIHPYDGDTFYNQKFQGKATLTVDKSSNTAHMELLSLTSEDFAVYYCTRYDGSRAMDYWGQGTTVTVSSTRIQNPDPAVYQLRDSKSSDKSVCLFTDFDSQTNVSQSKDSDVYITDKCVLDMRSMDFKSNSAVAWSNKSDFACANAFNNSIIPEDTFFPSPESSCGFTSESYQQGVLSATILYEILLGKATLYAVLVSALVLMAMVKRKDSRG

SEQ ID NO: 45348 - protein, 899 aa, synthetic construct
MALPVTALLLPLALLLHAARPEVQLVESGGGLVQPGGSLRLSCAASGFSFSDFWMSWVRQAPGKGLEWVATISQAGSEKDYVDSVKGRFTISRDNAKKSLYLQMNSLRAEDTAVYYCASGVYSFDYRGQGTLVTVSSGTGGGGSGGGGSGGGGSEFDIVLTQSPLSLAVSLGQPAIISCRASQSVSFAGTSLMHWYHQKPGQQPRLLIYRASNLEAGVPDRFSGSGSKTDFTLTISPVEAEDAATYYCQQSREYPYTFGGGTKLEIKRLEIQNPDPAVYQLRDSKSSDKSVCLFTDFDSQTNVSQSKDSDVYITDKCVLDMRSMDFKSNSAVAWSNKSDFACANAFNNSIIPEDTFFPSPESSCGFTSESYQQGVLSATILYEILLGKATLYAVLVSALVLMAMVKRKDSRGRAKRSGSGVKQTLNFDLLKLAGDVESNPGPTSMDWIWRILFLVGAATGAHSGPQLQLQESGPGLVKPSETLSLTCTVSGDSISSGDYYWGWIRQPPGKGLEWIGHIYYSGVTYYNPSLKSRVTISVDTSRNQFSLKLSSVTAADTAVYYCTREDSSNWRSRGQGTLVTVSSGSGGGGSGGGGSGGGGSFEQVQLVQSGAEVVKPGASVKISCKASGYTFTGYFMHWVKQSPGQSLEWIGRIHPYDGDTFYNQKFQGKATLTVDKSSNTAHMELLSLTSEDFAVYYCTRYDGSRAMDYWGQGTTVTVSSTREDLKNVFPPEVAVFEPSEAEISHTQKATLVCLATGFYPDHVELSWWVNGKEVHSGVCTDPQPLKEQPALNDSRYCLSSRLRVSATFWQNPRNHFRCQVQFYGLSENDEWTQDRAKPVTQIVSAEAWGRADCDVKLVEKSFETDTNLNFQNLSVIGFRILLLKVAGFNLLMTLRLWSS

SEQ ID NO: 45349 - protein, 693 aa, synthetic construct
MALPVTALLLPLALLLHAARPDIVLTQSPLSLAVSLGQPAIISCRASQSVSFAGTSLMHWYHQKPGQQPRLLIYRASNLEAGVPDRFSGSGSKTDFTLTISPVEAEDAATYYCQQSREYPYTFGGGTKLEIKRLEDLKNVFPPEVAVFEPSEAEISHTQKATLVCLATGFYPDHVELSWWVNGKEVHSGVCTDPQPLKEQPALNDSRYCLSSRLRVSATFWQNPRNHFRCQVQFYGLSENDEWTQDRAKPVTQIVSAEAWGRADCDVKLVEKSFETDTNLNFQNLSVIGFRILLLKVAGFNLLMTLRLWSSRAKRSGSGATNFSLLKQAGDVEENPGPTSMDWIWRILFLVGAATGAHSGPMDPDLEIRAAFLRQRNTALRTEVAELEQEVQRLENEVSQYETRYGPLGGGKGSGGGGSGGGGSGGGGSFEQVQLVQSGAEVVKPGASVKISCKASGYTFTGYFMHWVKQSPGQSLEWIGRIHPYDGDTFYNQKFQGKATLTVDKSSNTAHMELLSLTSEDFAVYYCTRYDGSRAMDYWGQGTTVTVSSTRIQNPDPAVYQLRDSKSSDKSVCLFTDFDSQTNVSQSKDSDVYITDKCVLDMRSMDFKSNSAVAWSNKSDFACANAFNNSIIPEDTFFPSPESSCGFTSESYQQGVLSATILYEILLGKATLYAVLVSALVLMAMVKRKDSRG

SEQ ID NO: 45350 - protein, 697 aa, synthetic construct
MALPVTALLLPLALLLHAARPDIVLTQSPLSLAVSLGQPAIISCRASQSVSFAGTSLMHWYHQKPGQQPRLLIYRASNLEAGVPDRFSGSGSKTDFTLTISPVEAEDAATYYCQQSREYPYTFGGGTKLEIKRLEIQNPDPAVYQLRDSKSSDKSVCLFTDFDSQTNVSQSKDSDVYITDKCVLDMRSMDFKSNSAVAWSNKSDFACANAFNNSIIPEDTFFPSPESSCGFTSESYQQGVLSATILYEILLGKATLYAVLVSALVLMAMVKRKDSRGRAKRSGSGVKQTLNFDLLKLAGDVESNPGPTSMDWIWRILFLVGAATGAHSGPMDPDLEIRAAFLRQRNTALRTEVAELEQEVQRLENEVSQYETRYGPLGGGKGSGGGGSGGGGSGGGGSFEQVQLVQSGAEVVKPGASVKISCKASGYTFTGYFMHWVKQSPGQSLEWIGRIHPYDGDTFYNQKFQGKATLTVDKSSNTAHMELLSLTSEDFAVYYCTRYDGSRAMDYWGQGTTVTVSSTREDLKNVFPPEVAVFEPSEAEISHTQKATLVCLATGFYPDHVELSWWVNGKEVHSGVCTDPQPLKEQPALNDSRYCLSSRLRVSATFWQNPRNHFRCQVQFYGLSENDEWTQDRAKPVTQIVSAEAWGRADCDVKLVEKSFETDTNLNFQNLSVIGFRILLLKVAGFNLLMTLRLWSS

SEQ ID NO: 45351 - protein, 670 aa, synthetic construct
MALPVTALLLPLALLLHAARPDIVLTQSPLSLAVSLGQPAIISCRASQSVSFAGTSLMHWYHQKPGQQPRLLIYRASNLEAGVPDRFSGSGSKTDFTLTISPVEAEDAATYYCQQSREYPYTFGGGTKLEIKRLEDLKNVFPPEVAVFEPSEAEISHTQKATLVCLATGFYPDHVELSWWVNGKEVHSGVCTDPQPLKEQPALNDSRYCLSSRLRVSATFWQNPRNHFRCQVQFYGLSENDEWTQDRAKPVTQIVSAEAWGRADCDVKLVEKSFETDTNLNFQNLSVIGFRILLLKVAGFNLLMTLRLWSSRAKRSGSGATNFSLLKQAGDVEENPGPTSMDWIWRILFLVGAATGAHSGPEVAALEKEVAALEKEVAALEKEVAALEKGSGGGGSGGGGSGGGGSFEQVQLVQSGAEVVKPGASVKISCKASGYTFTGYFMHWVKQSPGQSLEWIGRIHPYDGDTFYNQKFQGKATLTVDKSSNTAHMELLSLTSEDFAVYYCTRYDGSRAMDYWGQGTTVTVSSTRIQNPDPAVYQLRDSKSSDKSVCLFTDFDSQTNVSQSKDSDVYITDKCVLDMRSMDFKSNSAVAWSNKSDFACANAFNNSIIPEDTFFPSPESSCGFTSESYQQGVLSATILYEILLGKATLYAVLVSALVLMAMVKRKDSRG

SEQ ID NO: 45352 - protein, 674 aa, synthetic construct
MALPVTALLLPLALLLHAARPDIVLTQSPLSLAVSLGQPAIISCRASQSVSFAGTSLMHWYHQKPGQQPRLLIYRASNLEAGVPDRFSGSGSKTDFTLTISPVEAEDAATYYCQQSREYPYTFGGGTKLEIKRLEIQNPDPAVYQLRDSKSSDKSVCLFTDFDSQTNVSQSKDSDVYITDKCVLDMRSMDFKSNSAVAWSNKSDFACANAFNNSIIPEDTFFPSPESSCGFTSESYQQGVLSATILYEILLGKATLYAVLVSALVLMAMVKRKDSRGRAKRSGSGVKQTLNFDLLKLAGDVESNPGPTSMDWIWRILFLVGAATGAHSGPEVAALEKEVAALEKEVAALEKEVAALEKGSGGGGSGGGGSGGGGSFEQVQLVQSGAEVVKPGASVKISCKASGYTFTGYFMHWVKQSPGQSLEWIGRIHPYDGDTFYNQKFQGKATLTVDKSSNTAHMELLSLTSEDFAVYYCTRYDGSRAMDYWGQGTTVTVSSTREDLKNVFPPEVAVFEPSEAEISHTQKATLVCLATGFYPDHVELSWWVNGKEVHSGVCTDPQPLKEQPALNDSRYCLSSRLRVSATFWQNPRNHFRCQVQFYGLSENDEWTQDRAKPVTQIVSAEAWGRADCDVKLVEKSFETDTNLNFQNLSVIGFRILLLKVAGFNLLMTLRLWSS

SEQ ID NO: 45353 - protein, 760 aa, synthetic construct
MALPVTALLLPLALLLHAARPDIVLTQSPLSLAVSLGQPAIISCRASQSVSFAGTSLMHWYHQKPGQQPRLLIYRASNLEAGVPDRFSGSGSKTDFTLTISPVEAEDAATYYCQQSREYPYTFGGGTKLEIKRLEDLKNVFPPEVAVFEPSEAEISHTQKATLVCLATGFYPDHVELSWWVNGKEVHSGVCTDPQPLKEQPALNDSRYCLSSRLRVSATFWQNPRNHFRCQVQFYGLSENDEWTQDRAKPVTQIVSAEAWGRADCDVKLVEKSFETDTNLNFQNLSVIGFRILLLKVAGFNLLMTLRLWSSRAKRSGSGATNFSLLKQAGDVEENPGPTSMDWIWRILFLVGAATGAHSGPQVQLQESGGGLAQAGGSLRLSCAASGRTFSMGWFRQAPGKEREFVAAITYSGGSPYYASSVRGRFTISRDNAKNTVYLQMNSLKPEDTAVYYCAANPTYGSDWNAENWGQGTQVTVSSGSGGGGSGGGGSGGGGSFEQVQLVQSGAEVVKPGASVKISCKASGYTFTGYFMHWVKQSPGQSLEWIGRIHPYDGDTFYNQKFQGKATLTVDKSSNTAHMELLSLTSEDFAVYYCTRYDGSRAMDYWGQGTTVTVSSTRIQNPDPAVYQLRDSKSSDKSVCLFTDFDSQTNVSQSKDSDVYITDKCVLDMRSMDFKSNSAVAWSNKSDFACANAFNNSIIPEDTFFPSPESSCGFTSESYQQGVLSATILYEILLGKATLYAVLVSALVLMAMVKRKDSRG

SEQ ID NO: 45354 - protein, 764 aa, synthetic construct
MALPVTALLLPLALLLHAARPDIVLTQSPLSLAVSLGQPAIISCRASQSVSFAGTSLMHWYHQKPGQQPRLLIYRASNLEAGVPDRFSGSGSKTDFTLTISPVEAEDAATYYCQQSREYPYTFGGGTKLEIKRLEIQNPDPAVYQLRDSKSSDKSVCLFTDFDSQTNVSQSKDSDVYITDKCVLDMRSMDFKSNSAVAWSNKSDFACANAFNNSIIPEDTFFPSPESSCGFTSESYQQGVLSATILYEILLGKATLYAVLVSALVLMAMVKRKDSRGRAKRSGSGVKQTLNFDLLKLAGDVESNPGPTSMDWIWRILFLVGAATGAHSGPQVQLQESGGGLAQAGGSLRLSCAASGRTFSMGWFRQAPGKEREFVAAITYSGGSPYYASSVRGRFTISRDNAKNTVYLQMNSLKPEDTAVYYCAANPTYGSDWNAENWGQGTQVTVSSGSGGGGSGGGGSGGGGSFEQVQLVQSGAEVVKPGASVKISCKASGYTFTGYFMHWVKQSPGQSLEWIGRIHPYDGDTFYNQKFQGKATLTVDKSSNTAHMELLSLTSEDFAVYYCTRYDGSRAMDYWGQGTTVTVSSTREDLKNVFPPEVAVFEPSEAEISHTQKATLVCLATGFYPDHVELSWWVNGKEVHSGVCTDPQPLKEQPALNDSRYCLSSRLRVSATFWQNPRNHFRCQVQFYGLSENDEWTQDRAKPVTQIVSAEAWGRADCDVKLVEKSFETDTNLNFQNLSVIGFRILLLKVAGFNLLMTLRLWSS

SEQ ID NO: 45355 - protein, 766 aa, synthetic construct
MALPVTALLLPLALLLHAARPEVQLVESGGSLVQPGGSLRLSCAASGFTFDDYAMSWVRQVPGKGLEWVSSINWSGTHTDYADSVKGRFTISRNNANNTLYLQMNSLKSEDTAVYYCAKNWRDAGTTWFEKSGSAGQGTQVTVSSGTGGGGSGGGGSGGGGSEFDIVLTQSPLSLAVSLGQPAIISCRASQSVSFAGTSLMHWYHQKPGQQPRLLIYRASNLEAGVPDRFSGSGSKTDFTLTISPVEAEDAATYYCQQSREYPYTFGGGTKLEIKRLEDLKNVFPPEVAVFEPSEAEISHTQKATLVCLATGFYPDHVELSWWVNGKEVHSGVCTDPQPLKEQPALNDSRYCLSSRLRVSATFWQNPRNHFRCQVQFYGLSENDEWTQDRAKPVTQIVSAEAWGRADCDVKLVEKSFETDTNLNFQNLSVIGFRILLLKVAGFNLLMTLRLWSSRAKRSGSGATNFSLLKQAGDVEENPGPTSMDWIWRILFLVGAATGAHSFEQVQLVQSGAEVVKPGASVKISCKASGYTFTGYFMHWVKQSPGQSLEWIGRIHPYDGDTFYNQKFQGKATLTVDKSSNTAHMELLSLTSEDFAVYYCTRYDGSRAMDYWGQGTTVTVSSTRIQNPDPAVYQLRDSKSSDKSVCLFTDFDSQTNVSQSKDSDVYITDKCVLDMRSMDFKSNSAVAWSNKSDFACANAFNNSIIPEDTFFPSPESSCGFTSESYQQGVLSATILYEILLGKATLYAVLVSALVLMAMVKRKDSRG

SEQ ID NO: 45356 - protein, 770 aa, synthetic construct
MALPVTALLLPLALLLHAARPEVQLVESGGSLVQPGGSLRLSCAASGFTFDDYAMSWVRQVPGKGLEWVSSINWSGTHTDYADSVKGRFTISRNNANNTLYLQMNSLKSEDTAVYYCAKNWRDAGTTWFEKSGSAGQGTQVTVSSGTGGGGSGGGGSGGGGSEFDIVLTQSPLSLAVSLGQPAIISCRASQSVSFAGTSLMHWYHQKPGQQPRLLIYRASNLEAGVPDRFSGSGSKTDFTLTISPVEAEDAATYYCQQSREYPYTFGGGTKLEIKRLEIQNPDPAVYQLRDSKSSDKSVCLFTDFDSQTNVSQSKDSDVYITDKCVLDMRSMDFKSNSAVAWSNKSDFACANAFNNSIIPEDTFFPSPESSCGFTSESYQQGVLSATILYEILLGKATLYAVLVSALVLMAMVKRKDSRGRAKRSGSGVKQTLNFDLLKLAGDVESNPGPTSMDWIWRILFLVGAATGAHSFEQVQLVQSGAEVVKPGASVKISCKASGYTFTGYFMHWVKQSPGQSLEWIGRIHPYDGDTFYNQKFQGKATLTVDKSSNTAHMELLSLTSEDFAVYYCTRYDGSRAMDYWGQGTTVTVSSTREDLKNVFPPEVAVFEPSEAEISHTQKATLVCLATGFYPDHVELSWWVNGKEVHSGVCTDPQPLKEQPALNDSRYCLSSRLRVSATFWQNPRNHFRCQVQFYGLSENDEWTQDRAKPVTQIVSAEAWGRADCDVKLVEKSFETDTNLNFQNLSVIGFRILLLKVAGFNLLMTLRLWSS

SEQ ID NO: 45357 - protein, 764 aa, synthetic construct
MALPVTALLLPLALLLHAARPEVQLLESGGGLVQPGGSLRLSCAASGFIFSSYAMSWVRQAPGKGQEWVSGVSGTGVNTYYADSVKGRFTISRDNSKNTLYLQMNSLRAEDTAVYYCASGKGWDSGSWYEDYRGQGTLVTVSSGTGGGGSGGGGSGGGGSEFDIVLTQSPLSLAVSLGQPAIISCRASQSVSFAGTSLMHWYHQKPGQQPRLLIYRASNLEAGVPDRFSGSGSKTDFTLTISPVEAEDAATYYCQQSREYPYTFGGGTKLEIKRLEDLKNVFPPEVAVFEPSEAEISHTQKATLVCLATGFYPDHVELSWWVNGKEVHSGVCTDPQPLKEQPALNDSRYCLSSRLRVSATFWQNPRNHFRCQVQFYGLSENDEWTQDRAKPVTQIVSAEAWGRADCDVKLVEKSFETDTNLNFQNLSVIGFRILLLKVAGFNLLMTLRLWSSRAKRSGSGATNFSLLKQAGDVEENPGPTSMDWIWRILFLVGAATGAHSFEQVQLVQSGAEVVKPGASVKISCKASGYTFTGYFMHWVKQSPGQSLEWIGRIHPYDGDTFYNQKFQGKATLTVDKSSNTAHMELLSLTSEDFAVYYCTRYDGSRAMDYWGQGTTVTVSSTRIQNPDPAVYQLRDSKSSDKSVCLFTDFDSQTNVSQSKDSDVYITDKCVLDMRSMDFKSNSAVAWSNKSDFACANAFNNSIIPEDTFFPSPESSCGFTSESYQQGVLSATILYEILLGKATLYAVLVSALVLMAMVKRKDSRG

SEQ ID NO: 45358 - protein, 768 aa, synthetic construct
MALPVTALLLPLALLLHAARPEVQLLESGGGLVQPGGSLRLSCAASGFIFSSYAMSWVRQAPGKGQEWVSGVSGTGVNTYYADSVKGRFTISRDNSKNTLYLQMNSLRAEDTAVYYCASGKGWDSGSWYEDYRGQGTLVTVSSGTGGGGSGGGGSGGGGSEFDIVLTQSPLSLAVSLGQPAIISCRASQSVSFAGTSLMHWYHQKPGQQPRLLIYRASNLEAGVPDRFSGSGSKTDFTLTISPVEAEDAATYYCQQSREYPYTFGGGTKLEIKRLEIQNPDPAVYQLRDSKSSDKSVCLFTDFDSQTNVSQSKDSDVYITDKCVLDMRSMDFKSNSAVAWSNKSDFACANAFNNSIIPEDTFFPSPESSCGFTSESYQQGVLSATILYEILLGKATLYAVLVSALVLMAMVKRKDSRGRAKRSGSGVKQTLNFDLLKLAGDVESNPGPTSMDWIWRILFLVGAATGAHSFEQVQLVQSGAEVVKPGASVKISCKASGYTFTGYFMHWVKQSPGQSLEWIGRIHPYDGDTFYNQKFQGKATLTVDKSSNTAHMELLSLTSEDFAVYYCTRYDGSRAMDYWGQGTTVTVSSTREDLKNVFPPEVAVFEPSEAEISHTQKATLVCLATGFYPDHVELSWWVNGKEVHSGVCTDPQPLKEQPALNDSRYCLSSRLRVSATFWQNPRNHFRCQVQFYGLSENDEWTQDRAKPVTQIVSAEAWGRADCDVKLVEKSFETDTNLNFQNLSVIGFRILLLKVAGFNLLMTLRLWSS

SEQ ID NO: 45359 - protein, 732 aa, synthetic construct
MALPVTALLLPLALLLHAARPMLPAPKNLVVSRITEDSARLSWTAPDAAFDSFPIRYIETLIWGEAIWLDVPGSERSYDLTGLKPGTEYAVVITGVKGGRFSSPLVASFTTGTGGGGSGGGGSGGGGSEFDIVLTQSPLSLAVSLGQPAIISCRASQSVSFAGTSLMHWYHQKPGQQPRLLIYRASNLEAGVPDRFSGSGSKTDFTLTISPVEAEDAATYYCQQSREYPYTFGGGTKLEIKRLEDLKNVFPPEVAVFEPSEAEISHTQKATLVCLATGFYPDHVELSWWVNGKEVHSGVCTDPQPLKEQPALNDSRYCLSSRLRVSATFWQNPRNHFRCQVQFYGLSENDEWTQDRAKPVTQIVSAEAWGRADCDVKLVEKSFETDTNLNFQNLSVIGFRILLLKVAGFNLLMTLRLWSSRAKRSGSGATNFSLLKQAGDVEENPGPTSMDWIWRILFLVGAATGAHSFEQVQLVQSGAEVVKPGASVKISCKASGYTFTGYFMHWVKQSPGQSLEWIGRIHPYDGDTFYNQKFQGKATLTVDKSSNTAHMELLSLTSEDFAVYYCTRYDGSRAMDYWGQGTTVTVSSTRIQNPDPAVYQLRDSKSSDKSVCLFTDFDSQTNVSQSKDSDVYITDKCVLDMRSMDFKSNSAVAWSNKSDFACANAFNNSIIPEDTFFPSPESSCGFTSESYQQGVLSATILYEILLGKATLYAVLVSALVLMAMVKRKDSRG

SEQ ID NO: 45360 - protein, 736 aa, synthetic construct
MALPVTALLLPLALLLHAARPMLPAPKNLVVSRITEDSARLSWTAPDAAFDSFPIRYIETLIWGEAIWLDVPGSERSYDLTGLKPGTEYAVVITGVKGGRFSSPLVASFTTGTGGGGSGGGGSGGGGSEFDIVLTQSPLSLAVSLGQPAIISCRASQSVSFAGTSLMHWYHQKPGQQPRLLIYRASNLEAGVPDRFSGSGSKTDFTLTISPVEAEDAATYYCQQSREYPYTFGGGTKLEIKRLEIQNPDPAVYQLRDSKSSDKSVCLFTDFDSQTNVSQSKDSDVYITDKCVLDMRSMDFKSNSAVAWSNKSDFACANAFNNSIIPEDTFFPSPESSCGFTSESYQQGVLSATILYEILLGKATLYAVLVSALVLMAMVKRKDSRGRAKRSGSGVKQTLNFDLLKLAGDVESNPGPTSMDWIWRILFLVGAATGAHSFEQVQLVQSGAEVVKPGASVKISCKASGYTFTGYFMHWVKQSPGQSLEWIGRIHPYDGDTFYNQKFQGKATLTVDKSSNTAHMELLSLTSEDFAVYYCTRYDGSRAMDYWGQGTTVTVSSTREDLKNVFPPEVAVFEPSEAEISHTQKATLVCLATGFYPDHVELSWWVNGKEVHSGVCTDPQPLKEQPALNDSRYCLSSRLRVSATFWQNPRNHFRCQVQFYGLSENDEWTQDRAKPVTQIVSAEAWGRADCDVKLVEKSFETDTNLNFQNLSVIGFRILLLKVAGFNLLMTLRLWSS

SEQ ID NO: 45361 - protein, 761 aa, synthetic construct
MALPVTALLLPLALLLHAARPEVQLVESGGGLVQPGGSLRLSCAASGFNIKDTCIGWVRRAPGKEEELVAKICKYSGHTRYADSVKGRFTISADTSKNTAYLQMNSLRAEDTAVYYCAAVSVRDGHYNYWGQGTTVTVSSGTGGGGSGGGGSGGGGSEFDIVLTQSPLSLAVSLGQPAIISCRASQSVSFAGTSLMHWYHQKPGQQPRLLIYRASNLEAGVPDRFSGSGSKTDFTLTISPVEAEDAATYYCQQSREYPYTFGGGTKLEIKRLEDLKNVFPPEVAVFEPSEAEISHTQKATLVCLATGFYPDHVELSWWVNGKEVHSGVCTDPQPLKEQPALNDSRYCLSSRLRVSATFWQNPRNHFRCQVQFYGLSENDEWTQDRAKPVTQIVSAEAWGRADCDVKLVEKSFETDTNLNFQNLSVIGFRILLLKVAGFNLLMTLRLWSSRAKRSGSGATNFSLLKQAGDVEENPGPTSMDWIWRILFLVGAATGAHSFEQVQLVQSGAEVVKPGASVKISCKASGYTFTGYFMHWVKQSPGQSLEWIGRIHPYDGDTFYNQKFQGKATLTVDKSSNTAHMELLSLTSEDFAVYYCTRYDGSRAMDYWGQGTTVTVSSTRIQNPDPAVYQLRDSKSSDKSVCLFTDFDSQTNVSQSKDSDVYITDKCVLDMRSMDFKSNSAVAWSNKSDFACANAFNNSIIPEDTFFPSPESSCGFTSESYQQGVLSATILYEILLGKATLYAVLVSALVLMAMVKRKDSRG

SEQ ID NO: 45362 - protein, 765 aa, synthetic construct
MALPVTALLLPLALLLHAARPEVQLVESGGGLVQPGGSLRLSCAASGFNIKDTCIGWVRRAPGKEEELVAKICKYSGHTRYADSVKGRFTISADTSKNTAYLQMNSLRAEDTAVYYCAAVSVRDGHYNYWGQGTTVTVSSGTGGGGSGGGGSGGGGSEFDIVLTQSPLSLAVSLGQPAIISCRASQSVSFAGTSLMHWYHQKPGQQPRLLIYRASNLEAGVPDRFSGSGSKTDFTLTISPVEAEDAATYYCQQSREYPYTFGGGTKLEIKRLEIQNPDPAVYQLRDSKSSDKSVCLFTDFDSQTNVSQSKDSDVYITDKCVLDMRSMDFKSNSAVAWSNKSDFACANAFNNSIIPEDTFFPSPESSCGFTSESYQQGVLSATILYEILLGKATLYAVLVSALVLMAMVKRKDSRGRAKRSGSGVKQTLNFDLLKLAGDVESNPGPTSMDWIWRILFLVGAATGAHSFEQVQLVQSGAEVVKPGASVKISCKASGYTFTGYFMHWVKQSPGQSLEWIGRIHPYDGDTFYNQKFQGKATLTVDKSSNTAHMELLSLTSEDFAVYYCTRYDGSRAMDYWGQGTTVTVSSTREDLKNVFPPEVAVFEPSEAEISHTQKATLVCLATGFYPDHVELSWWVNGKEVHSGVCTDPQPLKEQPALNDSRYCLSSRLRVSATFWQNPRNHFRCQVQFYGLSENDEWTQDRAKPVTQIVSAEAWGRADCDVKLVEKSFETDTNLNFQNLSVIGFRILLLKVAGFNLLMTLRLWSS

SEQ ID NO: 45363 - protein, 1132 aa, synthetic construct
MALPVTALLLPLALLLHAARPEVQLVESGGGLVQAGGSLRLSCAASGRTFSMGWFRQAPGKEREFVAAITYSGGSPYYADSVKGRFTISRDNAKNTVYLQMNSLKPEDTAVYYCAANPTYGSDWNAENWGQGTQVTVSSGTGGGGSGGGGSGGGGSEFDIVLTQSPLSLAVSLGQPAIISCRASQSVSFAGTSLMHWYHQKPGQQPRLLIYRASNLEAGVPDRFSGSGSKTDFTLTISPVEAEDAATYYCQQSREYPYTFGGGTKLEIKRLEDLKNVFPPEVAVFEPSEAEISHTQKATLVCLATGFYPDHVELSWWVNGKEVHSGVCTDPQPLKEQPALNDSRYCLSSRLRVSATFWQNPRNHFRCQVQFYGLSENDEWTQDRAKPVTQIVSAEAWGRADCDVKLVEKSFETDTNLNFQNLSVIGFRILLLKVAGFNLLMTLRLWSSRAKRSGSGATNFSLLKQAGDVEENPGPTSATMDWIWRILFLVGAATGAHSGPEVQLVESGGGLVQAGGSLRLSCAASGRTFTMGWFRQAPGKEREFVAAISLSPTLAYYADSVKGRFTISRDNAKNTVVLQMNSLKPEDTALYYCAADRKSVMSIRPDYWGQGTQVTVSSGSGGGGSGGGGSGGGGSFEQVQLVQSGAEVVKPGASVKISCKASGYTFTGYFMHWVKQSPGQSLEWIGRIHPYDGDTFYNQKFQGKATLTVDKSSNTAHMELLSLTSEDFAVYYCTRYDGSRAMDYWGQGTTVTVSSTRIQNPDPAVYQLRDSKSSDKSVCLFTDFDSQTNVSQSKDSDVYITDKCVLDMRSMDFKSNSAVAWSNKSDFACANAFNNSIIPEDTFFPSPESSCGFTSESYQQGVLSATILYEILLGKATLYAVLVSALVLMAMVKRKDSRGRAKRSGSGVKQTLNFDLLKLAGDVESNPGPSRGHMTEYKPTVRLATRDDVPRAVRTLAAAFADYPATRHTVDPDRHIERVTELQELFLTRVGLDIGKVWVADDGAAVAVWTTPESVEAGAVFAEIGPRMAELSGSRLAAQQQMEGLLAPHRPKEPAWFLATVGVSPDHQGKGLGSAVVLPGVEAAERAGVPAFLETSAPRNLPFYERLGFTVTADVEVPEGPRTWCMTRKPGA

SEQ ID NO: 45364 - protein, 770 aa, synthetic construct
MALPVTALLLPLALLLHAARPEVQLVESGGGLVQPGGSLRLSCAASGFASDYYIIGWFRQAPGKEREGVSCISSRYANTNYADSVKGRFTISRDNAKNTVYLQMNSLKPEDTAVYYCAADTRRYTCPDIATMHRNFDSWGQGTLVTVSSGTGGGGSGGGGSGGGGSEFDIVLTQSPLSLAVSLGQPAIISCRASQSVSFAGTSLMHWYHQKPGQQPRLLIYRASNLEAGVPDRFSGSGSKTDFTLTISPVEAEDAATYYCQQSREYPYTFGGGTKLEIKRLEDLKNVFPPEVAVFEPSEAEISHTQKATLVCLATGFYPDHVELSWWVNGKEVHSGVCTDPQPLKEQPALNDSRYCLSSRLRVSATFWQNPRNHFRCQVQFYGLSENDEWTQDRAKPVTQIVSAEAWGRADCDVKLVEKSFETDTNLNFQNLSVIGFRILLLKVAGFNLLMTLRLWSSRAKRSGSGATNFSLLKQAGDVEENPGPTSMDWIWRILFLVGAATGAHSFEQVQLVQSGAEVVKPGASVKISCKASGYTFTGYFMHWVKQSPGQSLEWIGRIHPYDGDTFYNQKFQGKATLTVDKSSNTAHMELLSLTSEDFAVYYCTRYDGSRAMDYWGQGTTVTVSSTRIQNPDPAVYQLRDSKSSDKSVCLFTDFDSQTNVSQSKDSDVYITDKCVLDMRSMDFKSNSAVAWSNKSDFACANAFNNSIIPEDTFFPSPESSCGFTSESYQQGVLSATILYEILLGKATLYAVLVSALVLMAMVKRKDSRG

SEQ ID NO: 45365 - protein, 770 aa, synthetic construct
MALPVTALLLPLALLLHAARPEVQLVESGGGLVQPGGSLRLSCEASGFASDDYIIGWFRQAPGKEREGVSCISSKYANTVYTDSVKGRFRLSRGTAKNTVYLQMSALKPEDTAVYYCAMDSRRVTCPEISTMHRNFDSWGQGTLVTVSSGTGGGGSGGGGSGGGGSEFDIVLTQSPLSLAVSLGQPAIISCRASQSVSFAGTSLMHWYHQKPGQQPRLLIYRASNLEAGVPDRFSGSGSKTDFTLTISPVEAEDAATYYCQQSREYPYTFGGGTKLEIKRLEDLKNVFPPEVAVFEPSEAEISHTQKATLVCLATGFYPDHVELSWWVNGKEVHSGVCTDPQPLKEQPALNDSRYCLSSRLRVSATFWQNPRNHFRCQVQFYGLSENDEWTQDRAKPVTQIVSAEAWGRADCDVKLVEKSFETDTNLNFQNLSVIGFRILLLKVAGFNLLMTLRLWSSRAKRSGSGATNFSLLKQAGDVEENPGPTSMDWIWRILFLVGAATGAHSFEQVQLVQSGAEVVKPGASVKISCKASGYTFTGYFMHWVKQSPGQSLEWIGRIHPYDGDTFYNQKFQGKATLTVDKSSNTAHMELLSLTSEDFAVYYCTRYDGSRAMDYWGQGTTVTVSSTRIQNPDPAVYQLRDSKSSDKSVCLFTDFDSQTNVSQSKDSDVYITDKCVLDMRSMDFKSNSAVAWSNKSDFACANAFNNSIIPEDTFFPSPESSCGFTSESYQQGVLSATILYEILLGKATLYAVLVSALVLMAMVKRKDSRG

SEQ ID NO: 45366 - protein, 770 aa, synthetic construct
MALPVTALLLPLALLLHAARPEVQLVESGGGLVQPGGSLRLSCAASGFASDYYIIGWFRQAPGKEREGVSCISSRYANTNYADSVKGRFTISRDNAKNTVYLQMNSLKPEDTAVYYCAADTRRYTCPDIATMHRNFDSWGQGTLVTVSSGTGGGGSGGGGSGGGGSEFDIVLTQSPLSLAVSLGQPAIISCRASQSVSFAGTSLMHWYHQKPGQQPRLLIYRASNLEAGVPDRFSGSGSKTDFTLTISPVEAEDAATYYCQQSREYPYTFGGGTKLEIKRLEIQNPDPAVYQLRDSKSSDKSVCLFTDFDSQTNVSQSKDSDVYITDKCVLDMRSMDFKSNSAVAWSNKSDFACANAFNNSIIPEDTFFPSPESSCGFTSESYQQGVLSATILYEILLGKATLYAVLVSALVLMAMVKRKDSRGRAKRSGSGATNFSLLKQAGDVEENPGPTSMDWIWRILFLVGAATGAHSFEQVQLVQSGAEVVKPGASVKISCKASGYTFTGYFMHWVKQSPGQSLEWIGRIHPYDGDTFYNQKFQGKATLTVDKSSNTAHMELLSLTSEDFAVYYCTRYDGSRAMDYWGQGTTVTVSSTRDLKNVFPPEVAVFEPSEAEISHTQKATLVCLATGFYPDHVELSWWVNGKEVHSGVCTDPQPLKEQPALNDSRYCLSSRLRVSATFWQNPRNHFRCQVQFYGLSENDEWTQDRAKPVTQIVSAEAWGRADCDVKLVEKSFETDTNLNFQNLSVIGFRILLLKVAGFNLLMTLRLWSS

SEQ ID NO: 45367 - protein, 770 aa, synthetic construct
MALPVTALLLPLALLLHAARPEVQLVESGGGLVQPGGSLRLSCEASGFASDDYIIGWFRQAPGKEREGVSCISSKYANTVYTDSVKGRFRLSRGTAKNTVYLQMSALKPEDTAVYYCAMDSRRVTCPEISTMHRNFDSWGQGTLVTVSSGTGGGGSGGGGSGGGGSEFDIVLTQSPLSLAVSLGQPAIISCRASQSVSFAGTSLMHWYHQKPGQQPRLLIYRASNLEAGVPDRFSGSGSKTDFTLTISPVEAEDAATYYCQQSREYPYTFGGGTKLEIKRLEIQNPDPAVYQLRDSKSSDKSVCLFTDFDSQTNVSQSKDSDVYITDKCVLDMRSMDFKSNSAVAWSNKSDFACANAFNNSIIPEDTFFPSPESSCGFTSESYQQGVLSATILYEILLGKATLYAVLVSALVLMAMVKRKDSRGRAKRSGSGATNFSLLKQAGDVEENPGPTSMDWIWRILFLVGAATGAHSFEQVQLVQSGAEVVKPGASVKISCKASGYTFTGYFMHWVKQSPGQSLEWIGRIHPYDGDTFYNQKFQGKATLTVDKSSNTAHMELLSLTSEDFAVYYCTRYDGSRAMDYWGQGTTVTVSSTRDLKNVFPPEVAVFEPSEAEISHTQKATLVCLATGFYPDHVELSWWVNGKEVHSGVCTDPQPLKEQPALNDSRYCLSSRLRVSATFWQNPRNHFRCQVQFYGLSENDEWTQDRAKPVTQIVSAEAWGRADCDVKLVEKSFETDTNLNFQNLSVIGFRILLLKVAGFNLLMTLRLWSS

SEQ ID NO: 45368 - protein, 761 aa, synthetic construct
MALPVTALLLPLALLLHAARPQVKLEESGGGLVQPGESLRLSCSASGSIFKVFRVFAMSWYRQGPGKQRELVASISSGETTTYAESVKGRFTISRDNAKNTAYLQMDSLKPEDTAVYYCNADHTFTGDFWGQGTQVTVSSGTGGGGSGGGGSGGGGSEFDIVLTQSPLSLAVSLGQPAIISCRASQSVSFAGTSLMHWYHQKPGQQPRLLIYRASNLEAGVPDRFSGSGSKTDFTLTISPVEAEDAATYYCQQSREYPYTFGGGTKLEIKRLEIQNPDPAVYQLRDSKSSDKSVCLFTDFDSQTNVSQSKDSDVYITDKCVLDMRSMDFKSNSAVAWSNKSDFACANAFNNSIIPEDTFFPSPESSCGFTSESYQQGVLSATILYEILLGKATLYAVLVSALVLMAMVKRKDSRGRAKRSGSGATNFSLLKQAGDVEENPGPTSMDWIWRILFLVGAATGAHSFEQVQLVQSGAEVVKPGASVKISCKASGYTFTGYFMHWVKQSPGQSLEWIGRIHPYDGDTFYNQKFQGKATLTVDKSSNTAHMELLSLTSEDFAVYYCTRYDGSRAMDYWGQGTTVTVSSTRDLKNVFPPEVAVFEPSEAEISHTQKATLVCLATGFYPDHVELSWWVNGKEVHSGVCTDPQPLKEQPALNDSRYCLSSRLRVSATFWQNPRNHFRCQVQFYGLSENDEWTQDRAKPVTQIVSAEAWGRADCDVKLVEKSFETDTNLNFQNLSVIGFRILLLKVAGFNLLMTLRLWSS

SEQ ID NO: 45369 - protein, 762 aa, synthetic construct
MALPVTALLLPLALLLHAARPDIVLTQSPLSLAVSLGQPAIISCRASQSVSFAGTSLMHWYHQKPGQQPRLLIYRASNLEAGVPDRFSGSGSKTDFTLTISPVEAEDAATYYCQQSREYPYTFGGGTKLEIKRLEDLKNVFPPEVAVFEPSEAEISHTQKATLVCLATGFYPDHVELSWWVNGKEVHSGVCTDPQPLKEQPALNDSRYCLSSRLRVSATFWQNPRNHFRCQVQFYGLSENDEWTQDRAKPVTQIVSAEAWGRADCDVKLVEKSFETDTNLNFQNLSVIGFRILLLKVAGFNLLMTLRLWSSRAKRSGSGATNFSLLKQAGDVEENPGPTSATMDWIWRILFLVGAATGAHSGPEVQLVESGGGLVQAGGSLRLSCAASGRTFSMGWFRQAPGKEREFVAAITYSGGSPYYADSVKGRFTISRDNAKNTVYLQMNSLKPEDTAVYYCAANPTYGSDWNAENWGQGTQVTVSSGSGGGGSGGGGSGGGGSFEQVQLVQSGAEVVKPGASVKISCKASGYTFTGYFMHWVKQSPGQSLEWIGRIHPYDGDTFYNQKFQGKATLTVDKSSNTAHMELLSLTSEDFAVYYCTRYDGSRAMDYWGQGTTVTVSSTRIQNPDPAVYQLRDSKSSDKSVCLFTDFDSQTNVSQSKDSDVYITDKCVLDMRSMDFKSNSAVAWSNKSDFACANAFNNSIIPEDTFFPSPESSCGFTSESYQQGVLSATILYEILLGKATLYAVLVSALVLMAMVKRKDSRG

SEQ ID NO: 45370 - protein, 763 aa, synthetic construct
MALPVTALLLPLALLLHAARPDIVLTQSPLSLAVSLGQPAIISCRASQSVSFAGTSLMHWYHQKPGQQPRLLIYRASNLEAGVPDRFSGSGSKTDFTLTISPVEAEDAATYYCQQSREYPYTFGGGTKLEIKRLEDLKNVFPPEVAVFEPSEAEISHTQKATLVCLATGFYPDHVELSWWVNGKEVHSGVCTDPQPLKEQPALNDSRYCLSSRLRVSATFWQNPRNHFRCQVQFYGLSENDEWTQDRAKPVTQIVSAEAWGRADCDVKLVEKSFETDTNLNFQNLSVIGFRILLLKVAGFNLLMTLRLWSSRAKRSGSGATNFSLLKQAGDVEENPGPTSATMDWIWRILFLVGAATGAHSGPEVQLVESGGGLVQPGGSLRLSCAASGSIFGFNDMAWYRQAPGKQRELVALISRVGVTSSADSVKGRFTISRVNAKDTVYLQMNSLKPEDTAVYYCYMDQRLDGSTLAYWGQGTQVTVSSGSGGGGSGGGGSGGGGSFEQVQLVQSGAEVVKPGASVKISCKASGYTFTGYFMHWVKQSPGQSLEWIGRIHPYDGDTFYNQKFQGKATLTVDKSSNTAHMELLSLTSEDFAVYYCTRYDGSRAMDYWGQGTTVTVSSTRIQNPDPAVYQLRDSKSSDKSVCLFTDFDSQTNVSQSKDSDVYITDKCVLDMRSMDFKSNSAVAWSNKSDFACANAFNNSIIPEDTFFPSPESSCGFTSESYQQGVLSATILYEILLGKATLYAVLVSALVLMAMVKRKDSRG

SEQ ID NO: 45371 - protein, 759 aa, synthetic construct
MALPVTALLLPLALLLHAARPDIVLTQSPLSLAVSLGQPAIISCRASQSVSFAGTSLMHWYHQKPGQQPRLLIYRASNLEAGVPDRFSGSGSKTDFTLTISPVEAEDAATYYCQQSREYPYTFGGGTKLEIKRLEDLKNVFPPEVAVFEPSEAEISHTQKATLVCLATGFYPDHVELSWWVNGKEVHSGVCTDPQPLKEQPALNDSRYCLSSRLRVSATFWQNPRNHFRCQVQFYGLSENDEWTQDRAKPVTQIVSAEAWGRADCDVKLVEKSFETDTNLNFQNLSVIGFRILLLKVAGFNLLMTLRLWSSRAKRSGSGATNFSLLKQAGDVEENPGPTSATMDWIWRILFLVGAATGAHSGPEVQLVESGGGLVQAGGSLRLSCAASGSVFSGNVMGWYRQAPGKEREWVAAIASGGSIYYRDSVKGRFTISRDNAKNTVYLQMNSLKPEDTAVYYCNSHPPTLPYWGLGTQVTVSSGSGGGGSGGGGSGGGGSFEQVQLVQSGAEVVKPGASVKISCKASGYTFTGYFMHWVKQSPGQSLEWIGRIHPYDGDTFYNQKFQGKATLTVDKSSNTAHMELLSLTSEDFAVYYCTRYDGSRAMDYWGQGTTVTVSSTRIQNPDPAVYQLRDSKSSDKSVCLFTDFDSQTNVSQSKDSDVYITDKCVLDMRSMDFKSNSAVAWSNKSDFACANAFNNSIIPEDTFFPSPESSCGFTSESYQQGVLSATILYEILLGKATLYAVLVSALVLMAMVKRKDSRG

SEQ ID NO: 45372 - protein, 757 aa, synthetic construct
MALPVTALLLPLALLLHAARPDIVLTQSPLSLAVSLGQPAIISCRASQSVSFAGTSLMHWYHQKPGQQPRLLIYRASNLEAGVPDRFSGSGSKTDFTLTISPVEAEDAATYYCQQSREYPYTFGGGTKLEIKRLEDLKNVFPPEVAVFEPSEAEISHTQKATLVCLATGFYPDHVELSWWVNGKEVHSGVCTDPQPLKEQPALNDSRYCLSSRLRVSATFWQNPRNHFRCQVQFYGLSENDEWTQDRAKPVTQIVSAEAWGRADCDVKLVEKSFETDTNLNFQNLSVIGFRILLLKVAGFNLLMTLRLWSSRAKRSGSGATNFSLLKQAGDVEENPGPTSATMDWIWRILFLVGAATGAHSGPEVQLLESGGGLVQPGGSLRLSCAASGFSFSSYALSWVRQAPGKGLEWVSSIGENDGTTDYADAVKGRFTISRDNSKNTLYLQMNSLRVEDTAVYYCVKDGIHWGQGTLVTVSSGSGGGGSGGGGSGGGGSFEQVQLVQSGAEVVKPGASVKISCKASGYTFTGYFMHWVKQSPGQSLEWIGRIHPYDGDTFYNQKFQGKATLTVDKSSNTAHMELLSLTSEDFAVYYCTRYDGSRAMDYWGQGTTVTVSSTRIQNPDPAVYQLRDSKSSDKSVCLFTDFDSQTNVSQSKDSDVYITDKCVLDMRSMDFKSNSAVAWSNKSDFACANAFNNSIIPEDTFFPSPESSCGFTSESYQQGVLSATILYEILLGKATLYAVLVSALVLMAMVKRKDSRG

SEQ ID NO: 45373 - protein, 1126 aa, synthetic construct
MGPRLLFWALLCLLGTGPVEAGVTQSPTHLIKTRGQQATLRCSPISGHTSVYWYQQALGLGLQFLLWYDEGEERNRGNFPPRFSGRQFPNYSSELNVNALELEDSALYLCASSLGGPRGLAGLRGDEQFFGPGTRLTVLEGTGGGGSGGGEFDIVLTQSPLSLAVSLGQPAIISCRASQSVSFAGTSLMHWYHQKPGQQPRLLIYRASNLEAGVPDRFSGSGSKTDFTLTISPVEAEDAATYYCQQSREYPYTFGGGTKLEIKRLEDLKNVFPPEVAVFEPSEAEISHTQKATLVCLATGFYPDHVELSWWVNGKEVHSGVCTDPQPLKEQPALNDSRYCLSSRLRVSATFWQNPRNHFRCQVQFYGLSENDEWTQDRAKPVTQIVSAEAWGRADCDVKLVEKSFETDTNLNFQNLSVIGFRILLLKVAGFNLLMTLRLWSSRAKRSGSGATNFSLLKQAGDVEENPGPTSATMDWIWRILFLVGAATGAHSGPEVQLVESGGGLVQAGGSLRLSCAASGRTFSMGWFRQAPGKEREFVAAITYSGGSPYYADSVKGRFTISRDNAKNTVYLQMNSLKPEDTAVYYCAANPTYGSDWNAENWGQGTQVTVSSGSGGGGSGGGGSGGGGSFEQVQLVQSGAEVVKPGASVKISCKASGYTFTGYFMHWVKQSPGQSLEWIGRIHPYDGDTFYNQKFQGKATLTVDKSSNTAHMELLSLTSEDFAVYYCTRYDGSRAMDYWGQGTTVTVSSTRIQNPDPAVYQLRDSKSSDKSVCLFTDFDSQTNVSQSKDSDVYITDKCVLDMRSMDFKSNSAVAWSNKSDFACANAFNNSIIPEDTFFPSPESSCGFTSESYQQGVLSATILYEILLGKATLYAVLVSALVLMAMVKRKDSRGRAKRSGSGVKQTLNFDLLKLAGDVESNPGPSRGHMTEYKPTVRLATRDDVPRAVRTLAAAFADYPATRHTVDPDRHIERVTELQELFLTRVGLDIGKVWVADDGAAVAVWTTPESVEAGAVFAEIGPRMAELSGSRLAAQQQMEGLLAPHRPKEPAWFLATVGVSPDHQGKGLGSAVVLPGVEAAERAGVPAFLETSAPRNLPFYERLGFTVTADVEVPEGPRTWCMTRKPGA

SEQ ID NO: 45374 - protein, 1125 aa, synthetic construct
MGPRLLFWALLCLLGTGPVEAGVTQSPTHLIKTRGQQATLRCSPISGHTSVYWYQQALGLGLQFLLWYDEGEERNRGNFPPRFSGRQFPNYSSELNVNALELEDSALYLCASSLGGDELGADGNEQFFGPGTRLTVLEGTGGGGSGGGSEFDIVLTQSPLSLAVSLGQPAIISCRASQSVSFAGTSLMHWYHQKPGQQPRLLIYRASNLEAGVPDRFSGSGSKTDFTLTISPVEAEDAATYYCQQSREYPYTFGGGTKLEIKRLEDLKNVFPPEVAVFEPSEAEISHTQKATLVCLATGFYPDHVELSWWVNGKEVHSGVCTDPQPLKEQPALNDSRYCLSSRLRVSATFWQNPRNHFRCQVQFYGLSENDEWTQDRAKPVTQIVSAEAWGRADCDVKLVEKSFETDTNLNFQNLSVIGFRILLLKVAGFNLLMTLRLWSSRAKRSGSGATNFSLLKQAGDVEENPGPTSATMDWIWRILFLVGAATGAHSGPEVQLVESGGGLVQAGGSLRLSCAASGRTFSMGWFRQAPGKEREFVAAITYSGGSPYYADSVKGRFTISRDNAKNTVYLQMNSLKPEDTAVYYCAANPTYGSDWNAENWGQGTQVTVSSGSGGGGSGGGGSGGGGSFEQVQLVQSGAEVVKPGASVKISCKASGYTFTGYFMHWVKQSPGQSLEWIGRIHPYDGDTFYNQKFQGKATLTVDKSSNTAHMELLSLTSEDFAVYYCTRYDGSRAMDYWGQGTTVTVSSTRIQNPDPAVYQLRDSKSSDKSVCLFTDFDSQTNVSQSKDSDVYITDKCVLDMRSMDFKSNSAVAWSNKSDFACANAFNNSIIPEDTFFPSPESSCGFTSESYQQGVLSATILYEILLGKATLYAVLVSALVLMAMVKRKDSRGRAKRSGSGVKQTLNFDLLKLAGDVESNPGPSRGHMTEYKPTVRLATRDDVPRAVRTLAAAFADYPATRHTVDPDRHIERVTELQELFLTRVGLDIGKVWVADDGAAVAVWTTPESVEAGAVFAEIGPRMAELSGSRLAAQQQMEGLLAPHRPKEPAWFLATVGVSPDHQGKGLGSAVVLPGVEAAERAGVPAFLETSAPRNLPFYERLGFTVTADVEVPEGPRTWCMTRKPGA

SEQ ID NO: 45375 - protein, 950 aa, synthetic construct
MALPVTALLLPLALLLHAARPDIVLTQSPLSLAVSLGQPAIISCRASQSVSFAGTSLMHWYHQKPGQQPRLLIYRASNLEAGVPDRFSGSGSKTDFTLTISPVEAEDAATYYCQQSREYPYTFGGGTKLEIKRLEDLKNVFPPEVAVFEPSEAEISHTQKATLVCLATGFYPDHVELSWWVNGKEVHSGVCTDPQPLKEQPALNDSRYCLSSRLRVSATFWQNPRNHFRCQVQFYGLSENDEWTQDRAKPVTQIVSAEAWGRADCDVKLVEKSFETDTNLNFQNLSVIGFRILLLKVAGFNLLMTLRLWSSRAKRSGSGATNFSLLKQAGDVEENPGPTSATMDWIWRILFLVGAATGAHSGPMGSWLEFYHRLNAIDSRLWALGGSEAELAAFEKEIAAFESELQAYKGKGNPEVESLRDHAAHIREWLQAYRHNGSGGGGSGGGGSGGGGSFEQVQLVQSGAEVVKPGASVKISCKASGYTFTGYFMHWVKQSPGQSLEWIGRIHPYDGDTFYNQKFQGKATLTVDKSSNTAHMELLSLTSEDFAVYYCTRYDGSRAMDYWGQGTTVTVSSTRIQNPDPAVYQLRDSKSSDKSVCLFTDFDSQTNVSQSKDSDVYITDKCVLDMRSMDFKSNSAVAWSNKSDFACANAFNNSIIPEDTFFPSPESSCGFTSESYQQGVLSATILYEILLGKATLYAVLVSALVLMAMVKRKDSRGRAKRSGSGVKQTLNFDLLKLAGDVESNPGPSRGHMTEYKPTVRLATRDDVPRAVRTLAAAFADYPATRHTVDPDRHIERVTELQELFLTRVGLDIGKVWVADDGAAVAVWTTPESVEAGAVFAEIGPRMAELSGSRLAAQQQMEGLLAPHRPKEPAWFLATVGVSPDHQGKGLGSAVVLPGVEAAERAGVPAFLETSAPRNLPFYERLGFTVTADVEVPEGPRTWCMTRKPGA

SEQ ID NO: 45376 - protein, 950 aa, synthetic construct
MALPVTALLLPLALLLHAARPACMGSWFEFYDRLNAIDARLWALGGSEAELAAFEKEIAAFESELQAYKGKGNPEVENLRVHAAAIREWLQAYRHNGTGGGGSGGGGSGGGGSEFDIVLTQSPLSLAVSLGQPAIISCRASQSVSFAGTSLMHWYHQKPGQQPRLLIYRASNLEAGVPDRFSGSGSKTDFTLTISPVEAEDAATYYCQQSREYPYTFGGGTKLEIKRLEDLKNVFPPEVAVFEPSEAEISHTQKATLVCLATGFYPDHVELSWWVNGKEVHSGVCTDPQPLKEQPALNDSRYCLSSRLRVSATFWQNPRNHFRCQVQFYGLSENDEWTQDRAKPVTQIVSAEAWGRADCDVKLVEKSFETDTNLNFQNLSVIGFRILLLKVAGFNLLMTLRLWSSRAKRSGSGATNFSLLKQAGDVEENPGPTSMDWIWRILFLVGAATGAHSFEQVQLVQSGAEVVKPGASVKISCKASGYTFTGYFMHWVKQSPGQSLEWIGRIHPYDGDTFYNQKFQGKATLTVDKSSNTAHMELLSLTSEDFAVYYCTRYDGSRAMDYWGQGTTVTVSSTRIQNPDPAVYQLRDSKSSDKSVCLFTDFDSQTNVSQSKDSDVYITDKCVLDMRSMDFKSNSAVAWSNKSDFACANAFNNSIIPEDTFFPSPESSCGFTSESYQQGVLSATILYEILLGKATLYAVLVSALVLMAMVKRKDSRGRAKRSGSGVKQTLNFDLLKLAGDVESNPGPSRGHMTEYKPTVRLATRDDVPRAVRTLAAAFADYPATRHTVDPDRHIERVTELQELFLTRVGLDIGKVWVADDGAAVAVWTTPESVEAGAVFAEIGPRMAELSGSRLAAQQQMEGLLAPHRPKEPAWFLATVGVSPDHQGKGLGSAVVLPGVEAAERAGVPAFLETSAPRNLPFYERLGFTVTADVEVPEGPRTWCMTRKPGA

SEQ ID NO: 45377 - protein, 1067 aa, synthetic construct
MALPVTALLLPLALLLHAARPACMDPDLEIRAAFLRQRNTALRTEVAELEQEVQRLENEVSQYETRYGPLGGGKGTGGGGSGGGGSGGGGSEFDIVLTQSPLSLAVSLGQPAIISCRASQSVSFAGTSLMHWYHQKPGQQPRLLIYRASNLEAGVPDRFSGSGSKTDFTLTISPVEAEDAATYYCQQSREYPYTFGGGTKLEIKRLEDLKNVFPPEVAVFEPSEAEISHTQKATLVCLATGFYPDHVELSWWVNGKEVHSGVCTDPQPLKEQPALNDSRYCLSSRLRVSATFWQNPRNHFRCQVQFYGLSENDEWTQDRAKPVTQIVSAEAWGRADCDVKLVEKSFETDTNLNFQNLSVIGFRILLLKVAGFNLLMTLRLWSSRAKRSGSGATNFSLLKQAGDVEENPGPTSATMDWIWRILFLVGAATGAHSGPEVQLVESGGGLVQAGGSLRLSCAASGRTFSMGWFRQAPGKEREFVAAITYSGGSPYYADSVKGRFTISRDNAKNTVYLQMNSLKPEDTAVYYCAANPTYGSDWNAENWGQGTQVTVSSGSGGGGSGGGGSGGGGSFEQVQLVQSGAEVVKPGASVKISCKASGYTFTGYFMHWVKQSPGQSLEWIGRIHPYDGDTFYNQKFQGKATLTVDKSSNTAHMELLSLTSEDFAVYYCTRYDGSRAMDYWGQGTTVTVSSTRIQNPDPAVYQLRDSKSSDKSVCLFTDFDSQTNVSQSKDSDVYITDKCVLDMRSMDFKSNSAVAWSNKSDFACANAFNNSIIPEDTFFPSPESSCGFTSESYQQGVLSATILYEILLGKATLYAVLVSALVLMAMVKRKDSRGRAKRSGSGVKQTLNFDLLKLAGDVESNPGPSRGHMTEYKPTVRLATRDDVPRAVRTLAAAFADYPATRHTVDPDRHIERVTELQELFLTRVGLDIGKVWVADDGAAVAVWTTPESVEAGAVFAEIGPRMAELSGSRLAAQQQMEGLLAPHRPKEPAWFLATVGVSPDHQGKGLGSAVVLPGVEAAERAGVPAFLETSAPRNLPFYERLGFTVTADVEVPEGPRTWCMTRKPGA

SEQ ID NO: 45378 - protein, 950 aa, synthetic construct
MALPVTALLLPLALLLHAARPDIVLTQSPLSLAVSLGQPAIISCRASQSVSFAGTSLMHWYHQKPGQQPRLLIYRASNLEAGVPDRFSGSGSKTDFTLTISPVEAEDAATYYCQQSREYPYTFGGGTKLEIKRLEDLKNVFPPEVAVFEPSEAEISHTQKATLVCLATGFYPDHVELSWWVNGKEVHSGVCTDPQPLKEQPALNDSRYCLSSRLRVSATFWQNPRNHFRCQVQFYGLSENDEWTQDRAKPVTQIVSAEAWGRADCDVKLVEKSFETDTNLNFQNLSVIGFRILLLKVAGFNLLMTLRLWSSRAKRSGSGATNFSLLKQAGDVEENPGPTSATMDWIWRILFLVGAATGAHSGPMGSWSEFYDRLHAIHHRLYALGGSEAELAAFEKEIAAFESELQAYKGKGNPEVEALRDTAAFIRTRLQAYRHNGSGGGGSGGGGSGGGGSFEQVQLVQSGAEVVKPGASVKISCKASGYTFTGYFMHWVKQSPGQSLEWIGRIHPYDGDTFYNQKFQGKATLTVDKSSNTAHMELLSLTSEDFAVYYCTRYDGSRAMDYWGQGTTVTVSSTRIQNPDPAVYQLRDSKSSDKSVCLFTDFDSQTNVSQSKDSDVYITDKCVLDMRSMDFKSNSAVAWSNKSDFACANAFNNSIIPEDTFFPSPESSCGFTSESYQQGVLSATILYEILLGKATLYAVLVSALVLMAMVKRKDSRGRAKRSGSGVKQTLNFDLLKLAGDVESNPGPSRGHMTEYKPTVRLATRDDVPRAVRTLAAAFADYPATRHTVDPDRHIERVTELQELFLTRVGLDIGKVWVADDGAAVAVWTTPESVEAGAVFAEIGPRMAELSGSRLAAQQQMEGLLAPHRPKEPAWFLATVGVSPDHQGKGLGSAVVLPGVEAAERAGVPAFLETSAPRNLPFYERLGFTVTADVEVPEGPRTWCMTRKPGA

SEQ ID NO: 45379 - protein, 1160 aa, synthetic construct
MALPVTALLLPLALLLHAARPDIVLTQSPLSLAVSLGQPAIISCRASQSVSFAGTSLMHWYHQKPGQQPRLLIYRASNLEAGVPDRFSGSGSKTDFTLTISPVEAEDAATYYCQQSREYPYTFGGGTKLEIKRLEDLKNVFPPEVAVFEPSEAEISHTQKATLVCLATGFYPDHVELSWWVNGKEVHSGVCTDPQPLKEQPALNDSRYCLSSRLRVSATFWQNPRNHFRCQVQFYGLSENDEWTQDRAKPVTQIVSAEAWGRADCDVKLVEKSFETDTNLNFQNLSVIGFRILLLKVAGFNLLMTLRLWSSRAKRSGSGATNFSLLKQAGDVEENPGPTSTMDWIWRILFLVGAATGAHSLFNQEVQIPLTESYCGPCPKNWICYKNNCYQFFDESKNWYESQASCMSQNASLLKVYSKEDQDLLKLVKSAHWMGLVHIPTNGSWQWEDGSILSPNLLTIIEMQKGDCALYASSFKGYIENCSTPNTYICMQRTVSGGGGSGGGGSGGGGDLFNQEVQIPLTESYCGPCPKNWICYKNNCYQFFDESKNWYESQASCMSQNASLLKVYSKEDQDLLKLVKSAHWMGLVHIPTNGSWQWEDGSILSPNLLTIIEMQKGDCALYASSFKGYIENCSTPNTYICMQRTVGSGGGGSGGGGSGGGGSFEQVQLVQSGAEVVKPGASVKISCKASGYTFTGYFMHWVKQSPGQSLEWIGRIHPYDGDTFYNQKFQGKATLTVDKSSNTAHMELLSLTSEDFAVYYCTRYDGSRAMDYWGQGTTVTVSSTRIQNPDPAVYQLRDSKSSDKSVCLFTDFDSQTNVSQSKDSDVYITDKCVLDMRSMDFKSNSAVAWSNKSDFACANAFNNSIIPEDTFFPSPESSCGFTSESYQQGVLSATILYEILLGKATLYAVLVSALVLMAMVKRKDSRGRAKRSGSGVKQTLNFDLLKLAGDVESNPGPSRGHMTEYKPTVRLATRDDVPRAVRTLAAAFADYPATRHTVDPDRHIERVTELQELFLTRVGLDIGKVWVADDGAAVAVWTTPESVEAGAVFAEIGPRMAELSGSRLAAQQQMEGLLAPHRPKEPAWFLATVGVSPDHQGKGLGSAVVLPGVEAAERAGVPAFLETSAPRNLPFYERLGFTVTADVEVPEGPRTWCMTRKPGA

SEQ ID NO: 45380 - protein, 623 aa, synthetic construct; identical to SEQ ID NO: 45337

SEQ ID NO: 45381 - protein, 627 aa, synthetic construct
MALPVTALLLPLALLLHAARPDIVLTQSPLSLAVSLGQPAIISCRASQSVSFAGTSLMHWYHQKPGQQPRLLIYRASNLEAGVPDRFSGSGSKTDFTLTISPVEAEDAATYYCQQSREYPYTFGGGTKLEIKRLEIQNPDPAVYQLRDSKSSDKSVCLFTDFDSQTNVSQSKDSDVYITDKCVLDMRSMDFKSNSAVAWSNKSDFACANAFNNSIIPEDTFFPSPESSCDVKLVEKSFETDTNLNFQILYEILLGKATLYAVLVSALVLMAMVKRKDSRGRAKRSGSGVKQTLNFDLLKLAGDVESNPGPTSMDWIWRILFLVGAATGAHSFEQVQLVQSGAEVVKPGASVKISCKASGYTFTGYFMHWVKQSPGQSLEWIGRIHPYDGDTFYNQKFQGKATLTVDKSSNTAHMELLSLTSEDFAVYYCTRYDGSRAMDYWGQGTTVTVSSTREDLKNVFPPEVAVFEPSEAEISHTQKATLVCLATGFYPDHVELSWWVNGKEVHSGVCTDPQPLKEQPALNDSRYCLSSRLRVSATFWQNPRNHFRCQVQFYGLSENDEWTQDRAKPVTQIVSAEAWGRADCGFTSESYQQGVLSATNLSVIGFRILLLKVAGFNLLMTLRLWSS

SEQ ID NO: 45382 - protein, 758 aa, synthetic construct
MALPVTALLLPLALLLHAARPEVQLVESGGGLVQPGGSLRLSCAASGFSFSDFWMSWVRQAPGKGLEWVATISQAGSEKDYVDSVKGRFTISRDNAKKSLYLQMNSLRAEDTAVYYCASGVYSFDYRGQGTLVTVSSGTGGGGSGGGGSGGGGSEFDIVLTQSPLSLAVSLGQPAIISCRASQSVSFAGTSLMHWYHQKPGQQPRLLIYRASNLEAGVPDRFSGSGSKTDFTLTISPVEAEDAATYYCQQSREYPYTFGGGTKLEIKRLEDLKNVFPPEVAVFEPSEAEISHTQKATLVCLATGFYPDHVELSWWVNGKEVHSGVCTDPQPLKEQPALNDSRYCLSSRLRVSATFWQNPRNHFRCQVQFYGLSENDEWTQDRAKPVTQIVSAEAWGRADCGFTSESYQQGVLSATNLSVIGFRILLLKVAGFNLLMTLRLWSSRAKRSGSGATNFSLLKQAGDVEENPGPTSMDWIWRILFLVGAATGAHSFEQVQLVQSGAEVVKPGASVKISCKASGYTFTGYFMHWVKQSPGQSLEWIGRIHPYDGDTFYNQKFQGKATLTVDKSSNTAHMELLSLTSEDFAVYYCTRYDGSRAMDYWGQGTTVTVSSTRIQNPDPAVYQLRDSKSSDKSVCLFTDFDSQTNVSQSKDSDVYITDKCVLDMRSMDFKSNSAVAWSNKSDFACANAFNNSIIPEDTFFPSPESSCDVKLVEKSFETDTNLNFQILYEILLGKATLYAVLVSALVLMAMVKRKDSRG

SEQ ID NO: 45383 - protein, 762 aa, synthetic construct
MALPVTALLLPLALLLHAARPEVQLVESGGGLVQPGGSLRLSCAASGFSFSDFWMSWVRQAPGKGLEWVATISQAGSEKDYVDSVKGRFTISRDNAKKSLYLQMNSLRAEDTAVYYCASGVYSFDYRGQGTLVTVSSGTGGGGSGGGGSGGGGSEFDIVLTQSPLSLAVSLGQPAIISCRASQSVSFAGTSLMHWYHQKPGQQPRLLIYRASNLEAGVPDRFSGSGSKTDFTLTISPVEAEDAATYYCQQSREYPYTFGGGTKLEIKRLEIQNPDPAVYQLRDSKSSDKSVCLFTDFDSQTNVSQSKDSDVYITDKCVLDMRSMDFKSNSAVAWSNKSDFACANAFNNSIIPEDTFFPSPESSCDVKLVEKSFETDTNLNFQILYEILLGKATLYAVLVSALVLMAMVKRKDSRGRAKRSGSGVKQTLNFDLLKLAGDVESNPGPTSMDWIWRILFLVGAATGAHSFEQVQLVQSGAEVVKPGASVKISCKASGYTFTGYFMHWVKQSPGQSLEWIGRIHPYDGDTFYNQKFQGKATLTVDKSSNTAHMELLSLTSEDFAVYYCTRYDGSRAMDYWGQGTTVTVSSTREDLKNVFPPEVAVFEPSEAEISHTQKATLVCLATGFYPDHVELSWWVNGKEVHSGVCTDPQPLKEQPALNDSRYCLSSRLRVSATFWQNPRNHFRCQVQFYGLSENDEWTQDRAKPVTQIVSAEAWGRADCGFTSESYQQGVLSATNLSVIGFRILLLKVAGFNLLMTLRLWSS

SEQ ID NO: 45384 - protein, 895 aa, synthetic construct
MALPVTALLLPLALLLHAARPEVQLVESGGGLVQPGGSLRLSCAASGFSFSDFWMSWVRQAPGKGLEWVATISQAGSEKDYVDSVKGRFTISRDNAKKSLYLQMNSLRAEDTAVYYCASGVYSFDYRGQGTLVTVSSGTGGGGSGGGGSGGGGSEFDIVLTQSPLSLAVSLGQPAIISCRASQSVSFAGTSLMHWYHQKPGQQPRLLIYRASNLEAGVPDRFSGSGSKTDFTLTISPVEAEDAATYYCQQSREYPYTFGGGTKLEIKRLEDLKNVFPPEVAVFEPSEAEISHTQKATLVCLATGFYPDHVELSWWVNGKEVHSGVCTDPQPLKEQPALNDSRYCLSSRLRVSATFWQNPRNHFRCQVQFYGLSENDEWTQDRAKPVTQIVSAEAWGRADCGFTSESYQQGVLSATNLSVIGFRILLLKVAGFNLLMTLRLWSSRAKRSGSGATNFSLLKQAGDVEENPGPTSMDWIWRILFLVGAATGAHSGPQLQLQESGPGLVKPSETLSLTCTVSGDSISSGDYYWGWIRQPPGKGLEWIGHIYYSGVTYYNPSLKSRVTISVDTSRNQFSLKLSSVTAADTAVYYCTREDSSNWRSRGQGTLVTVSSGSGGGGSGGGGSGGGGSFEQVQLVQSGAEVVKPGASVKISCKASGYTFTGYFMHWVKQSPGQSLEWIGRIHPYDGDTFYNQKFQGKATLTVDKSSNTAHMELLSLTSEDFAVYYCTRYDGSRAMDYWGQGTTVTVSSTRIQNPDPAVYQLRDSKSSDKSVCLFTDFDSQTNVSQSKDSDVYITDKCVLDMRSMDFKSNSAVAWSNKSDFACANAFNNSIIPEDTFFPSPESSCDVKLVEKSFETDTNLNFQILYEILLGKATLYAVLVSALVLMAMVKRKDSRG

SEQ ID NO: 45385 - protein, 899 aa, synthetic construct
MALPVTALLLPLALLLHAARPEVQLVESGGGLVQPGGSLRLSCAASGFSFSDFWMSWVRQAPGKGLEWVATISQAGSEKDYVDSVKGRFTISRDNAKKSLYLQMNSLRAEDTAVYYCASGVYSFDYRGQGTLVTVSSGTGGGGSGGGGSGGGGSEFDIVLTQSPLSLAVSLGQPAIISCRASQSVSFAGTSLMHWYHQKPGQQPRLLIYRASNLEAGVPDRFSGSGSKTDFTLTISPVEAEDAATYYCQQSREYPYTFGGGTKLEIKRLEIQNPDPAVYQLRDSKSSDKSVCLFTDFDSQTNVSQSKDSDVYITDKCVLDMRSMDFKSNSAVAWSNKSDFACANAFNNSIIPEDTFFPSPESSCDVKLVEKSFETDTNLNFQILYEILLGKATLYAVLVSALVLMAMVKRKDSRGRAKRSGSGVKQTLNFDLLKLAGDVESNPGPTSMDWIWRILFLVGAATGAHSGPQLQLQESGPGLVKPSETLSLTCTVSGDSISSGDYYWGWIRQPPGKGLEWIGHIYYSGVTYYNPSLKSRVTISVDTSRNQFSLKLSSVTAADTAVYYCTREDSSNWRSRGQGTLVTVSSGSGGGGSGGGGSGGGGSFEQVQLVQSGAEVVKPGASVKISCKASGYTFTGYFMHWVKQSPGQSLEWIGRIHPYDGDTFYNQKFQGKATLTVDKSSNTAHMELLSLTSEDFAVYYCTRYDGSRAMDYWGQGTTVTVSSTREDLKNVFPPEVAVFEPSEAEISHTQKATLVCLATGFYPDHVELSWWVNGKEVHSGVCTDPQPLKEQPALNDSRYCLSSRLRVSATFWQNPRNHFRCQVQFYGLSENDEWTQDRAKPVTQIVSAEAWGRADCGFTSESYQQGVLSATNLSVIGFRILLLKVAGFNLLMTLRLWSS

SEQ ID NO: 45386 - protein, 727 aa, synthetic construct
MALPVTALLLPLALLLHAARPDIVLTQSPLSLAVSLGQPAIISCRASQSVSFAGTSLMHWYHQKPGQQPRLLIYRASNLEAGVPDRFSGSGSKTDFTLTISPVEAEDAATYYCQQSREYPYTFGGGTKLEIKRLEDLKNVFPPEVAVFEPSEAEISHTQKATLVCLATGFYPDHVELSWWVNGKEVHSGVCTDPQPLKEQPALNDSRYCLSSRLRVSATFWQNPRNHFRCQVQFYGLSENDEWTQDRAKPVTQIVSAEAWGRADDVIKIHWQEKKSNTILGSQEGNTMKTNDTYMKFSWLTVPEKSLDKEHRCIVRHENNKNGVDQEIIFPPIKTDVITMDPKDNCSKDANDTLLLQLTNTSAYYMYLLLLLKSVVYFAIITCCLLMAMVKRKDSRGRAKRSGSGATNFSLLKQAGDVEENPGPTSMDWIWRILFLVGAATGAHSFEQVQLVQSGAEVVKPGASVKISCKASGYTFTGYFMHWVKQSPGQSLEWIGRIHPYDGDTFYNQKFQGKATLTVDKSSNTAHMELLSLTSEDFAVYYCTRYDGSRAMDYWGQGTTVTVSSTRIQNPDPAVYQLRDSKSSDKSVCLFTDFDSQTNVSQSKDSDVYITDKCVLDMRSMDFKSNSAVAWSNKSDFACANAFNNSIIPEDTFFPSPESSDSTDHVKPKETENTKQPSKSCHKPKAIVHTEKVNMMSLTVLGLRMLFAKTVAVNFLLTAKLFFLLTA

SEQ ID NO: 45387 - protein, 731 aa, synthetic construct
MALPVTALLLPLALLLHAARPDIVLTQSPLSLAVSLGQPAIISCRASQSVSFAGTSLMHWYHQKPGQQPRLLIYRASNLEAGVPDRFSGSGSKTDFTLTISPVEAEDAATYYCQQSREYPYTFGGGTKLEIKRLEIQNPDPAVYQLRDSKSSDKSVCLFTDFDSQTNVSQSKDSDVYITDKCVLDMRSMDFKSNSAVAWSNKSDFACANAFNNSIIPEDTFFPSPESSDSTDHVKPKETENTKQPSKSCHKPKAIVHTEKVNMMSLTVLGLRMLFAKTVAVNFLLTAKLFFLLTARAKRSGSGVKQTLNFDLLKLAGDVESNPGPTSMDWIWRILFLVGAATGAHSFEQVQLVQSGAEVVKPGASVKISCKASGYTFTGYFMHWVKQSPGQSLEWIGRIHPYDGDTFYNQKFQGKATLTVDKSSNTAHMELLSLTSEDFAVYYCTRYDGSRAMDYWGQGTTVTVSSTREDLKNVFPPEVAVFEPSEAEISHTQKATLVCLATGFYPDHVELSWWVNGKEVHSGVCTDPQPLKEQPALNDSRYCLSSRLRVSATFWQNPRNHFRCQVQFYGLSENDEWTQDRAKPVTQIVSAEAWGRADDVIKIHWQEKKSNTILGSQEGNTMKTNDTYMKFSWLTVPEKSLDKEHRCIVRHENNKNGVDQEIIFPPIKTDVITMDPKDNCSKDANDTLLLQLTNTSAYYMYLLLLLKSVVYFAIITCCLLMAMVKRKDSRG

SEQ ID NO: 45388 - protein, 862 aa, synthetic construct
MALPVTALLLPLALLLHAARPEVQLVESGGGLVQPGGSLRLSCAASGFSFSDFWMSWVRQAPGKGLEWVATISQAGSEKDYVDSVKGRFTISRDNAKKSLYLQMNSLRAEDTAVYYCASGVYSFDYRGQGTLVTVSSGTGGGGSGGGGSGGGGSEFDIVLTQSPLSLAVSLGQPAIISCRASQSVSFAGTSLMHWYHQKPGQQPRLLIYRASNLEAGVPDRFSGSGSKTDFTLTISPVEAEDAATYYCQQSREYPYTFGGGTKLEIKRLEDLKNVFPPEVAVFEPSEAEISHTQKATLVCLATGFYPDHVELSWWVNGKEVHSGVCTDPQPLKEQPALNDSRYCLSSRLRVSATFWQNPRNHFRCQVQFYGLSENDEWTQDRAKPVTQIVSAEAWGRADDVIKIHWQEKKSNTILGSQEGNTMKTNDTYMKFSWLTVPEKSLDKEHRCIVRHENNKNGVDQEIIFPPIKTDVITMDPKDNCSKDANDTLLLQLTNTSAYYMYLLLLLKSVVYFAIITCCLLMAMVKRKDSRGRAKRSGSGATNFSLLKQAGDVEENPGPTSMDWIWRILFLVGAATGAHSFEQVQLVQSGAEVVKPGASVKISCKASGYTFTGYFMHWVKQSPGQSLEWIGRIHPYDGDTFYNQKFQGKATLTVDKSSNTAHMELLSLTSEDFAVYYCTRYDGSRAMDYWGQGTTVTVSSTRIQNPDPAVYQLRDSKSSDKSVCLFTDFDSQTNVSQSKDSDVYITDKCVLDMRSMDFKSNSAVAWSNKSDFACANAFNNSIIPEDTFFPSPESSDSTDHVKPKETENTKQPSKSCHKPKAIVHTEKVNMMSLTVLGLRMLFAKTVAVNFLLTAKLFFLLTA

SEQ ID NO: 45389 - protein, 866 aa, synthetic construct
MALPVTALLLPLALLLHAARPEVQLVESGGGLVQPGGSLRLSCAASGFSFSDFWMSWVRQAPGKGLEWVATISQAGSEKDYVDSVKGRFTISRDNAKKSLYLQMNSLRAEDTAVYYCASGVYSFDYRGQGTLVTVSSGTGGGGSGGGGSGGGGSEFDIVLTQSPLSLAVSLGQPAIISCRASQSVSFAGTSLMHWYHQKPGQQPRLLIYRASNLEAGVPDRFSGSGSKTDFTLTISPVEAEDAATYYCQQSREYPYTFGGGTKLEIKRLEIQNPDPAVYQLRDSKSSDKSVCLFTDFDSQTNVSQSKDSDVYITDKCVLDMRSMDFKSNSAVAWSNKSDFACANAFNNSIIPEDTFFPSPESSDSTDHVKPKETENTKQPSKSCHKPKAIVHTEKVNMMSLTVLGLRMLFAKTVAVNFLLTAKLFFLLTARAKRSGSGVKQTLNFDLLKLAGDVESNPGPTSMDWIWRILFLVGAATGAHSFEQVQLVQSGAEVVKPGASVKISCKASGYTFTGYFMHWVKQSPGQSLEWIGRIHPYDGDTFYNQKFQGKATLTVDKSSNTAHMELLSLTSEDFAVYYCTRYDGSRAMDYWGQGTTVTVSSTREDLKNVFPPEVAVFEPSEAEISHTQKATLVCLATGFYPDHVELSWWVNGKEVHSGVCTDPQPLKEQPALNDSRYCLSSRLRVSATFWQNPRNHFRCQVQFYGLSENDEWTQDRAKPVTQIVSAEAWGRADDVIKIHWQEKKSNTILGSQEGNTMKTNDTYMKFSWLTVPEKSLDKEHRCIVRHENNKNGVDQEIIFPPIKTDVITMDPKDNCSKDANDTLLLQLTNTSAYYMYLLLLLKSVVYFAIITCCLLMAMVKRKDSRG

SEQ ID NO: 45390 - protein, 999 aa, synthetic construct
MALPVTALLLPLALLLHAARPEVQLVESGGGLVQPGGSLRLSCAASGFSFSDFWMSWVRQAPGKGLEWVATISQAGSEKDYVDSVKGRFTISRDNAKKSLYLQMNSLRAEDTAVYYCASGVYSFDYRGQGTLVTVSSGTGGGGSGGGGSGGGGSEFDIVLTQSPLSLAVSLGQPAIISCRASQSVSFAGTSLMHWYHQKPGQQPRLLIYRASNLEAGVPDRFSGSGSKTDFTLTISPVEAEDAATYYCQQSREYPYTFGGGTKLEIKRLEDLKNVFPPEVAVFEPSEAEISHTQKATLVCLATGFYPDHVELSWWVNGKEVHSGVCTDPQPLKEQPALNDSRYCLSSRLRVSATFWQNPRNHFRCQVQFYGLSENDEWTQDRAKPVTQIVSAEAWGRADDVIKIHWQEKKSNTILGSQEGNTMKTNDTYMKFSWLTVPEKSLDKEHRCIVRHENNKNGVDQEIIFPPIKTDVITMDPKDNCSKDANDTLLLQLTNTSAYYMYLLLLLKSVVYFAIITCCLLMAMVKRKDSRGRAKRSGSGATNFSLLKQAGDVEENPGPTSMDWIWRILFLVGAATGAHSGPQLQLQESGPGLVKPSETLSLTCTVSGDSISSGDYYWGWIRQPPGKGLEWIGHIYYSGVTYYNPSLKSRVTISVDTSRNQFSLKLSSVTAADTAVYYCTREDSSNWRSRGQGTLVTVSSGSGGGGSGGGGSGGGGSFEQVQLVQSGAEVVKPGASVKISCKASGYTFTGYFMHWVKQSPGQSLEWIGRIHPYDGDTFYNQKFQGKATLTVDKSSNTAHMELLSLTSEDFAVYYCTRYDGSRAMDYWGQGTTVTVSSTRIQNPDPAVYQLRDSKSSDKSVCLFTDFDSQTNVSQSKDSDVYITDKCVLDMRSMDFKSNSAVAWSNKSDFACANAFNNSIIPEDTFFPSPESSDSTDHVKPKETENTKQPSKSCHKPKAIVHTEKVNMMSLTVLGLRMLFAKTVAVNFLLTAKLFFLLTA

SEQ ID NO: 45391 - protein, 1003 aa, synthetic construct
MALPVTALLLPLALLLHAARPEVQLVESGGGLVQPGGSLRLSCAASGFSFSDFWMSWVRQAPGKGLEWVATISQAGSEKDYVDSVKGRFTISRDNAKKSLYLQMNSLRAEDTAVYYCASGVYSFDYRGQGTLVTVSSGTGGGGSGGGGSGGGGSEFDIVLTQSPLSLAVSLGQPAIISCRASQSVSFAGTSLMHWYHQKPGQQPRLLIYRASNLEAGVPDRFSGSGSKTDFTLTISPVEAEDAATYYCQQSREYPYTFGGGTKLEIKRLEIQNPDPAVYQLRDSKSSDKSVCLFTDFDSQTNVSQSKDSDVYITDKCVLDMRSMDFKSNSAVAWSNKSDFACANAFNNSIIPEDTFFPSPESSDSTDHVKPKETENTKQPSKSCHKPKAIVHTEKVNMMSLTVLGLRMLFAKTVAVNFLLTAKLFFLLTARAKRSGSGVKQTLNFDLLKLAGDVESNPGPTSMDWIWRILFLVGAATGAHSGPQLQLQESGPGLVKPSETLSLTCTVSGDSISSGDYYWGWIRQPPGKGLEWIGHIYYSGVTYYNPSLKSRVTISVDTSRNQFSLKLSSVTAADTAVYYCTREDSSNWRSRGQGTLVTVSSGSGGGGSGGGGSGGGGSFEQVQLVQSGAEVVKPGASVKISCKASGYTFTGYFMHWVKQSPGQSLEWIGRIHPYDGDTFYNQKFQGKATLTVDKSSNTAHMELLSLTSEDFAVYYCTRYDGSRAMDYWGQGTTVTVSSTREDLKNVFPPEVAVFEPSEAEISHTQKATLVCLATGFYPDHVELSWWVNGKEVHSGVCTDPQPLKEQPALNDSRYCLSSRLRVSATFWQNPRNHFRCQVQFYGLSENDEWTQDRAKPVTQIVSAEAWGRADDVIKIHWQEKKSNTILGSQEGNTMKTNDTYMKFSWLTVPEKSLDKEHRCIVRHENNKNGVDQEIIFPPIKTDVITMDPKDNCSKDANDTLLLQLTNTSAYYMYLLLLLKSVVYFAIITCCLLMAMVKRKDSRG

SEQ ID NO: 45392 - protein, 725 aa, synthetic construct
MALPVTALLLPLALLLHAARPDIVLTQSPLSLAVSLGQPAIISCRASQSVSFAGTSLMHWYHQKPGQQPRLLIYRASNLEAGVPDRFSGSGSKTDFTLTISPVEAEDAATYYCQQSREYPYTFGGGTKLEIKRLEDLKNVFPPEVAVFEPSEAEISHTQKATLVCLATGFYPDHVELSWWVNGKEVHSGVCTDPQPLKEQPALNDSRYCLSSRLRVSATFWQNPRNHFRCQVQFYGLSENDEWTQDRAKPVTQIVSAEAWGRADDVIKIHWQEKKSNTILGSQEGNTMKTNDTYMKFSWLTVPEKSLDKEHRCIVRHENNKNGVDQEIIFPPIKTDVITMDPKDNCSKDANDTLLLQLTNTSAYYMYLLLLLKSVVYFAIITCCLLRRTAFCCNGEKSRAKRSGSGATNFSLLKQAGDVEENPGPTSMDWIWRILFLVGAATGAHSFEQVQLVQSGAEVVKPGASVKISCKASGYTFTGYFMHWVKQSPGQSLEWIGRIHPYDGDTFYNQKFQGKATLTVDKSSNTAHMELLSLTSEDFAVYYCTRYDGSRAMDYWGQGTTVTVSSTRIQNPDPAVYQLRDSKSSDKSVCLFTDFDSQTNVSQSKDSDVYITDKCVLDMRSMDFKSNSAVAWSNKSDFACANAFNNSIIPEDTFFPSPESSDSTDHVKPKETENTKQPSKSCHKPKAIVHTEKVNMMSLTVLGLRMLFAKTVAVNFLLTAKLFFL

SEQ ID NO: 45393 - protein, 729 aa, synthetic construct
MALPVTALLLPLALLLHAARPDIVLTQSPLSLAVSLGQPAIISCRASQSVSFAGTSLMHWYHQKPGQQPRLLIYRASNLEAGVPDRFSGSGSKTDFTLTISPVEAEDAATYYCQQSREYPYTFGGGTKLEIKRLEIQNPDPAVYQLRDSKSSDKSVCLFTDFDSQTNVSQSKDSDVYITDKCVLDMRSMDFKSNSAVAWSNKSDFACANAFNNSIIPEDTFFPSPESSDSTDHVKPKETENTKQPSKSCHKPKAIVHTEKVNMMSLTVLGLRMLFAKTVAVNFLLTAKLFFLRAKRSGSGVKQTLNFDLLKLAGDVESNPGPTSMDWIWRILFLVGAATGAHSFEQVQLVQSGAEVVKPGASVKISCKASGYTFTGYFMHWVKQSPGQSLEWIGRIHPYDGDTFYNQKFQGKATLTVDKSSNTAHMELLSLTSEDFAVYYCTRYDGSRAMDYWGQGTTVTVSSTREDLKNVFPPEVAVFEPSEAEISHTQKATLVCLATGFYPDHVELSWWVNGKEVHSGVCTDPQPLKEQPALNDSRYCLSSRLRVSATFWQNPRNHFRCQVQFYGLSENDEWTQDRAKPVTQIVSAEAWGRADDVIKIHWQEKKSNTILGSQEGNTMKTNDTYMKFSWLTVPEKSLDKEHRCIVRHENNKNGVDQEIIFPPIKTDVITMDPKDNCSKDANDTLLLQLTNTSAYYMYLLLLLKSVVYFAIITCCLLRRTAFCCNGEKS

SEQ ID NO: 45394 - protein, 860 aa, synthetic construct
MALPVTALLLPLALLLHAARPEVQLVESGGGLVQPGGSLRLSCAASGFSFSDFWMSWVRQAPGKGLEWVATISQAGSEKDYVDSVKGRFTISRDNAKKSLYLQMNSLRAEDTAVYYCASGVYSFDYRGQGTLVTVSSGTGGGGSGGGGSGGGGSEFDIVLTQSPLSLAVSLGQPAIISCRASQSVSFAGTSLMHWYHQKPGQQPRLLIYRASNLEAGVPDRFSGSGSKTDFTLTISPVEAEDAATYYCQQSREYPYTFGGGTKLEIKRLEDLKNVFPPEVAVFEPSEAEISHTQKATLVCLATGFYPDHVELSWWVNGKEVHSGVCTDPQPLKEQPALNDSRYCLSSRLRVSATFWQNPRNHFRCQVQFYGLSENDEWTQDRAKPVTQIVSAEAWGRADDVIKIHWQEKKSNTILGSQEGNTMKTNDTYMKFSWLTVPEKSLDKEHRCIVRHENNKNGVDQEIIFPPIKTDVITMDPKDNCSKDANDTLLLQLTNTSAYYMYLLLLLKSVVYFAIITCCLLRRTAFCCNGEKSRAKRSGSGATNFSLLKQAGDVEENPGPTSMDWIWRILFLVGAATGAHSFEQVQLVQSGAEVVKPGASVKISCKASGYTFTGYFMHWVKQSPGQSLEWIGRIHPYDGDTFYNQKFQGKATLTVDKSSNTAHMELLSLTSEDFAVYYCTRYDGSRAMDYWGQGTTVTVSSTRIQNPDPAVYQLRDSKSSDKSVCLFTDFDSQTNVSQSKDSDVYITDKCVLDMRSMDFKSNSAVAWSNKSDFACANAFNNSIIPEDTFFPSPESSDSTDHVKPKETENTKQPSKSCHKPKAIVHTEKVNMMSLTVLGLRMLFAKTVAVNFLLTAKLFFL

SEQ ID NO: 45395 - protein, 997 aa, synthetic construct
MALPVTALLLPLALLLHAARPEVQLVESGGGLVQPGGSLRLSCAASGFSFSDFWMSWVRQAPGKGLEWVATISQAGSEKDYVDSVKGRFTISRDNAKKSLYLQMNSLRAEDTAVYYCASGVYSFDYRGQGTLVTVSSGTGGGGSGGGGSGGGGSEFDIVLTQSPLSLAVSLGQPAIISCRASQSVSFAGTSLMHWYHQKPGQQPRLLIYRASNLEAGVPDRFSGSGSKTDFTLTISPVEAEDAATYYCQQSREYPYTFGGGTKLEIKRLEDLKNVFPPEVAVFEPSEAEISHTQKATLVCLATGFYPDHVELSWWVNGKEVHSGVCTDPQPLKEQPALNDSRYCLSSRLRVSATFWQNPRNHFRCQVQFYGLSENDEWTQDRAKPVTQIVSAEAWGRADDVIKIHWQEKKSNTILGSQEGNTMKTNDTYMKFSWLTVPEKSLDKEHRCIVRHENNKNGVDQEIIFPPIKTDVITMDPKDNCSKDANDTLLLQLTNTSAYYMYLLLLLKSVVYFAIITCCLLRRTAFCCNGEKSRAKRSGSGATNFSLLKQAGDVEENPGPTSMDWIWRILFLVGAATGAHSGPQLQLQESGPGLVKPSETLSLTCTVSGDSISSGDYYWGWIRQPPGKGLEWIGHIYYSGVTYYNPSLKSRVTISVDTSRNQFSLKLSSVTAADTAVYYCTREDSSNWRSRGQGTLVTVSSGSGGGGSGGGGSGGGGSFEQVQLVQSGAEVVKPGASVKISCKASGYTFTGYFMHWVKQSPGQSLEWIGRIHPYDGDTFYNQKFQGKATLTVDKSSNTAHMELLSLTSEDFAVYYCTRYDGSRAMDYWGQGTTVTVSSTRIQNPDPAVYQLRDSKSSDKSVCLFTDFDSQTNVSQSKDSDVYITDKCVLDMRSMDFKSNSAVAWSNKSDFACANAFNNSIIPEDTFFPSPESSDSTDHVKPKETENTKQPSKSCHKPKAIVHTEKVNMMSLTVLGLRMLFAKTVAVNFLLTAKLFFL

SEQ ID NO: 45396 - protein, 623 aa, synthetic construct
MALPVTALLLPLALLLHAARPDIVLTQSPLSLAVSLGQPAIISCRASQSVSFAGTSLMHWYHQKPGQQPRLLIYRASNLEAGVPDRFSGSGSKTDFTLTISPVEAEDAATYYCQQSREYPYTFGGGTKLEIKRLEDLKNVFPPEVAVFEPSEAEISHTQKATLVCLATGFYPDHVELSWWVNGKEVHSGVSTDPQPLKEQPALNDSRYCLSSRLRVSATFWQNPRNHFRCQVQFYGLSENDEWTQDRAKPVTQIVSAEAWGRADCDVKLVEKSFETDTNLNFQNLSVIGFRILLLKVAGFNLLMTLRLWSSRAKRSGSGATNFSLLKQAGDVEENPGPTSMDWIWRILFLVGAATGAHSFEQVQLVQSGAEVVKPGASVKISCKASGYTFTGYFMHWVKQSPGQSLEWIGRIHPYDGDTFYNQKFQGKATLTVDKSSNTAHMELLSLTSEDFAVYYCTRYDGSRAMDYWGQGTTVTVSSTRIQNPDPAVYQLRDSKSSDKSVCLFTDFDSQTNVSQSKDSDVYITDKTVLDMRSMDFKSNSAVAWSNKSDFACANAFNNSIIPEDTFFPSPESSCGFTSESYQQGVLSATILYEILLGKATLYAVLVSALVLMAMVKRKDSRG

SEQ ID NO: 45397 - protein, 623 aa, synthetic construct
MALPVTALLLPLALLLHAARPDIVLTQSPLSLAVSLGQPAIISCRASQSVSFAGTSLMHWYHQKPGQQPRLLIYRASNLEAGVPDRFSGSGSKTDFTLTISPVEAEDAATYYCQQSREYPYTFGGGTKLEIKRLEDLKNVFPPEVAVFEPSEAEISHTQKATLVCLATGFYPDHVELSWWVNGKEVHSGVSTDPQPLKEQPALNDSRYCLSSRLRVSATFWQNPRNHFRCQVQFYGLSENDEWTQDRAKPVTQIVSAEAWGRADCGFTSESYQQGVLSATNLSVIGFRILLLKVAGFNLLMTLRLWSSRAKRSGSGATNFSLLKQAGDVEENPGPTSMDWIWRILFLVGAATGAHSFEQVQLVQSGAEVVKPGASVKISCKASGYTFTGYFMHWVKQSPGQSLEWIGRIHPYDGDTFYNQKFQGKATLTVDKSSNTAHMELLSLTSEDFAVYYCTRYDGSRAMDYWGQGTTVTVSSTRIQNPDPAVYQLRDSKSSDKSVCLFTDFDSQTNVSQSKDSDVYITDKTVLDMRSMDFKSNSAVAWSNKSDFACANAFNNSIIPEDTFFPSPESSCDVKLVEKSFETDTNLNFQILYEILLGKATLYAVLVSALVLMAMVKRKDSRG

SEQ ID NO: 45398 - protein, 727 aa, synthetic construct
MALPVTALLLPLALLLHAARPDIVLTQSPLSLAVSLGQPAIISCRASQSVSFAGTSLMHWYHQKPGQQPRLLIYRASNLEAGVPDRFSGSGSKTDFTLTISPVEAEDAATYYCQQSREYPYTFGGGTKLEIKRLEDLKNVFPPEVAVFEPSEAEISHTQKATLVCLATGFYPDHVELSWWVNGKEVHSGVSTDPQPLKEQPALNDSRYCLSSRLRVSATFWQNPRNHFRCQVQFYGLSENDEWTQDRAKPVTQIVSAEAWGRADDVIKIHWQEKKSNTILGSQEGNTMKTNDTYMKFSWLTVPEKSLDKEHRCIVRHENNKNGVDQEIIFPPIKTDVITMDPKDNCSKDANDTLLLQLTNTSAYYMYLLLLLKSVVYFAIITCCLLMAMVKRKDSRGRAKRSGSGATNFSLLKQAGDVEENPGPTSMDWIWRILFLVGAATGAHSFEQVQLVQSGAEVVKPGASVKISCKASGYTFTGYFMHWVKQSPGQSLEWIGRIHPYDGDTFYNQKFQGKATLTVDKSSNTAHMELLSLTSEDFAVYYCTRYDGSRAMDYWGQGTTVTVSSTRIQNPDPAVYQLRDSKSSDKSVCLFTDFDSQTNVSQSKDSDVYITDKTVLDMRSMDFKSNSAVAWSNKSDFACANAFNNSIIPEDTFFPSPESSDSTDHVKPKETENTKQPSKSCHKPKAIVHTEKVNMMSLTVLGLRMLFAKTVAVNFLLTAKLFFLLTA

SEQ ID NO: 45399 - protein, 725 aa, synthetic construct
MALPVTALLLPLALLLHAARPDIVLTQSPLSLAVSLGQPAIISCRASQSVSFAGTSLMHWYHQKPGQQPRLLIYRASNLEAGVPDRFSGSGSKTDFTLTISPVEAEDAATYYCQQSREYPYTFGGGTKLEIKRLEDLKNVFPPEVAVFEPSEAEISHTQKATLVCLATGFYPDHVELSWWVNGKEVHSGVSTDPQPLKEQPALNDSRYCLSSRLRVSATFWQNPRNHFRCQVQFYGLSENDEWTQDRAKPVTQIVSAEAWGRADDVIKIHWQEKKSNTILGSQEGNTMKTNDTYMKFSWLTVPEKSLDKEHRCIVRHENNKNGVDQEIIFPPIKTDVITMDPKDNCSKDANDTLLLQLTNTSAYYMYLLLLLKSVVYFAIITCCLLRRTAFCCNGEKSRAKRSGSGATNFSLLKQAGDVEENPGPTSMDWIWRILFLVGAATGAHSFEQVQLVQSGAEVVKPGASVKISCKASGYTFTGYFMHWVKQSPGQSLEWIGRIHPYDGDTFYNQKFQGKATLTVDKSSNTAHMELLSLTSEDFAVYYCTRYDGSRAMDYWGQGTTVTVSSTRIQNPDPAVYQLRDSKSSDKSVCLFTDFDSQTNVSQSKDSDVYITDKTVLDMRSMDFKSNSAVAWSNKSDFACANAFNNSIIPEDTFFPSPESSDSTDHVKPKETENTKQPSKSCHKPKAIVHTEKVNMMSLTVLGLRMLFAKTVAVNFLLTAKLFFL

SEQ ID NO: 45400 - protein, 868 aa, synthetic construct
MALPVTALLLPLALLLHAARPLEEDLKNVFPPEVAVFEPSEAEISHTQKATLVCLATGFYPDHVELSWWVNGKEVHSGVCTDPQPLKEQPALNDSRYCLSSRLRVSATFWQNPRNHFRCQVQFYGLSENDEWTQDRAKPVTQIVSAEAWGRADCGFTSESYQQGVLSATNLSVIGFRILLLKVAGFNLLMTLRLWSSRAKRSGSGATNFSLLKQAGDVEENPGPTSMALPVTALLLPLALLLHAARPDIVLTQSPLSLAVSLGQPAIISCRASQSVSFAGTSLMHWYHQKPGQQPRLLIYRASNLEAGVPDRFSGSGSKTDFTLTISPVEAEDAATYYCQQSREYPYTFGGGTKLEIKRGGGGSGGGGSGGGGSQVQLVQSGAEVVKPGASVKISCKASGYTFTGYFMHWVKQSPGQSLEWIGRIHPYDGDTFYNQKFQGKATLTVDKSSNTAHMELLSLTSEDFAVYYCTRYDGSRAMDYWGQGTTVTVSSTRIQNPDPAVYQLRDSKSSDKSVCLFTDFDSQTNVSQSKDSDVYITDKCVLDMRSMDFKSNSAVAWSNKSDFACANAFNNSIIPEDTFFPSPESSCDVKLVEKSFETDTNLNFQILYEVIGFRILLLKVAGFNLLMTLRLWSSRAKRSGSGVKQTLNFDLLKLAGDVESNPGPSRGHMTEYKPTVRLATRDDVPRAVRTLAAAFADYPATRHTVDPDRHIERVTELQELFLTRVGLDIGKVWVADDGAAVAVWTTPESVEAGAVFAEIGPRMAELSGSRLAAQQQMEGLLAPHRPKEPAWFLATVGVSPDHQGKGLGSAVVLPGVEAAERAGVPAFLETSAPRNLPFYERLGFTVTADVEVPEGPRTWCMTRKPGA

SEQ ID NO: 45401 - protein, 868 aa, synthetic construct
MALPVTALLLPLALLLHAARPLEIQNPDPAVYQLRDSKSSDKSVCLFTDFDSQTNVSQSKDSDVYITDKCVLDMRSMDFKSNSAVAWSNKSDFACANAFNNSIIPEDTFFPSPESSCDVKLVEKSFETDTNLNFQILYEVIGFRILLLKVAGFNLLMTLRLWSSRAKRSGSGATNFSLLKQAGDVEENPGPTSMALPVTALLLPLALLLHAARPDIVLTQSPLSLAVSLGQPAIISCRASQSVSFAGTSLMHWYHQKPGQQPRLLIYRASNLEAGVPDRFSGSGSKTDFTLTISPVEAEDAATYYCQQSREYPYTFGGGTKLEIKRGGGGSGGGGSGGGGSQVQLVQSGAEVVKPGASVKISCKASGYTFTGYFMHWVKQSPGQSLEWIGRIHPYDGDTFYNQKFQGKATLTVDKSSNTAHMELLSLTSEDFAVYYCTRYDGSRAMDYWGQGTTVTVSSTREDLKNVFPPEVAVFEPSEAEISHTQKATLVCLATGFYPDHVELSWWVNGKEVHSGVCTDPQPLKEQPALNDSRYCLSSRLRVSATFWQNPRNHFRCQVQFYGLSENDEWTQDRAKPVTQIVSAEAWGRADCGFTSESYQQGVLSATNLSVIGFRILLLKVAGFNLLMTLRLWSSRAKRSGSGVKQTLNFDLLKLAGDVESNPGPSRGHMTEYKPTVRLATRDDVPRAVRTLAAAFADYPATRHTVDPDRHIERVTELQELFLTRVGLDIGKVWVADDGAAVAVWTTPESVEAGAVFAEIGPRMAELSGSRLAAQQQMEGLLAPHRPKEPAWFLATVGVSPDHQGKGLGSAVVLPGVEAAERAGVPAFLETSAPRNLPFYERLGFTVTADVEVPEGPRTWCMTRKPGA

SEQ ID NO: 45402 - protein, 868 aa, synthetic construct; identical to SEQ ID NO: 45400

SEQ ID NO: 45403 - protein, 976 aa, synthetic construct
MALPVTALLLPLALLLHAARPLEEDLKNVFPPEVAVFEPSEAEISHTQKATLVCLATGFYPDHVELSWWVNGKEVHSGVSTDPQPLKEQPALNDSRYCLSSRLRVSATFWQNPRNHFRCQVQFYGLSENDEWTQDRAKPVTQIVSAEAWGRADDVIKIHWQEKKSNTILGSQEGNTMKTNDTYMKFSWLTVPEKSLDKEHRCIVRHENNKNGVDQEIIFPPIKTDVITMDPKDNCSKDANDTLLLQLTNTSAYYMYLLLLLKSVVYFAIITCCLLMAMVKRKDSRGRAKRSGSGATNFSLLKQAGDVEENPGPTSMALPVTALLLPLALLLHAARPDIVLTQSPLSLAVSLGQPAIISCRASQSVSFAGTSLMHWYHQKPGQQPRLLIYRASNLEAGVPDRFSGSGSKTDFTLTISPVEAEDAATYYCQQSREYPYTFGGGTKLEIKRGGGGSGGGGSGGGGSQVQLVQSGAEVVKPGASVKISCKASGYTFTGYFMHWVKQSPGQSLEWIGRIHPYDGDTFYNQKFQGKATLTVDKSSNTAHMELLSLTSEDFAVYYCTRYDGSRAMDYWGQGTTVTVSSTRIQNPDPAVYQLRDSKSSDKSVCLFTDFDSQTNVSQSKDSDVYITDKTVLDMRSMDFKSNSAVAWSNKSDFACANAFNNSIIPEDTFFPSPESSDSTDHVKPKETENTKQPSKSCHKPKAIVHTEKVNMMSLTVLGLRMLFAKTVAVNFLLTAKLFFLLTARAKRSGSGVKQTLNFDLLKLAGDVESNPGPSRGHMTEYKPTVRLATRDDVPRAVRTLAAAFADYPATRHTVDPDRHIERVTELQELFLTRVGLDIGKVWVADDGAAVAVWTTPESVEAGAVFAEIGPRMAELSGSRLAAQQQMEGLLAPHRPKEPAWFLATVGVSPDHQGKGLGSAVVLPGVEAAERAGVPAFLETSAPRNLPFYERLGFTVTADVEVPEGPRTWCMTRKPGA

SEQ ID NO: 45404 - protein, 976 aa, synthetic construct
MALPVTALLLPLALLLHAARPLEIQNPDPAVYQLRDSKSSDKSVCLFTDFDSQTNVSQSKDSDVYITDKTVLDMRSMDFKSNSAVAWSNKSDFACANAFNNSIIPEDTFFPSPESSDSTDHVKPKETENTKQPSKSCHKPKAIVHTEKVNMMSLTVLGLRMLFAKTVAVNFLLTAKLFFLLTARAKRSGSGATNFSLLKQAGDVEENPGPTSMALPVTALLLPLALLLHAARPDIVLTQSPLSLAVSLGQPAIISCRASQSVSFAGTSLMHWYHQKPGQQPRLLIYRASNLEAGVPDRFSGSGSKTDFTLTISPVEAEDAATYYCQQSREYPYTFGGGTKLEIKRGGGGSGGGGSGGGGSQVQLVQSGAEVVKPGASVKISCKASGYTFTGYFMHWVKQSPGQSLEWIGRIHPYDGDTFYNQKFQGKATLTVDKSSNTAHMELLSLTSEDFAVYYCTRYDGSRAMDYWGQGTTVTVSSTREDLKNVFPPEVAVFEPSEAEISHTQKATLVCLATGFYPDHVELSWWVNGKEVHSGVSTDPQPLKEQPALNDSRYCLSSRLRVSATFWQNPRNHFRCQVQFYGLSENDEWTQDRAKPVTQIVSAEAWGRADDVIKIHWQEKKSNTILGSQEGNTMKTNDTYMKFSWLTVPEKSLDKEHRCIVRHENNKNGVDQEIIFPPIKTDVITMDPKDNCSKDANDTLLLQLTNTSAYYMYLLLLLKSVVYFAIITCCLLMAMVKRKDSRGRAKRSGSGVKQTLNFDLLKLAGDVESNPGPSRGHMTEYKPTVRLATRDDVPRAVRTLAAAFADYPATRHTVDPDRHIERVTELQELFLTRVGLDIGKVWVADDGAAVAVWTTPESVEAGAVFAEIGPRMAELSGSRLAAQQQMEGLLAPHRPKEPAWFLATVGVSPDHQGKGLGSAVVLPGVEAAERAGVPAFLETSAPRNLPFYERLGFTVTADVEVPEGPRTWCMTRKPGA

SEQ ID NO: 45405 - protein, 974 aa, synthetic construct
MALPVTALLLPLALLLHAARPLEEDLKNVFPPEVAVFEPSEAEISHTQKATLVCLATGFYPDHVELSWWVNGKEVHSGVCTDPQPLKEQPALNDSRYCLSSRLRVSATFWQNPRNHFRCQVQFYGLSENDEWTQDRAKPVTQIVSAEAWGRADDVIKIHWQEKKSNTILGSQEGNTMKTNDTYMKFSWLTVPEKSLDKEHRCIVRHENNKNGVDQEIIFPPIKTDVITMDPKDNCSKDANDTLLLQLTNTSAYYMYLLLLLKSVVYFAIITCCLLRRTAFCCNGEKSRAKRSGSGATNFSLLKQAGDVEENPGPTSMALPVTALLLPLALLLHAARPDIVLTQSPLSLAVSLGQPAIISCRASQSVSFAGTSLMHWYHQKPGQQPRLLIYRASNLEAGVPDRFSGSGSKTDFTLTISPVEAEDAATYYCQQSREYPYTFGGGTKLEIKRGGGGSGGGGSGGGGSQVQLVQSGAEVVKPGASVKISCKASGYTFTGYFMHWVKQSPGQSLEWIGRIHPYDGDTFYNQKFQGKATLTVDKSSNTAHMELLSLTSEDFAVYYCTRYDGSRAMDYWGQGTTVTVSSTRIQNPDPAVYQLRDSKSSDKSVCLFTDFDSQTNVSQSKDSDVYITDKCVLDMRSMDFKSNSAVAWSNKSDFACANAFNNSIIPEDTFFPSPESSDSTDHVKPKETENTKQPSKSCHKPKAIVHTEKVNMMSLTVLGLRMLFAKTVAVNFLLTAKLFFLRAKRSGSGVKQTLNFDLLKLAGDVESNPGPSRGHMTEYKPTVRLATRDDVPRAVRTLAAAFADYPATRHTVDPDRHIERVTELQELFLTRVGLDIGKVWVADDGAAVAVWTTPESVEAGAVFAEIGPRMAELSGSRLAAQQQMEGLLAPHRPKEPAWFLATVGVSPDHQGKGLGSAVVLPGVEAAERAGVPAFLETSAPRNLPFYERLGFTVTADVEVPEGPRTWCMTRKPGA

SEQ ID NO: 45406 - protein, 974 aa, synthetic construct
MALPVTALLLPLALLLHAARPLEIQNPDPAVYQLRDSKSSDKSVCLFTDFDSQTNVSQSKDSDVYITDKCVLDMRSMDFKSNSAVAWSNKSDFACANAFNNSIIPEDTFFPSPESSDSTDHVKPKETENTKQPSKSCHKPKAIVHTEKVNMMSLTVLGLRMLFAKTVAVNFLLTAKLFFLRAKRSGSGATNFSLLKQAGDVEENPGPTSMALPVTALLLPLALLLHAARPDIVLTQSPLSLAVSLGQPAIISCRASQSVSFAGTSLMHWYHQKPGQQPRLLIYRASNLEAGVPDRFSGSGSKTDFTLTISPVEAEDAATYYCQQSREYPYTFGGGTKLEIKRGGGGSGGGGSGGGGSQVQLVQSGAEVVKPGASVKISCKASGYTFTGYFMHWVKQSPGQSLEWIGRIHPYDGDTFYNQKFQGKATLTVDKSSNTAHMELLSLTSEDFAVYYCTRYDGSRAMDYWGQGTTVTVSSTREDLKNVFPPEVAVFEPSEAEISHTQKATLVCLATGFYPDHVELSWWVNGKEVHSGVCTDPQPLKEQPALNDSRYCLSSRLRVSATFWQNPRNHFRCQVQFYGLSENDEWTQDRAKPVTQIVSAEAWGRADDVIKIHWQEKKSNTILGSQEGNTMKTNDTYMKFSWLTVPEKSLDKEHRCIVRHENNKNGVDQEIIFPPIKTDVITMDPKDNCSKDANDTLLLQLTNTSAYYMYLLLLLKSVVYFAIITCCLLRRTAFCCNGEKSRAKRSGSGVKQTLNFDLLKLAGDVESNPGPSRGHMTEYKPTVRLATRDDVPRAVRTLAAAFADYPATRHTVDPDRHIERVTELQELFLTRVGLDIGKVWVADDGAAVAVWTTPESVEAGAVFAEIGPRMAELSGSRLAAQQQMEGLLAPHRPKEPAWFLATVGVSPDHQGKGLGSAVVLPGVEAAERAGVPAFLETSAPRNLPFYERLGFTVTADVEVPEGPRTWCMTRKPGA

SEQ ID NO: 45407 - protein, 974 aa, synthetic construct
MALPVTALLLPLALLLHAARPLEEDLKNVFPPEVAVFEPSEAEISHTQKATLVCLATGFYPDHVELSWWVNGKEVHSGVSTDPQPLKEQPALNDSRYCLSSRLRVSATFWQNPRNHFRCQVQFYGLSENDEWTQDRAKPVTQIVSAEAWGRADDVIKIHWQEKKSNTILGSQEGNTMKTNDTYMKFSWLTVPEKSLDKEHRCIVRHENNKNGVDQEIIFPPIKTDVITMDPKDNCSKDANDTLLLQLTNTSAYYMYLLLLLKSVVYFAIITCCLLRRTAFCCNGEKSRAKRSGSGATNFSLLKQAGDVEENPGPTSMALPVTALLLPLALLLHAARPDIVLTQSPLSLAVSLGQPAIISCRASQSVSFAGTSLMHWYHQKPGQQPRLLIYRASNLEAGVPDRFSGSGSKTDFTLTISPVEAEDAATYYCQQSREYPYTFGGGTKLEIKRGGGGSGGGGSGGGGSQVQLVQSGAEVVKPGASVKISCKASGYTFTGYFMHWVKQSPGQSLEWIGRIHPYDGDTFYNQKFQGKATLTVDKSSNTAHMELLSLTSEDFAVYYCTRYDGSRAMDYWGQGTTVTVSSTRIQNPDPAVYQLRDSKSSDKSVCLFTDFDSQTNVSQSKDSDVYITDKTVLDMRSMDFKSNSAVAWSNKSDFACANAFNNSIIPEDTFFPSPESSDSTDHVKPKETENTKQPSKSCHKPKAIVHTEKVNMMSLTVLGLRMLFAKTVAVNFLLTAKLFFLRAKRSGSGVKQTLNFDLLKLAGDVESNPGPSRGHMTEYKPTVRLATRDDVPRAVRTLAAAFADYPATRHTVDPDRHIERVTELQELFLTRVGLDIGKVWVADDGAAVAVWTTPESVEAGAVFAEIGPRMAELSGSRLAAQQQMEGLLAPHRPKEPAWFLATVGVSPDHQGKGLGSAVVLPGVEAAERAGVPAFLETSAPRNLPFYERLGFTVTADVEVPEGPRTWCMTRKPGA

SEQ ID NO: 45408 - protein, 974 aa, synthetic construct
MALPVTALLLPLALLLHAARPLEIQNPDPAVYQLRDSKSSDKSVCLFTDFDSQTNVSQSKDSDVYITDKTVLDMRSMDFKSNSAVAWSNKSDFACANAFNNSIIPEDTFFPSPESSDSTDHVKPKETENTKQPSKSCHKPKAIVHTEKVNMMSLTVLGLRMLFAKTVAVNFLLTAKLFFLRAKRSGSGATNFSLLKQAGDVEENPGPTSMALPVTALLLPLALLLHAARPDIVLTQSPLSLAVSLGQPAIISCRASQSVSFAGTSLMHWYHQKPGQQPRLLIYRASNLEAGVPDRFSGSGSKTDFTLTISPVEAEDAATYYCQQSREYPYTFGGGTKLEIKRGGGGSGGGGSGGGGSQVQLVQSGAEVVKPGASVKISCKASGYTFTGYFMHWVKQSPGQSLEWIGRIHPYDGDTFYNQKFQGKATLTVDKSSNTAHMELLSLTSEDFAVYYCTRYDGSRAMDYWGQGTTVTVSSTREDLKNVFPPEVAVFEPSEAEISHTQKATLVCLATGFYPDHVELSWWVNGKEVHSGVSTDPQPLKEQPALNDSRYCLSSRLRVSATFWQNPRNHFRCQVQFYGLSENDEWTQDRAKPVTQIVSAEAWGRADDVIKIHWQEKKSNTILGSQEGNTMKTNDTYMKFSWLTVPEKSLDKEHRCIVRHENNKNGVDQEIIFPPIKTDVITMDPKDNCSKDANDTLLLQLTNTSAYYMYLLLLLKSVVYFAIITCCLLRRTAFCCNGEKSRAKRSGSGVKQTLNFDLLKLAGDVESNPGPSRGHMTEYKPTVRLATRDDVPRAVRTLAAAFADYPATRHTVDPDRHIERVTELQELFLTRVGLDIGKVWVADDGAAVAVWTTPESVEAGAVFAEIGPRMAELSGSRLAAQQQMEGLLAPHRPKEPAWFLATVGVSPDHQGKGLGSAVVLPGVEAAERAGVPAFLETSAPRNLPFYERLGFTVTADVEVPEGPRTWCMTRKPGA

SEQ ID NO: 45409 - protein, 872 aa, synthetic construct
MALPVTALLLPLALLLHAARPLEEDLKNVFPPEVAVFEPSKAEIAHTQKATLVCLATGFYPDHVELSWWVNGKEVHSGVCTDPQPLKEQPALNDSRYCLSSRLRVSATFWQNPRNHFRCQVQFYGLSENDEWTQDRAKPVTQIVSAEAWGRADCGITSASYHQGVLSATILYEILLGKATLYAVLVSALVLMAMVKRKDSRGRAKRSGSGATNFSLLKQAGDVEENPGPTSMALPVTALLLPLALLLHAARPDIVLTQSPLSLAVSLGQPAIISCRASQSVSFAGTSLMHWYHQKPGQQPRLLIYRASNLEAGVPDRFSGSGSKTDFTLTISPVEAEDAATYYCQQSREYPYTFGGGTKLEIKRGGGGSGGGGSGGGGSQVQLVQSGAEVVKPGASVKISCKASGYTFTGYFMHWVKQSPGQSLEWIGRIHPYDGDTFYNQKFQGKATLTVDKSSNTAHMELLSLTSEDFAVYYCTRYDGSRAMDYWGQGTTVTVSSTRIQNPDPAVYQLRDSKSSDKSVCLFTDFDSQTNVSQSKDSDVYITDKCVLDMRSMDFKSNSAVAWSNKSDFACANAFNNSIIPEDTFFPSSDVPCDVKLVEKSFETDTNLNFQNLSVIGFRILLLKVAGFNLLMTLRLWSSRAKRSGSGVKQTLNFDLLKLAGDVESNPGPSRGHMTEYKPTVRLATRDDVPRAVRTLAAAFADYPATRHTVDPDRHIERVTELQELFLTRVGLDIGKVWVADDGAAVAVWTTPESVEAGAVFAEIGPRMAELSGSRLAAQQQMEGLLAPHRPKEPAWFLATVGVSPDHQGKGLGSAVVLPGVEAAERAGVPAFLETSAPRNLPFYERLGFTVTADVEVPEGPRTWCMTRKPGA

SEQ ID NO: 45410 - protein, 872 aa, synthetic construct
MALPVTALLLPLALLLHAARPLEIQNPDPAVYQLRDSKSSDKSVCLFTDFDSQTNVSQSKDSDVYITDKCVLDMRSMDFKSNSAVAWSNKSDFACANAFNNSIIPEDTFFPSSDVPCDVKLVEKSFETDTNLNFQNLSVIGFRILLLKVAGFNLLMTLRLWSSRAKRSGSGATNFSLLKQAGDVEENPGPTSMALPVTALLLPLALLLHAARPDIVLTQSPLSLAVSLGQPAIISCRASQSVSFAGTSLMHWYHQKPGQQPRLLIYRASNLEAGVPDRFSGSGSKTDFTLTISPVEAEDAATYYCQQSREYPYTFGGGTKLEIKRGGGGSGGGGSGGGGSQVQLVQSGAEVVKPGASVKISCKASGYTFTGYFMHWVKQSPGQSLEWIGRIHPYDGDTFYNQKFQGKATLTVDKSSNTAHMELLSLTSEDFAVYYCTRYDGSRAMDYWGQGTTVTVSSTREDLKNVFPPEVAVFEPSKAEIAHTQKATLVCLATGFYPDHVELSWWVNGKEVHSGVCTDPQPLKEQPALNDSRYCLSSRLRVSATFWQNPRNHFRCQVQFYGLSENDEWTQDRAKPVTQIVSAEAWGRADCGITSASYHQGVLSATILYEILLGKATLYAVLVSALVLMAMVKRKDSRGRAKRSGSGVKQTLNFDLLKLAGDVESNPGPSRGHMTEYKPTVRLATRDDVPRAVRTLAAAFADYPATRHTVDPDRHIERVTELQELFLTRVGLDIGKVWVADDGAAVAVWTTPESVEAGAVFAEIGPRMAELSGSRLAAQQQMEGLLAPHRPKEPAWFLATVGVSPDHQGKGLGSAVVLPGVEAAERAGVPAFLETSAPRNLPFYERLGFTVTADVEVPEGPRTWCMTRKPGA

SEQ ID NO: 45411 - protein, 765 aa, synthetic construct
MALPVTALLLPLALLLHAARPLEQSFGLLDPKLCYLLDGILFIYGVILTALFLRVKFSRSADAPAYQQGQNQLYNELNLGRREEYDVLDKRRGRDPEMGGKPQRRKNPQEGLYNELQKDKMAEAYSEIGMKGERRRGKGHDGLYQGLSTATKDTYDALHMQALPPRRAKRSGSGATNFSLLKQAGDVEENPGPTSMALPVTALLLPLALLLHAARPDIVLTQSPLSLAVSLGQPAIISCRASQSVSFAGTSLMHWYHQKPGQQPRLLIYRASNLEAGVPDRFSGSGSKTDFTLTISPVEAEDAATYYCQQSREYPYTFGGGTKLEIKRGGGGSGGGGSGGGGSQVQLVQSGAEVVKPGASVKISCKASGYTFTGYFMHWVKQSPGQSLEWIGRIHPYDGDTFYNQKFQGKATLTVDKSSNTAHMELLSLTSEDFAVYYCTRYDGSRAMDYWGQGTTVTVSSTRELGEPQLCYILDAILFLYGIVLTLLYCRLKIQVRKAAITSYEKSDGVYTGLSTRNQETYETLKHEKPPQRAKRSGSGVKQTLNFDLLKLAGDVESNPGPSRGHMTEYKPTVRLATRDDVPRAVRTLAAAFADYPATRHTVDPDRHIERVTELQELFLTRVGLDIGKVWVADDGAAVAVWTTPESVEAGAVFAEIGPRMAELSGSRLAAQQQMEGLLAPHRPKEPAWFLATVGVSPDHQGKGLGSAVVLPGVEAAERAGVPAFLETSAPRNLPFYERLGFTVTADVEVPEGPRTWCMTRKPGA

SEQ ID NO: 45412 - protein, 976 aa, synthetic construct; identical to SEQ ID NO: 45403

SEQ ID NO: 45413 - protein, 976 aa, synthetic construct; identical to SEQ ID NO: 45404

SEQ ID NO: 45414 - protein, 975 aa, synthetic construct
MALPVTALLLPLALLLHAARPLEEEDLKNVFPPEVAVFEPSEAEISHTQKATLVCLATGFYPDHVELSWWVNGKEVHSGVCTDPQPLKEQPALNDSRYCLSSRLRVSATFWQNPRNHFRCQVQFYGLSENDEWTQDRAKPVTQIVSAEAWGRADDVIKIHWQEKKSNTILGSQEGNTMKTNDTYMKFSWLTVPEKSLDKEHRCIVRHENNKNGVDQEIIFPPIKTDVITMDPKDNCSKDANDTLLLQLTNTSAYYMYLLLLLKSVVYFAIITCCLLRRTAFCCNGEKSRAKRSGSGATNFSLLKQAGDVEENPGPTSMALPVTALLLPLALLLHAARPDIVLTQSPLSLAVSLGQPAIISCRASQSVSFAGTSLMHWYHQKPGQQPRLLIYRASNLEAGVPDRFSGSGSKTDFTLTISPVEAEDAATYYCQQSREYPYTFGGGTKLEIKRGGGGSGGGGSGGGGSQVQLVQSGAEVVKPGASVKISCKASGYTFTGYFMHWVKQSPGQSLEWIGRIHPYDGDTFYNQKFQGKATLTVDKSSNTAHMELLSLTSEDFAVYYCTRYDGSRAMDYWGQGTTVTVSSTRIQNPDPAVYQLRDSKSSDKSVCLFTDFDSQTNVSQSKDSDVYITDKCVLDMRSMDFKSNSAVAWSNKSDFACANAFNNSIIPEDTFFPSPESSDSTDHVKPKETENTKQPSKSCHKPKAIVHTEKVNMMSLTVLGLRMLFAKTVAVNFLLTAKLFFLRAKRSGSGVKQTLNFDLLKLAGDVESNPGPSRGHMTEYKPTVRLATRDDVPRAVRTLAAAFADYPATRHTVDPDRHIERVTELQELFLTRVGLDIGKVWVADDGAAVAVWTTPESVEAGAVFAEIGPRMAELSGSRLAAQQQMEGLLAPHRPKEPAWFLATVGVSPDHQGKGLGSAVVLPGVEAAERAGVPAFLETSAPRNLPFYERLGFTVTADVEVPEGPRTWCMTRKPGA

SEQ ID NO: 45415 - protein, 975 aa, synthetic construct
MALPVTALLLPLALLLHAARPLEIQNPDPAVYQLRDSKSSDKSVCLFTDFDSQTNVSQSKDSDVYITDKCVLDMRSMDFKSNSAVAWSNKSDFACANAFNNSIIPEDTFFPSPESSDSTDHVKPKETENTKQPSKSCHKPKAIVHTEKVNMMSLTVLGLRMLFAKTVAVNFLLTAKLFFLRAKRSGSGATNFSLLKQAGDVEENPGPTSMALPVTALLLPLALLLHAARPDIVLTQSPLSLAVSLGQPAIISCRASQSVSFAGTSLMHWYHQKPGQQPRLLIYRASNLEAGVPDRFSGSGSKTDFTLTISPVEAEDAATYYCQQSREYPYTFGGGTKLEIKRGGGGSGGGGSGGGGSQVQLVQSGAEVVKPGASVKISCKASGYTFTGYFMHWVKQSPGQSLEWIGRIHPYDGDTFYNQKFQGKATLTVDKSSNTAHMELLSLTSEDFAVYYCTRYDGSRAMDYWGQGTTVTVSSTREEDLKNVFPPEVAVFEPSEAEISHTQKATLVCLATGFYPDHVELSWWVNGKEVHSGVCTDPQPLKEQPALNDSRYCLSSRLRVSATFWQNPRNHFRCQVQFYGLSENDEWTQDRAKPVTQIVSAEAWGRADDVIKIHWQEKKSNTILGSQEGNTMKTNDTYMKFSWLTVPEKSLDKEHRCIVRHENNKNGVDQEIIFPPIKTDVITMDPKDNCSKDANDTLLLQLTNTSAYYMYLLLLLKSVVYFAIITCCLLRRTAFCCNGEKSRAKRSGSGVKQTLNFDLLKLAGDVESNPGPSRGHMTEYKPTVRLATRDDVPRAVRTLAAAFADYPATRHTVDPDRHIERVTELQELFLTRVGLDIGKVWVADDGAAVAVWTTPESVEAGAVFAEIGPRMAELSGSRLAAQQQMEGLLAPHRPKEPAWFLATVGVSPDHQGKGLGSAVVLPGVEAAERAGVPAFLETSAPRNLPFYERLGFTVTADVEVPEGPRTWCMTRKPGA

SEQ ID NO: 45416 - protein, 872 aa, synthetic construct
MALPVTALLLPLALLLHAARPLEEDLKNVFPPEVAVFEPSEAEISHTQKATLVCLATGFYPDHVELSWWVNGKEVHSGVSTDPQPLKEQPALNDSRYCLSSRLRVSATFWQNPRNHFRCQVQFYGLSENDEWTQDRAKPVTQIVSAEAWGRADCGFTSESYQQGVLSATNLSVIGFRILLLKVAGFNLLMTLRLWSSRAKRSGSGATNFSLLKQAGDVEENPGPTSMALPVTALLLPLALLLHAARPDIVLTQSPLSLAVSLGQPAIISCRASQSVSFAGTSLMHWYHQKPGQQPRLLIYRASNLEAGVPDRFSGSGSKTDFTLTISPVEAEDAATYYCQQSREYPYTFGGGTKLEIKRGGGGSGGGGSGGGGSQVQLVQSGAEVVKPGASVKISCKASGYTFTGYFMHWVKQSPGQSLEWIGRIHPYDGDTFYNQKFQGKATLTVDKSSNTAHMELLSLTSEDFAVYYCTRYDGSRAMDYWGQGTTVTVSSTRIQNPDPAVYQLRDSKSSDKSVCLFTDFDSQTNVSQSKDSDVYITDKTVLDMRSMDFKSNSAVAWSNKSDFACANAFNNSIIPEDTFFPSPESSCDVKLVEKSFETDTNLNFQILYEILLGKATLYAVLVSALVLMAMVKRKDSRGRAKRSGSGVKQTLNFDLLKLAGDVESNPGPSRGHMTEYKPTVRLATRDDVPRAVRTLAAAFADYPATRHTVDPDRHIERVTELQELFLTRVGLDIGKVWVADDGAAVAVWTTPESVEAGAVFAEIGPRMAELSGSRLAAQQQMEGLLAPHRPKEPAWFLATVGVSPDHQGKGLGSAVVLPGVEAAERAGVPAFLETSAPRNLPFYERLGFTVTADVEVPEGPRTWCMTRKPGA

SEQ ID NO: 45417 - protein, 872 aa, synthetic construct
MALPVTALLLPLALLLHAARPLEIQNPDPAVYQLRDSKSSDKSVCLFTDFDSQTNVSQSKDSDVYITDKTVLDMRSMDFKSNSAVAWSNKSDFACANAFNNSIIPEDTFFPSPESSCDVKLVEKSFETDTNLNFQILYEILLGKATLYAVLVSALVLMAMVKRKDSRGRAKRSGSGATNFSLLKQAGDVEENPGPTSMALPVTALLLPLALLLHAARPDIVLTQSPLSLAVSLGQPAIISCRASQSVSFAGTSLMHWYHQKPGQQPRLLIYRASNLEAGVPDRFSGSGSKTDFTLTISPVEAEDAATYYCQQSREYPYTFGGGTKLEIKRGGGGSGGGGSGGGGSQVQLVQSGAEVVKPGASVKISCKASGYTFTGYFMHWVKQSPGQSLEWIGRIHPYDGDTFYNQKFQGKATLTVDKSSNTAHMELLSLTSEDFAVYYCTRYDGSRAMDYWGQGTTVTVSSTREDLKNVFPPEVAVFEPSEAEISHTQKATLVCLATGFYPDHVELSWWVNGKEVHSGVSTDPQPLKEQPALNDSRYCLSSRLRVSATFWQNPRNHFRCQVQFYGLSENDEWTQDRAKPVTQIVSAEAWGRADCGFTSESYQQGVLSATNLSVIGFRILLLKVAGFNLLMTLRLWSSRAKRSGSGVKQTLNFDLLKLAGDVESNPGPSRGHMTEYKPTVRLATRDDVPRAVRTLAAAFADYPATRHTVDPDRHIERVTELQELFLTRVGLDIGKVWVADDGAAVAVWTTPESVEAGAVFAEIGPRMAELSGSRLAAQQQMEGLLAPHRPKEPAWFLATVGVSPDHQGKGLGSAVVLPGVEAAERAGVPAFLETSAPRNLPFYERLGFTVTADVEVPEGPRTWCMTRKPGA

SEQ ID NO: 45418 - protein, 872 aa, synthetic construct
MALPVTALLLPLALLLHAARPLEEDLKNVFPPEVAVFEPSEAEISHTQKATLVCLATGFYPDHVELSWWVNGKEVHSGVCTDPQPLKEQPALNDSRYCLSSRLRVSATFWQNPRNHFRCQVQFYGLSENDEWTQDRAKPVTQIVSAEAWGRADCDVKLVEKSFETDTNLNFQNLSVIGFRILLLKVAGFNLLMTLRLWSSRAKRSGSGATNFSLLKQAGDVEENPGPTSMALPVTALLLPLALLLHAARPDIVLTQSPLSLAVSLGQPAIISCRASQSVSFAGTSLMHWYHQKPGQQPRLLIYRASNLEAGVPDRFSGSGSKTDFTLTISPVEAEDAATYYCQQSREYPYTFGGGTKLEIKRGGGGSGGGGSGGGGSQVQLVQSGAEVVKPGASVKISCKASGYTFTGYFMHWVKQSPGQSLEWIGRIHPYDGDTFYNQKFQGKATLTVDKSSNTAHMELLSLTSEDFAVYYCTRYDGSRAMDYWGQGTTVTVSSTRIQNPDPAVYQLRDSKSSDKSVCLFTDFDSQTNVSQSKDSDVYITDKCVLDMRSMDFKSNSAVAWSNKSDFACANAFNNSIIPEDTFFPSPESSCGFTSESYQQGVLSATILYEILLGKATLYAVLVSALVLMAMVKRKDSRGRAKRSGSGVKQTLNFDLLKLAGDVESNPGPSRGHMTEYKPTVRLATRDDVPRAVRTLAAAFADYPATRHTVDPDRHIERVTELQELFLTRVGLDIGKVWVADDGAAVAVWTTPESVEAGAVFAEIGPRMAELSGSRLAAQQQMEGLLAPHRPKEPAWFLATVGVSPDHQGKGLGSAVVLPGVEAAERAGVPAFLETSAPRNLPFYERLGFTVTADVEVPEGPRTWCMTRKPGA

SEQ ID NO: 45419 - protein, 872 aa, synthetic construct
MALPVTALLLPLALLLHAARPLEEDLKNVFPPEVAVFEPSEAEISHTQKATLVCLATGFYPDHVELSWWVNGKEVHSGVSTDPQPLKEQPALNDSRYCLSSRLRVSATFWQNPRNHFRCQVQFYGLSENDEWTQDRAKPVTQIVSAEAWGRADCDVKLVEKSFETDTNLNFQNLSVIGFRILLLKVAGFNLLMTLRLWSSRAKRSGSGATNFSLLKQAGDVEENPGPTSMALPVTALLLPLALLLHAARPDIVLTQSPLSLAVSLGQPAIISCRASQSVSFAGTSLMHWYHQKPGQQPRLLIYRASNLEAGVPDRFSGSGSKTDFTLTISPVEAEDAATYYCQQSREYPYTFGGGTKLEIKRGGGGSGGGGSGGGGSQVQLVQSGAEVVKPGASVKISCKASGYTFTGYFMHWVKQSPGQSLEWIGRIHPYDGDTFYNQKFQGKATLTVDKSSNTAHMELLSLTSEDFAVYYCTRYDGSRAMDYWGQGTTVTVSSTRIQNPDPAVYQLRDSKSSDKSVCLFTDFDSQTNVSQSKDSDVYITDKTVLDMRSMDFKSNSAVAWSNKSDFACANAFNNSIIPEDTFFPSPESSCGFTSESYQQGVLSATILYEILLGKATLYAVLVSALVLMAMVKRKDSRGRAKRSGSGVKQTLNFDLLKLAGDVESNPGPSRGHMTEYKPTVRLATRDDVPRAVRTLAAAFADYPATRHTVDPDRHIERVTELQELFLTRVGLDIGKVWVADDGAAVAVWTTPESVEAGAVFAEIGPRMAELSGSRLAAQQQMEGLLAPHRPKEPAWFLATVGVSPDHQGKGLGSAVVLPGVEAAERAGVPAFLETSAPRNLPFYERLGFTVTADVEVPEGPRTWCMTRKPGA

SEQ ID NO: 45420 - protein, 975 aa, synthetic construct
MALPVTALLLPLALLLHAARPLEEEDLKNVFPPEVAVFEPSEAEISHTQKATLVCLATGFYPDHVELSWWVNGKEVHSGVSTDPQPLKEQPALNDSRYCLSSRLRVSATFWQNPRNHFRCQVQFYGLSENDEWTQDRAKPVTQIVSAEAWGRADDVIKIHWQEKKSNTILGSQEGNTMKTNDTYMKFSWLTVPEKSLDKEHRCIVRHENNKNGVDQEIIFPPIKTDVITMDPKDNCSKDANDTLLLQLTNTSAYYMYLLLLLKSVVYFAIITCCLLRRTAFCCNGEKSRAKRSGSGATNFSLLKQAGDVEENPGPTSMALPVTALLLPLALLLHAARPDIVLTQSPLSLAVSLGQPAIISCRASQSVSFAGTSLMHWYHQKPGQQPRLLIYRASNLEAGVPDRFSGSGSKTDFTLTISPVEAEDAATYYCQQSREYPYTFGGGTKLEIKRGGGGSGGGGSGGGGSQVQLVQSGAEVVKPGASVKISCKASGYTFTGYFMHWVKQSPGQSLEWIGRIHPYDGDTFYNQKFQGKATLTVDKSSNTAHMELLSLTSEDFAVYYCTRYDGSRAMDYWGQGTTVTVSSTRIQNPDPAVYQLRDSKSSDKSVCLFTDFDSQTNVSQSKDSDVYITDKTVLDMRSMDFKSNSAVAWSNKSDFACANAFNNSIIPEDTFFPSPESSDSTDHVKPKETENTKQPSKSCHKPKAIVHTEKVNMMSLTVLGLRMLFAKTVAVNFLLTAKLFFLRAKRSGSGVKQTLNFDLLKLAGDVESNPGPSRGHMTEYKPTVRLATRDDVPRAVRTLAAAFADYPATRHTVDPDRHIERVTELQELFLTRVGLDIGKVWVADDGAAVAVWTTPESVEAGAVFAEIGPRMAELSGSRLAAQQQMEGLLAPHRPKEPAWFLATVGVSPDHQGKGLGSAVVLPGVEAAERAGVPAFLETSAPRNLPFYERLGFTVTADVEVPEGPRTWCMTRKPGA

SEQ ID NO: 45421 - protein, 872 aa, synthetic construct
MALPVTALLLPLALLLHAARPLEEDLKNVFPPEVAVFEPSEAEISHTQKATLVCLATGFYPDHVELSWWVNGKEVHSGVCTDPQPLKEQPALNDSRYCLSSRLRVSATFWQNPRNHFRCQVQFYGLSENDEWTQDRAKPVTQIVSAEAWGRADCGFTSESYQQGVLSATNLSVIGFRILLLKVAGFNLLMTLRLWSSRAKRSGSGATNFSLLKQAGDVEENPGPTSMALPVTALLLPLALLLHAARPDIVLTQSPLSLAVSLGQPAIISCRASQSVSFAGTSLMHWYHQKPGQQPRLLIYRASNLEAGVPDRFSGSGSKTDFTLTISPVEAEDAATYYCQQSREYPYTFGGGTKLEIKRGGGGSGGGGSGGGGSQVQLVQSGAEVVKPGASVKISCKASGYTFTGYFMHWVKQSPGQSLEWIGRIHPYDGDTFYNQKFQGKATLTVDKSSNTAHMELLSLTSEDFAVYYCTRYDGSRAMDYWGQGTTVTVSSTRIQNPDPAVYQLRDSKSSDKSVCLFTDFDSQTNVSQSKDSDVYITDKCVLDMRSMDFKSNSAVAWSNKSDFACANAFNNSIIPEDTFFPSPESSCDVKLVEKSFETDTNLNFQILYEILLGKATLYAVLVSALVLMAMVKRKDSRGRAKRSGSGVKQTLNFDLLKLAGDVESNPGPSRGHMTEYKPTVRLATRDDVPRAVRTLAAAFADYPATRHTVDPDRHIERVTELQELFLTRVGLDIGKVWVADDGAAVAVWTTPESVEAGAVFAEIGPRMAELSGSRLAAQQQMEGLLAPHRPKEPAWFLATVGVSPDHQGKGLGSAVVLPGVEAAERAGVPAFLETSAPRNLPFYERLGFTVTADVEVPEGPRTWCMTRKPGA

SEQ ID NO: 45422 - protein, 901 aa, synthetic construct
MALPVTALLLPLALLLHAARPLEEEDLKNVFPPEVAVFEPSEAEISHTQKATLVCLATGFYPDHVELSWWVNGKEVHSGVCTDPQPLKEQPALNDSRYCLSSRLRVSATFWQNPRNHFRCQVQFYGLSENDEWTQDRAKPVTQIVSAEAWGRADCGFTSESYQQGVLSATNLSVIGFRILLLKVAGFNLLMTLRLWSSRAKRSGSGATNFSLLKQAGDVEENPGPTSMALPVTALLLPLALLLHAARPDIVLTQSPLSLAVSLGQPAIISCRASQSVSFAGTSLMHWYHQKPGQQPRLLIYRASNLEAGVPDRFSGSGSKTDFTLTISPVEAEDAATYYCQQSREYPYTFGGGTKLEIKRGGGGSGGGGSGGGGSQVQLVQSGAEVVKPGASVKISCKASGYTFTGYFMHWVKQSPGQSLEWIGRIHPYDGDTFYNQKFQGKATLTVDKSSNTAHMELLSLTSEDFAVYYCTRYDGSRAMDYWGQGTTVTVSSTRGQPKANPTVTLFPPSSEELQANKATLVCLISDFYPGAVTVAWKADGSPVKAGVETTKPSKQSNNKYAASSYLSLTPEQWKSHRSYSCQVTHEGSTVEKTVAPTECSPIKTDVITMDPKDNCSKDANDTLLLQLTNTSAYYMYLLLLLKSVVYFAIITCCLLRRTAFCCNGEKSRAKRSGSGVKQTLNFDLLKLAGDVESNPGPSRGHMTEYKPTVRLATRDDVPRAVRTLAAAFADYPATRHTVDPDRHIERVTELQELFLTRVGLDIGKVWVADDGAAVAVWTTPESVEAGAVFAEIGPRMAELSGSRLAAQQQMEGLLAPHRPKEPAWFLATVGVSPDHQGKGLGSAVVLPGVEAAERAGVPAFLETSAPRNLPFYERLGFTVTADVEVPEGPRTWCMTRKPGA

SEQ ID NO: 45423 - protein, 901 aa, synthetic construct
MALPVTALLLPLALLLHAARPLEGQPKANPTVTLFPPSSEELQANKATLVCLISDFYPGAVTVAWKADGSPVKAGVETTKPSKQSNNKYAASSYLSLTPEQWKSHRSYSCQVTHEGSTVEKTVAPTECSPIKTDVITMDPKDNCSKDANDTLLLQLTNTSAYYMYLLLLLKSVVYFAIITCCLLRRTAFCCNGEKSRAKRSGSGATNFSLLKQAGDVEENPGPTSMALPVTALLLPLALLLHAARPDIVLTQSPLSLAVSLGQPAIISCRASQSVSFAGTSLMHWYHQKPGQQPRLLIYRASNLEAGVPDRFSGSGSKTDFTLTISPVEAEDAATYYCQQSREYPYTFGGGTKLEIKRGGGGSGGGGSGGGGSQVQLVQSGAEVVKPGASVKISCKASGYTFTGYFMHWVKQSPGQSLEWIGRIHPYDGDTFYNQKFQGKATLTVDKSSNTAHMELLSLTSEDFAVYYCTRYDGSRAMDYWGQGTTVTVSSTREEDLKNVFPPEVAVFEPSEAEISHTQKATLVCLATGFYPDHVELSWWVNGKEVHSGVCTDPQPLKEQPALNDSRYCLSSRLRVSATFWQNPRNHFRCQVQFYGLSENDEWTQDRAKPVTQIVSAEAWGRADCGFTSESYQQGVLSATNLSVIGFRILLLKVAGFNLLMTLRLWSSRAKRSGSGVKQTLNFDLLKLAGDVESNPGPSRGHMTEYKPTVRLATRDDVPRAVRTLAAAFADYPATRHTVDPDRHIERVTELQELFLTRVGLDIGKVWVADDGAAVAVWTTPESVEAGAVFAEIGPRMAELSGSRLAAQQQMEGLLAPHRPKEPAWFLATVGVSPDHQGKGLGSAVVLPGVEAAERAGVPAFLETSAPRNLPFYERLGFTVTADVEVPEGPRTWCMTRKPGA

SEQ ID NO: 45424 - protein, 898 aa, synthetic construct
MALPVTALLLPLALLLHAARPLEEASTKGPSVFPLAPSSKSTSGGTAALGCLVKDYFPEPVTVSWNSGALTSGVHTFPAVLQSSGLYSLSSVVTVPSSSLGTQTYICNVNHKPSNTKVDKRVEPKSCPIKTDVITMDPKDNCSKDANDTLLLQLTNTSAYYMYLLLLLKSVVYFAIITCCLLRRTAFCCNGEKSRAKRSGSGATNFSLLKQAGDVEENPGPTSMALPVTALLLPLALLLHAARPDIVLTQSPLSLAVSLGQPAIISCRASQSVSFAGTSLMHWYHQKPGQQPRLLIYRASNLEAGVPDRFSGSGSKTDFTLTISPVEAEDAATYYCQQSREYPYTFGGGTKLEIKRGGGGSGGGGSGGGGSQVQLVQSGAEVVKPGASVKISCKASGYTFTGYFMHWVKQSPGQSLEWIGRIHPYDGDTFYNQKFQGKATLTVDKSSNTAHMELLSLTSEDFAVYYCTRYDGSRAMDYWGQGTTVTVSSTRGQPKANPTVTLFPPSSEELQANKATLVCLISDFYPGAVTVAWKADGSPVKAGVETTKPSKQSNNKYAASSYLSLTPEQWKSHRSYSCQVTHEGSTVEKTVAPTECSEVKTDSTDHVKPKETENTKQPSKSCHKPKAIVHTEKVNMMSLTVLGLRMLFAKTVAVNFLLTAKLFFLRAKRSGSGVKQTLNFDLLKLAGDVESNPGPSRGHMTEYKPTVRLATRDDVPRAVRTLAAAFADYPATRHTVDPDRHIERVTELQELFLTRVGLDIGKVWVADDGAAVAVWTTPESVEAGAVFAEIGPRMAELSGSRLAAQQQMEGLLAPHRPKEPAWFLATVGVSPDHQGKGLGSAVVLPGVEAAERAGVPAFLETSAPRNLPFYERLGFTVTADVEVPEGPRTWCMTRKPGA

SEQ ID NO: 45425 - protein, 876 aa, synthetic construct
MALPVTALLLPLALLLHAARPLEEASTKGPSVFPLAPSSKSTSGGTAALGCLVKDYFPEPVTVSWNSGALTSGVHTFPAVLQSSGLYSLSSVVTVPSSSLGTQTYICNVNHKPSNTKVDKRVEPKSCGRADCGFTSESYQQGVLSATILYEILLGKATLYAVLVSALVLMAMVKRKDSRGRAKRSGSGATNFSLLKQAGDVEENPGPTSMALPVTALLLPLALLLHAARPDIVLTQSPLSLAVSLGQPAIISCRASQSVSFAGTSLMHWYHQKPGQQPRLLIYRASNLEAGVPDRFSGSGSKTDFTLTISPVEAEDAATYYCQQSREYPYTFGGGTKLEIKRGGGGSGGGGSGGGGSQVQLVQSGAEVVKPGASVKISCKASGYTFTGYFMHWVKQSPGQSLEWIGRIHPYDGDTFYNQKFQGKATLTVDKSSNTAHMELLSLTSEDFAVYYCTRYDGSRAMDYWGQGTTVTVSSTRGQPKANPTVTLFPPSSEELQANKATLVCLISDFYPGAVTVAWKADGSPVKAGVETTKPSKQSNNKYAASSYLSLTPEQWKSHRSYSCQVTHEGSTVEKTVAPTECSIPEDTFFPSPESSCDVKLVEKSFETDTNLNFQNLSVIGFRILLLKVAGFNLLMTLRLWSSRAKRSGSGVKQTLNFDLLKLAGDVESNPGPSRGHMTEYKPTVRLATRDDVPRAVRTLAAAFADYPATRHTVDPDRHIERVTELQELFLTRVGLDIGKVWVADDGAAVAVWTTPESVEAGAVFAEIGPRMAELSGSRLAAQQQMEGLLAPHRPKEPAWFLATVGVSPDHQGKGLGSAVVLPGVEAAERAGVPAFLETSAPRNLPFYERLGFTVTADVEVPEGPRTWCMTRKPGA

SEQ ID NO: 45426 - protein, 876 aa, synthetic construct
MALPVTALLLPLALLLHAARPLEEASTKGPSVFPLAPSSKSTSGGTAALGCLVKDYFPEPVTVSWNSGALTSGVHTFPAVLQSSGLYSLSSVVTVPSSSLGTQTYICNVNHKPSNTKVDKRVEPKSCIPEDTFFPSPESSCDVKLVEKSFETDTNLNFQNLSVIGFRILLLKVAGFNLLMTLRLWSSRAKRSGSGATNFSLLKQAGDVEENPGPTSMALPVTALLLPLALLLHAARPDIVLTQSPLSLAVSLGQPAIISCRASQSVSFAGTSLMHWYHQKPGQQPRLLIYRASNLEAGVPDRFSGSGSKTDFTLTISPVEAEDAATYYCQQSREYPYTFGGGTKLEIKRGGGGSGGGGSGGGGSQVQLVQSGAEVVKPGASVKISCKASGYTFTGYFMHWVKQSPGQSLEWIGRIHPYDGDTFYNQKFQGKATLTVDKSSNTAHMELLSLTSEDFAVYYCTRYDGSRAMDYWGQGTTVTVSSTRGQPKANPTVTLFPPSSEELQANKATLVCLISDFYPGAVTVAWKADGSPVKAGVETTKPSKQSNNKYAASSYLSLTPEQWKSHRSYSCQVTHEGSTVEKTVAPTECSGRADCGFTSESYQQGVLSATILYEILLGKATLYAVLVSALVLMAMVKRKDSRGRAKRSGSGVKQTLNFDLLKLAGDVESNPGPSRGHMTEYKPTVRLATRDDVPRAVRTLAAAFADYPATRHTVDPDRHIERVTELQELFLTRVGLDIGKVWVADDGAAVAVWTTPESVEAGAVFAEIGPRMAELSGSRLAAQQQMEGLLAPHRPKEPAWFLATVGVSPDHQGKGLGSAVVLPGVEAAERAGVPAFLETSAPRNLPFYERLGFTVTADVEVPEGPRTWCMTRKPGA

SEQ ID NO: 45427 - protein, 623 aa, synthetic construct
MALPVTALLLPLALLLHAARPDIVLTQSPLSLAVSLGQPAIISCRASQSVSFAGTSLMHWYHQKPGQQPRLLIYRASNLEAGVPDRFSGSGSKTDFTLTISPVEAEDAATYYCQQSREYPYTFGGGTKLEIKRLEDLKNVFPPEVAVFEPSEAEISHTQKATLVCLATGFYPDHVELSWWVNGKEVHSGVCTDPQPLKEQPALNDSRYCLSSRLRVSATFWQNPRNHFRCQVQFYGLSENDEWTQDRAKPVTQIVSAEAWGRADSGFTSESYQQGVLSATILYEILLGKATLYAVLVSALVLMAMVKRKDSRGRAKRSGSGATNFSLLKQAGDVEENPGPTSMDWIWRILFLVGAATGAHSFEQVQLVQSGAEVVKPGASVKISCKASGYTFTGYFMHWVKQSPGQSLEWIGRIHPYDGDTFYNQKFQGKATLTVDKSSNTAHMELLSLTSEDFAVYYCTRYDGSRAMDYWGQGTTVTVSSTRIQNPDPAVYQLRDSKSSDKSVCLFTDFDSQTNVSQSKDSDVYITDKCVLDMRSMDFKSNSAVAWSNKSDFACANAFNNSIIPEDTFFPSPESSSDVKLVEKSFETDTNLNFQNLSVIGFRILLLKVAGFNLLMTLRLWSS

SEQ ID NO: 45428 - protein, 902 aa, synthetic construct
MALPVTALLLPLALLLHAARPEVQLLESGGGLVQPGGSLRLSCAASGRTFSMGWYRQAPGKGLEFVSAITYSGGSPYYADSVKGRFTISRDNSKNTVYLQMNSLRAEDTAVYYCAANPTYGSDWNAENWGQGTLVTVSSGTGGGGSGGGGSGGGGSEFDIVLTQSPLSLAVSLGQPAIISCRASQSVSFAGTSLMHWYHQKPGQQPRLLIYRASNLEAGVPDRFSGSGSKTDFTLTISPVEAEDAATYYCQQSREYPYTFGGGTKLEIKRLEIQNPDPAVYQLRDSKSSDKSVCLFTDFDSQTNVSQSKDSDVYITDKCVLDMRSMDFKSNSAVAWSNKSDFACANAFNNSIIPEDTFFPSSDVPCDVKLVEKSFETDTNLNFQNLSVIGFRILLLKVAGFNLLMTLRLWSSRAKRSGSGVKQTLNFDLLKLAGDVESNPGPTSTMDWIWRILFLVGAATGTHSGPEVQLVESGGGLVQPGGSLRLSCAASGRTFTMGWYRQAPGKEREFVAAISLSPTLAYYADSVKGRFTISRDNSKNTVVLQMNSLRAEDTALYYCAADRKSVMSIRPDYWGQGTLVTVSSGSGGGGSGGGGSGGGGSFEQVQLVQSGAEVVKPGASVKISCKASGYTFTGYFMHWVKQSPGQSLEWIGRIHPYDGDTFYNQKFQGKATLTVDKSSNTAHMELLSLTSEDFAVYYCTRYDGSRAMDYWGQGTTVTVSSTREDLKNVFPPEVAVFEPSKAEIAHTQKATLVCLATGFYPDHVELSWWVNGKEVHSGVCTDPQPLKEQPALNDSRYCLSSRLRVSATFWQNPRNHFRCQVQFYGLSENDEWTQDRAKPVTQIVSAEAWGRADCGITSASYHQGVLSATILYEILLGKATLYAVLVSALVLMAMVKRKDSRG

SEQ ID NO: 45429 - protein, 902 aa, synthetic construct
MALPVTALLLPLALLLHAARPEVQLVESGGGLVQAGGSLRLSCAASGRTFSMGWFRQAPGKEREFVAAITYSGGSPYYADSVKGRFTISRDNAKNTVYLQMNSLKPEDTAVYYCAANPTYGSDWNAENWGQGTQVTVSSGTGGGGSGGGGSGGGGSEFDIVLTQSPLSLAVSLGQPAIISCRASQSVSFAGTSLMHWYHQKPGQQPRLLIYRASNLEAGVPDRFSGSGSKTDFTLTISPVEAEDAATYYCQQSREYPYTFGGGTKLEIKRLEIQNPDPAVYQLRDSKSSDKSVCLFTDFDSQTNVSQSKDSDVYITDKCVLDMRSMDFKSNSAVAWSNKSDFACANAFNNSIIPEDTFFPSSDVPCDVKLVEKSFETDTNLNFQNLSVIGFRILLLKVAGFNLLMTLRLWSSRAKRSGSGVKQTLNFDLLKLAGDVESNPGPTSTMDWIWRILFLVGAATGAHSGPEVQLVESGGGLVQPGGSLRLSCAASGRTFTMGWYRQAPGKEREFVAAISLSPTLAYYADSVKGRFTISRDNSKNTVVLQMNSLRAEDTALYYCAADRKSVMSIRPDYWGQGTLVTVSSGSGGGGSGGGGSGGGGSFEQVQLVQSGAEVVKPGASVKISCKASGYTFTGYFMHWVKQSPGQSLEWIGRIHPYDGDTFYNQKFQGKATLTVDKSSNTAHMELLSLTSEDFAVYYCTRYDGSRAMDYWGQGTTVTVSSTREDLKNVFPPEVAVFEPSKAEIAHTQKATLVCLATGFYPDHVELSWWVNGKEVHSGVCTDPQPLKEQPALNDSRYCLSSRLRVSATFWQNPRNHFRCQVQFYGLSENDEWTQDRAKPVTQIVSAEAWGRADCGITSASYHQGVLSATILYEILLGKATLYAVLVSALVLMAMVKRKDSRG

SEQ ID NO: 45430 - protein, 899 aa, synthetic construct
MALPVTALLLPLALLLHAARPEVQLVESGGGLVQAGGSLRLSCAASGRTFSMGWFRQAPGKEREFVAAITYSGGSPYYADSVKGRFTISRDNAKNTVYLQMNSLKPEDTAVYYCAANPTYGSDWNAENWGQGTQVTVSSGTGGGGSGGGGSGGGGSEFDIVLTQSPLSLAVSLGQPAIISCRASQSVSFAGTSLMHWYHQKPGQQPRLLIYRASNLEAGVPDRFSGSGSKTDFTLTISPVEAEDAATYYCQQSREYPYTFGGGTKLEIKRLEDLKNVFPPEVAVFEPSEAEISHTQKATLVCLATGFYPDHVELSWWVNGKEVHSGVCTDPQPLKEQPALNDSRYCLSSRLRVSATFWQNPRNHFRCQVQFYGLSENDEWTQDRAKPVTQIVSAEAWGRADCGFTSESYQQGVLSATILYEILLGKATLYAVLVSALVLMAMVKRKDSRGRAKRSGSGATNFSLLKQAGDVEENPGPTSATMDWIWRILFLVGAATGAHSGPEVQLVESGGGLVQAGGSLRLSCAASGRTFTMGWFRQAPGKEREFVAAISLSPTLAYYADSVKGRFTISRDNAKNTVVLQMNSLKPEDTALYYCAADRKSVMSIRPDYWGQGTQVTVSSGSGGGGSGGGGSGGGGSFEQVQLVQSGAEVVKPGASVKISCKASGYTFTGYFMHWVKQSPGQSLEWIGRIHPYDGDTFYNQKFQGKATLTVDKSSNTAHMELLSLTSEDFAVYYCTRYDGSRAMDYWGQGTTVTVSSTRIQNPDPAVYQLRDSKSSDKSVCLFTDFDSQTNVSQSKDSDVYITDKCVLDMRSMDFKSNSAVAWSNKSDFACANAFNNSIIPEDTFFPSPESSCDVKLVEKSFETDTNLNFQNLSVIGFRILLLKVAGFNLLMTLRLWSS

SEQ ID NO: 45431 - protein, 770 aa, synthetic construct
MALPVTALLLPLALLLHAARPEVQLVESGGGLVQPGGSLRLSCEASGFASDDYIIGWFRQAPGKEREGVSCISSKYANTVYTDSVKGRFRLSRGTAKNTVYLQMSALKPEDTAVYYCAMDSRRVTCPEISTMHRNFDSWGQGTLVTVSSGTGGGGSGGGGSGGGGSEFDIVLTQSPLSLAVSLGQPAIISCRASQSVSFAGTSLMHWYHQKPGQQPRLLIYRASNLEAGVPDRFSGSGSKTDFTLTISPVEAEDAATYYCQQSREYPYTFGGGTKLEIKRLEDLKNVFPPEVAVFEPSKAEIAHTQKATLVCLATGFYPDHVELSWWVNGKEVHSGVCTDPQPLKEQPALNDSRYCLSSRLRVSATFWQNPRNHFRCQVQFYGLSENDEWTQDRAKPVTQIVSAEAWGRADCGITSASYHQGVLSATILYEILLGKATLYAVLVSALVLMAMVKRKDSRGRAKRSGSGATNFSLLKQAGDVEENPGPTSMDWIWRILFLVGAATGAHSFEQVQLVQSGAEVVKPGASVKISCKASGYTFTGYFMHWVKQSPGQSLEWIGRIHPYDGDTFYNQKFQGKATLTVDKSSNTAHMELLSLTSEDFAVYYCTRYDGSRAMDYWGQGTTVTVSSTRIQNPDPAVYQLRDSKSSDKSVCLFTDFDSQTNVSQSKDSDVYITDKCVLDMRSMDFKSNSAVAWSNKSDFACANAFNNSIIPEDTFFPSSDVPCDVKLVEKSFETDTNLNFQNLSVIGFRILLLKVAGFNLLMTLRLWSS

SEQ ID NO: 45432 - protein, 761 aa, synthetic construct
MALPVTALLLPLALLLHAARPDIVLTQSPLSLAVSLGQPAIISCRASQSVSFAGTSLMHWYHQKPGQQPRLLIYRASNLEAGVPDRFSGSGSKTDFTLTISPVEAEDAATYYCQQSREYPYTFGGGTKLEIKRLEDLKNVFPPEVAVFEPSEAEISHTQKATLVCLATGFYPDHVELSWWVNGKEVHSGVCTDPQPLKEQPALNDSRYCLSSRLRVSATFWQNPRNHFRCQVQFYGLSENDEWTQDRAKPVTQIVSAEAWGRADCGFTSESYQQGVLSATILYEILLGKATLYAVLVSALVLMAMVKRKDSRGRAKRSGSGATNFSLLKQAGDVEENPGPTSTMDWIWRILFLVGAATGAHSGPEVQLVESGGGLVQPGGSLRLSCAASGRTFTMGWYRQAPGKEREFVAAISLSPTLAYYADSVKGRFTISRDNSKNTVVLQMNSLRAEDTALYYCAADRKSVMSIRPDYWGQGTLVTVSSGSGGGGSGGGGSGGGGSFEQVQLVQSGAEVVKPGASVKISCKASGYTFTGYFMHWVKQSPGQSLEWIGRIHPYDGDTFYNQKFQGKATLTVDKSSNTAHMELLSLTSEDFAVYYCTRYDGSRAMDYWGQGTTVTVSSTRIQNPDPAVYQLRDSKSSDKSVCLFTDFDSQTNVSQSKDSDVYITDKCVLDMRSMDFKSNSAVAWSNKSDFACANAFNNSIIPEDTFFPSPESSCDVKLVEKSFETDTNLNFQNLSVIGFRILLLKVAGFNLLMTLRLWSS

SEQ ID NO: 45433 - protein, 768 aa, synthetic construct
MALPVTALLLPLALLLHAARPDIVLTQSPLSLAVSLGQPAIISCRASQSVSFAGTSLMHWYHQKPGQQPRLLIYRASNLEAGVPDRFSGSGSKTDFTLTISPVEAEDAATYYCQQSREYPYTFGGGTKLEIKRLEDLKNVFPPEVAVFEPSEAEISHTQKATLVCLATGFYPDHVELSWWVNGKEVHSGVCTDPQPLKEQPALNDSRYCLSSRLRVSATFWQNPRNHFRCQVQFYGLSENDEWTQDRAKPVTQIVSAEAWGRADCGFTSESYQQGVLSATILYEILLGKATLYAVLVSALVLMAMVKRKDSRGRAKRSGSGATNFSLLKQAGDVEENPGPTSTMDWIWRILFLVGAATGAHSGPQVQLVESGGGLVQPGGSLRLSCAASGNINSRNCMGWFRQAPGKGREGVAAIGQVTGRTYYVDSVKGRFTISLDNSKNTLYLQMNSLRAEDTAVYYCAAAPGCLLSALRSADYRNWGQGTLVTVSSGSGGGGSGGGGSGGGGSFEQVQLVQSGAEVVKPGASVKISCKASGYTFTGYFMHWVKQSPGQSLEWIGRIHPYDGDTFYNQKFQGKATLTVDKSSNTAHMELLSLTSEDFAVYYCTRYDGSRAMDYWGQGTTVTVSSTRIQNPDPAVYQLRDSKSSDKSVCLFTDFDSQTNVSQSKDSDVYITDKCVLDMRSMDFKSNSAVAWSNKSDFACANAFNNSIIPEDTFFPSPESSCDVKLVEKSFETDTNLNFQNLSVIGFRILLLKVAGFNLLMTLRLWSS

SEQ ID NO: 45434 - protein, 768 aa, synthetic construct
MALPVTALLLPLALLLHAARPDIVLTQSPLSLAVSLGQPAIISCRASQSVSFAGTSLMHWYHQKPGQQPRLLIYRASNLEAGVPDRFSGSGSKTDFTLTISPVEAEDAATYYCQQSREYPYTFGGGTKLEIKRLEDLKNVFPPEVAVFEPSEAEISHTQKATLVCLATGFYPDHVELSWWVNGKEVHSGVCTDPQPLKEQPALNDSRYCLSSRLRVSATFWQNPRNHFRCQVQFYGLSENDEWTQDRAKPVTQIVSAEAWGRADCGFTSESYQQGVLSATILYEILLGKATLYAVLVSALVLMAMVKRKDSRGRAKRSGSGATNFSLLKQAGDVEENPGPTSTMDWIWRILFLVGAATGAHSGPQVQLVESGGGSVQAGGSLRLSCGASGNISSRNCMGWFRQAPGKEREGVAAIGQVTGRSYYVDSVKGRFTISLDNAKNTLYLQMNTLKPEDTAMYYCAAAPGCLLSALRSADYRNWGQGTQVTVSSGSGGGGSGGGGSGGGGSFEQVQLVQSGAEVVKPGASVKISCKASGYTFTGYFMHWVKQSPGQSLEWIGRIHPYDGDTFYNQKFQGKATLTVDKSSNTAHMELLSLTSEDFAVYYCTRYDGSRAMDYWGQGTTVTVSSTRIQNPDPAVYQLRDSKSSDKSVCLFTDFDSQTNVSQSKDSDVYITDKCVLDMRSMDFKSNSAVAWSNKSDFACANAFNNSIIPEDTFFPSPESSCDVKLVEKSFETDTNLNFQNLSVIGFRILLLKVAGFNLLMTLRLWSS

SEQ ID NO: 45435 - protein, 909 aa, synthetic construct
MALPVTALLLPLALLLHAARPEVQLVESGGGLVQAGGSLRLSCAASGRTFSMGWFRQAPGKEREFVAAITYSGGSPYYADSVKGRFTISRDNAKNTVYLQMNSLKPEDTAVYYCAANPTYGSDWNAENWGQGTQVTVSSGTGGGGSGGGGSGGGGSEFDIVLTQSPLSLAVSLGQPAIISCRASQSVSFAGTSLMHWYHQKPGQQPRLLIYRASNLEAGVPDRFSGSGSKTDFTLTISPVEAEDAATYYCQQSREYPYTFGGGTKLEIKRLEIQNPDPAVYQLRDSKSSDKSVCLFTDFDSQTNVSQSKDSDVYITDKCVLDMRSMDFKSNSAVAWSNKSDFACANAFNNSIIPEDTFFPSSDVPCDVKLVEKSFETDTNLNFQNLSVIGFRILLLKVAGFNLLMTLRLWSSRAKRSGSGVKQTLNFDLLKLAGDVESNPGPTSTMDWIWRILFLVGAATGAHSGPQVQLVESGGGSVQAGGSLRLSCGASGNISSRNCMGWFRQAPGKEREGVAAIGQVTGRSYYVDSVKGRFTISLDNAKNTLYLQMNTLKPEDTAMYYCAAAPGCLLSALRSADYRNWGQGTQVTVSSGSGGGGSGGGGSGGGGSFEQVQLVQSGAEVVKPGASVKISCKASGYTFTGYFMHWVKQSPGQSLEWIGRIHPYDGDTFYNQKFQGKATLTVDKSSNTAHMELLSLTSEDFAVYYCTRYDGSRAMDYWGQGTTVTVSSTREDLKNVFPPEVAVFEPSKAEIAHTQKATLVCLATGFYPDHVELSWWVNGKEVHSGVCTDPQPLKEQPALNDSRYCLSSRLRVSATFWQNPRNHFRCQVQFYGLSENDEWTQDRAKPVTQIVSAEAWGRADCGITSASYHQGVLSATILYEILLGKATLYAVLVSALVLMAMVKRKDSRG

SEQ ID NO: 45436 - protein, 906 aa, synthetic construct
MALPVTALLLPLALLLHAARPQVQLVESGGGSVQAGGSLRLSCGASGNISSRNCMGWFRQAPGKEREGVAAIGQVTGRSYYVDSVKGRFTISLDNAKNTLYLQMNTLKPEDTAMYYCAAAPGCLLSALRSADYRNWGQGTQVTVSSGTGGGGSGGGGSGGGGSEFDIVLTQSPLSLAVSLGQPAIISCRASQSVSFAGTSLMHWYHQKPGQQPRLLIYRASNLEAGVPDRFSGSGSKTDFTLTISPVEAEDAATYYCQQSREYPYTFGGGTKLEIKRLEDLKNVFPPEVAVFEPSEAEISHTQKATLVCLATGFYPDHVELSWWVNGKEVHSGVCTDPQPLKEQPALNDSRYCLSSRLRVSATFWQNPRNHFRCQVQFYGLSENDEWTQDRAKPVTQIVSAEAWGRADCGFTSESYQQGVLSATILYEILLGKATLYAVLVSALVLMAMVKRKDSRGRAKRSGSGATNFSLLKQAGDVEENPGPTSATMDWIWRILFLVGAATGAHSGPEVQLVESGGGLVQAGGSLRLSCAASGRTFTMGWFRQAPGKEREFVAAISLSPTLAYYADSVKGRFTISRDNAKNTVVLQMNSLKPEDTALYYCAADRKSVMSIRPDYWGQGTQVTVSSGSGGGGSGGGGSGGGGSFEQVQLVQSGAEVVKPGASVKISCKASGYTFTGYFMHWVKQSPGQSLEWIGRIHPYDGDTFYNQKFQGKATLTVDKSSNTAHMELLSLTSEDFAVYYCTRYDGSRAMDYWGQGTTVTVSSTRIQNPDPAVYQLRDSKSSDKSVCLFTDFDSQTNVSQSKDSDVYITDKCVLDMRSMDFKSNSAVAWSNKSDFACANAFNNSIIPEDTFFPSPESSCDVKLVEKSFETDTNLNFQNLSVIGFRILLLKVAGFNLLMTLRLWSS

SEQ ID NO: 45437 - protein, 769 aa, synthetic construct
MALPVTALLLPLALLLHAARPQVQLVESGGGSVQAGGSLRLSCGASGNISSRNCMGWFRQAPGKEREGVAAIGQVTGRSYYVDSVKGRFTISLDNAKNTLYLQMNTLKPEDTAMYYCAAAPGCLLSALRSADYRNWGQGTQVTVSSGTGGGGSGGGGSGGGGSEFDIVLTQSPLSLAVSLGQPAIISCRASQSVSFAGTSLMHWYHQKPGQQPRLLIYRASNLEAGVPDRFSGSGSKTDFTLTISPVEAEDAATYYCQQSREYPYTFGGGTKLEIKRLEDLKNVFPPEVAVFEPSEAEISHTQKATLVCLATGFYPDHVELSWWVNGKEVHSGVCTDPQPLKEQPALNDSRYCLSSRLRVSATFWQNPRNHFRCQVQFYGLSENDEWTQDRAKPVTQIVSAEAWGRADCGFTSESYQQGVLSATILYEILLGKATLYAVLVSALVLMAMVKRKDSRGRAKRSGSGATNFSLLKQAGDVEENPGPTSATMDWIWRILFLVGAATGAHSFEQVQLVQSGAEVVKPGASVKISCKASGYTFTGYFMHWVKQSPGQSLEWIGRIHPYDGDTFYNQKFQGKATLTVDKSSNTAHMELLSLTSEDFAVYYCTRYDGSRAMDYWGQGTTVTVSSTRIQNPDPAVYQLRDSKSSDKSVCLFTDFDSQTNVSQSKDSDVYITDKCVLDMRSMDFKSNSAVAWSNKSDFACANAFNNSIIPEDTFFPSPESSCDVKLVEKSFETDTNLNFQNLSVIGFRILLLKVAGFNLLMTLRLWSS

SEQ ID NO: 45438 - protein, 769 aa, synthetic construct
MALPVTALLLPLALLLHAARPQVQLVESGGGVVQPGGSLRLSCAASGLSFSTYTVAWFRQAPGKGLEGVAAIPYTSQHMVYTDSVRGRFTISRDNSKNTLYLQMNSLRAEDTAVYYCATDRRPGTSMLAINGYNRWGQGTTVTVSSGTGGGGSGGGGSGGGGSEFDIVLTQSPLSLAVSLGQPAIISCRASQSVSFAGTSLMHWYHQKPGQQPRLLIYRASNLEAGVPDRFSGSGSKTDFTLTISPVEAEDAATYYCQQSREYPYTFGGGTKLEIKRLEDLKNVFPPEVAVFEPSEAEISHTQKATLVCLATGFYPDHVELSWWVNGKEVHSGVCTDPQPLKEQPALNDSRYCLSSRLRVSATFWQNPRNHFRCQVQFYGLSENDEWTQDRAKPVTQIVSAEAWGRADCGFTSESYQQGVLSATILYEILLGKATLYAVLVSALVLMAMVKRKDSRGRAKRSGSGATNFSLLKQAGDVEENPGPTSATMDWIWRILFLVGAATGAHSFEQVQLVQSGAEVVKPGASVKISCKASGYTFTGYFMHWVKQSPGQSLEWIGRIHPYDGDTFYNQKFQGKATLTVDKSSNTAHMELLSLTSEDFAVYYCTRYDGSRAMDYWGQGTTVTVSSTRIQNPDPAVYQLRDSKSSDKSVCLFTDFDSQTNVSQSKDSDVYITDKCVLDMRSMDFKSNSAVAWSNKSDFACANAFNNSIIPEDTFFPSPESSCDVKLVEKSFETDTNLNFQNLSVIGFRILLLKVAGFNLLMTLRLWSS

SEQ ID NO: 45439 - protein, 768 aa, synthetic construct
MALPVTALLLPLALLLHAARPDIVLTQSPLSLAVSLGQPAIISCRASQSVSFAGTSLMHWYHQKPGQQPRLLIYRASNLEAGVPDRFSGSGSKTDFTLTISPVEAEDAATYYCQQSREYPYTFGGGTKLEIKRLEDLKNVFPPEVAVFEPSEAEISHTQKATLVCLATGFYPDHVELSWWVNGKEVHSGVCTDPQPLKEQPALNDSRYCLSSRLRVSATFWQNPRNHFRCQVQFYGLSENDEWTQDRAKPVTQIVSAEAWGRADCGFTSESYQQGVLSATILYEILLGKATLYAVLVSALVLMAMVKRKDSRGRAKRSGSGATNFSLLKQAGDVEENPGPTSTMDWIWRILFLVGAATGAHSGPQVQLVESGGGVVQPGGSLRLSCAASGLSFSTYTVAWFRQAPGKGLEGVAAIPYTSQHMVYTDSVRGRFTISRDNSKNTLYLQMNSLRAEDTAVYYCATDRRPGTSMLAINGYNRWGQGTTVTVSSGSGGGGSGGGGSGGGGSFEQVQLVQSGAEVVKPGASVKISCKASGYTFTGYFMHWVKQSPGQSLEWIGRIHPYDGDTFYNQKFQGKATLTVDKSSNTAHMELLSLTSEDFAVYYCTRYDGSRAMDYWGQGTTVTVSSTRIQNPDPAVYQLRDSKSSDKSVCLFTDFDSQTNVSQSKDSDVYITDKCVLDMRSMDFKSNSAVAWSNKSDFACANAFNNSIIPEDTFFPSPESSCDVKLVEKSFETDTNLNFQNLSVIGFRILLLKVAGFNLLMTLRLWSS

SEQ ID NO: 45440 - protein, 770 aa, synthetic construct
MALPVTALLLPLALLLHAARPDIVLTQSPLSLAVSLGQPAIISCRASQSVSFAGTSLMHWYHQKPGQQPRLLIYRASNLEAGVPDRFSGSGSKTDFTLTISPVEAEDAATYYCQQSREYPYTFGGGTKLEIKRLEDLKNVFPPEVAVFEPSEAEISHTQKATLVCLATGFYPDHVELSWWVNGKEVHSGVCTDPQPLKEQPALNDSRYCLSSRLRVSATFWQNPRNHFRCQVQFYGLSENDEWTQDRAKPVTQIVSAEAWGRADCGFTSESYQQGVLSATILYEILLGKATLYAVLVSALVLMAMVKRKDSRGRAKRSGSGATNFSLLKQAGDVEENPGPTSTMDWIWRILFLVGAATGAHSGPEVQLVESGGGSVQAGGSLRLSCAASGYTYSINCMGWFRQAPGKEREGVAAISTGGGRTDYRDSVKGRFTISQDNAKNTVYLQMNSLKPEDTAMYYCAGKTTYPGYGCGLGRSAYNYWGQGTQVTVSSGSGGGGSGGGGSGGGGSFEQVQLVQSGAEVVKPGASVKISCKASGYTFTGYFMHWVKQSPGQSLEWIGRIHPYDGDTFYNQKFQGKATLTVDKSSNTAHMELLSLTSEDFAVYYCTRYDGSRAMDYWGQGTTVTVSSTRIQNPDPAVYQLRDSKSSDKSVCLFTDFDSQTNVSQSKDSDVYITDKCVLDMRSMDFKSNSAVAWSNKSDFACANAFNNSIIPEDTFFPSPESSCDVKLVEKSFETDTNLNFQNLSVIGFRILLLKVAGFNLLMTLRLWSS

SEQ ID NO: 45441 - protein, 623 aa, synthetic construct
MALPVTALLLPLALLLHAARPDIVLTQSPLSLAVSLGQPAIISCRASQSVSFAGTSLMHWYHQKPGQQPRLLIYRASNLEAGVPDRFSGSGSKTDFTLTISPVEAEDAATYYCQQSREYPYTFGGGTKLEIKRLEDLKHVFPPEVAVFEPSDAEIWHTQKATLVCLATGFYPDHVELSWWVNGKEVHSGVSTDPQPLKEQPALNDSRYCLSSRLRVSATFWQNPRNHFRCQVQFYGLSENDEWTQDRAKPVTQIVSAEAWGRADCGFTSESYQQGVLSATILYEILLGKATLYAVLVSALVLMAMVKRKDSRGRAKRSGSGATNFSLLKQAGDVEENPGPTSMDWIWRILFLVGAATGAHSFEQVQLVQSGAEVVKPGASVKISCKASGYTFTGYFMHWVKQSPGQSLEWIGRIHPYDGDTFYNQKFQGKATLTVDKSSNTAHMELLSLTSEDFAVYYCTRYDGSRAMDYWGQGTTVTVSSTRIQNPDPAVYQLRDSKSSDKSVCLFTDFDSQTNVSQSKDSDVYITDKTVLDMRSMDFKSNSAVAWSSKSDFACANAFNNSIIPEDTFFPSPEMACDVKLVEKSFETDTNLNFQNLLVIWLRILLLKVAGFNLLMTLRLWSS

SEQ ID NO: 45442 - protein, 623 aa, synthetic construct
MALPVTALLLPLALLLHAARPDIVLTQSPLSLAVSLGQPAIISCRASQSVSFAGTSLMHWYHQKPGQQPRLLIYRASNLEAGVPDRFSGSGSKTDFTLTISPVEAEDAATYYCQQSREYPYTFGGGTKLEIKRLEDLKHVFPPEVAVFEPSDAEIWHTQKATLVCLATGFYPDHVELSWWVNGKEVHSGVSTDPQPLKEQPALNDSRYCLSSRLRVSATFWQNPRNHFRCQVQFYGLSENDEWTQDRAKPVTQIVSAEAWGRADCGFTSESYQQGVLSATILYEILLGKATLYAVLVSALVLMAMVKRKDSRGRAKRSGSGATNFSLLKQAGDVEENPGPTSMDWIWRILFLVGAATGAHSFEQVQLVQSGAEVVKPGASVKISCKASGYTFTGYFMHWVKQSPGQSLEWIGRIHPYDGDTFYNQKFQGKATLTVDKSSNTAHMELLSLTSEDFAVYYCTRYDGSRAMDYWGQGTTVTVSSTRIQNPDPAVYQLRDSKSSDKSVCLFTDFDSQTNVSQSKDSDVYITDKTVLDMRSMDFKSNSAVAWSTKSDFACANAFNNSIIPEDTFFPSPEVVCDVKLVEKSFETDTNLNFQNLVVIGARILLLKVAGFNLLMTLRLWSS

SEQ ID NO: 45443 - protein, 623 aa, synthetic construct
MALPVTALLLPLALLLHAARPDIVLTQSPLSLAVSLGQPAIISCRASQSVSFAGTSLMHWYHQKPGQQPRLLIYRASNLEAGVPDRFSGSGSKTDFTLTISPVEAEDAATYYCQQSREYPYTFGGGTKLEIKRLEDLKNVFPPEVAVFEPSKAEISRTQKATLVCLATGFYPPHVELSWWVNGKEVHDGVCTDPQPLKEQPALNDSRYCLSSRLRVSATFWQNPRNHFRCQVQFYGLSENDEWTQDRAKPVTQIVSAEAWGRADCGFTSESYQQGVLSATILYEILLGKATLYAVLVSALVLMAMVKRKDSRGRAKRSGSGATNFSLLKQAGDVEENPGPTSMDWIWRILFLVGAATGAHSFEQVQLVQSGAEVVKPGASVKISCKASGYTFTGYFMHWVKQSPGQSLEWIGRIHPYDGDTFYNQKFQGKATLTVDKSSNTAHMELLSLTSEDFAVYYCTRYDGSRAMDYWGQGTTVTVSSTRIQNPDPAVYQLRDSKSSDKFVCLFTDFDSQINVSQSKDSDVYITDKCVLDMRSMDFKSNSAVAWSNKSDFTCANAFNNSIIPEDTFFPSPESSCDVKLVEKSFETDTNLNFQNLSVIGFRILLLKVAGFNLLMTLRLWSS

SEQ ID NO: 45444 - protein, 765 aa, synthetic construct
MALPVTALLLPLALLLHAARPDIVLTQSPLSLAVSLGQPAIISCRASQSVSFAGTSLMHWYHQKPGQQPRLLIYRASNLEAGVPDRFSGSGSKTDFTLTISPVEAEDAATYYCQQSREYPYTFGGGTKLEIKRLEDLKNVFPPEVAVFEPSEAEISHTQKATLVCLATGFYPDHVELSWWVNGKEVHSGVCTDPQPLKEQPALNDSRYCLSSRLRVSATFWQNPRNHFRCQVQFYGLSENDEWTQDRAKPVTQIVSAEAWGRADCGFTSESYQQGVLSATILYEILLGKATLYAVLVSALVLMAMVKRKDSRGRAKRSGSGATNFSLLKQAGDVEENPGPTSTMDWIWRILFLVGAATGAHSGPQVQLQESGPGLVKPSQTLSLTCTVSGASITTGEYYWNWFRQPPGKGLEWMGAIAASGSTTYSPSFESRTSISRDTSKNQFSLKLSSVTAADTAVYYCGRSFGVAAVTTGQNRGQGTLVTVSSGSGGGGSGGGGSGGGGSFEQVQLVQSGAEVVKPGASVKISCKASGYTFTGYFMHWVKQSPGQSLEWIGRIHPYDGDTFYNQKFQGKATLTVDKSSNTAHMELLSLTSEDFAVYYCTRYDGSRAMDYWGQGTTVTVSSTRIQNPDPAVYQLRDSKSSDKSVCLFTDFDSQTNVSQSKDSDVYITDKCVLDMRSMDFKSNSAVAWSNKSDFACANAFNNSIIPEDTFFPSPESSCDVKLVEKSFETDTNLNFQNLSVIGFRILLLKVAGFNLLMTLRLWSS

SEQ ID NO: 45445 - protein, 906 aa, synthetic construct
MALPVTALLLPLALLLHAARPQVQLQESGPGLVKPSQTLSLTCTVSGGSITTGEFYWNWFRQPPGKGLEWMGAIAASGSTTYSPSFESRTSISRDTSKNQFSLKLSSVTAADTAVYYCGRSFGVAAVTTGQNRGQGTLVTVSSGTGGGGSGGGGSGGGGSEFDIVLTQSPLSLAVSLGQPAIISCRASQSVSFAGTSLMHWYHQKPGQQPRLLIYRASNLEAGVPDRFSGSGSKTDFTLTISPVEAEDAATYYCQQSREYPYTFGGGTKLEIKRLEIQNPDPAVYQLRDSKSSDKSVCLFTDFDSQTNVSQSKDSDVYITDKCVLDMRSMDFKSNSAVAWSNKSDFACANAFNNSIIPEDTFFPSSDVPCDVKLVEKSFETDTNLNFQNLSVIGFRILLLKVAGFNLLMTLRLWSSRAKRSGSGVKQTLNFDLLKLAGDVESNPGPTSTMDWIWRILFLVGAATGAHSGPEVQLVESGGGLVQPGGSLRLSCAASGRTFTMGWYRQAPGKEREFVAAISLSPTLAYYADSVKGRFTISRDNSKNTVVLQMNSLRAEDTALYYCAADRKSVMSIRPDYWGQGTLVTVSSGSGGGGSGGGGSGGGGSFEQVQLVQSGAEVVKPGASVKISCKASGYTFTGYFMHWVKQSPGQSLEWIGRIHPYDGDTFYNQKFQGKATLTVDKSSNTAHMELLSLTSEDFAVYYCTRYDGSRAMDYWGQGTTVTVSSTREDLKNVFPPEVAVFEPSKAEIAHTQKATLVCLATGFYPDHVELSWWVNGKEVHSGVCTDPQPLKEQPALNDSRYCLSSRLRVSATFWQNPRNHFRCQVQFYGLSENDEWTQDRAKPVTQIVSAEAWGRADCGITSASYHQGVLSATILYEILLGKATLYAVLVSALVLMAMVKRKDSRG

SEQ ID NO: 45446 - protein, 769 aa, synthetic construct
MALPVTALLLPLALLLHAARPQVQLQESGPGLVKPSQTLSLTCTVSGGSITTGEFYWNWFRQPPGKGLEWMGAIAASGSTTYSPSFESRTSISRDTSKNQFSLKLSSVTAADTAVYYCGRSFGVAAVTTGQNRGQGTLVTVSSGTGGGGSGGGGSGGGGSEFDIVLTQSPLSLAVSLGQPAIISCRASQSVSFAGTSLMHWYHQKPGQQPRLLIYRASNLEAGVPDRFSGSGSKTDFTLTISPVEAEDAATYYCQQSREYPYTFGGGTKLEIKRLEIQNPDPAVYQLRDSKSSDKSVCLFTDFDSQTNVSQSKDSDVYITDKCVLDMRSMDFKSNSAVAWSNKSDFACANAFNNSIIPEDTFFPSSDVPCDVKLVEKSFETDTNLNFQNLSVIGFRILLLKVAGFNLLMTLRLWSSRAKRSGSGVKQTLNFDLLKLAGDVESNPGPTSTMDWIWRILFLVGAATGAHSFEQVQLVQSGAEVVKPGASVKISCKASGYTFTGYFMHWVKQSPGQSLEWIGRIHPYDGDTFYNQKFQGKATLTVDKSSNTAHMELLSLTSEDFAVYYCTRYDGSRAMDYWGQGTTVTVSSTREDLKNVFPPEVAVFEPSKAEIAHTQKATLVCLATGFYPDHVELSWWVNGKEVHSGVCTDPQPLKEQPALNDSRYCLSSRLRVSATFWQNPRNHFRCQVQFYGLSENDEWTQDRAKPVTQIVSAEAWGRADCGITSASYHQGVLSATILYEILLGKATLYAVLVSALVLMAMVKRKDSRG

SEQ ID NO: 45447 - protein, 902 aa, synthetic construct
MALPVTALLLPLALLLHAARPEVQLVESGGGLVQAGGSLRLSCAASGRTFSMGWFRQAPGKEREFVAAITYSGGSPYYADSVKGRFTISRDNAKNTVYLQMNSLKPEDTAVYYCAANPTYGSDWNAENWGQGTQVTVSSGTGGGGSGGGGSGGGGSEFDIVLTQSPLSLAVSLGQPAIISCRASQSVSFAGTSLMHWYHQKPGQQPRLLIYRASNLEAGVPDRFSGSGSKTDFTLTISPVEAEDAATYYCQQSREYPYTFGGGTKLEIKRLEDLKNVFPPEVAVFEPSEAEISHTQKATLVCLATGFYPDHVELSWWVNGKEVHSGVCTDPQPLKEQPALNDSRYCLSSRLRVSATFWQNPRNHFRCQVQFYGLSENDEWTQDRAKPVTQIVSAEAWGRADCGFTSESYQQGVLSATILYEILLGKATLYAVLVSALVLMAMVKRKDSRGRAKRSGSGATNFSLLKQAGDVEENPGPTSTMDWIWRILFLVGAATGAHSGPQVQLQESGPGLVKPSQTLSLTCTVSGASITTGEYYWNWFRQPPGKGLEWMGAIAASGSTTYSPSFESRTSISRDTSKNQFSLKLSSVTAADTAVYYCGRSFGVAAVTTGQNRGQGTLVTVSSGSGGGGSGGGGSGGGGSFEQVQLVQSGAEVVKPGASVKISCKASGYTFTGYFMHWVKQSPGQSLEWIGRIHPYDGDTFYNQKFQGKATLTVDKSSNTAHMELLSLTSEDFAVYYCTRYDGSRAMDYWGQGTTVTVSSTRIQNPDPAVYQLRDSKSSDKSVCLFTDFDSQTNVSQSKDSDVYITDKCVLDMRSMDFKSNSAVAWSNKSDFACANAFNNSIIPEDTFFPSPESSCDVKLVEKSFETDTNLNFQNLSVIGFRILLLKVAGFNLLMTLRLWSS

SEQ ID NO: 45448 - protein, 909 aa, synthetic construct
MALPVTALLLPLALLLHAARPEVQLVESGGGLVQAGGSLRLSCAASGRTFSMGWFRQAPGKEREFVAAITYSGGSPYYADSVKGRFTISRDNAKNTVYLQMNSLKPEDTAVYYCAANPTYGSDWNAENWGQGTQVTVSSGTGGGGSGGGGSGGGGSEFDIVLTQSPLSLAVSLGQPAIISCRASQSVSFAGTSLMHWYHQKPGQQPRLLIYRASNLEAGVPDRFSGSGSKTDFTLTISPVEAEDAATYYCQQSREYPYTFGGGTKLEIKRLEIQNPDPAVYQLRDSKSSDKSVCLFTDFDSQTNVSQSKDSDVYITDKCVLDMRSMDFKSNSAVAWSNKSDFACANAFNNSIIPEDTFFPSSDVPCDVKLVEKSFETDTNLNFQNLSVIGFRILLLKVAGFNLLMTLRLWSSRAKRSGSGVKQTLNFDLLKLAGDVESNPGPTSTMDWIWRILFLVGAATGAHSGPQVQLVESGGGLVQPGGSLRLSCAASGNINSRNCMGWFRQAPGKGREGVAAIGQVTGRTYYVDSVKGRFTISLDNSKNTLYLQMNSLRAEDTAVYYCAAAPGCLLSALRSADYRNWGQGTLVTVSSGSGGGGSGGGGSGGGGSFEQVQLVQSGAEVVKPGASVKISCKASGYTFTGYFMHWVKQSPGQSLEWIGRIHPYDGDTFYNQKFQGKATLTVDKSSNTAHMELLSLTSEDFAVYYCTRYDGSRAMDYWGQGTTVTVSSTREDLKNVFPPEVAVFEPSKAEIAHTQKATLVCLATGFYPDHVELSWWVNGKEVHSGVCTDPQPLKEQPALNDSRYCLSSRLRVSATFWQNPRNHFRCQVQFYGLSENDEWTQDRAKPVTQIVSAEAWGRADCGITSASYHQGVLSATILYEILLGKATLYAVLVSALVLMAMVKRKDSRG

SEQ ID NO: 45449 - protein, 905 aa, synthetic construct
MALPVTALLLPLALLLHAARPEVQLVESGGGLVQAGGSLRLSCAASGRTFSMGWFRQAPGKEREFVAAITYSGGSPYYADSVKGRFTISRDNAKNTVYLQMNSLKPEDTAVYYCAANPTYGSDWNAENWGQGTQVTVSSGTGGGGSGGGGSGGGGSEFDIVLTQSPLSLAVSLGQPAIISCRASQSVSFAGTSLMHWYHQKPGQQPRLLIYRASNLEAGVPDRFSGSGSKTDFTLTISPVEAEDAATYYCQQSREYPYTFGGGTKLEIKRLEDLKNVFPPEVAVFEPSEAEISHTQKATLVCLATGFYPDHVELSWWVNGKEVHSGVCTDPQPLKEQPALNDSRYCLSSRLRVSATFWQNPRNHFRCQVQFYGLSENDEWTQDRAKPVTQIVSAEAWGRADCGFTSESYQQGVLSATILYEILLGKATLYAVLVSALVLMAMVKRKDSRGRAKRSGSGATNFSLLKQAGDVEENPGPTSTMDWIWRILFLVGAATGAHSGPQVQLVESGGGLVQPGGSLRLSCAASGNINSRNCMGWFRQAPGKGREGVAAIGQVTGRTYYVDSVKGRFTISLDNSKNTLYLQMNSLRAEDTAVYYCAAAPGCLLSALRSADYRNWGQGTLVTVSSGSGGGGSGGGGSGGGGSFEQVQLVQSGAEVVKPGASVKISCKASGYTFTGYFMHWVKQSPGQSLEWIGRIHPYDGDTFYNQKFQGKATLTVDKSSNTAHMELLSLTSEDFAVYYCTRYDGSRAMDYWGQGTTVTVSSTRIQNPDPAVYQLRDSKSSDKSVCLFTDFDSQTNVSQSKDSDVYITDKCVLDMRSMDFKSNSAVAWSNKSDFACANAFNNSIIPEDTFFPSPESSCDVKLVEKSFETDTNLNFQNLSVIGFRILLLKVAGFNLLMTLRLWSS

SEQ ID NO: 45450 - protein, 905 aa, synthetic construct
MALPVTALLLPLALLLHAARPEVQLVESGGGLVQAGGSLRLSCAASGRTFTMGWFRQAPGKEREFVAAISLSPTLAYYADSVKGRFTISRDNAKNTVVLQMNSLKPEDTALYYCAADRKSVMSIRPDYWGQGTQVTVSSGTGGGGSGGGGSGGGGSEFDIVLTQSPLSLAVSLGQPAIISCRASQSVSFAGTSLMHWYHQKPGQQPRLLIYRASNLEAGVPDRFSGSGSKTDFTLTISPVEAEDAATYYCQQSREYPYTFGGGTKLEIKRLEDLKNVFPPEVAVFEPSEAEISHTQKATLVCLATGFYPDHVELSWWVNGKEVHSGVCTDPQPLKEQPALNDSRYCLSSRLRVSATFWQNPRNHFRCQVQFYGLSENDEWTQDRAKPVTQIVSAEAWGRADCGFTSESYQQGVLSATILYEILLGKATLYAVLVSALVLMAMVKRKDSRGRAKRSGSGATNFSLLKQAGDVEENPGPTSTMDWIWRILFLVGAATGAHSGPQVQLVESGGGLVQPGGSLRLSCAASGNINSRNCMGWFRQAPGKGREGVAAIGQVTGRTYYVDSVKGRFTISLDNSKNTLYLQMNSLRAEDTAVYYCAAAPGCLLSALRSADYRNWGQGTLVTVSSGSGGGGSGGGGSGGGGSFEQVQLVQSGAEVVKPGASVKISCKASGYTFTGYFMHWVKQSPGQSLEWIGRIHPYDGDTFYNQKFQGKATLTVDKSSNTAHMELLSLTSEDFAVYYCTRYDGSRAMDYWGQGTTVTVSSTRIQNPDPAVYQLRDSKSSDKSVCLFTDFDSQTNVSQSKDSDVYITDKCVLDMRSMDFKSNSAVAWSNKSDFACANAFNNSIIPEDTFFPSPESSCDVKLVEKSFETDTNLNFQNLSVIGFRILLLKVAGFNLLMTLRLWSS

SEQ ID NO: 45451 - protein, 909 aa, synthetic construct
MALPVTALLLPLALLLHAARPQVQLQESGPGLVKPSQTLSLTCTVSGGSITTGEFYWNWFRQPPGKGLEWMGAIAASGSTTYSPSFESRTSISRDTSKNQFSLKLSSVTAADTAVYYCGRSFGVAAVTTGQNRGQGTLVTVSSGTGGGGSGGGGSGGGGSEFDIVLTQSPLSLAVSLGQPAIISCRASQSVSFAGTSLMHWYHQKPGQQPRLLIYRASNLEAGVPDRFSGSGSKTDFTLTISPVEAEDAATYYCQQSREYPYTFGGGTKLEIKRLEDLKNVFPPEVAVFEPSEAEISHTQKATLVCLATGFYPDHVELSWWVNGKEVHSGVCTDPQPLKEQPALNDSRYCLSSRLRVSATFWQNPRNHFRCQVQFYGLSENDEWTQDRAKPVTQIVSAEAWGRADCGFTSESYQQGVLSATILYEILLGKATLYAVLVSALVLMAMVKRKDSRGRAKRSGSGATNFSLLKQAGDVEENPGPTSTMDWIWRILFLVGAATGAHSGPQVQLVESGGGLVQPGGSLRLSCAASGNINSRNCMGWFRQAPGKGREGVAAIGQVTGRTYYVDSVKGRFTISLDNSKNTLYLQMNSLRAEDTAVYYCAAAPGCLLSALRSADYRNWGQGTLVTVSSGSGGGGSGGGGSGGGGSFEQVQLVQSGAEVVKPGASVKISCKASGYTFTGYFMHWVKQSPGQSLEWIGRIHPYDGDTFYNQKFQGKATLTVDKSSNTAHMELLSLTSEDFAVYYCTRYDGSRAMDYWGQGTTVTVSSTRIQNPDPAVYQLRDSKSSDKSVCLFTDFDSQTNVSQSKDSDVYITDKCVLDMRSMDFKSNSAVAWSNKSDFACANAFNNSIIPEDTFFPSPESSCDVKLVEKSFETDTNLNFQNLSVIGFRILLLKVAGFNLLMTLRLWSS

SEQ ID NO: 45452 - protein, 482 aa, synthetic construct
MALPVTALLLPLALLLHAARPDIQMTQSPSSLSASVGDRVTITCKASQSVSNDVTWYQQKPGQAPKLLIYSASNRYSGVPARFSGSGYGTEFTFTISSVQSEDFAVYFCQQDYSSFGQGTKLEIKRGGGGSGGGGSGGGGSQVQLVESGPGVVQPGRSLRISCAVSGFSVTNYGVHWVRQPPGKGLEWLGVIWAGGITNYNSAFMSRLTISKDNSKNTVYLQMNSLRAEDTAMYYCASRGGHYGYALDYWGQGTLVTVSSTRKIEVMYPPPYLDNEKSNGTIIHVKGKHLCPSPLFPGPSKPFWVLVVVGGVLACYSLLVTVAFIIFWVRSKRSRLLHSDYMNMTPRRPGPTRKHYQPYAPPRDFAAYRSRVKFSRSADAPAYQQGQNQLYNELNLGRREEYDVLDKRRGRDPEMGGKPRRKNPQEGLYNELQKDKMAEAYSEIGMKGERRRGKGHDGLYQGLSTATKDTYDALHMQALPPR

SEQ ID NO: 45453 - protein, 488 aa, synthetic construct
MALPVTALLLPLALLLHAARPDIQMTQSPSSLSASVGDRVTITCKASQSVSNDVTWYQQKPGQAPKLLIYSASNRYSGVPARFSGSGYGTEFTFTISSVQSEDFAVYFCQQDYSSFGQGTKLEIKRGGGGSGGGGSGGGGSQVQLVESGPGVVQPGRSLRISCAVSGFSVTNYGVHWVRQPPGKGLEWLGVIWAGGITNYNSAFMSRLTISKDNSKNTVYLQMNSLRAEDTAMYYCASRGGHYGYALDYWGQGTLVTVSSTRAKPTTTPAPRPPTPAPTIASQPLSLRPEACRPAAGGAVHTRGLDFACDIYIWAPLAGTCGVLLLSLVITLYCKRGRKKLLYIFKQPFMRPVQTTQEEDGCSCRFPEEEEGGCELRVKFSRSADAPAYQQGQNQLYNELNLGRREEYDVLDKRRGRDPEMGGKPRRKNPQEGLYNELQKDKMAEAYSEIGMKGERRRGKGHDGLYQGLSTATKDTYDALHMQALPPR

SEQ ID NO: 45454 - protein, 488 aa, synthetic construct
MALPVTALLLPLALLLHAARPQVQLVESGPGVVQPGRSLRISCAVSGFSVTNYGVHWVRQPPGKGLEWLGVIWAGGITNYNSAFMSRLTISKDNSKNTVYLQMNSLRAEDTAMYYCASRGGHYGYALDYWGQGTLVTVSSGGGGSGGGGSGGGGSDIQMTQSPSSLSASVGDRVTITCKASQSVSNDVTWYQQKPGQAPKLLIYSASNRYSGVPARFSGSGYGTEFTFTISSVQSEDFAVYFCQQDYSSFGQGTKLEIKRTRAKPTTTPAPRPPTPAPTIASQPLSLRPEACRPAAGGAVHTRGLDFACDIYIWAPLAGTCGVLLLSLVITLYCKRGRKKLLYIFKQPFMRPVQTTQEEDGCSCRFPEEEEGGCELRVKFSRSADAPAYQQGQNQLYNELNLGRREEYDVLDKRRGRDPEMGGKPRRKNPQEGLYNELQKDKMAEAYSEIGMKGERRRGKGHDGLYQGLSTATKDTYDALHMQALPPR

SEQ ID NO: 45455 - protein, 621 aa, synthetic construct
MALPVTALLLPLALLLHAARPDIQMTQSPSSLSASVGDRVTITCKASQSVSNDVTWYQQKPGQAPKLLIYSASNRYSGVPARFSGSGYGTEFTFTISSVQSEDFAVYFCQQDYSSFGQGTKLEIKRLEIQNPDPAVYQLRDSKSSDKSVCLFTDFDSQTNVSQSKDSDVYITDKCVLDMRSMDFKSNSAVAWSNKSDFACANAFNNSIIPEDTFFPSSDVPCDVKLVEKSFETDTNLNFQNLSVIGFRILLLKVAGFNLLMTLRLWSSRAKRSGSGVKQTLNFDLLKLAGDVESNPGPTSMDWIWRILFLVGAATGAHSFEQVQLVESGPGVVQPGRSLRISCAVSGFSVTNYGVHWVRQPPGKGLEWLGVIWAGGITNYNSAFMSRLTISKDNSKNTVYLQMNSLRAEDTAMYYCASRGGHYGYALDYWGQGTLVTVSSTREDLKNVFPPEVAVFEPSKAEIAHTQKATLVCLATGFYPDHVELSWWVNGKEVHSGVCTDPQPLKEQPALNDSRYCLSSRLRVSATFWQNPRNHFRCQVQFYGLSENDEWTQDRAKPVTQIVSAEAWGRADCGITSASYHQGVLSATILYEILLGKATLYAVLVSALVLMAMVKRKDSRG

SEQ ID NO: 45456 - protein, 617 aa, synthetic construct
MALPVTALLLPLALLLHAARPDIQMTQSPSSLSASVGDRVTITCKASQSVSNDVTWYQQKPGQAPKLLIYSASNRYSGVPARFSGSGYGTEFTFTISSVQSEDFAVYFCQQDYSSFGQGTKLEIKRLEDLKNVFPPEVAVFEPSKAEIAHTQKATLVCLATGFYPDHVELSWWVNGKEVHSGVCTDPQPLKEQPALNDSRYCLSSRLRVSATFWQNPRNHFRCQVQFYGLSENDEWTQDRAKPVTQIVSAEAWGRADCGITSASYHQGVLSATILYEILLGKATLYAVLVSALVLMAMVKRKDSRGRAKRSGSGATNFSLLKQAGDVEENPGPTSMDWIWRILFLVGAATGAHSFEQVQLVESGPGVVQPGRSLRISCAVSGFSVTNYGVHWVRQPPGKGLEWLGVIWAGGITNYNSAFMSRLTISKDNSKNTVYLQMNSLRAEDTAMYYCASRGGHYGYALDYWGQGTLVTVSSTRIQNPDPAVYQLRDSKSSDKSVCLFTDFDSQTNVSQSKDSDVYITDKCVLDMRSMDFKSNSAVAWSNKSDFACANAFNNSIIPEDTFFPSSDVPCDVKLVEKSFETDTNLNFQNLSVIGFRILLLKVAGFNLLMTLRLWSS

SEQ ID NO: 45457 - protein, 617 aa, synthetic construct
MALPVTALLLPLALLLHAARPDIQMTQSPSSLSASVGDRVTITCKASQSVSNDVTWYQQKPGQAPKLLIYSASNRYSGVPARFSGSGYGTEFTFTISSVQSEDFAVYFCQQDYSSFGQGTKLEIKRLEDLKNVFPPEVAVFEPSEAEISHTQKATLVCLATGFYPDHVELSWWVNGKEVHSGVCTDPQPLKEQPALNDSRYCLSSRLRVSATFWQNPRNHFRCQVQFYGLSENDEWTQDRAKPVTQIVSAEAWGRADCGFTSESYQQGVLSATILYEILLGKATLYAVLVSALVLMAMVKRKDSRGRAKRSGSGATNFSLLKQAGDVEENPGPTSMDWIWRILFLVGAATGAHSFEQVQLVESGPGVVQPGRSLRISCAVSGFSVTNYGVHWVRQPPGKGLEWLGVIWAGGITNYNSAFMSRLTISKDNSKNTVYLQMNSLRAEDTAMYYCASRGGHYGYALDYWGQGTLVTVSSTRIQNPDPAVYQLRDSKSSDKSVCLFTDFDSQTNVSQSKDSDVYITDKCVLDMRSMDFKSNSAVAWSNKSDFACANAFNNSIIPEDTFFPSPESSCDVKLVEKSFETDTNLNFQNLSVIGFRILLLKVAGFNLLMTLRLWSS

SEQ ID NO: 45458 - protein, 621 aa, synthetic construct
MALPVTALLLPLALLLHAARPDIQMTQSPSSLSASVGDRVTITCKASQSVSNDVTWYQQKPGQAPKLLIYSASNRYSGVPARFSGSGYGTEFTFTISSVQSEDFAVYFCQQDYSSFGQGTKLEIKRLEIQNPDPAVYQLRDSKSSDKSVCLFTDFDSQTNVSQSKDSDVYITDKCVLDMRSMDFKSNSAVAWSNKSDFACANAFNNSIIPEDTFFPSPESSCDVKLVEKSFETDTNLNFQNLSVIGFRILLLKVAGFNLLMTLRLWSSRAKRSGSGVKQTLNFDLLKLAGDVESNPGPTSMDWIWRILFLVGAATGAHSFEQVQLVESGPGVVQPGRSLRISCAVSGFSVTNYGVHWVRQPPGKGLEWLGVIWAGGITNYNSAFMSRLTISKDNSKNTVYLQMNSLRAEDTAMYYCASRGGHYGYALDYWGQGTLVTVSSTREDLKNVFPPEVAVFEPSEAEISHTQKATLVCLATGFYPDHVELSWWVNGKEVHSGVCTDPQPLKEQPALNDSRYCLSSRLRVSATFWQNPRNHFRCQVQFYGLSENDEWTQDRAKPVTQIVSAEAWGRADCGFTSESYQQGVLSATILYEILLGKATLYAVLVSALVLMAMVKRKDSRG

SEQ ID NO: 45459 - protein, 633 aa, synthetic construct
MALPVTALLLPLALLLHAARPLEEDLKNVFPPEVAVFEPSKAEIAHTQKATLVCLATGFYPDHVELSWWVNGKEVHSGVCTDPQPLKEQPALNDSRYCLSSRLRVSATFWQNPRNHFRCQVQFYGLSENDEWTQDRAKPVTQIVSAEAWGRADCGITSASYHQGVLSATILYEILLGKATLYAVLVSALVLMAMVKRKDSRGRAKRSGSGATNFSLLKQAGDVEENPGPTSMALPVTALLLPLALLLHAARPDIQMTQSPSSLSASVGDRVTITCKASQSVSNDVTWYQQKPGQAPKLLIYSASNRYSGVPARFSGSGYGTEFTFTISSVQSEDFAVYFCQQDYSSFGQGTKLEIKRGGGGSGGGGSGGGGSQVQLVESGPGVVQPGRSLRISCAVSGFSVTNYGVHWVRQPPGKGLEWLGVIWAGGITNYNSAFMSRLTISKDNSKNTVYLQMNSLRAEDTAMYYCASRGGHYGYALDYWGQGTLVTVSSTRIQNPDPAVYQLRDSKSSDKSVCLFTDFDSQTNVSQSKDSDVYITDKCVLDMRSMDFKSNSAVAWSNKSDFACANAFNNSIIPEDTFFPSSDVPCDVKLVEKSFETDTNLNFQNLSVIGFRILLLKVAGFNLLMTLRLWSS

SEQ ID NO: 45460 - protein, 640 aa, synthetic construct
MALPVTALLLPLALLLHAARPLEGSGDRPDPAVYQLRDSKSSDKSVCLFTDFDSQTNVSQSKDSDVYITDKCVLDMRSMDFKSNSAVAWSNKSDFACANAFNNSIIPEDTFFPSPESSCDVKLVEKSFETDTNLNFQNLSVIGFRILLLKVAGFNLLMTLRLWSSSSRAKRSGSGVKQTLNFDLLKLAGDVESNPGPTSMALPVTALLLPLALLLHAARPDIQMTQSPSSLSASVGDRVTITCKASQSVSNDVTWYQQKPGQAPKLLIYSASNRYSGVPARFSGSGYGTEFTFTISSVQSEDFAVYFCQQDYSSFGQGTKLEIKRGGGGSGGGGSGGGGSQVQLVESGPGVVQPGRSLRISCAVSGFSVTNYGVHWVRQPPGKGLEWLGVIWAGGITNYNSAFMSRLTISKDNSKNTVYLQMNSLRAEDTAMYYCASRGGHYGYALDYWGQGTLVTVSSTREDLKNVFPPEVAVFEPSEAEISHTQKATLVCLATGFYPDHVELSWWVNGKEVHSGVCTDPQPLKEQPALNDSRYCLSSRLRVSATFWQNPRNHFRCQVQFYGLSENDEWTQDRAKPVTQIVSAEAWGRADCGFTSESYQQGVLSATILYEILLGKATLYAVLVSALVLMAMVKRKDSRG

SEQ ID NO: 45461 - protein, 617 aa, synthetic construct
MALPVTALLLPLALLLHAARPDIQMTQSPSSLSASVGDRVTITCKASQSVSNDVTWYQQKPGQAPKLLIYSASNRYSGVPARFSGSGYGTEFTFTISSVQSEDFAVYFCQQDYSSFGQGTKLEIKRLEDLKNVFPPEVAVFEPSEAEISHTQKATLVCLATGFYPDHVELSWWVNGKEVHSGVSTDPQPLKEQPALNDSRYCLSSRLRVSATFWQNPRNHFRCQVQFYGLSENDEWTQDRAKPVTQIVSAEAWGRADCGFTSESYQQGVLSATILYEILLGKATLYAVLVSALVLMAMVKRKDSRGRAKRSGSGATNFSLLKQAGDVEENPGPTSMDWIWRILFLVGAATGAHSFEQVQLVESGPGVVQPGRSLRISCAVSGFSVTNYGVHWVRQPPGKGLEWLGVIWAGGITNYNSAFMSRLTISKDNSKNTVYLQMNSLRAEDTAMYYCASRGGHYGYALDYWGQGTLVTVSSTRIQNPDPAVYQLRDSKSSDKSVCLFTDFDSQTNVSQSKDSDVYITDKTVLDMRSMDFKSNSAVAWSNKSDFACANAFNNSIIPEDTFFPSPESSCDVKLVEKSFETDTNLNFQNLSVIGFRILLLKVAGFNLLMTLRLWSS

SEQ ID NO: 45462 - protein, 625 aa, synthetic construct
MALPVTALLLPLALLLHAARPDIQMTQSPSSLSASVGDRVTITCKASQSVSNDVTWYQQKPGQAPKLLIYSASNRYSGVPARFSGSGYGTEFTFTISSVQSEDFAVYFCQQDYSSFGQGTKLEIKRLEDKQLDADVSPKPTIFLPSIAETKLQKAGTYLCLLEKFFPDVIKIHWQEKKSNTILGSQEGNTMKTNDTYMKFSWLTVPEKSLDKEHRCIVRHENNKNGVDQEIIFPPIKTDVITMDPKDNCSKDANDTLLLQLTNTSAYYMYLLLLLKSVVYFAIITCCLLRRTAFCCNGEKSRAKRSGSGATNFSLLKQAGDVEENPGPTSMDWIWRILFLVGAATGAHSFEQVQLVESGPGVVQPGRSLRISCAVSGFSVTNYGVHWVRQPPGKGLEWLGVIWAGGITNYNSAFMSRLTISKDNSKNTVYLQMNSLRAEDTAMYYCASRGGHYGYALDYWGQGTLVTVSSTRSQPHTKPSVFVMKNGTNVACLVKEFYPKDIRINLVSSKKITEFDPAIVISPSGKYNAVKLGKYEDSNSVTCSVQHDNKTVHSTDFEVKTDSTDHVKPKETENTKQPSKSCHKPKAIVHTEKVNMMSLTVLGLRMLFAKTVAVNFLLTAKLFFL

SEQ ID NO: 45463 - protein, 625 aa, synthetic construct
MALPVTALLLPLALLLHAARPDIQMTQSPSSLSASVGDRVTITCKASQSVSNDVTWYQQKPGQAPKLLIYSASNRYSGVPARFSGSGYGTEFTFTISSVQSEDFAVYFCQQDYSSFGQGTKLEIKRLESQPHTKPSVFVMKNGTNVACLVKEFYPKDIRINLVSSKKITEFDPAIVISPSGKYNAVKLGKYEDSNSVTCSVQHDNKTVHSTDFEVKTDSTDHVKPKETENTKQPSKSCHKPKAIVHTEKVNMMSLTVLGLRMLFAKTVAVNFLLTAKLFFLRAKRSGSGATNFSLLKQAGDVEENPGPTSMDWIWRILFLVGAATGAHSFEQVQLVESGPGVVQPGRSLRISCAVSGFSVTNYGVHWVRQPPGKGLEWLGVIWAGGITNYNSAFMSRLTISKDNSKNTVYLQMNSLRAEDTAMYYCASRGGHYGYALDYWGQGTLVTVSSTRDKQLDADVSPKPTIFLPSIAETKLQKAGTYLCLLEKFFPDVIKIHWQEKKSNTILGSQEGNTMKTNDTYMKFSWLTVPEKSLDKEHRCIVRHENNKNGVDQEIIFPPIKTDVITMDPKDNCSKDANDTLLLQLTNTSAYYMYLLLLLKSVVYFAIITCCLLRRTAFCCNGEKS

SEQ ID NO: 45464 - protein, 640 aa, synthetic construct
MALPVTALLLPLALLLHAARPLEDKQLDADVSPKPTIFLPSIAETKLQKAGTYLCLLEKFFPDVIKIHWQEKKSNTILGSQEGNTMKTNDTYMKFSWLTVPEKSLDKEHRCIVRHENNKNGVDQEIIFPPIKTDVITMDPKDNCSKDANDTLLLQLTNTSAYYMYLLLLLKSVVYFAIITCCLLRRTAFCCNGEKSRAKRSGSGATNFSLLKQAGDVEENPGPTSMALPVTALLLPLALLLHAARPDIQMTQSPSSLSASVGDRVTITCKASQSVSNDVTWYQQKPGQAPKLLIYSASNRYSGVPARFSGSGYGTEFTFTISSVQSEDFAVYFCQQDYSSFGQGTKLEIKRGGGGSGGGGSGGGGSQVQLVESGPGVVQPGRSLRISCAVSGFSVTNYGVHWVRQPPGKGLEWLGVIWAGGITNYNSAFMSRLTISKDNSKNTVYLQMNSLRAEDTAMYYCASRGGHYGYALDYWGQGTLVTVSSTRSQPHTKPSVFVMKNGTNVACLVKEFYPKDIRINLVSSKKITEFDPAIVISPSGKYNAVKLGKYEDSNSVTCSVQHDNKTVHSTDFEVKTDSTDHVKPKETENTKQPSKSCHKPKAIVHTEKVNMMSLTVLGLRMLFAKTVAVNFLLTAKLFFL

SEQ ID NO: 45465 - protein, 794 aa, synthetic construct
MALPVTALLLPLALLLHAARPDIQMTQSPSSLSASVGDRVTITCKASQSVSNDVTWYQQKPGQAPKLLIYSASNRYSGVPARFSGSGYGTEFTFTISSVQSEDFAVYFCQQDYSSFGQGTKLEIKRGQPKANPTVTLFPPSSEELQANKATLVCLISDFYPGAVTVAWKADGSPVKAGVETTKPSKQSNNKYAASSYLSLTPEQWKSHRSYSCQVTHEGSTVEKTVAPTECSGSQSFGLLDPKLCYLLDGILFIYGVILTALFLRVKFSRSADAPAYQQGQNQLYNELNLGRREEYDVLDKRRGRDPEMGGKPQRRKNPQEGLYNELQKDKMAEAYSEIGMKGERRRGKGHDGLYQGLSTATKDTYDALHMQALPPRRAKRSGSGATNFSLLKQAGDVEENPGPTSMDWIWRILFLVGAATGAHSFEQVQLVESGPGVVQPGRSLRISCAVSGFSVTNYGVHWVRQPPGKGLEWLGVIWAGGITNYNSAFMSRLTISKDNSKNTVYLQMNSLRAEDTAMYYCASRGGHYGYALDYWGQGTLVTVSSASTKGPSVFPLAPSSKSTSGGTAALGCLVKDYFPEPVTVSWNSGALTSGVHTFPAVLQSSGLYSLSSVVTVPSSSLGTQTYICNVNHKPSNTKVDKRVEPKSCGTQSFGLLDPKLCYLLDGILFIYGVILTALFLRVKFSRSADAPAYQQGQNQLYNELNLGRREEYDVLDKRRGRDPEMGGKPQRRKNPQEGLYNELQKDKMAEAYSEIGMKGERRRGKGHDGLYQGLSTATKDTYDALHMQALPPR

SEQ ID NO: 45466 - protein, 813 aa, synthetic construct
MALPVTALLLPLALLLHAARPDIQMTQSPSSLSASVGDRVTITCKASQSVSNDVTWYQQKPGQAPKLLIYSASNRYSGVPARFSGSGYGTEFTFTISSVQSEDFAVYFCQQDYSSFGQGTKLEIKRLEDLKNVFPPEVAVFEPSEAEISHTQKATLVCLATGFYPDHVELSWWVNGKEVHSGVSTDPQPLKEQPALNDSRYCLSSRLRVSATFWQNPRNHFRCQVQFYGLSENDEWTQDRAKPVTQIVSAEAWGRADCGSQSFGLLDPKLCYLLDGILFIYGVILTALFLRVKFSRSADAPAYQQGQNQLYNELNLGRREEYDVLDKRRGRDPEMGGKPQRRKNPQEGLYNELQKDKMAEAYSEIGMKGERRRGKGHDGLYQGLSTATKDTYDALHMQALPPRRAKRSGSGATNFSLLKQAGDVEENPGPTSMDWIWRILFLVGAATGAHSFEQVQLVESGPGVVQPGRSLRISCAVSGFSVTNYGVHWVRQPPGKGLEWLGVIWAGGITNYNSAFMSRLTISKDNSKNTVYLQMNSLRAEDTAMYYCASRGGHYGYALDYWGQGTLVTVSSTRIQNPDPAVYQLRDSKSSDKSVCLFTDFDSQTNVSQSKDSDVYITDKTVLDMRSMDFKSNSAVAWSNKSDFACANAFNNSIIPEDTFFPSPESSCGTQSFGLLDPKLCYLLDGILFIYGVILTALFLRVKFSRSADAPAYQQGQNQLYNELNLGRREEYDVLDKRRGRDPEMGGKPQRRKNPQEGLYNELQKDKMAEAYSEIGMKGERRRGKGHDGLYQGLSTATKDTYDALHMQALPPR

SEQ ID NO: 45467 - protein, 855 aa, synthetic construct
MALPVTALLLPLALLLHAARPDIQMTQSPSSLSASVGDRVTITCKASQSVSNDVTWYQQKPGQAPKLLIYSASNRYSGVPARFSGSGYGTEFTFTISSVQSEDFAVYFCQQDYSSFGQGTKLEIKRLEEDLKNVFPPEVAVFEPSEAEISHTQKATLVCLATGFYPDHVELSWWVNGKEVHSGVSTDPQPLKEQPALNDSRYCLSSRLRVSATFWQNPRNHFRCQVQFYGLSENDEWTQDRAKPVTQIVSAEAWGRADCGSQSFGLLDPKLCYLLDGILFIYGVILTALFLRVKFSRSADAPAYQQGQNQLYNELNLGRREEYDVLDKRRGRDPEMGGKPQRRKNPQEGLYNELQKDKMAEAYSEIGMKGERRRGKGHDGLYQGLSTATKDTYDALHMQALPPRRAKRSGSGATNFSLLKQAGDVEENPGPTSMDWIWRILFLVGAATGAHSFEQVQLVESGPGVVQPGRSLRISCAVSGFSVTNYGVHWVRQPPGKGLEWLGVIWAGGITNYNSAFMSRLTISKDNSKNTVYLQMNSLRAEDTAMYYCASRGGHYGYALDYWGQGTLVTVSSTRIQNPDPAVYQLRDSKSSDKSVCLFTDFDSQTNVSQSKDSDVYITDKTVLDMRSMDFKSNSAVAWSNKSDFACANAFNNSIIPEDTFFPSPESSCGTQSFGLLDPKLCYLLDGILFIYGVILTALFLRSKRSRLLHSDYMNMTPRRPGPTRKHYQPYAPPRDFAAYRSRVKFSRSADAPAYQQGQNQLYNELNLGRREEYDVLDKRRGRDPEMGGKPQRRKNPQEGLYNELQKDKMAEAYSEIGMKGERRRGKGHDGLYQGLSTATKDTYDALHMQALPPR

SEQ ID NO: 45468 - protein, 898 aa, synthetic construct
MALPVTALLLPLALLLHAARPDIQMTQSPSSLSASVGDRVTITCKASQSVSNDVTWYQQKPGQAPKLLIYSASNRYSGVPARFSGSGYGTEFTFTISSVQSEDFAVYFCQQDYSSFGQGTKLEIKRLEEDLKNVFPPEVAVFEPSEAEISHTQKATLVCLATGFYPDHVELSWWVNGKEVHSGVSTDPQPLKEQPALNDSRYCLSSRLRVSATFWQNPRNHFRCQVQFYGLSENDEWTQDRAKPVTQIVSAEAWGRADCGSQSFGLLDPKLCYLLDGILFIYGVILTALFLKRGRKKLLYIFKQPFMRPVQTTQEEDGCSCRFPEEEEGGCELRVKFSRSADAPAYQQGQNQLYNELNLGRREEYDVLDKRRGRDPEMGGKPQRRKNPQEGLYNELQKDKMAEAYSEIGMKGERRRGKGHDGLYQGLSTATKDTYDALHMQALPPRRAKRSGSGATNFSLLKQAGDVEENPGPTSMDWIWRILFLVGAATGAHSFEQVQLVESGPGVVQPGRSLRISCAVSGFSVTNYGVHWVRQPPGKGLEWLGVIWAGGITNYNSAFMSRLTISKDNSKNTVYLQMNSLRAEDTAMYYCASRGGHYGYALDYWGQGTLVTVSSTRIQNPDPAVYQLRDSKSSDKSVCLFTDFDSQTNVSQSKDSDVYITDKTVLDMRSMDFKSNSAVAWSNKSDFACANAFNNSIIPEDTFFPSPESSCGTQSFGLLDPKLCYLLDGILFIYGVILTALFLKRGRKKLLYIFKQPFMRPVQTTQEEDGCSCRFPEEEEGGCELRVKFSRSADAPAYQQGQNQLYNELNLGRREEYDVLDKRRGRDPEMGGKPQRRKNPQEGLYNELQKDKMAEAYSEIGMKGERRRGKGHDGLYQGLSTATKDTYDALHMQALPPR

SEQ ID NO: 45469 - protein, 585 aa, synthetic construct
MALPVTALLLPLALLLHAARPDIQMTQSPSSLSASVGDRVTITCKASQSVSNDVTWYQQKPGQAPKLLIYSASNRYSGVPARFSGSGYGTEFTFTISSVQSEDFAVYFCQQDYSSFGQGTKLEIKRLEQSFGLLDPKLCYLLDGILFIYGVILTALFLRVKFSRSADAPAYQQGQNQLYNELNLGRREEYDVLDKRRGRDPEMGGKPQRRKNPQEGLYNELQKDKMAEAYSEIGMKGERRRGKGHDGLYQGLSTATKDTYDALHMQALPPRRAKRSGSGATNFSLLKQAGDVEENPGPTSMDWIWRILFLVGAATGAHSFEQVQLVESGPGVVQPGRSLRISCAVSGFSVTNYGVHWVRQPPGKGLEWLGVIWAGGITNYNSAFMSRLTISKDNSKNTVYLQMNSLRAEDTAMYYCASRGGHYGYALDYWGQGTLVTVSSTRQSFGLLDPKLCYLLDGILFIYGVILTALFLRVKFSRSADAPAYQQGQNQLYNELNLGRREEYDVLDKRRGRDPEMGGKPQRRKNPQEGLYNELQKDKMAEAYSEIGMKGERRRGKGHDGLYQGLSTATKDTYDALHMQALPPR

SEQ ID NO: 45470 - protein, 643 aa, synthetic construct
MALPVTALLLPLALLLHAARPDIQMTQSPSSLSASVGDRVTITCKASQSVSNDVTWYQQKPGQAPKLLIYSASNRYSGVPARFSGSGYGTEFTFTISSVQSEDFAVYFCQQDYSSFGQGTKLEIKRLEGQPKANPTVTLFPPSSEELQANKATLVCLISDFYPGAVTVAWKADGSPVKAGVETTKPSKQSNNKYAASSYLSLTPEQWKSHRSYSCQVTHEGSTVEKTVAPTECSPIKTDVITMDPKDNCSKDANDTLLLQLTNTSAYYMYLLLLLKSVVYFAIITCCLLRRTAFCCNGEKSRAKRSGSGATNFSLLKQAGDVEENPGPTSMDWIWRILFLVGAATGAHSFEQVQLVESGPGVVQPGRSLRISCAVSGFSVTNYGVHWVRQPPGKGLEWLGVIWAGGITNYNSAFMSRLTISKDNSKNTVYLQMNSLRAEDTAMYYCASRGGHYGYALDYWGQGTLVTVSSTRASTKGPSVFPLAPSSKSTSGGTAALGCLVKDYFPEPVTVSWNSGALTSGVHTFPAVLQSSGLYSLSSVVTVPSSSLGTQTYICNVNHKPSNTKVDKRVEPKSCEVKTDSTDHVKPKETENTKQPSKSCHKPKAIVHTEKVNMMSLTVLGLRMLFAKTVAVNFLLTAKLFFL

SEQ ID NO: 45471 - protein, 621 aa, synthetic construct
MALPVTALLLPLALLLHAARPDIQMTQSPSSLSASVGDRVTITCKASQSVSNDVTWYQQKPGQAPKLLIYSASNRYSGVPARFSGSGYGTEFTFTISSVQSEDFAVYFCQQDYSSFGQGTKLEIKRLEGQPKANPTVTLFPPSSEELQANKATLVCLISDFYPGAVTVAWKADGSPVKAGVETTKPSKQSNNKYAASSYLSLTPEQWKSHRSYSCQVTHEGSTVEKTVAPTECSGRADCGITSASYHQGVLSATILYEILLGKATLYAVLVSALVLMAMVKRKDSRGRAKRSGSGATNFSLLKQAGDVEENPGPTSMDWIWRILFLVGAATGAHSFEQVQLVESGPGVVQPGRSLRISCAVSGFSVTNYGVHWVRQPPGKGLEWLGVIWAGGITNYNSAFMSRLTISKDNSKNTVYLQMNSLRAEDTAMYYCASRGGHYGYALDYWGQGTLVTVSSTRASTKGPSVFPLAPSSKSTSGGTAALGCLVKDYFPEPVTVSWNSGALTSGVHTFPAVLQSSGLYSLSSVVTVPSSSLGTQTYICNVNHKPSNTKVDKRVEPKSCIPEDTFFPSSDVPCDVKLVEKSFETDTNLNFQNLSVIGFRILLLKVAGFNLLMTLRLWSS

SEQ ID NO: 45472 - protein, 621 aa, synthetic construct
MALPVTALLLPLALLLHAARPDIQMTQSPSSLSASVGDRVTITCKASQSVSNDVTWYQQKPGQAPKLLIYSASNRYSGVPARFSGSGYGTEFTFTISSVQSEDFAVYFCQQDYSSFGQGTKLEIKRLEGQPKANPTVTLFPPSSEELQANKATLVCLISDFYPGAVTVAWKADGSPVKAGVETTKPSKQSNNKYAASSYLSLTPEQWKSHRSYSCQVTHEGSTVEKTVAPTECSGRADCGFTSESYQQGVLSATILYEILLGKATLYAVLVSALVLMAMVKRKDSRGRAKRSGSGATNFSLLKQAGDVEENPGPTSMDWIWRILFLVGAATGAHSFEQVQLVESGPGVVQPGRSLRISCAVSGFSVTNYGVHWVRQPPGKGLEWLGVIWAGGITNYNSAFMSRLTISKDNSKNTVYLQMNSLRAEDTAMYYCASRGGHYGYALDYWGQGTLVTVSSTRASTKGPSVFPLAPSSKSTSGGTAALGCLVKDYFPEPVTVSWNSGALTSGVHTFPAVLQSSGLYSLSSVVTVPSSSLGTQTYICNVNHKPSNTKVDKRVEPKSCIPEDTFFPSPESSCDVKLVEKSFETDTNLNFQNLSVIGFRILLLKVAGFNLLMTLRLWSS

SEQ ID NO: 45473 - protein, 447 aa, synthetic construct
MALPVTALLLPLALLLHAARPDIQMTQSPSSLSASVGDRVTITCKASQSVSNDVTWYQQKPGQAPKLLIYSASNRYSGVPARFSGSGYGTEFTFTISSVQSEDFAVYFCQQDYSSFGQGTKLEIKRGGGGSGGGGSGGGGSQVQLVESGPGVVQPGRSLRISCAVSGFSVTNYGVHWVRQPPGKGLEWLGVIWAGGITNYNSAFMSRLTISKDNSKNTVYLQMNSLRAEDTAMYYCASRGGHYGYALDYWGQGTLVTVSSTRDGNEEMGGITQTPYKVSISGTTVILTCPQYPGSEILWQHNDKNIGGDEDDKNIGSDEDHLSLKEFSELEQSGYYVCYPRGSKPEDANFYLYLRARVCENCMEMDVMSVATIVIVDICITGGLLLLVYYWSKNRKAKAKPVTRGAGAGGRQRGQNKERPPPVPNPDYEPIRKGQRDLYSGLNQRRI

SEQ ID NO: 45474 - protein, 412 aa, synthetic construct
MALPVTALLLPLALLLHAARPDIQMTQSPSSLSASVGDRVTITCKASQSVSNDVTWYQQKPGQAPKLLIYSASNRYSGVPARFSGSGYGTEFTFTISSVQSEDFAVYFCQQDYSSFGQGTKLEIKRGGGGSGGGGSGGGGSQVQLVESGPGVVQPGRSLRISCAVSGFSVTNYGVHWVRQPPGKGLEWLGVIWAGGITNYNSAFMSRLTISKDNSKNTVYLQMNSLRAEDTAMYYCASRGGHYGYALDYWGQGTLVTVSSTRFKIPIEELEDRVFVNCNTSITWVEGTVGTLLSDITRLDLGKRILDPRGIYRCNGTDIYKDKESTVQVHYRMCQSCVELDPATVAGIIVTDVIATLLLALGVFCFAGHETGRLSGAADTQALLRNDQVYQPLRDRDDAQYSHLGGNWARNK

SEQ ID NO: 45475 - protein, 422 aa, synthetic construct
MALPVTALLLPLALLLHAARPDIQMTQSPSSLSASVGDRVTITCKASQSVSNDVTWYQQKPGQAPKLLIYSASNRYSGVPARFSGSGYGTEFTFTISSVQSEDFAVYFCQQDYSSFGQGTKLEIKRGGGGSGGGGSGGGGSQVQLVESGPGVVQPGRSLRISCAVSGFSVTNYGVHWVRQPPGKGLEWLGVIWAGGITNYNSAFMSRLTISKDNSKNTVYLQMNSLRAEDTAMYYCASRGGHYGYALDYWGQGTLVTVSSTRQSIKGNHLVKVYDYQEDGSVLLTCDAEAKNITWFKDGKMIGFLTEDKKKWNLGSNAKDPRGMYQCKGSQNKSKPLQVYYRMCQNCIELNAATISGFLFAEIVSIFVLAVGVYFIAGQDGVRQSRASDKQTLLPNDQLYQPLKDREDDQYSHLQGNQLRRN

SEQ ID NO: 45476 - protein, 405 aa, synthetic construct
MALPVTALLLPLALLLHAARPDIQMTQSPSSLSASVGDRVTITCKASQSVSNDVTWYQQKPGQAPKLLIYSASNRYSGVPARFSGSGYGTEFTFTISSVQSEDFAVYFCQQDYSSFGQGTKLEIKRGGGGSGGGGSGGGGSQVQLVESGPGVVQPGRSLRISCAVSGFSVTNYGVHWVRQPPGKGLEWLGVIWAGGITNYNSAFMSRLTISKDNSKNTVYLQMNSLRAEDTAMYYCASRGGHYGYALDYWGQGTLVTVSSTRQSFGLLDPKLCYLLDGILFIYGVILTALFLRVKFSRSADAPAYQQGQNQLYNELNLGRREEYDVLDKRRGRDPEMGGKPQRRKNPQEGLYNELQKDKMAEAYSEIGMKGERRRGKGHDGLYQGLSTATKDTYDALHMQALPPR

SEQ ID NO: 45477 - protein, 500 aa, synthetic construct
MALPVTALLLPLALLLHAARPDIQMTQSPSSLSASVGDRVTITCKASQSVSNDVTWYQQKPGQAPKLLIYSASNRYSGVPARFSGSGYGTEFTFTISSVQSEDFAVYFCQQDYSSFGQGTKLEIKRGGGGSGGGGSGGGGSQVQLVESGPGVVQPGRSLRISCAVSGFSVTNYGVHWVRQPPGKGLEWLGVIWAGGITNYNSAFMSRLTISKDNSKNTVYLQMNSLRAEDTAMYYCASRGGHYGYALDYWGQGTLVTVSSTRGMRTEDLPKAVVFLEPQWYRVLEKDSVTLKCQGAYSPEDNSTQWFHNESLISSQASSYFIDAATVDDSGEYRCQTNLSTLSDPVQLEVHIGWLLLQAPRWVFKEEDPIHLRCHSWKNTALHKVTYLQNGKGRKYFHHNSDFYIPKATLKDSGSYFCRGLVGSKNVSSETVNITITQGLAVPTISSFFPPGYQVSFCLVMVLLFAVDTGLYFSVKTNIRSSTRDWKDHKFKWRKDPQDK

SEQ ID NO: 45478 - protein, 475 aa, synthetic construct
MALPVTALLLPLALLLHAARPDIQMTQSPSSLSASVGDRVTITCKASQSVSNDVTWYQQKPGQAPKLLIYSASNRYSGVPARFSGSGYGTEFTFTISSVQSEDFAVYFCQQDYSSFGQGTKLEIKRGGGGSGGGGSGGGGSQVQLVESGPGVVQPGRSLRISCAVSGFSVTNYGVHWVRQPPGKGLEWLGVIWAGGITNYNSAFMSRLTISKDNSKNTVYLQMNSLRAEDTAMYYCASRGGHYGYALDYWGQGTLVTVSSTRGMRTEDLPKAVVFLEPQWYRVLEKDSVTLKCQGAYSPEDNSTQWFHNESLISSQASSYFIDAATVDDSGEYRCQTNLSTLSDPVQLEVHIGWLLLQAPRWVFKEEDPIHLRCHSWKNTALHKVTYLQNGKGRKYFHHNSDFYIPKATLKDSGSYFCRGLVGSKNVSSETVNITITQGLAVPTISSFFPPGYQVSFCLVMVLLFAVDTGLYFSV

SEQ ID NO: 45479 - protein, 476 aa, synthetic construct
MALPVTALLLPLALLLHAARPDIQMTQSPSSLSASVGDRVTITCKASQSVSNDVTWYQQKPGQAPKLLIYSASNRYSGVPARFSGSGYGTEFTFTISSVQSEDFAVYFCQQDYSSFGQGTKLEIKRGGGGSGGGGSGGGGSQVQLVESGPGVVQPGRSLRISCAVSGFSVTNYGVHWVRQPPGKGLEWLGVIWAGGITNYNSAFMSRLTISKDNSKNTVYLQMNSLRAEDTAMYYCASRGGHYGYALDYWGQGTLVTVSSTRGMRTEDLPKAVVFLEPQWYRVLEKDSVTLKCQGAYSPEDNSTQWFHNESLISSQASSYFIDAATVDDSGEYRCQTNLSTLSDPVQLEVHIGWLLLQAPRWVFKEEDPIHLRCHSWKNTALHKVTYLQNGKGRKYFHHNSDFYIPKATLKDSGSYFCRGLVGSKNVSSETVNITITQGLAVPTISSFFPPGYQVSFCLVMVLLFAVDTGLYFSVK

SEQ ID NO: 45480 - protein, 720 aa, synthetic construct
MALPVTALLLPLALLLHAARPDIQMTQSPSSLSASVGDRVTITCKASQSVSNDVTWYQQKPGQAPKLLIYSASNRYSGVPARFSGSGYGTEFTFTISSVQSEDFAVYFCQQDYSSFGQGTKLEIKRLEGQPKANPTVTLFPPSSEELQANKATLVCLISDFYPGAVTVAWKADGSPVKAGVETTKPSKQSNNKYAASSYLSLTPEQWKSHRSYSCQVTHEGSTVEKTVAPTECSGSQSFGLLDPKLCYLLDGILFIYGVILTALFLRVKFSRSADAPAYQQGQNQLYNELNLGRREEYDVLDKRRGRDPEMGGKPQRRKNPQEGLYNELQKDKMAEAYSEIGMKGERRRGKGHDGLYQGLSTATKDTYDALHMQALPPRRAKRSGSGATNFSLLKQAGDVEENPGPTSMDWIWRILFLVGAATGAHSFEQVQLVESGPGVVQPGRSLRISCAVSGFSVTNYGVHWVRQPPGKGLEWLGVIWAGGITNYNSAFMSRLTISKDNSKNTVYLQMNSLRAEDTAMYYCASRGGHYGYALDYWGQGTLVTVSSTRASTKGPSVFPLAPSSKSTSGGTAALGCLVKDYFPEPVTVSWNSGALTSGVHTFPAVLQSSGLYSLSSVVTVPSSSLGTQTYICNVNHKPSNTKVDKRVEPKSCGTITQGLAVSTISSFFPPGYQVSFCLVMVLLFAVDTGLYFSVKTNIRSSTRDWKDHKFKWRKDPQDK

SEQ ID NO: 45481 - protein, 735 aa, synthetic construct
MALPVTALLLPLALLLHAARPDIQMTQSPSSLSASVGDRVTITCKASQSVSNDVTWYQQKPGQAPKLLIYSASNRYSGVPARFSGSGYGTEFTFTISSVQSEDFAVYFCQQDYSSFGQGTKLEIKRLEDLKNVFPPEVAVFEPSEAEISHTQKATLVCLATGFYPDHVELSWWVNGKEVHSGVSTDPQPLKEQPALNDSRYCLSSRLRVSATFWQNPRNHFRCQVQFYGLSENDEWTQDRAKPVTQIVSAEAWGRADCGSQSFGLLDPKLCYLLDGILFIYGVILTALFLRVKFSRSADAPAYQQGQNQLYNELNLGRREEYDVLDKRRGRDPEMGGKPQRRKNPQEGLYNELQKDKMAEAYSEIGMKGERRRGKGHDGLYQGLSTATKDTYDALHMQALPPRRAKRSGSGATNFSLLKQAGDVEENPGPTSMDWIWRILFLVGAATGAHSFEQVQLVESGPGVVQPGRSLRISCAVSGFSVTNYGVHWVRQPPGKGLEWLGVIWAGGITNYNSAFMSRLTISKDNSKNTVYLQMNSLRAEDTAMYYCASRGGHYGYALDYWGQGTLVTVSSTRIQNPDPAVYQLRDSKSSDKSVCLFTDFDSQTNVSQSKDSDVYITDKTVLDMRSMDFKSNSAVAWSNKSDFACANAFNNSIIPEDTFFPSPESSCGTITQGLAVSTISSFFPPGYQVSFCLVMVLLFAVDTGLYFSVKTNIRSSTRDWKDHKFKWRKDPQDK

SEQ ID NO: 45482 - protein, 710 aa, synthetic construct
MALPVTALLLPLALLLHAARPDIQMTQSPSSLSASVGDRVTITCKASQSVSNDVTWYQQKPGQAPKLLIYSASNRYSGVPARFSGSGYGTEFTFTISSVQSEDFAVYFCQQDYSSFGQGTKLEIKRLEDLKNVFPPEVAVFEPSEAEISHTQKATLVCLATGFYPDHVELSWWVNGKEVHSGVSTDPQPLKEQPALNDSRYCLSSRLRVSATFWQNPRNHFRCQVQFYGLSENDEWTQDRAKPVTQIVSAEAWGRADCGSQSFGLLDPKLCYLLDGILFIYGVILTALFLRVKFSRSADAPAYQQGQNQLYNELNLGRREEYDVLDKRRGRDPEMGGKPQRRKNPQEGLYNELQKDKMAEAYSEIGMKGERRRGKGHDGLYQGLSTATKDTYDALHMQALPPRRAKRSGSGATNFSLLKQAGDVEENPGPTSMDWIWRILFLVGAATGAHSFEQVQLVESGPGVVQPGRSLRISCAVSGFSVTNYGVHWVRQPPGKGLEWLGVIWAGGITNYNSAFMSRLTISKDNSKNTVYLQMNSLRAEDTAMYYCASRGGHYGYALDYWGQGTLVTVSSTRIQNPDPAVYQLRDSKSSDKSVCLFTDFDSQTNVSQSKDSDVYITDKTVLDMRSMDFKSNSAVAWSNKSDFACANAFNNSIIPEDTFFPSPESSCGTITQGLAVSTISSFFPPGYQVSFCLVMVLLFAVDTGLYFSV

SEQ ID NO: 45483 - protein, 711 aa, synthetic construct
MALPVTALLLPLALLLHAARPDIQMTQSPSSLSASVGDRVTITCKASQSVSNDVTWYQQKPGQAPKLLIYSASNRYSGVPARFSGSGYGTEFTFTISSVQSEDFAVYFCQQDYSSFGQGTKLEIKRLEDLKNVFPPEVAVFEPSEAEISHTQKATLVCLATGFYPDHVELSWWVNGKEVHSGVSTDPQPLKEQPALNDSRYCLSSRLRVSATFWQNPRNHFRCQVQFYGLSENDEWTQDRAKPVTQIVSAEAWGRADCGSQSFGLLDPKLCYLLDGILFIYGVILTALFLRVKFSRSADAPAYQQGQNQLYNELNLGRREEYDVLDKRRGRDPEMGGKPQRRKNPQEGLYNELQKDKMAEAYSEIGMKGERRRGKGHDGLYQGLSTATKDTYDALHMQALPPRRAKRSGSGATNFSLLKQAGDVEENPGPTSMDWIWRILFLVGAATGAHSFEQVQLVESGPGVVQPGRSLRISCAVSGFSVTNYGVHWVRQPPGKGLEWLGVIWAGGITNYNSAFMSRLTISKDNSKNTVYLQMNSLRAEDTAMYYCASRGGHYGYALDYWGQGTLVTVSSTRIQNPDPAVYQLRDSKSSDKSVCLFTDFDSQTNVSQSKDSDVYITDKTVLDMRSMDFKSNSAVAWSNKSDFACANAFNNSIIPEDTFFPSPESSCGTITQGLAVSTISSFFPPGYQVSFCLVMVLLFAVDTGLYFSVK

SEQ ID NO: 45484 - protein, 712 aa, synthetic construct
MALPVTALLLPLALLLHAARPDIQMTQSPSSLSASVGDRVTITCKASQSVSNDVTWYQQKPGQAPKLLIYSASNRYSGVPARFSGSGYGTEFTFTISSVQSEDFAVYFCQQDYSSFGQGTKLEIKRLEDLKNVFPPEVAVFEPSEAEISHTQKATLVCLATGFYPDHVELSWWVNGKEVHSGVSTDPQPLKEQPALNDSRYCLSSRLRVSATFWQNPRNHFRCQVQFYGLSENDEWTQDRAKPVTQIVSAEAWGRADCGSQSFGLLDPKLCYLLDGILFIYGVILTALFLRVKFSRSADAPAYQQGQNQLYNELNLGRREEYDVLDKRRGRDPEMGGKPQRRKNPQEGLYNELQKDKMAEAYSEIGMKGERRRGKGHDGLYQGLSTATKDTYDALHMQALPPRRAKRSGSGATNFSLLKQAGDVEENPGPTSMDWIWRILFLVGAATGAHSFEQVQLVESGPGVVQPGRSLRISCAVSGFSVTNYGVHWVRQPPGKGLEWLGVIWAGGITNYNSAFMSRLTISKDNSKNTVYLQMNSLRAEDTAMYYCASRGGHYGYALDYWGQGTLVTVSSTRIQNPDPAVYQLRDSKSSDKSVCLFTDFDSQTNVSQSKDSDVYITDKTVLDMRSMDFKSNSAVAWSNKSDFACANAFNNSIIPEDTFFPSPESSCGTITQGLAVSTISSFFPPGYQVSFCLVMVLLFAVDTGLYFSVKT

SEQ ID NO: 45485 - protein, 648 aa, synthetic construct
MALPVTALLLPLALLLHAARPDIQMTQSPSSLSASVGDRVTITCKASQSVSNDVTWYQQKPGQAPKLLIYSASNRYSGVPARFSGSGYGTEFTFTISSVQSEDFAVYFCQQDYSSFGQGTKLEIKRLEGQPKANPTVTLFPPSSEELQANKATLVCLISDFYPGAVTVAWKADGSPVKAGVETTKPSKQSNNKYAASSYLSLTPEQWKSHRSYSCQVTHEGSTVEKTVAPTECSGSLGEPQLCYILDAILFLYGIVLTLLYCRLKIQVRKAAITSYEKSDGVYTGLSTRNQETYETLKHEKPPQRAKRSGSGATNFSLLKQAGDVEENPGPTSMDWIWRILFLVGAATGAHSFEQVQLVESGPGVVQPGRSLRISCAVSGFSVTNYGVHWVRQPPGKGLEWLGVIWAGGITNYNSAFMSRLTISKDNSKNTVYLQMNSLRAEDTAMYYCASRGGHYGYALDYWGQGTLVTVSSTRASTKGPSVFPLAPSSKSTSGGTAALGCLVKDYFPEPVTVSWNSGALTSGVHTFPAVLQSSGLYSLSSVVTVPSSSLGTQTYICNVNHKPSNTKVDKRVEPKSCGTLGEPQLCYILDAILFLYGIVLTLLYCRLKIQVRKAAITSYEKSDGVYTGLSTRNQETYETLKHEKPPQ

SEQ ID NO: 45486 - protein, 618 aa, synthetic construct
MALPVTALLLPLALLLHAARPDIQMTQSPSSLSASVGDRVTITCKASQSVSNDVTWYQQKPGQAPKLLIYSASNRYSGVPARFSGSGYGTEFTFTISSVQSEDFAVYFCQQDYSSFGQGTKLEIKRLEDLKNVFPPEVAVFEPSEAEISHTQKATLVCLATGFYPDHVELSWWVNGKEVHSGVCTDPQPLKEQPALNDSRYCLSSRLRVSATFWQNPRNHFRCQVQFYGLSENDEWTQDRAKPVTQIVSAEAWGRADCGFTSESYQQGVLSAYYMYLLLLLKSVVYFAIITCCLLRRTAFCCNGEKSRAKRSGSGATNFSLLKQAGDVEENPGPTSMDWIWRILFLVGAATGAHSFEQVQLVESGPGVVQPGRSLRISCAVSGFSVTNYGVHWVRQPPGKGLEWLGVIWAGGITNYNSAFMSRLTISKDNSKNTVYLQMNSLRAEDTAMYYCASRGGHYGYALDYWGQGTLVTVSSTRIQNPDPAVYQLRDSKSSDKSVCLFTDFDSQTNVSQSKDSDVYITDKCVLDMRSMDFKSNSAVAWSNKSDFACANAFNNSIIPEDTFFPSPESSCDVKLVEKSFETDTNLNFQNLSVIGFRILLLKVAGFNLLMTLRLWSS

SEQ ID NO: 45487 - protein, 624 aa, synthetic construct
MALPVTALLLPLALLLHAARPDIQMTQSPSSLSASVGDRVTITCKASQSVSNDVTWYQQKPGQAPKLLIYSASNRYSGVPARFSGSGYGTEFTFTISSVQSEDFAVYFCQQDYSSFGQGTKLEIKRLEDKQLDADVSPKPTIFLPSIAETKLQKAGTYLCLLEKFFPDVIKIHWQEKKSNTILGSQEGNTMKTNDTYMKFSWLTVPEKSLDKEHRCIVRHENNKNGVDQEIIFPPIKTDVITMDPKDNCSKDANDTLLLQLTNTSAYYMYEILLGKATLYAVLVSALVLMAMVKRKDSRGRAKRSGSGATNFSLLKQAGDVEENPGPTSMDWIWRILFLVGAATGAHSFEQVQLVESGPGVVQPGRSLRISCAVSGFSVTNYGVHWVRQPPGKGLEWLGVIWAGGITNYNSAFMSRLTISKDNSKNTVYLQMNSLRAEDTAMYYCASRGGHYGYALDYWGQGTLVTVSSTRSQPHTKPSVFVMKNGTNVACLVKEFYPKDIRINLVSSKKITEFDPAIVISPSGKYNAVKLGKYEDSNSVTCSVQHDNKTVHSTDFEVKTDSTDHVKPKETENTKQPSKSCHKPKAIVHTEKVNMMSLTVIGFRILLLKVAGFNLLMTLRLWSS

SEQ ID NO: 45488 - protein, 624 aa, synthetic construct
MALPVTALLLPLALLLHAARPDIQMTQSPSSLSASVGDRVTITCKASQSVSNDVTWYQQKPGQAPKLLIYSASNRYSGVPARFSGSGYGTEFTFTISSVQSEDFAVYFCQQDYSSFGQGTKLEIKRLEDKQLDADVSPKPTIFLPSIAETKLQKAGTYLCLLEKFFPDVIKIHWQEKKSNTILGSQEGNTMKTNDTYMKFSWLTVPEKSLDKEHRCIVRHENNKNGVDQEIIFPPIKTDVITMDPKDNCSKDANDTLLLQLTNTSATILYEILLGKATLYAVLVSALVLMAMVKRKDSRGRAKRSGSGATNFSLLKQAGDVEENPGPTSMDWIWRILFLVGAATGAHSFEQVQLVESGPGVVQPGRSLRISCAVSGFSVTNYGVHWVRQPPGKGLEWLGVIWAGGITNYNSAFMSRLTISKDNSKNTVYLQMNSLRAEDTAMYYCASRGGHYGYALDYWGQGTLVTVSSTRSQPHTKPSVFVMKNGTNVACLVKEFYPKDIRINLVSSKKITEFDPAIVISPSGKYNAVKLGKYEDSNSVTCSVQHDNKTVHSTDFEVKTDSTDHVKPKETENTKQPSKSCHKPKAIVHTEKVNMMSLTVIGFRILLLKVAGFNLLMTLRLWSS

SEQ ID NO: 45489 - protein, 624 aa, synthetic construct
MALPVTALLLPLALLLHAARPDIQMTQSPSSLSASVGDRVTITCKASQSVSNDVTWYQQKPGQAPKLLIYSASNRYSGVPARFSGSGYGTEFTFTISSVQSEDFAVYFCQQDYSSFGQGTKLEIKRLEDKQLDADVSPKPTIFLPSIAETKLQKAGTYLCLLEKFFPDVIKIHWQEKKSNTILGSQEGNTMKTNDTYMKFSWLTVPEKSLDKEHRCIVRHENNKNGVDQEIIFPPIKTDVITMDPKDNCSKDANDTLLLQLTNTSAYYMYEILLGKATLYAVLVSALVLMAMVKRKDSRGRAKRSGSGATNFSLLKQAGDVEENPGPTSMDWIWRILFLVGAATGAHSFEQVQLVESGPGVVQPGRSLRISCAVSGFSVTNYGVHWVRQPPGKGLEWLGVIWAGGITNYNSAFMSRLTISKDNSKNTVYLQMNSLRAEDTAMYYCASRGGHYGYALDYWGQGTLVTVSSTRSQPHTKPSVFVMKNGTNVACLVKEFYPKDIRINLVSSKKITEFDPAIVISPSGKYNAVKLGKYEDSNSVTCSVQHDNKTVHSTDFEVKTDSTDHVKPKETENTKQPSKSCHKPKAIVHTEKVNMMSLTVLGFRILLLKVAGFNLLMTLRLWSS

SEQ ID NO: 45490 - protein, 624 aa, synthetic construct
MALPVTALLLPLALLLHAARPDIQMTQSPSSLSASVGDRVTITCKASQSVSNDVTWYQQKPGQAPKLLIYSASNRYSGVPARFSGSGYGTEFTFTISSVQSEDFAVYFCQQDYSSFGQGTKLEIKRLEDKQLDADVSPKPTIFLPSIAETKLQKAGTYLCLLEKFFPDVIKIHWQEKKSNTILGSQEGNTMKTNDTYMKFSWLTVPEKSLDKEHRCIVRHENNKNGVDQEIIFPPIKTDVITMDPKDNCSKDANDTLLLQLTNTSATILYEILLGKATLYAVLVSALVLMAMVKRKDSRGRAKRSGSGATNFSLLKQAGDVEENPGPTSMDWIWRILFLVGAATGAHSFEQVQLVESGPGVVQPGRSLRISCAVSGFSVTNYGVHWVRQPPGKGLEWLGVIWAGGITNYNSAFMSRLTISKDNSKNTVYLQMNSLRAEDTAMYYCASRGGHYGYALDYWGQGTLVTVSSTRSQPHTKPSVFVMKNGTNVACLVKEFYPKDIRINLVSSKKITEFDPAIVISPSGKYNAVKLGKYEDSNSVTCSVQHDNKTVHSTDFEVKTDSTDHVKPKETENTKQPSKSCHKPKAIVHTEKVNMMSLTVLGFRILLLKVAGFNLLMTLRLWSS

SEQ ID NO: 45491 - protein, 618 aa, synthetic construct
MALPVTALLLPLALLLHAARPDIQMTQSPSSLSASVGDRVTITCKASQSVSNDVTWYQQKPGQAPKLLIYSASNRYSGVPARFSGSGYGTEFTFTISSVQSEDFAVYFCQQDYSSFGQGTKLEIKRLEDLKNVFPPEVAVFEPSEAEISHTQKATLVCLATGFYPDHVELSWWVNGKEVHSGVCTDPQPLKEQPALNDSRYCLSSRLRVSATFWQNPRNHFRCQVQFYGLSENDEWTQDRAKPVTQIVSAEAWGRADCGFTSESYQQGVLSATILYLLLLLKSVVYFAIITCCLLRRTAFCCNGEKSRAKRSGSGATNFSLLKQAGDVEENPGPTSMDWIWRILFLVGAATGAHSFEQVQLVESGPGVVQPGRSLRISCAVSGFSVTNYGVHWVRQPPGKGLEWLGVIWAGGITNYNSAFMSRLTISKDNSKNTVYLQMNSLRAEDTAMYYCASRGGHYGYALDYWGQGTLVTVSSTRIQNPDPAVYQLRDSKSSDKSVCLFTDFDSQTNVSQSKDSDVYITDKCVLDMRSMDFKSNSAVAWSNKSDFACANAFNNSIIPEDTFFPSPESSCDVKLVEKSFETDTNLNFQNLSVIGLRMLFAKTVAVNFLLTAKLFFL

SEQ ID NO: 45492 - protein, 647 aa, synthetic construct
MALPVTALLLPLALLLHAARPDIQMTQSPSSLSASVGDRVTITCKASQSVSNDVTWYQQKPGQAPKLLIYSASNRYSGVPARFSGSGYGTEFTFTISSVQSEDFAVYFCQQDYSSFGQGTKLEIKRLEDLKNVFPPEVAVFEPSEAEISHTQKATLVCLATGFYPDHVELSWWVNGKEVHSGVSTDPQPLKEQPALNDSRYCLSSRLRVSATFWQNPRNHFRCQVQFYGLSENDEWTQDRAKPVTQIVSAEAWGRADCGSSKDANDTLLLQLTNTSAYYMYLLLLLKSVVYFAIITCCLLRRTAFCCNGEKSRAKRSGSGATNFSLLKQAGDVEENPGPTSMDWIWRILFLVGAATGAHSFEQVQLVESGPGVVQPGRSLRISCAVSGFSVTNYGVHWVRQPPGKGLEWLGVIWAGGITNYNSAFMSRLTISKDNSKNTVYLQMNSLRAEDTAMYYCASRGGHYGYALDYWGQGTLVTVSSTRIQNPDPAVYQLRDSKSSDKSVCLFTDFDSQTNVSQSKDSDVYITDKTVLDMRSMDFKSNSAVAWSNKSDFACANAFNNSIIPEDTFFPSPESSCGTEVKTDSTDHVKPKETENTKQPSKSCHKPKAIVHTEKVNMMSLTVLGLRMLFAKTVAVNFLLTAKLFFL

SEQ ID NO: 45493 - protein, 617 aa, synthetic construct
MALPVTALLLPLALLLHAARPDIQMTQSPSSLSASVGDRVTITCKASQSVSNDVTWYQQKPGQAPKLLIYSASNRYSGVPARFSGSGYGTEFTFTISSVQSEDFAVYFCQQDYSSFGQGTKLEIKRLEDLKNVFPPEVAVFEPSEAEISHTQKATLVCLATGFYPDHVELSWWVNGKEVHSGVCTDPQPLKEQPALNDSRYCLSSRLRVSATFWQNPRNHFRCQVQFYGLSENDEWTQDRAKPVTQIVSAEAWGRADCDVKLVEKSFETDTNLNFQNLSVIGFRILLLKVAGFNLLMTLRLWSSRAKRSGSGATNFSLLKQAGDVEENPGPTSMDWIWRILFLVGAATGAHSFEQVQLVESGPGVVQPGRSLRISCAVSGFSVTNYGVHWVRQPPGKGLEWLGVIWAGGITNYNSAFMSRLTISKDNSKNTVYLQMNSLRAEDTAMYYCASRGGHYGYALDYWGQGTLVTVSSTRIQNPDPAVYQLRDSKSSDKSVCLFTDFDSQTNVSQSKDSDVYITDKCVLDMRSMDFKSNSAVAWSNKSDFACANAFNNSIIPEDTFFPSPESSCGFTSESYQQGVLSATILYEILLGKATLYAVLVSALVLMAMVKRKDSRG

SEQ ID NO: 45494 - protein, 617 aa, synthetic construct
MALPVTALLLPLALLLHAARPDIQMTQSPSSLSASVGDRVTITCKASQSVSNDVTWYQQKPGQAPKLLIYSASNRYSGVPARFSGSGYGTEFTFTISSVQSEDFAVYFCQQDYSSFGQGTKLEIKRLEDLKNVFPPEVAVFEPSEAEISHTQKATLVCLATGFYPDHVELSWWVNGKEVHSGVCTDPQPLKEQPALNDSRYCLSSRLRVSATFWQNPRNHFRCQVQFYGLSENDEWTQDRAKPVTQIVSAEAWGRADCGFTSESYQQGVLSATNLSVIGFRILLLKVAGFNLLMTLRLWSSRAKRSGSGATNFSLLKQAGDVEENPGPTSMDWIWRILFLVGAATGAHSFEQVQLVESGPGVVQPGRSLRISCAVSGFSVTNYGVHWVRQPPGKGLEWLGVIWAGGITNYNSAFMSRLTISKDNSKNTVYLQMNSLRAEDTAMYYCASRGGHYGYALDYWGQGTLVTVSSTRIQNPDPAVYQLRDSKSSDKSVCLFTDFDSQTNVSQSKDSDVYITDKCVLDMRSMDFKSNSAVAWSNKSDFACANAFNNSIIPEDTFFPSPESSCDVKLVEKSFETDTNLNFQILYEILLGKATLYAVLVSALVLMAMVKRKDSRG

SEQ ID NO: 45495 - protein, 617 aa, synthetic construct; identical to SEQ ID NO: 45493

SEQ ID NO: 45496 - protein, 617 aa, synthetic construct; identical to SEQ ID NO: 45494

SEQ ID NO: 45497 - protein, 617 aa, synthetic construct; identical to SEQ ID NO: 45493

SEQ ID NO: 45498 - protein, 620 aa, synthetic construct
MALPVTALLLPLALLLHAARPDIQMTQSPSSLSASVGDRVTITCKASQSVSNDVTWYQQKPGQAPKLLIYSASNRYSGVPARFSGSGYGTEFTFTISSVQSEDFAVYFCQQDYSSFGQGTKLEIKRLEADVSPKPTIFLPSIAETKLQKAGTYLCLLEKFFPDVIKIHWQEKKSNTILGSQEGNTMKTNDTYMKFSWLTVPEKSLDKEHRCIVRHENNKNGVDQEIIFPPIKTDVITMDPKDNCSKDANDTLLLQLTNTSAYYMYLLLLLKSVVYFAIITCCLLRRTAFCCNGEKSRAKRSGSGATNFSLLKQAGDVEENPGPTSMDWIWRILFLVGAATGAHSFEQVQLVESGPGVVQPGRSLRISCAVSGFSVTNYGVHWVRQPPGKGLEWLGVIWAGGITNYNSAFMSRLTISKDNSKNTVYLQMNSLRAEDTAMYYCASRGGHYGYALDYWGQGTLVTVSSTRSQPHTKPSVFVMKNGTNVACLVKEFYPKDIRINLVSSKKITEFDPAIVISPSGKYNAVKLGKYEDSNSVTCSVQHDNKTVHSTDFEVKTDSTDHVKPKETENTKQPSKSCHKPKAIVHTEKVNMMSLTVIGFRILLLKVAGFNLLMTLRLWSS

SEQ ID NO: 45499 - protein, 620 aa, synthetic construct
MALPVTALLLPLALLLHAARPDIQMTQSPSSLSASVGDRVTITCKASQSVSNDVTWYQQKPGQAPKLLIYSASNRYSGVPARFSGSGYGTEFTFTISSVQSEDFAVYFCQQDYSSFGQGTKLEIKRLEADVSPKPTIFLPSIAETKLQKAGTYLCLLEKFFPDVIKIHWQEKKSNTILGSQEGNTMKTNDTYMKFSWLTVPEKSLDKEHRCIVRHENNKNGVDQEIIFPPIKTDVITMDPKDNCSKDANDTLLLQLTNTSAYYMYLLLLLKSVVYFAIITCCLLRRTAFCCNGEKSRAKRSGSGATNFSLLKQAGDVEENPGPTSMDWIWRILFLVGAATGAHSFEQVQLVESGPGVVQPGRSLRISCAVSGFSVTNYGVHWVRQPPGKGLEWLGVIWAGGITNYNSAFMSRLTISKDNSKNTVYLQMNSLRAEDTAMYYCASRGGHYGYALDYWGQGTLVTVSSTRSQPHTKPSVFVMKNGTNVACLVKEFYPKDIRINLVSSKKITEFDPAIVISPSGKYNAVKLGKYEDSNSVTCSVQHDNKTVHSTDFEVKTDSTDHVKPKETENTKQPSKSCHKPKAIVHTEKVNMMSLTVLGFRILLLKVAGFNLLMTLRLWSS

SEQ ID NO: 45500 - protein, 617 aa, synthetic construct; identical to SEQ ID NO: 45493

SEQ ID NO: 45501 - protein, 621 aa, synthetic construct
MALPVTALLLPLALLLHAARPDIQMTQSPSSLSASVGDRVTITCKASQSVSNDVTWYQQKPGQAPKLLIYSASNRYSGVPARFSGSGYGTEFTFTISSVQSEDFAVYFCQQDYSSFGQGTKLEIKRLEIQNPDPAVYQLRDSKSSDKSVCLFTDFDSQTNVSQSKDSDVYITDKCVLDMRSMDFKSNSAVAWSNKSDFACANAFNNSIIPEDTFFPSPESSCGFTSESYQQGVLSATILYEILLGKATLYAVLVSALVLMAMVKRKDSRGRAKRSGSGVKQTLNFDLLKLAGDVESNPGPTSMDWIWRILFLVGAATGAHSFEQVQLVESGPGVVQPGRSLRISCAVSGFSVTNYGVHWVRQPPGKGLEWLGVIWAGGITNYNSAFMSRLTISKDNSKNTVYLQMNSLRAEDTAMYYCASRGGHYGYALDYWGQGTLVTVSSTREDLKNVFPPEVAVFEPSEAEISHTQKATLVCLATGFYPDHVELSWWVNGKEVHSGVCTDPQPLKEQPALNDSRYCLSSRLRVSATFWQNPRNHFRCQVQFYGLSENDEWTQDRAKPVTQIVSAEAWGRADCDVKLVEKSFETDTNLNFQNLSVIGFRILLLKVAGFNLLMTLRLWSS

SEQ ID NO: 45502 - protein, 752 aa, synthetic construct
MALPVTALLLPLALLLHAARPEVQLVESGGGLVQPGGSLRLSCAASGFSFSDFWMSWVRQAPGKGLEWVATISQAGSEKDYVDSVKGRFTISRDNAKKSLYLQMNSLRAEDTAVYYCASGVYSFDYRGQGTLVTVSSGTGGGGSGGGGSGGGGSEFDIQMTQSPSSLSASVGDRVTITCKASQSVSNDVTWYQQKPGQAPKLLIYSASNRYSGVPARFSGSGYGTEFTFTISSVQSEDFAVYFCQQDYSSFGQGTKLEIKRLEDLKNVFPPEVAVFEPSEAEISHTQKATLVCLATGFYPDHVELSWWVNGKEVHSGVCTDPQPLKEQPALNDSRYCLSSRLRVSATFWQNPRNHFRCQVQFYGLSENDEWTQDRAKPVTQIVSAEAWGRADCDVKLVEKSFETDTNLNFQNLSVIGFRILLLKVAGFNLLMTLRLWSSRAKRSGSGATNFSLLKQAGDVEENPGPTSMDWIWRILFLVGAATGAHSFEQVQLVESGPGVVQPGRSLRISCAVSGFSVTNYGVHWVRQPPGKGLEWLGVIWAGGITNYNSAFMSRLTISKDNSKNTVYLQMNSLRAEDTAMYYCASRGGHYGYALDYWGQGTLVTVSSTRIQNPDPAVYQLRDSKSSDKSVCLFTDFDSQTNVSQSKDSDVYITDKCVLDMRSMDFKSNSAVAWSNKSDFACANAFNNSIIPEDTFFPSPESSCGFTSESYQQGVLSATILYEILLGKATLYAVLVSALVLMAMVKRKDSRG

SEQ ID NO: 45503 - protein, 756 aa, synthetic construct
MALPVTALLLPLALLLHAARPEVQLVESGGGLVQPGGSLRLSCAASGFSFSDFWMSWVRQAPGKGLEWVATISQAGSEKDYVDSVKGRFTISRDNAKKSLYLQMNSLRAEDTAVYYCASGVYSFDYRGQGTLVTVSSGTGGGGSGGGGSGGGGSEFDIQMTQSPSSLSASVGDRVTITCKASQSVSNDVTWYQQKPGQAPKLLIYSASNRYSGVPARFSGSGYGTEFTFTISSVQSEDFAVYFCQQDYSSFGQGTKLEIKRLEIQNPDPAVYQLRDSKSSDKSVCLFTDFDSQTNVSQSKDSDVYITDKCVLDMRSMDFKSNSAVAWSNKSDFACANAFNNSIIPEDTFFPSPESSCGFTSESYQQGVLSATILYEILLGKATLYAVLVSALVLMAMVKRKDSRGRAKRSGSGVKQTLNFDLLKLAGDVESNPGPTSMDWIWRILFLVGAATGAHSFEQVQLVESGPGVVQPGRSLRISCAVSGFSVTNYGVHWVRQPPGKGLEWLGVIWAGGITNYNSAFMSRLTISKDNSKNTVYLQMNSLRAEDTAMYYCASRGGHYGYALDYWGQGTLVTVSSTREDLKNVFPPEVAVFEPSEAEISHTQKATLVCLATGFYPDHVELSWWVNGKEVHSGVCTDPQPLKEQPALNDSRYCLSSRLRVSATFWQNPRNHFRCQVQFYGLSENDEWTQDRAKPVTQIVSAEAWGRADCDVKLVEKSFETDTNLNFQNLSVIGFRILLLKVAGFNLLMTLRLWSS

SEQ ID NO: 45504 - protein, 889 aa, synthetic construct
MALPVTALLLPLALLLHAARPEVQLVESGGGLVQPGGSLRLSCAASGFSFSDFWMSWVRQAPGKGLEWVATISQAGSEKDYVDSVKGRFTISRDNAKKSLYLQMNSLRAEDTAVYYCASGVYSFDYRGQGTLVTVSSGTGGGGSGGGGSGGGGSEFDIQMTQSPSSLSASVGDRVTITCKASQSVSNDVTWYQQKPGQAPKLLIYSASNRYSGVPARFSGSGYGTEFTFTISSVQSEDFAVYFCQQDYSSFGQGTKLEIKRLEDLKNVFPPEVAVFEPSEAEISHTQKATLVCLATGFYPDHVELSWWVNGKEVHSGVCTDPQPLKEQPALNDSRYCLSSRLRVSATFWQNPRNHFRCQVQFYGLSENDEWTQDRAKPVTQIVSAEAWGRADCDVKLVEKSFETDTNLNFQNLSVIGFRILLLKVAGFNLLMTLRLWSSRAKRSGSGATNFSLLKQAGDVEENPGPTSMDWIWRILFLVGAATGAHSGPQLQLQESGPGLVKPSETLSLTCTVSGDSISSGDYYWGWIRQPPGKGLEWIGHIYYSGVTYYNPSLKSRVTISVDTSRNQFSLKLSSVTAADTAVYYCTREDSSNWRSRGQGTLVTVSSGSGGGGSGGGGSGGGGSFEQVQLVESGPGVVQPGRSLRISCAVSGFSVTNYGVHWVRQPPGKGLEWLGVIWAGGITNYNSAFMSRLTISKDNSKNTVYLQMNSLRAEDTAMYYCASRGGHYGYALDYWGQGTLVTVSSTRIQNPDPAVYQLRDSKSSDKSVCLFTDFDSQTNVSQSKDSDVYITDKCVLDMRSMDFKSNSAVAWSNKSDFACANAFNNSIIPEDTFFPSPESSCGFTSESYQQGVLSATILYEILLGKATLYAVLVSALVLMAMVKRKDSRG

SEQ ID NO: 45505 - protein, 893 aa, synthetic construct
MALPVTALLLPLALLLHAARPEVQLVESGGGLVQPGGSLRLSCAASGFSFSDFWMSWVRQAPGKGLEWVATISQAGSEKDYVDSVKGRFTISRDNAKKSLYLQMNSLRAEDTAVYYCASGVYSFDYRGQGTLVTVSSGTGGGGSGGGGSGGGGSEFDIQMTQSPSSLSASVGDRVTITCKASQSVSNDVTWYQQKPGQAPKLLIYSASNRYSGVPARFSGSGYGTEFTFTISSVQSEDFAVYFCQQDYSSFGQGTKLEIKRLEIQNPDPAVYQLRDSKSSDKSVCLFTDFDSQTNVSQSKDSDVYITDKCVLDMRSMDFKSNSAVAWSNKSDFACANAFNNSIIPEDTFFPSPESSCGFTSESYQQGVLSATILYEILLGKATLYAVLVSALVLMAMVKRKDSRGRAKRSGSGVKQTLNFDLLKLAGDVESNPGPTSMDWIWRILFLVGAATGAHSGPQLQLQESGPGLVKPSETLSLTCTVSGDSISSGDYYWGWIRQPPGKGLEWIGHIYYSGVTYYNPSLKSRVTISVDTSRNQFSLKLSSVTAADTAVYYCTREDSSNWRSRGQGTLVTVSSGSGGGGSGGGGSGGGGSFEQVQLVESGPGVVQPGRSLRISCAVSGFSVTNYGVHWVRQPPGKGLEWLGVIWAGGITNYNSAFMSRLTISKDNSKNTVYLQMNSLRAEDTAMYYCASRGGHYGYALDYWGQGTLVTVSSTREDLKNVFPPEVAVFEPSEAEISHTQKATLVCLATGFYPDHVELSWWVNGKEVHSGVCTDPQPLKEQPALNDSRYCLSSRLRVSATFWQNPRNHFRCQVQFYGLSENDEWTQDRAKPVTQIVSAEAWGRADCDVKLVEKSFETDTNLNFQNLSVIGFRILLLKVAGFNLLMTLRLWSS

SEQ ID NO: 45506 - protein, 687 aa, synthetic construct
MALPVTALLLPLALLLHAARPDIQMTQSPSSLSASVGDRVTITCKASQSVSNDVTWYQQKPGQAPKLLIYSASNRYSGVPARFSGSGYGTEFTFTISSVQSEDFAVYFCQQDYSSFGQGTKLEIKRLEDLKNVFPPEVAVFEPSEAEISHTQKATLVCLATGFYPDHVELSWWVNGKEVHSGVCTDPQPLKEQPALNDSRYCLSSRLRVSATFWQNPRNHFRCQVQFYGLSENDEWTQDRAKPVTQIVSAEAWGRADCDVKLVEKSFETDTNLNFQNLSVIGFRILLLKVAGFNLLMTLRLWSSRAKRSGSGATNFSLLKQAGDVEENPGPTSMDWIWRILFLVGAATGAHSGPMDPDLEIRAAFLRQRNTALRTEVAELEQEVQRLENEVSQYETRYGPLGGGKGSGGGGSGGGGSGGGGSFEQVQLVESGPGVVQPGRSLRISCAVSGFSVTNYGVHWVRQPPGKGLEWLGVIWAGGITNYNSAFMSRLTISKDNSKNTVYLQMNSLRAEDTAMYYCASRGGHYGYALDYWGQGTLVTVSSTRIQNPDPAVYQLRDSKSSDKSVCLFTDFDSQTNVSQSKDSDVYITDKCVLDMRSMDFKSNSAVAWSNKSDFACANAFNNSIIPEDTFFPSPESSCGFTSESYQQGVLSATILYEILLGKATLYAVLVSALVLMAMVKRKDSRG

SEQ ID NO: 45507 - protein, 691 aa, synthetic construct
MALPVTALLLPLALLLHAARPDIQMTQSPSSLSASVGDRVTITCKASQSVSNDVTWYQQKPGQAPKLLIYSASNRYSGVPARFSGSGYGTEFTFTISSVQSEDFAVYFCQQDYSSFGQGTKLEIKRLEIQNPDPAVYQLRDSKSSDKSVCLFTDFDSQTNVSQSKDSDVYITDKCVLDMRSMDFKSNSAVAWSNKSDFACANAFNNSIIPEDTFFPSPESSCGFTSESYQQGVLSATILYEILLGKATLYAVLVSALVLMAMVKRKDSRGRAKRSGSGVKQTLNFDLLKLAGDVESNPGPTSMDWIWRILFLVGAATGAHSGPMDPDLEIRAAFLRQRNTALRTEVAELEQEVQRLENEVSQYETRYGPLGGGKGSGGGGSGGGGSGGGGSFEQVQLVESGPGVVQPGRSLRISCAVSGFSVTNYGVHWVRQPPGKGLEWLGVIWAGGITNYNSAFMSRLTISKDNSKNTVYLQMNSLRAEDTAMYYCASRGGHYGYALDYWGQGTLVTVSSTREDLKNVFPPEVAVFEPSEAEISHTQKATLVCLATGFYPDHVELSWWVNGKEVHSGVCTDPQPLKEQPALNDSRYCLSSRLRVSATFWQNPRNHFRCQVQFYGLSENDEWTQDRAKPVTQIVSAEAWGRADCDVKLVEKSFETDTNLNFQNLSVIGFRILLLKVAGFNLLMTLRLWSS

SEQ ID NO: 45508 - protein, 664 aa, synthetic construct
MALPVTALLLPLALLLHAARPDIQMTQSPSSLSASVGDRVTITCKASQSVSNDVTWYQQKPGQAPKLLIYSASNRYSGVPARFSGSGYGTEFTFTISSVQSEDFAVYFCQQDYSSFGQGTKLEIKRLEDLKNVFPPEVAVFEPSEAEISHTQKATLVCLATGFYPDHVELSWWVNGKEVHSGVCTDPQPLKEQPALNDSRYCLSSRLRVSATFWQNPRNHFRCQVQFYGLSENDEWTQDRAKPVTQIVSAEAWGRADCDVKLVEKSFETDTNLNFQNLSVIGFRILLLKVAGFNLLMTLRLWSSRAKRSGSGATNFSLLKQAGDVEENPGPTSMDWIWRILFLVGAATGAHSGPEVAALEKEVAALEKEVAALEKEVAALEKGSGGGGSGGGGSGGGGSFEQVQLVESGPGVVQPGRSLRISCAVSGFSVTNYGVHWVRQPPGKGLEWLGVIWAGGITNYNSAFMSRLTISKDNSKNTVYLQMNSLRAEDTAMYYCASRGGHYGYALDYWGQGTLVTVSSTRIQNPDPAVYQLRDSKSSDKSVCLFTDFDSQTNVSQSKDSDVYITDKCVLDMRSMDFKSNSAVAWSNKSDFACANAFNNSIIPEDTFFPSPESSCGFTSESYQQGVLSATILYEILLGKATLYAVLVSALVLMAMVKRKDSRG

SEQ ID NO: 45509 - protein, 668 aa, synthetic construct
MALPVTALLLPLALLLHAARPDIQMTQSPSSLSASVGDRVTITCKASQSVSNDVTWYQQKPGQAPKLLIYSASNRYSGVPARFSGSGYGTEFTFTISSVQSEDFAVYFCQQDYSSFGQGTKLEIKRLEIQNPDPAVYQLRDSKSSDKSVCLFTDFDSQTNVSQSKDSDVYITDKCVLDMRSMDFKSNSAVAWSNKSDFACANAFNNSIIPEDTFFPSPESSCGFTSESYQQGVLSATILYEILLGKATLYAVLVSALVLMAMVKRKDSRGRAKRSGSGVKQTLNFDLLKLAGDVESNPGPTSMDWIWRILFLVGAATGAHSGPEVAALEKEVAALEKEVAALEKEVAALEKGSGGGGSGGGGSGGGGSFEQVQLVESGPGVVQPGRSLRISCAVSGFSVTNYGVHWVRQPPGKGLEWLGVIWAGGITNYNSAFMSRLTISKDNSKNTVYLQMNSLRAEDTAMYYCASRGGHYGYALDYWGQGTLVTVSSTREDLKNVFPPEVAVFEPSEAEISHTQKATLVCLATGFYPDHVELSWWVNGKEVHSGVCTDPQPLKEQPALNDSRYCLSSRLRVSATFWQNPRNHFRCQVQFYGLSENDEWTQDRAKPVTQIVSAEAWGRADCDVKLVEKSFETDTNLNFQNLSVIGFRILLLKVAGFNLLMTLRLWSS

SEQ ID NO: 45510 - protein, 754 aa, synthetic construct
MALPVTALLLPLALLLHAARPDIQMTQSPSSLSASVGDRVTITCKASQSVSNDVTWYQQKPGQAPKLLIYSASNRYSGVPARFSGSGYGTEFTFTISSVQSEDFAVYFCQQDYSSFGQGTKLEIKRLEDLKNVFPPEVAVFEPSEAEISHTQKATLVCLATGFYPDHVELSWWVNGKEVHSGVCTDPQPLKEQPALNDSRYCLSSRLRVSATFWQNPRNHFRCQVQFYGLSENDEWTQDRAKPVTQIVSAEAWGRADCDVKLVEKSFETDTNLNFQNLSVIGFRILLLKVAGFNLLMTLRLWSSRAKRSGSGATNFSLLKQAGDVEENPGPTSMDWIWRILFLVGAATGAHSGPQVQLQESGGGLAQAGGSLRLSCAASGRTFSMGWFRQAPGKEREFVAAITYSGGSPYYASSVRGRFTISRDNAKNTVYLQMNSLKPEDTAVYYCAANPTYGSDWNAENWGQGTQVTVSSGSGGGGSGGGGSGGGGSFEQVQLVESGPGVVQPGRSLRISCAVSGFSVTNYGVHWVRQPPGKGLEWLGVIWAGGITNYNSAFMSRLTISKDNSKNTVYLQMNSLRAEDTAMYYCASRGGHYGYALDYWGQGTLVTVSSTRIQNPDPAVYQLRDSKSSDKSVCLFTDFDSQTNVSQSKDSDVYITDKCVLDMRSMDFKSNSAVAWSNKSDFACANAFNNSIIPEDTFFPSPESSCGFTSESYQQGVLSATILYEILLGKATLYAVLVSALVLMAMVKRKDSRG

SEQ ID NO: 45511 - protein, 758 aa, synthetic construct
MALPVTALLLPLALLLHAARPDIQMTQSPSSLSASVGDRVTITCKASQSVSNDVTWYQQKPGQAPKLLIYSASNRYSGVPARFSGSGYGTEFTFTISSVQSEDFAVYFCQQDYSSFGQGTKLEIKRLEIQNPDPAVYQLRDSKSSDKSVCLFTDFDSQTNVSQSKDSDVYITDKCVLDMRSMDFKSNSAVAWSNKSDFACANAFNNSIIPEDTFFPSPESSCGFTSESYQQGVLSATILYEILLGKATLYAVLVSALVLMAMVKRKDSRGRAKRSGSGVKQTLNFDLLKLAGDVESNPGPTSMDWIWRILFLVGAATGAHSGPQVQLQESGGGLAQAGGSLRLSCAASGRTFSMGWFRQAPGKEREFVAAITYSGGSPYYASSVRGRFTISRDNAKNTVYLQMNSLKPEDTAVYYCAANPTYGSDWNAENWGQGTQVTVSSGSGGGGSGGGGSGGGGSFEQVQLVESGPGVVQPGRSLRISCAVSGFSVTNYGVHWVRQPPGKGLEWLGVIWAGGITNYNSAFMSRLTISKDNSKNTVYLQMNSLRAEDTAMYYCASRGGHYGYALDYWGQGTLVTVSSTREDLKNVFPPEVAVFEPSEAEISHTQKATLVCLATGFYPDHVELSWWVNGKEVHSGVCTDPQPLKEQPALNDSRYCLSSRLRVSATFWQNPRNHFRCQVQFYGLSENDEWTQDRAKPVTQIVSAEAWGRADCDVKLVEKSFETDTNLNFQNLSVIGFRILLLKVAGFNLLMTLRLWSS

SEQ ID NO: 45512 - protein, 760 aa, synthetic construct
MALPVTALLLPLALLLHAARPEVQLVESGGSLVQPGGSLRLSCAASGFTFDDYAMSWVRQVPGKGLEWVSSINWSGTHTDYADSVKGRFTISRNNANNTLYLQMNSLKSEDTAVYYCAKNWRDAGTTWFEKSGSAGQGTQVTVSSGTGGGGSGGGGSGGGGSEFDIQMTQSPSSLSASVGDRVTITCKASQSVSNDVTWYQQKPGQAPKLLIYSASNRYSGVPARFSGSGYGTEFTFTISSVQSEDFAVYFCQQDYSSFGQGTKLEIKRLEDLKNVFPPEVAVFEPSEAEISHTQKATLVCLATGFYPDHVELSWWVNGKEVHSGVCTDPQPLKEQPALNDSRYCLSSRLRVSATFWQNPRNHFRCQVQFYGLSENDEWTQDRAKPVTQIVSAEAWGRADCDVKLVEKSFETDTNLNFQNLSVIGFRILLLKVAGFNLLMTLRLWSSRAKRSGSGATNFSLLKQAGDVEENPGPTSMDWIWRILFLVGAATGAHSFEQVQLVESGPGVVQPGRSLRISCAVSGFSVTNYGVHWVRQPPGKGLEWLGVIWAGGITNYNSAFMSRLTISKDNSKNTVYLQMNSLRAEDTAMYYCASRGGHYGYALDYWGQGTLVTVSSTRIQNPDPAVYQLRDSKSSDKSVCLFTDFDSQTNVSQSKDSDVYITDKCVLDMRSMDFKSNSAVAWSNKSDFACANAFNNSIIPEDTFFPSPESSCGFTSESYQQGVLSATILYEILLGKATLYAVLVSALVLMAMVKRKDSRG

SEQ ID NO: 45513 - protein, 764 aa, synthetic construct
MALPVTALLLPLALLLHAARPEVQLVESGGSLVQPGGSLRLSCAASGFTFDDYAMSWVRQVPGKGLEWVSSINWSGTHTDYADSVKGRFTISRNNANNTLYLQMNSLKSEDTAVYYCAKNWRDAGTTWFEKSGSAGQGTQVTVSSGTGGGGSGGGGSGGGGSEFDIQMTQSPSSLSASVGDRVTITCKASQSVSNDVTWYQQKPGQAPKLLIYSASNRYSGVPARFSGSGYGTEFTFTISSVQSEDFAVYFCQQDYSSFGQGTKLEIKRLEIQNPDPAVYQLRDSKSSDKSVCLFTDFDSQTNVSQSKDSDVYITDKCVLDMRSMDFKSNSAVAWSNKSDFACANAFNNSIIPEDTFFPSPESSCGFTSESYQQGVLSATILYEILLGKATLYAVLVSALVLMAMVKRKDSRGRAKRSGSGVKQTLNFDLLKLAGDVESNPGPTSMDWIWRILFLVGAATGAHSFEQVQLVESGPGVVQPGRSLRISCAVSGFSVTNYGVHWVRQPPGKGLEWLGVIWAGGITNYNSAFMSRLTISKDNSKNTVYLQMNSLRAEDTAMYYCASRGGHYGYALDYWGQGTLVTVSSTREDLKNVFPPEVAVFEPSEAEISHTQKATLVCLATGFYPDHVELSWWVNGKEVHSGVCTDPQPLKEQPALNDSRYCLSSRLRVSATFWQNPRNHFRCQVQFYGLSENDEWTQDRAKPVTQIVSAEAWGRADCDVKLVEKSFETDTNLNFQNLSVIGFRILLLKVAGFNLLMTLRLWSS

SEQ ID NO: 45514 - protein, 758 aa, synthetic construct
MALPVTALLLPLALLLHAARPEVQLLESGGGLVQPGGSLRLSCAASGFIFSSYAMSWVRQAPGKGQEWVSGVSGTGVNTYYADSVKGRFTISRDNSKNTLYLQMNSLRAEDTAVYYCASGKGWDSGSWYEDYRGQGTLVTVSSGTGGGGSGGGGSGGGGSEFDIQMTQSPSSLSASVGDRVTITCKASQSVSNDVTWYQQKPGQAPKLLIYSASNRYSGVPARFSGSGYGTEFTFTISSVQSEDFAVYFCQQDYSSFGQGTKLEIKRLEDLKNVFPPEVAVFEPSEAEISHTQKATLVCLATGFYPDHVELSWWVNGKEVHSGVCTDPQPLKEQPALNDSRYCLSSRLRVSATFWQNPRNHFRCQVQFYGLSENDEWTQDRAKPVTQIVSAEAWGRADCDVKLVEKSFETDTNLNFQNLSVIGFRILLLKVAGFNLLMTLRLWSSRAKRSGSGATNFSLLKQAGDVEENPGPTSMDWIWRILFLVGAATGAHSFEQVQLVESGPGVVQPGRSLRISCAVSGFSVTNYGVHWVRQPPGKGLEWLGVIWAGGITNYNSAFMSRLTISKDNSKNTVYLQMNSLRAEDTAMYYCASRGGHYGYALDYWGQGTLVTVSSTRIQNPDPAVYQLRDSKSSDKSVCLFTDFDSQTNVSQSKDSDVYITDKCVLDMRSMDFKSNSAVAWSNKSDFACANAFNNSIIPEDTFFPSPESSCGFTSESYQQGVLSATILYEILLGKATLYAVLVSALVLMAMVKRKDSRG

SEQ ID NO: 45515 - protein, 762 aa, synthetic construct
MALPVTALLLPLALLLHAARPEVQLLESGGGLVQPGGSLRLSCAASGFIFSSYAMSWVRQAPGKGQEWVSGVSGTGVNTYYADSVKGRFTISRDNSKNTLYLQMNSLRAEDTAVYYCASGKGWDSGSWYEDYRGQGTLVTVSSGTGGGGSGGGGSGGGGSEFDIQMTQSPSSLSASVGDRVTITCKASQSVSNDVTWYQQKPGQAPKLLIYSASNRYSGVPARFSGSGYGTEFTFTISSVQSEDFAVYFCQQDYSSFGQGTKLEIKRLEIQNPDPAVYQLRDSKSSDKSVCLFTDFDSQTNVSQSKDSDVYITDKCVLDMRSMDFKSNSAVAWSNKSDFACANAFNNSIIPEDTFFPSPESSCGFTSESYQQGVLSATILYEILLGKATLYAVLVSALVLMAMVKRKDSRGRAKRSGSGVKQTLNFDLLKLAGDVESNPGPTSMDWIWRILFLVGAATGAHSFEQVQLVESGPGVVQPGRSLRISCAVSGFSVTNYGVHWVRQPPGKGLEWLGVIWAGGITNYNSAFMSRLTISKDNSKNTVYLQMNSLRAEDTAMYYCASRGGHYGYALDYWGQGTLVTVSSTREDLKNVFPPEVAVFEPSEAEISHTQKATLVCLATGFYPDHVELSWWVNGKEVHSGVCTDPQPLKEQPALNDSRYCLSSRLRVSATFWQNPRNHFRCQVQFYGLSENDEWTQDRAKPVTQIVSAEAWGRADCDVKLVEKSFETDTNLNFQNLSVIGFRILLLKVAGFNLLMTLRLWSS

SEQ ID NO: 45516 - protein, 726 aa, synthetic construct
MALPVTALLLPLALLLHAARPMLPAPKNLVVSRITEDSARLSWTAPDAAFDSFPIRYIETLIWGEAIWLDVPGSERSYDLTGLKPGTEYAVVITGVKGGRFSSPLVASFTTGTGGGGSGGGGSGGGGSEFDIQMTQSPSSLSASVGDRVTITCKASQSVSNDVTWYQQKPGQAPKLLIYSASNRYSGVPARFSGSGYGTEFTFTISSVQSEDFAVYFCQQDYSSFGQGTKLEIKRLEDLKNVFPPEVAVFEPSEAEISHTQKATLVCLATGFYPDHVELSWWVNGKEVHSGVCTDPQPLKEQPALNDSRYCLSSRLRVSATFWQNPRNHFRCQVQFYGLSENDEWTQDRAKPVTQIVSAEAWGRADCDVKLVEKSFETDTNLNFQNLSVIGFRILLLKVAGFNLLMTLRLWSSRAKRSGSGATNFSLLKQAGDVEENPGPTSMDWIWRILFLVGAATGAHSFEQVQLVESGPGVVQPGRSLRISCAVSGFSVTNYGVHWVRQPPGKGLEWLGVIWAGGITNYNSAFMSRLTISKDNSKNTVYLQMNSLRAEDTAMYYCASRGGHYGYALDYWGQGTLVTVSSTRIQNPDPAVYQLRDSKSSDKSVCLFTDFDSQTNVSQSKDSDVYITDKCVLDMRSMDFKSNSAVAWSNKSDFACANAFNNSIIPEDTFFPSPESSCGFTSESYQQGVLSATILYEILLGKATLYAVLVSALVLMAMVKRKDSRG

SEQ ID NO: 45517 - protein, 730 aa, synthetic construct
MALPVTALLLPLALLLHAARPMLPAPKNLVVSRITEDSARLSWTAPDAAFDSFPIRYIETLIWGEAIWLDVPGSERSYDLTGLKPGTEYAVVITGVKGGRFSSPLVASFTTGTGGGGSGGGGSGGGGSEFDIQMTQSPSSLSASVGDRVTITCKASQSVSNDVTWYQQKPGQAPKLLIYSASNRYSGVPARFSGSGYGTEFTFTISSVQSEDFAVYFCQQDYSSFGQGTKLEIKRLEIQNPDPAVYQLRDSKSSDKSVCLFTDFDSQTNVSQSKDSDVYITDKCVLDMRSMDFKSNSAVAWSNKSDFACANAFNNSIIPEDTFFPSPESSCGFTSESYQQGVLSATILYEILLGKATLYAVLVSALVLMAMVKRKDSRGRAKRSGSGVKQTLNFDLLKLAGDVESNPGPTSMDWIWRILFLVGAATGAHSFEQVQLVESGPGVVQPGRSLRISCAVSGFSVTNYGVHWVRQPPGKGLEWLGVIWAGGITNYNSAFMSRLTISKDNSKNTVYLQMNSLRAEDTAMYYCASRGGHYGYALDYWGQGTLVTVSSTREDLKNVFPPEVAVFEPSEAEISHTQKATLVCLATGFYPDHVELSWWVNGKEVHSGVCTDPQPLKEQPALNDSRYCLSSRLRVSATFWQNPRNHFRCQVQFYGLSENDEWTQDRAKPVTQIVSAEAWGRADCDVKLVEKSFETDTNLNFQNLSVIGFRILLLKVAGFNLLMTLRLWSS

SEQ ID NO: 45518 - protein, 755 aa, synthetic construct
MALPVTALLLPLALLLHAARPEVQLVESGGGLVQPGGSLRLSCAASGFNIKDTCIGWVRRAPGKEEELVAKICKYSGHTRYADSVKGRFTISADTSKNTAYLQMNSLRAEDTAVYYCAAVSVRDGHYNYWGQGTTVTVSSGTGGGGSGGGGSGGGGSEFDIQMTQSPSSLSASVGDRVTITCKASQSVSNDVTWYQQKPGQAPKLLIYSASNRYSGVPARFSGSGYGTEFTFTISSVQSEDFAVYFCQQDYSSFGQGTKLEIKRLEDLKNVFPPEVAVFEPSEAEISHTQKATLVCLATGFYPDHVELSWWVNGKEVHSGVCTDPQPLKEQPALNDSRYCLSSRLRVSATFWQNPRNHFRCQVQFYGLSENDEWTQDRAKPVTQIVSAEAWGRADCDVKLVEKSFETDTNLNFQNLSVIGFRILLLKVAGFNLLMTLRLWSSRAKRSGSGATNFSLLKQAGDVEENPGPTSMDWIWRILFLVGAATGAHSFEQVQLVESGPGVVQPGRSLRISCAVSGFSVTNYGVHWVRQPPGKGLEWLGVIWAGGITNYNSAFMSRLTISKDNSKNTVYLQMNSLRAEDTAMYYCASRGGHYGYALDYWGQGTLVTVSSTRIQNPDPAVYQLRDSKSSDKSVCLFTDFDSQTNVSQSKDSDVYITDKCVLDMRSMDFKSNSAVAWSNKSDFACANAFNNSIIPEDTFFPSPESSCGFTSESYQQGVLSATILYEILLGKATLYAVLVSALVLMAMVKRKDSRG

SEQ ID NO: 45519 - protein, 759 aa, synthetic construct
MALPVTALLLPLALLLHAARPEVQLVESGGGLVQPGGSLRLSCAASGFNIKDTCIGWVRRAPGKEEELVAKICKYSGHTRYADSVKGRFTISADTSKNTAYLQMNSLRAEDTAVYYCAAVSVRDGHYNYWGQGTTVTVSSGTGGGGSGGGGSGGGGSEFDIQMTQSPSSLSASVGDRVTITCKASQSVSNDVTWYQQKPGQAPKLLIYSASNRYSGVPARFSGSGYGTEFTFTISSVQSEDFAVYFCQQDYSSFGQGTKLEIKRLEIQNPDPAVYQLRDSKSSDKSVCLFTDFDSQTNVSQSKDSDVYITDKCVLDMRSMDFKSNSAVAWSNKSDFACANAFNNSIIPEDTFFPSPESSCGFTSESYQQGVLSATILYEILLGKATLYAVLVSALVLMAMVKRKDSRGRAKRSGSGVKQTLNFDLLKLAGDVESNPGPTSMDWIWRILFLVGAATGAHSFEQVQLVESGPGVVQPGRSLRISCAVSGFSVTNYGVHWVRQPPGKGLEWLGVIWAGGITNYNSAFMSRLTISKDNSKNTVYLQMNSLRAEDTAMYYCASRGGHYGYALDYWGQGTLVTVSSTREDLKNVFPPEVAVFEPSEAEISHTQKATLVCLATGFYPDHVELSWWVNGKEVHSGVCTDPQPLKEQPALNDSRYCLSSRLRVSATFWQNPRNHFRCQVQFYGLSENDEWTQDRAKPVTQIVSAEAWGRADCDVKLVEKSFETDTNLNFQNLSVIGFRILLLKVAGFNLLMTLRLWSS

SEQ ID NO: 45520 - protein, 1126 aa, synthetic construct
MALPVTALLLPLALLLHAARPEVQLVESGGGLVQAGGSLRLSCAASGRTFSMGWFRQAPGKEREFVAAITYSGGSPYYADSVKGRFTISRDNAKNTVYLQMNSLKPEDTAVYYCAANPTYGSDWNAENWGQGTQVTVSSGTGGGGSGGGGSGGGGSEFDIQMTQSPSSLSASVGDRVTITCKASQSVSNDVTWYQQKPGQAPKLLIYSASNRYSGVPARFSGSGYGTEFTFTISSVQSEDFAVYFCQQDYSSFGQGTKLEIKRLEDLKNVFPPEVAVFEPSEAEISHTQKATLVCLATGFYPDHVELSWWVNGKEVHSGVCTDPQPLKEQPALNDSRYCLSSRLRVSATFWQNPRNHFRCQVQFYGLSENDEWTQDRAKPVTQIVSAEAWGRADCDVKLVEKSFETDTNLNFQNLSVIGFRILLLKVAGFNLLMTLRLWSSRAKRSGSGATNFSLLKQAGDVEENPGPTSATMDWIWRILFLVGAATGAHSGPEVQLVESGGGLVQAGGSLRLSCAASGRTFTMGWFRQAPGKEREFVAAISLSPTLAYYADSVKGRFTISRDNAKNTVVLQMNSLKPEDTALYYCAADRKSVMSIRPDYWGQGTQVTVSSGSGGGGSGGGGSGGGGSFEQVQLVESGPGVVQPGRSLRISCAVSGFSVTNYGVHWVRQPPGKGLEWLGVIWAGGITNYNSAFMSRLTISKDNSKNTVYLQMNSLRAEDTAMYYCASRGGHYGYALDYWGQGTLVTVSSTRIQNPDPAVYQLRDSKSSDKSVCLFTDFDSQTNVSQSKDSDVYITDKCVLDMRSMDFKSNSAVAWSNKSDFACANAFNNSIIPEDTFFPSPESSCGFTSESYQQGVLSATILYEILLGKATLYAVLVSALVLMAMVKRKDSRGRAKRSGSGVKQTLNFDLLKLAGDVESNPGPSRGHMTEYKPTVRLATRDDVPRAVRTLAAAFADYPATRHTVDPDRHIERVTELQELFLTRVGLDIGKVWVADDGAAVAVWTTPESVEAGAVFAEIGPRMAELSGSRLAAQQQMEGLLAPHRPKEPAWFLATVGVSPDHQGKGLGSAVVLPGVEAAERAGVPAFLETSAPRNLPFYERLGFTVTADVEVPEGPRTWCMTRKPGA

SEQ ID NO: 45521 - protein, 764 aa, synthetic construct
MALPVTALLLPLALLLHAARPEVQLVESGGGLVQPGGSLRLSCAASGFASDYYIIGWFRQAPGKEREGVSCISSRYANTNYADSVKGRFTISRDNAKNTVYLQMNSLKPEDTAVYYCAADTRRYTCPDIATMHRNFDSWGQGTLVTVSSGTGGGGSGGGGSGGGGSEFDIQMTQSPSSLSASVGDRVTITCKASQSVSNDVTWYQQKPGQAPKLLIYSASNRYSGVPARFSGSGYGTEFTFTISSVQSEDFAVYFCQQDYSSFGQGTKLEIKRLEDLKNVFPPEVAVFEPSEAEISHTQKATLVCLATGFYPDHVELSWWVNGKEVHSGVCTDPQPLKEQPALNDSRYCLSSRLRVSATFWQNPRNHFRCQVQFYGLSENDEWTQDRAKPVTQIVSAEAWGRADCDVKLVEKSFETDTNLNFQNLSVIGFRILLLKVAGFNLLMTLRLWSSRAKRSGSGATNFSLLKQAGDVEENPGPTSMDWIWRILFLVGAATGAHSFEQVQLVESGPGVVQPGRSLRISCAVSGFSVTNYGVHWVRQPPGKGLEWLGVIWAGGITNYNSAFMSRLTISKDNSKNTVYLQMNSLRAEDTAMYYCASRGGHYGYALDYWGQGTLVTVSSTRIQNPDPAVYQLRDSKSSDKSVCLFTDFDSQTNVSQSKDSDVYITDKCVLDMRSMDFKSNSAVAWSNKSDFACANAFNNSIIPEDTFFPSPESSCGFTSESYQQGVLSATILYEILLGKATLYAVLVSALVLMAMVKRKDSRG

SEQ ID NO: 45522 - protein, 764 aa, synthetic construct
MALPVTALLLPLALLLHAARPEVQLVESGGGLVQPGGSLRLSCEASGFASDDYIIGWFRQAPGKEREGVSCISSKYANTVYTDSVKGRFRLSRGTAKNTVYLQMSALKPEDTAVYYCAMDSRRVTCPEISTMHRNFDSWGQGTLVTVSSGTGGGGSGGGGSGGGGSEFDIQMTQSPSSLSASVGDRVTITCKASQSVSNDVTWYQQKPGQAPKLLIYSASNRYSGVPARFSGSGYGTEFTFTISSVQSEDFAVYFCQQDYSSFGQGTKLEIKRLEDLKNVFPPEVAVFEPSEAEISHTQKATLVCLATGFYPDHVELSWWVNGKEVHSGVCTDPQPLKEQPALNDSRYCLSSRLRVSATFWQNPRNHFRCQVQFYGLSENDEWTQDRAKPVTQIVSAEAWGRADCDVKLVEKSFETDTNLNFQNLSVIGFRILLLKVAGFNLLMTLRLWSSRAKRSGSGATNFSLLKQAGDVEENPGPTSMDWIWRILFLVGAATGAHSFEQVQLVESGPGVVQPGRSLRISCAVSGFSVTNYGVHWVRQPPGKGLEWLGVIWAGGITNYNSAFMSRLTISKDNSKNTVYLQMNSLRAEDTAMYYCASRGGHYGYALDYWGQGTLVTVSSTRIQNPDPAVYQLRDSKSSDKSVCLFTDFDSQTNVSQSKDSDVYITDKCVLDMRSMDFKSNSAVAWSNKSDFACANAFNNSIIPEDTFFPSPESSCGFTSESYQQGVLSATILYEILLGKATLYAVLVSALVLMAMVKRKDSRG

SEQ ID NO: 45523 - protein, 764 aa, synthetic construct
MALPVTALLLPLALLLHAARPEVQLVESGGGLVQPGGSLRLSCAASGFASDYYIIGWFRQAPGKEREGVSCISSRYANTNYADSVKGRFTISRDNAKNTVYLQMNSLKPEDTAVYYCAADTRRYTCPDIATMHRNFDSWGQGTLVTVSSGTGGGGSGGGGSGGGGSEFDIQMTQSPSSLSASVGDRVTITCKASQSVSNDVTWYQQKPGQAPKLLIYSASNRYSGVPARFSGSGYGTEFTFTISSVQSEDFAVYFCQQDYSSFGQGTKLEIKRLEIQNPDPAVYQLRDSKSSDKSVCLFTDFDSQTNVSQSKDSDVYITDKCVLDMRSMDFKSNSAVAWSNKSDFACANAFNNSIIPEDTFFPSPESSCGFTSESYQQGVLSATILYEILLGKATLYAVLVSALVLMAMVKRKDSRGRAKRSGSGATNFSLLKQAGDVEENPGPTSMDWIWRILFLVGAATGAHSFEQVQLVESGPGVVQPGRSLRISCAVSGFSVTNYGVHWVRQPPGKGLEWLGVIWAGGITNYNSAFMSRLTISKDNSKNTVYLQMNSLRAEDTAMYYCASRGGHYGYALDYWGQGTLVTVSSTRDLKNVFPPEVAVFEPSEAEISHTQKATLVCLATGFYPDHVELSWWVNGKEVHSGVCTDPQPLKEQPALNDSRYCLSSRLRVSATFWQNPRNHFRCQVQFYGLSENDEWTQDRAKPVTQIVSAEAWGRADCDVKLVEKSFETDTNLNFQNLSVIGFRILLLKVAGFNLLMTLRLWSS

SEQ ID NO: 45524 - protein, 764 aa, synthetic construct
MALPVTALLLPLALLLHAARPEVQLVESGGGLVQPGGSLRLSCEASGFASDDYIIGWFRQAPGKEREGVSCISSKYANTVYTDSVKGRFRLSRGTAKNTVYLQMSALKPEDTAVYYCAMDSRRVTCPEISTMHRNFDSWGQGTLVTVSSGTGGGGSGGGGSGGGGSEFDIQMTQSPSSLSASVGDRVTITCKASQSVSNDVTWYQQKPGQAPKLLIYSASNRYSGVPARFSGSGYGTEFTFTISSVQSEDFAVYFCQQDYSSFGQGTKLEIKRLEIQNPDPAVYQLRDSKSSDKSVCLFTDFDSQTNVSQSKDSDVYITDKCVLDMRSMDFKSNSAVAWSNKSDFACANAFNNSIIPEDTFFPSPESSCGFTSESYQQGVLSATILYEILLGKATLYAVLVSALVLMAMVKRKDSRGRAKRSGSGATNFSLLKQAGDVEENPGPTSMDWIWRILFLVGAATGAHSFEQVQLVESGPGVVQPGRSLRISCAVSGFSVTNYGVHWVRQPPGKGLEWLGVIWAGGITNYNSAFMSRLTISKDNSKNTVYLQMNSLRAEDTAMYYCASRGGHYGYALDYWGQGTLVTVSSTRDLKNVFPPEVAVFEPSEAEISHTQKATLVCLATGFYPDHVELSWWVNGKEVHSGVCTDPQPLKEQPALNDSRYCLSSRLRVSATFWQNPRNHFRCQVQFYGLSENDEWTQDRAKPVTQIVSAEAWGRADCDVKLVEKSFETDTNLNFQNLSVIGFRILLLKVAGFNLLMTLRLWSS

SEQ ID NO: 45525 - protein, 755 aa, synthetic construct
MALPVTALLLPLALLLHAARPQVKLEESGGGLVQPGESLRLSCSASGSIFKVFRVFAMSWYRQGPGKQRELVASISSGETTTYAESVKGRFTISRDNAKNTAYLQMDSLKPEDTAVYYCNADHTFTGDFWGQGTQVTVSSGTGGGGSGGGGSGGGGSEFDIQMTQSPSSLSASVGDRVTITCKASQSVSNDVTWYQQKPGQAPKLLIYSASNRYSGVPARFSGSGYGTEFTFTISSVQSEDFAVYFCQQDYSSFGQGTKLEIKRLEIQNPDPAVYQLRDSKSSDKSVCLFTDFDSQTNVSQSKDSDVYITDKCVLDMRSMDFKSNSAVAWSNKSDFACANAFNNSIIPEDTFFPSPESSCGFTSESYQQGVLSATILYEILLGKATLYAVLVSALVLMAMVKRKDSRGRAKRSGSGATNFSLLKQAGDVEENPGPTSMDWIWRILFLVGAATGAHSFEQVQLVESGPGVVQPGRSLRISCAVSGFSVTNYGVHWVRQPPGKGLEWLGVIWAGGITNYNSAFMSRLTISKDNSKNTVYLQMNSLRAEDTAMYYCASRGGHYGYALDYWGQGTLVTVSSTRDLKNVFPPEVAVFEPSEAEISHTQKATLVCLATGFYPDHVELSWWVNGKEVHSGVCTDPQPLKEQPALNDSRYCLSSRLRVSATFWQNPRNHFRCQVQFYGLSENDEWTQDRAKPVTQIVSAEAWGRADCDVKLVEKSFETDTNLNFQNLSVIGFRILLLKVAGFNLLMTLRLWSS

SEQ ID NO: 45526 - protein, 756 aa, synthetic construct
MALPVTALLLPLALLLHAARPDIQMTQSPSSLSASVGDRVTITCKASQSVSNDVTWYQQKPGQAPKLLIYSASNRYSGVPARFSGSGYGTEFTFTISSVQSEDFAVYFCQQDYSSFGQGTKLEIKRLEDLKNVFPPEVAVFEPSEAEISHTQKATLVCLATGFYPDHVELSWWVNGKEVHSGVCTDPQPLKEQPALNDSRYCLSSRLRVSATFWQNPRNHFRCQVQFYGLSENDEWTQDRAKPVTQIVSAEAWGRADCDVKLVEKSFETDTNLNFQNLSVIGFRILLLKVAGFNLLMTLRLWSSRAKRSGSGATNFSLLKQAGDVEENPGPTSATMDWIWRILFLVGAATGAHSGPEVQLVESGGGLVQAGGSLRLSCAASGRTFSMGWFRQAPGKEREFVAAITYSGGSPYYADSVKGRFTISRDNAKNTVYLQMNSLKPEDTAVYYCAANPTYGSDWNAENWGQGTQVTVSSGSGGGGSGGGGSGGGGSFEQVQLVESGPGVVQPGRSLRISCAVSGFSVTNYGVHWVRQPPGKGLEWLGVIWAGGITNYNSAFMSRLTISKDNSKNTVYLQMNSLRAEDTAMYYCASRGGHYGYALDYWGQGTLVTVSSTRIQNPDPAVYQLRDSKSSDKSVCLFTDFDSQTNVSQSKDSDVYITDKCVLDMRSMDFKSNSAVAWSNKSDFACANAFNNSIIPEDTFFPSPESSCGFTSESYQQGVLSATILYEILLGKATLYAVLVSALVLMAMVKRKDSRG

SEQ ID NO: 45527 - protein, 757 aa, synthetic construct
MALPVTALLLPLALLLHAARPDIQMTQSPSSLSASVGDRVTITCKASQSVSNDVTWYQQKPGQAPKLLIYSASNRYSGVPARFSGSGYGTEFTFTISSVQSEDFAVYFCQQDYSSFGQGTKLEIKRLEDLKNVFPPEVAVFEPSEAEISHTQKATLVCLATGFYPDHVELSWWVNGKEVHSGVCTDPQPLKEQPALNDSRYCLSSRLRVSATFWQNPRNHFRCQVQFYGLSENDEWTQDRAKPVTQIVSAEAWGRADCDVKLVEKSFETDTNLNFQNLSVIGFRILLLKVAGFNLLMTLRLWSSRAKRSGSGATNFSLLKQAGDVEENPGPTSATMDWIWRILFLVGAATGAHSGPEVQLVESGGGLVQPGGSLRLSCAASGSIFGFNDMAWYRQAPGKQRELVALISRVGVTSSADSVKGRFTISRVNAKDTVYLQMNSLKPEDTAVYYCYMDQRLDGSTLAYWGQGTQVTVSSGSGGGGSGGGGSGGGGSFEQVQLVESGPGVVQPGRSLRISCAVSGFSVTNYGVHWVRQPPGKGLEWLGVIWAGGITNYNSAFMSRLTISKDNSKNTVYLQMNSLRAEDTAMYYCASRGGHYGYALDYWGQGTLVTVSSTRIQNPDPAVYQLRDSKSSDKSVCLFTDFDSQTNVSQSKDSDVYITDKCVLDMRSMDFKSNSAVAWSNKSDFACANAFNNSIIPEDTFFPSPESSCGFTSESYQQGVLSATILYEILLGKATLYAVLVSALVLMAMVKRKDSRG

SEQ ID NO: 45528 - protein, 753 aa, synthetic construct
MALPVTALLLPLALLLHAARPDIQMTQSPSSLSASVGDRVTITCKASQSVSNDVTWYQQKPGQAPKLLIYSASNRYSGVPARFSGSGYGTEFTFTISSVQSEDFAVYFCQQDYSSFGQGTKLEIKRLEDLKNVFPPEVAVFEPSEAEISHTQKATLVCLATGFYPDHVELSWWVNGKEVHSGVCTDPQPLKEQPALNDSRYCLSSRLRVSATFWQNPRNHFRCQVQFYGLSENDEWTQDRAKPVTQIVSAEAWGRADCDVKLVEKSFETDTNLNFQNLSVIGFRILLLKVAGFNLLMTLRLWSSRAKRSGSGATNFSLLKQAGDVEENPGPTSATMDWIWRILFLVGAATGAHSGPEVQLVESGGGLVQAGGSLRLSCAASGSVFSGNVMGWYRQAPGKEREWVAAIASGGSIYYRDSVKGRFTISRDNAKNTVYLQMNSLKPEDTAVYYCNSHPPTLPYWGLGTQVTVSSGSGGGGSGGGGSGGGGSFEQVQLVESGPGVVQPGRSLRISCAVSGFSVTNYGVHWVRQPPGKGLEWLGVIWAGGITNYNSAFMSRLTISKDNSKNTVYLQMNSLRAEDTAMYYCASRGGHYGYALDYWGQGTLVTVSSTRIQNPDPAVYQLRDSKSSDKSVCLFTDFDSQTNVSQSKDSDVYITDKCVLDMRSMDFKSNSAVAWSNKSDFACANAFNNSIIPEDTFFPSPESSCGFTSESYQQGVLSATILYEILLGKATLYAVLVSALVLMAMVKRKDSRG

SEQ ID NO: 45529 - protein, 751 aa, synthetic construct
MALPVTALLLPLALLLHAARPDIQMTQSPSSLSASVGDRVTITCKASQSVSNDVTWYQQKPGQAPKLLIYSASNRYSGVPARFSGSGYGTEFTFTISSVQSEDFAVYFCQQDYSSFGQGTKLEIKRLEDLKNVFPPEVAVFEPSEAEISHTQKATLVCLATGFYPDHVELSWWVNGKEVHSGVCTDPQPLKEQPALNDSRYCLSSRLRVSATFWQNPRNHFRCQVQFYGLSENDEWTQDRAKPVTQIVSAEAWGRADCDVKLVEKSFETDTNLNFQNLSVIGFRILLLKVAGFNLLMTLRLWSSRAKRSGSGATNFSLLKQAGDVEENPGPTSATMDWIWRILFLVGAATGAHSGPEVQLLESGGGLVQPGGSLRLSCAASGFSFSSYALSWVRQAPGKGLEWVSSIGENDGTTDYADAVKGRFTISRDNSKNTLYLQMNSLRVEDTAVYYCVKDGIHWGQGTLVTVSSGSGGGGSGGGGSGGGGSFEQVQLVESGPGVVQPGRSLRISCAVSGFSVTNYGVHWVRQPPGKGLEWLGVIWAGGITNYNSAFMSRLTISKDNSKNTVYLQMNSLRAEDTAMYYCASRGGHYGYALDYWGQGTLVTVSSTRIQNPDPAVYQLRDSKSSDKSVCLFTDFDSQTNVSQSKDSDVYITDKCVLDMRSMDFKSNSAVAWSNKSDFACANAFNNSIIPEDTFFPSPESSCGFTSESYQQGVLSATILYEILLGKATLYAVLVSALVLMAMVKRKDSRG

SEQ ID NO: 45530 - protein, 1120 aa, synthetic construct
MGPRLLFWALLCLLGTGPVEAGVTQSPTHLIKTRGQQATLRCSPISGHTSVYWYQQALGLGLQFLLWYDEGEERNRGNFPPRFSGRQFPNYSSELNVNALELEDSALYLCASSLGGPRGLAGLRGDEQFFGPGTRLTVLEGTGGGGSGGGEFDIQMTQSPSSLSASVGDRVTITCKASQSVSNDVTWYQQKPGQAPKLLIYSASNRYSGVPARFSGSGYGTEFTFTISSVQSEDFAVYFCQQDYSSFGQGTKLEIKRLEDLKNVFPPEVAVFEPSEAEISHTQKATLVCLATGFYPDHVELSWWVNGKEVHSGVCTDPQPLKEQPALNDSRYCLSSRLRVSATFWQNPRNHFRCQVQFYGLSENDEWTQDRAKPVTQIVSAEAWGRADCDVKLVEKSFETDTNLNFQNLSVIGFRILLLKVAGFNLLMTLRLWSSRAKRSGSGATNFSLLKQAGDVEENPGPTSATMDWIWRILFLVGAATGAHSGPEVQLVESGGGLVQAGGSLRLSCAASGRTFSMGWFRQAPGKEREFVAAITYSGGSPYYADSVKGRFTISRDNAKNTVYLQMNSLKPEDTAVYYCAANPTYGSDWNAENWGQGTQVTVSSGSGGGGSGGGGSGGGGSFEQVQLVESGPGVVQPGRSLRISCAVSGFSVTNYGVHWVRQPPGKGLEWLGVIWAGGITNYNSAFMSRLTISKDNSKNTVYLQMNSLRAEDTAMYYCASRGGHYGYALDYWGQGTLVTVSSTRIQNPDPAVYQLRDSKSSDKSVCLFTDFDSQTNVSQSKDSDVYITDKCVLDMRSMDFKSNSAVAWSNKSDFACANAFNNSIIPEDTFFPSPESSCGFTSESYQQGVLSATILYEILLGKATLYAVLVSALVLMAMVKRKDSRGRAKRSGSGVKQTLNFDLLKLAGDVESNPGPSRGHMTEYKPTVRLATRDDVPRAVRTLAAAFADYPATRHTVDPDRHIERVTELQELFLTRVGLDIGKVWVADDGAAVAVWTTPESVEAGAVFAEIGPRMAELSGSRLAAQQQMEGLLAPHRPKEPAWFLATVGVSPDHQGKGLGSAVVLPGVEAAERAGVPAFLETSAPRNLPFYERLGFTVTADVEVPEGPRTWCMTRKPGA

SEQ ID NO: 45531 - protein, 1119 aa, synthetic construct
MGPRLLFWALLCLLGTGPVEAGVTQSPTHLIKTRGQQATLRCSPISGHTSVYWYQQALGLGLQFLLWYDEGEERNRGNFPPRFSGRQFPNYSSELNVNALELEDSALYLCASSLGGDELGADGNEQFFGPGTRLTVLEGTGGGGSGGGSEFDIQMTQSPSSLSASVGDRVTITCKASQSVSNDVTWYQQKPGQAPKLLIYSASNRYSGVPARFSGSGYGTEFTFTISSVQSEDFAVYFCQQDYSSFGQGTKLEIKRLEDLKNVFPPEVAVFEPSEAEISHTQKATLVCLATGFYPDHVELSWWVNGKEVHSGVCTDPQPLKEQPALNDSRYCLSSRLRVSATFWQNPRNHFRCQVQFYGLSENDEWTQDRAKPVTQIVSAEAWGRADCDVKLVEKSFETDTNLNFQNLSVIGFRILLLKVAGFNLLMTLRLWSSRAKRSGSGATNFSLLKQAGDVEENPGPTSATMDWIWRILFLVGAATGAHSGPEVQLVESGGGLVQAGGSLRLSCAASGRTFSMGWFRQAPGKEREFVAAITYSGGSPYYADSVKGRFTISRDNAKNTVYLQMNSLKPEDTAVYYCAANPTYGSDWNAENWGQGTQVTVSSGSGGGGSGGGGSGGGGSFEQVQLVESGPGVVQPGRSLRISCAVSGFSVTNYGVHWVRQPPGKGLEWLGVIWAGGITNYNSAFMSRLTISKDNSKNTVYLQMNSLRAEDTAMYYCASRGGHYGYALDYWGQGTLVTVSSTRIQNPDPAVYQLRDSKSSDKSVCLFTDFDSQTNVSQSKDSDVYITDKCVLDMRSMDFKSNSAVAWSNKSDFACANAFNNSIIPEDTFFPSPESSCGFTSESYQQGVLSATILYEILLGKATLYAVLVSALVLMAMVKRKDSRGRAKRSGSGVKQTLNFDLLKLAGDVESNPGPSRGHMTEYKPTVRLATRDDVPRAVRTLAAAFADYPATRHTVDPDRHIERVTELQELFLTRVGLDIGKVWVADDGAAVAVWTTPESVEAGAVFAEIGPRMAELSGSRLAAQQQMEGLLAPHRPKEPAWFLATVGVSPDHQGKGLGSAVVLPGVEAAERAGVPAFLETSAPRNLPFYERLGFTVTADVEVPEGPRTWCMTRKPGA

SEQ ID NO: 45532 - protein, 944 aa, synthetic construct
MALPVTALLLPLALLLHAARPDIQMTQSPSSLSASVGDRVTITCKASQSVSNDVTWYQQKPGQAPKLLIYSASNRYSGVPARFSGSGYGTEFTFTISSVQSEDFAVYFCQQDYSSFGQGTKLEIKRLEDLKNVFPPEVAVFEPSEAEISHTQKATLVCLATGFYPDHVELSWWVNGKEVHSGVCTDPQPLKEQPALNDSRYCLSSRLRVSATFWQNPRNHFRCQVQFYGLSENDEWTQDRAKPVTQIVSAEAWGRADCDVKLVEKSFETDTNLNFQNLSVIGFRILLLKVAGFNLLMTLRLWSSRAKRSGSGATNFSLLKQAGDVEENPGPTSATMDWIWRILFLVGAATGAHSGPMGSWLEFYHRLNAIDSRLWALGGSEAELAAFEKEIAAFESELQAYKGKGNPEVESLRDHAAHIREWLQAYRHNGSGGGGSGGGGSGGGGSFEQVQLVESGPGVVQPGRSLRISCAVSGFSVTNYGVHWVRQPPGKGLEWLGVIWAGGITNYNSAFMSRLTISKDNSKNTVYLQMNSLRAEDTAMYYCASRGGHYGYALDYWGQGTLVTVSSTRIQNPDPAVYQLRDSKSSDKSVCLFTDFDSQTNVSQSKDSDVYITDKCVLDMRSMDFKSNSAVAWSNKSDFACANAFNNSIIPEDTFFPSPESSCGFTSESYQQGVLSATILYEILLGKATLYAVLVSALVLMAMVKRKDSRGRAKRSGSGVKQTLNFDLLKLAGDVESNPGPSRGHMTEYKPTVRLATRDDVPRAVRTLAAAFADYPATRHTVDPDRHIERVTELQELFLTRVGLDIGKVWVADDGAAVAVWTTPESVEAGAVFAEIGPRMAELSGSRLAAQQQMEGLLAPHRPKEPAWFLATVGVSPDHQGKGLGSAVVLPGVEAAERAGVPAFLETSAPRNLPFYERLGFTVTADVEVPEGPRTWCMTRKPGA

SEQ ID NO: 45533 - protein, 944 aa, synthetic construct
MALPVTALLLPLALLLHAARPACMGSWFEFYDRLNAIDARLWALGGSEAELAAFEKEIAAFESELQAYKGKGNPEVENLRVHAAAIREWLQAYRHNGTGGGGSGGGGSGGGGSEFDIQMTQSPSSLSASVGDRVTITCKASQSVSNDVTWYQQKPGQAPKLLIYSASNRYSGVPARFSGSGYGTEFTFTISSVQSEDFAVYFCQQDYSSFGQGTKLEIKRLEDLKNVFPPEVAVFEPSEAEISHTQKATLVCLATGFYPDHVELSWWVNGKEVHSGVCTDPQPLKEQPALNDSRYCLSSRLRVSATFWQNPRNHFRCQVQFYGLSENDEWTQDRAKPVTQIVSAEAWGRADCDVKLVEKSFETDTNLNFQNLSVIGFRILLLKVAGFNLLMTLRLWSSRAKRSGSGATNFSLLKQAGDVEENPGPTSMDWIWRILFLVGAATGAHSFEQVQLVESGPGVVQPGRSLRISCAVSGFSVTNYGVHWVRQPPGKGLEWLGVIWAGGITNYNSAFMSRLTISKDNSKNTVYLQMNSLRAEDTAMYYCASRGGHYGYALDYWGQGTLVTVSSTRIQNPDPAVYQLRDSKSSDKSVCLFTDFDSQTNVSQSKDSDVYITDKCVLDMRSMDFKSNSAVAWSNKSDFACANAFNNSIIPEDTFFPSPESSCGFTSESYQQGVLSATILYEILLGKATLYAVLVSALVLMAMVKRKDSRGRAKRSGSGVKQTLNFDLLKLAGDVESNPGPSRGHMTEYKPTVRLATRDDVPRAVRTLAAAFADYPATRHTVDPDRHIERVTELQELFLTRVGLDIGKVWVADDGAAVAVWTTPESVEAGAVFAEIGPRMAELSGSRLAAQQQMEGLLAPHRPKEPAWFLATVGVSPDHQGKGLGSAVVLPGVEAAERAGVPAFLETSAPRNLPFYERLGFTVTADVEVPEGPRTWCMTRKPGA

SEQ ID NO: 45534 - protein, 1061 aa, synthetic construct
MALPVTALLLPLALLLHAARPACMDPDLEIRAAFLRQRNTALRTEVAELEQEVQRLENEVSQYETRYGPLGGGKGTGGGGSGGGGSGGGGSEFDIQMTQSPSSLSASVGDRVTITCKASQSVSNDVTWYQQKPGQAPKLLIYSASNRYSGVPARFSGSGYGTEFTFTISSVQSEDFAVYFCQQDYSSFGQGTKLEIKRLEDLKNVFPPEVAVFEPSEAEISHTQKATLVCLATGFYPDHVELSWWVNGKEVHSGVCTDPQPLKEQPALNDSRYCLSSRLRVSATFWQNPRNHFRCQVQFYGLSENDEWTQDRAKPVTQIVSAEAWGRADCDVKLVEKSFETDTNLNFQNLSVIGFRILLLKVAGFNLLMTLRLWSSRAKRSGSGATNFSLLKQAGDVEENPGPTSATMDWIWRILFLVGAATGAHSGPEVQLVESGGGLVQAGGSLRLSCAASGRTFSMGWFRQAPGKEREFVAAITYSGGSPYYADSVKGRFTISRDNAKNTVYLQMNSLKPEDTAVYYCAANPTYGSDWNAENWGQGTQVTVSSGSGGGGSGGGGSGGGGSFEQVQLVESGPGVVQPGRSLRISCAVSGFSVTNYGVHWVRQPPGKGLEWLGVIWAGGITNYNSAFMSRLTISKDNSKNTVYLQMNSLRAEDTAMYYCASRGGHYGYALDYWGQGTLVTVSSTRIQNPDPAVYQLRDSKSSDKSVCLFTDFDSQTNVSQSKDSDVYITDKCVLDMRSMDFKSNSAVAWSNKSDFACANAFNNSIIPEDTFFPSPESSCGFTSESYQQGVLSATILYEILLGKATLYAVLVSALVLMAMVKRKDSRGRAKRSGSGVKQTLNFDLLKLAGDVESNPGPSRGHMTEYKPTVRLATRDDVPRAVRTLAAAFADYPATRHTVDPDRHIERVTELQELFLTRVGLDIGKVWVADDGAAVAVWTTPESVEAGAVFAEIGPRMAELSGSRLAAQQQMEGLLAPHRPKEPAWFLATVGVSPDHQGKGLGSAVVLPGVEAAERAGVPAFLETSAPRNLPFYERLGFTVTADVEVPEGPRTWCMTRKPGA

SEQ ID NO: 45535 - protein, 944 aa, synthetic construct
MALPVTALLLPLALLLHAARPDIQMTQSPSSLSASVGDRVTITCKASQSVSNDVTWYQQKPGQAPKLLIYSASNRYSGVPARFSGSGYGTEFTFTISSVQSEDFAVYFCQQDYSSFGQGTKLEIKRLEDLKNVFPPEVAVFEPSEAEISHTQKATLVCLATGFYPDHVELSWWVNGKEVHSGVCTDPQPLKEQPALNDSRYCLSSRLRVSATFWQNPRNHFRCQVQFYGLSENDEWTQDRAKPVTQIVSAEAWGRADCDVKLVEKSFETDTNLNFQNLSVIGFRILLLKVAGFNLLMTLRLWSSRAKRSGSGATNFSLLKQAGDVEENPGPTSATMDWIWRILFLVGAATGAHSGPMGSWSEFYDRLHAIHHRLYALGGSEAELAAFEKEIAAFESELQAYKGKGNPEVEALRDTAAFIRTRLQAYRHNGSGGGGSGGGGSGGGGSFEQVQLVESGPGVVQPGRSLRISCAVSGFSVTNYGVHWVRQPPGKGLEWLGVIWAGGITNYNSAFMSRLTISKDNSKNTVYLQMNSLRAEDTAMYYCASRGGHYGYALDYWGQGTLVTVSSTRIQNPDPAVYQLRDSKSSDKSVCLFTDFDSQTNVSQSKDSDVYITDKCVLDMRSMDFKSNSAVAWSNKSDFACANAFNNSIIPEDTFFPSPESSCGFTSESYQQGVLSATILYEILLGKATLYAVLVSALVLMAMVKRKDSRGRAKRSGSGVKQTLNFDLLKLAGDVESNPGPSRGHMTEYKPTVRLATRDDVPRAVRTLAAAFADYPATRHTVDPDRHIERVTELQELFLTRVGLDIGKVWVADDGAAVAVWTTPESVEAGAVFAEIGPRMAELSGSRLAAQQQMEGLLAPHRPKEPAWFLATVGVSPDHQGKGLGSAVVLPGVEAAERAGVPAFLETSAPRNLPFYERLGFTVTADVEVPEGPRTWCMTRKPGA

SEQ ID NO: 45536 - protein, 1154 aa, synthetic construct
MALPVTALLLPLALLLHAARPDIQMTQSPSSLSASVGDRVTITCKASQSVSNDVTWYQQKPGQAPKLLIYSASNRYSGVPARFSGSGYGTEFTFTISSVQSEDFAVYFCQQDYSSFGQGTKLEIKRLEDLKNVFPPEVAVFEPSEAEISHTQKATLVCLATGFYPDHVELSWWVNGKEVHSGVCTDPQPLKEQPALNDSRYCLSSRLRVSATFWQNPRNHFRCQVQFYGLSENDEWTQDRAKPVTQIVSAEAWGRADCDVKLVEKSFETDTNLNFQNLSVIGFRILLLKVAGFNLLMTLRLWSSRAKRSGSGATNFSLLKQAGDVEENPGPTSTMDWIWRILFLVGAATGAHSLFNQEVQIPLTESYCGPCPKNWICYKNNCYQFFDESKNWYESQASCMSQNASLLKVYSKEDQDLLKLVKSAHWMGLVHIPTNGSWQWEDGSILSPNLLTIIEMQKGDCALYASSFKGYIENCSTPNTYICMQRTVSGGGGSGGGGSGGGGDLFNQEVQIPLTESYCGPCPKNWICYKNNCYQFFDESKNWYESQASCMSQNASLLKVYSKEDQDLLKLVKSAHWMGLVHIPTNGSWQWEDGSILSPNLLTIIEMQKGDCALYASSFKGYIENCSTPNTYICMQRTVGSGGGGSGGGGSGGGGSFEQVQLVESGPGVVQPGRSLRISCAVSGFSVTNYGVHWVRQPPGKGLEWLGVIWAGGITNYNSAFMSRLTISKDNSKNTVYLQMNSLRAEDTAMYYCASRGGHYGYALDYWGQGTLVTVSSTRIQNPDPAVYQLRDSKSSDKSVCLFTDFDSQTNVSQSKDSDVYITDKCVLDMRSMDFKSNSAVAWSNKSDFACANAFNNSIIPEDTFFPSPESSCGFTSESYQQGVLSATILYEILLGKATLYAVLVSALVLMAMVKRKDSRGRAKRSGSGVKQTLNFDLLKLAGDVESNPGPSRGHMTEYKPTVRLATRDDVPRAVRTLAAAFADYPATRHTVDPDRHIERVTELQELFLTRVGLDIGKVWVADDGAAVAVWTTPESVEAGAVFAEIGPRMAELSGSRLAAQQQMEGLLAPHRPKEPAWFLATVGVSPDHQGKGLGSAVVLPGVEAAERAGVPAFLETSAPRNLPFYERLGFTVTADVEVPEGPRTWCMTRKPGA

SEQ ID NO: 45537 - protein, 617 aa, synthetic construct; identical to SEQ ID NO: 45494

SEQ ID NO: 45538 - protein, 621 aa, synthetic construct
MALPVTALLLPLALLLHAARPDIQMTQSPSSLSASVGDRVTITCKASQSVSNDVTWYQQKPGQAPKLLIYSASNRYSGVPARFSGSGYGTEFTFTISSVQSEDFAVYFCQQDYSSFGQGTKLEIKRLEIQNPDPAVYQLRDSKSSDKSVCLFTDFDSQTNVSQSKDSDVYITDKCVLDMRSMDFKSNSAVAWSNKSDFACANAFNNSIIPEDTFFPSPESSCDVKLVEKSFETDTNLNFQILYEILLGKATLYAVLVSALVLMAMVKRKDSRGRAKRSGSGVKQTLNFDLLKLAGDVESNPGPTSMDWIWRILFLVGAATGAHSFEQVQLVESGPGVVQPGRSLRISCAVSGFSVTNYGVHWVRQPPGKGLEWLGVIWAGGITNYNSAFMSRLTISKDNSKNTVYLQMNSLRAEDTAMYYCASRGGHYGYALDYWGQGTLVTVSSTREDLKNVFPPEVAVFEPSEAEISHTQKATLVCLATGFYPDHVELSWWVNGKEVHSGVCTDPQPLKEQPALNDSRYCLSSRLRVSATFWQNPRNHFRCQVQFYGLSENDEWTQDRAKPVTQIVSAEAWGRADCGFTSESYQQGVLSATNLSVIGFRILLLKVAGFNLLMTLRLWSS

SEQ ID NO: 45539 - protein, 752 aa, synthetic construct
MALPVTALLLPLALLLHAARPEVQLVESGGGLVQPGGSLRLSCAASGFSFSDFWMSWVRQAPGKGLEWVATISQAGSEKDYVDSVKGRFTISRDNAKKSLYLQMNSLRAEDTAVYYCASGVYSFDYRGQGTLVTVSSGTGGGGSGGGGSGGGGSEFDIQMTQSPSSLSASVGDRVTITCKASQSVSNDVTWYQQKPGQAPKLLIYSASNRYSGVPARFSGSGYGTEFTFTISSVQSEDFAVYFCQQDYSSFGQGTKLEIKRLEDLKNVFPPEVAVFEPSEAEISHTQKATLVCLATGFYPDHVELSWWVNGKEVHSGVCTDPQPLKEQPALNDSRYCLSSRLRVSATFWQNPRNHFRCQVQFYGLSENDEWTQDRAKPVTQIVSAEAWGRADCGFTSESYQQGVLSATNLSVIGFRILLLKVAGFNLLMTLRLWSSRAKRSGSGATNFSLLKQAGDVEENPGPTSMDWIWRILFLVGAATGAHSFEQVQLVESGPGVVQPGRSLRISCAVSGFSVTNYGVHWVRQPPGKGLEWLGVIWAGGITNYNSAFMSRLTISKDNSKNTVYLQMNSLRAEDTAMYYCASRGGHYGYALDYWGQGTLVTVSSTRIQNPDPAVYQLRDSKSSDKSVCLFTDFDSQTNVSQSKDSDVYITDKCVLDMRSMDFKSNSAVAWSNKSDFACANAFNNSIIPEDTFFPSPESSCDVKLVEKSFETDTNLNFQILYEILLGKATLYAVLVSALVLMAMVKRKDSRG

SEQ ID NO: 45540 - protein, 756 aa, synthetic construct
MALPVTALLLPLALLLHAARPEVQLVESGGGLVQPGGSLRLSCAASGFSFSDFWMSWVRQAPGKGLEWVATISQAGSEKDYVDSVKGRFTISRDNAKKSLYLQMNSLRAEDTAVYYCASGVYSFDYRGQGTLVTVSSGTGGGGSGGGGSGGGGSEFDIQMTQSPSSLSASVGDRVTITCKASQSVSNDVTWYQQKPGQAPKLLIYSASNRYSGVPARFSGSGYGTEFTFTISSVQSEDFAVYFCQQDYSSFGQGTKLEIKRLEIQNPDPAVYQLRDSKSSDKSVCLFTDFDSQTNVSQSKDSDVYITDKCVLDMRSMDFKSNSAVAWSNKSDFACANAFNNSIIPEDTFFPSPESSCDVKLVEKSFETDTNLNFQILYEILLGKATLYAVLVSALVLMAMVKRKDSRGRAKRSGSGVKQTLNFDLLKLAGDVESNPGPTSMDWIWRILFLVGAATGAHSFEQVQLVESGPGVVQPGRSLRISCAVSGFSVTNYGVHWVRQPPGKGLEWLGVIWAGGITNYNSAFMSRLTISKDNSKNTVYLQMNSLRAEDTAMYYCASRGGHYGYALDYWGQGTLVTVSSTREDLKNVFPPEVAVFEPSEAEISHTQKATLVCLATGFYPDHVELSWWVNGKEVHSGVCTDPQPLKEQPALNDSRYCLSSRLRVSATFWQNPRNHFRCQVQFYGLSENDEWTQDRAKPVTQIVSAEAWGRADCGFTSESYQQGVLSATNLSVIGFRILLLKVAGFNLLMTLRLWSS

SEQ ID NO: 45541 - protein, 889 aa, synthetic construct
MALPVTALLLPLALLLHAARPEVQLVESGGGLVQPGGSLRLSCAASGFSFSDFWMSWVRQAPGKGLEWVATISQAGSEKDYVDSVKGRFTISRDNAKKSLYLQMNSLRAEDTAVYYCASGVYSFDYRGQGTLVTVSSGTGGGGSGGGGSGGGGSEFDIQMTQSPSSLSASVGDRVTITCKASQSVSNDVTWYQQKPGQAPKLLIYSASNRYSGVPARFSGSGYGTEFTFTISSVQSEDFAVYFCQQDYSSFGQGTKLEIKRLEDLKNVFPPEVAVFEPSEAEISHTQKATLVCLATGFYPDHVELSWWVNGKEVHSGVCTDPQPLKEQPALNDSRYCLSSRLRVSATFWQNPRNHFRCQVQFYGLSENDEWTQDRAKPVTQIVSAEAWGRADCGFTSESYQQGVLSATNLSVIGFRILLLKVAGFNLLMTLRLWSSRAKRSGSGATNFSLLKQAGDVEENPGPTSMDWIWRILFLVGAATGAHSGPQLQLQESGPGLVKPSETLSLTCTVSGDSISSGDYYWGWIRQPPGKGLEWIGHIYYSGVTYYNPSLKSRVTISVDTSRNQFSLKLSSVTAADTAVYYCTREDSSNWRSRGQGTLVTVSSGSGGGGSGGGGSGGGGSFEQVQLVESGPGVVQPGRSLRISCAVSGFSVTNYGVHWVRQPPGKGLEWLGVIWAGGITNYNSAFMSRLTISKDNSKNTVYLQMNSLRAEDTAMYYCASRGGHYGYALDYWGQGTLVTVSSTRIQNPDPAVYQLRDSKSSDKSVCLFTDFDSQTNVSQSKDSDVYITDKCVLDMRSMDFKSNSAVAWSNKSDFACANAFNNSIIPEDTFFPSPESSCDVKLVEKSFETDTNLNFQILYEILLGKATLYAVLVSALVLMAMVKRKDSRG

SEQ ID NO: 45542 - protein, 893 aa, synthetic construct
MALPVTALLLPLALLLHAARPEVQLVESGGGLVQPGGSLRLSCAASGFSFSDFWMSWVRQAPGKGLEWVATISQAGSEKDYVDSVKGRFTISRDNAKKSLYLQMNSLRAEDTAVYYCASGVYSFDYRGQGTLVTVSSGTGGGGSGGGGSGGGGSEFDIQMTQSPSSLSASVGDRVTITCKASQSVSNDVTWYQQKPGQAPKLLIYSASNRYSGVPARFSGSGYGTEFTFTISSVQSEDFAVYFCQQDYSSFGQGTKLEIKRLEIQNPDPAVYQLRDSKSSDKSVCLFTDFDSQTNVSQSKDSDVYITDKCVLDMRSMDFKSNSAVAWSNKSDFACANAFNNSIIPEDTFFPSPESSCDVKLVEKSFETDTNLNFQILYEILLGKATLYAVLVSALVLMAMVKRKDSRGRAKRSGSGVKQTLNFDLLKLAGDVESNPGPTSMDWIWRILFLVGAATGAHSGPQLQLQESGPGLVKPSETLSLTCTVSGDSISSGDYYWGWIRQPPGKGLEWIGHIYYSGVTYYNPSLKSRVTISVDTSRNQFSLKLSSVTAADTAVYYCTREDSSNWRSRGQGTLVTVSSGSGGGGSGGGGSGGGGSFEQVQLVESGPGVVQPGRSLRISCAVSGFSVTNYGVHWVRQPPGKGLEWLGVIWAGGITNYNSAFMSRLTISKDNSKNTVYLQMNSLRAEDTAMYYCASRGGHYGYALDYWGQGTLVTVSSTREDLKNVFPPEVAVFEPSEAEISHTQKATLVCLATGFYPDHVELSWWVNGKEVHSGVCTDPQPLKEQPALNDSRYCLSSRLRVSATFWQNPRNHFRCQVQFYGLSENDEWTQDRAKPVTQIVSAEAWGRADCGFTSESYQQGVLSATNLSVIGFRILLLKVAGFNLLMTLRLWSS

SEQ ID NO: 45543 - protein, 721 aa, synthetic construct
MALPVTALLLPLALLLHAARPDIQMTQSPSSLSASVGDRVTITCKASQSVSNDVTWYQQKPGQAPKLLIYSASNRYSGVPARFSGSGYGTEFTFTISSVQSEDFAVYFCQQDYSSFGQGTKLEIKRLEDLKNVFPPEVAVFEPSEAEISHTQKATLVCLATGFYPDHVELSWWVNGKEVHSGVCTDPQPLKEQPALNDSRYCLSSRLRVSATFWQNPRNHFRCQVQFYGLSENDEWTQDRAKPVTQIVSAEAWGRADDVIKIHWQEKKSNTILGSQEGNTMKTNDTYMKFSWLTVPEKSLDKEHRCIVRHENNKNGVDQEIIFPPIKTDVITMDPKDNCSKDANDTLLLQLTNTSAYYMYLLLLLKSVVYFAIITCCLLMAMVKRKDSRGRAKRSGSGATNFSLLKQAGDVEENPGPTSMDWIWRILFLVGAATGAHSFEQVQLVESGPGVVQPGRSLRISCAVSGFSVTNYGVHWVRQPPGKGLEWLGVIWAGGITNYNSAFMSRLTISKDNSKNTVYLQMNSLRAEDTAMYYCASRGGHYGYALDYWGQGTLVTVSSTRIQNPDPAVYQLRDSKSSDKSVCLFTDFDSQTNVSQSKDSDVYITDKCVLDMRSMDFKSNSAVAWSNKSDFACANAFNNSIIPEDTFFPSPESSDSTDHVKPKETENTKQPSKSCHKPKAIVHTEKVNMMSLTVLGLRMLFAKTVAVNFLLTAKLFFLLTA

SEQ ID NO: 45544 - protein, 725 aa, synthetic construct
MALPVTALLLPLALLLHAARPDIQMTQSPSSLSASVGDRVTITCKASQSVSNDVTWYQQKPGQAPKLLIYSASNRYSGVPARFSGSGYGTEFTFTISSVQSEDFAVYFCQQDYSSFGQGTKLEIKRLEIQNPDPAVYQLRDSKSSDKSVCLFTDFDSQTNVSQSKDSDVYITDKCVLDMRSMDFKSNSAVAWSNKSDFACANAFNNSIIPEDTFFPSPESSDSTDHVKPKETENTKQPSKSCHKPKAIVHTEKVNMMSLTVLGLRMLFAKTVAVNFLLTAKLFFLLTARAKRSGSGVKQTLNFDLLKLAGDVESNPGPTSMDWIWRILFLVGAATGAHSFEQVQLVESGPGVVQPGRSLRISCAVSGFSVTNYGVHWVRQPPGKGLEWLGVIWAGGITNYNSAFMSRLTISKDNSKNTVYLQMNSLRAEDTAMYYCASRGGHYGYALDYWGQGTLVTVSSTREDLKNVFPPEVAVFEPSEAEISHTQKATLVCLATGFYPDHVELSWWVNGKEVHSGVCTDPQPLKEQPALNDSRYCLSSRLRVSATFWQNPRNHFRCQVQFYGLSENDEWTQDRAKPVTQIVSAEAWGRADDVIKIHWQEKKSNTILGSQEGNTMKTNDTYMKFSWLTVPEKSLDKEHRCIVRHENNKNGVDQEIIFPPIKTDVITMDPKDNCSKDANDTLLLQLTNTSAYYMYLLLLLKSVVYFAIITCCLLMAMVKRKDSRG

SEQ ID NO: 45545 - protein, 856 aa, synthetic construct
MALPVTALLLPLALLLHAARPEVQLVESGGGLVQPGGSLRLSCAASGFSFSDFWMSWVRQAPGKGLEWVATISQAGSEKDYVDSVKGRFTISRDNAKKSLYLQMNSLRAEDTAVYYCASGVYSFDYRGQGTLVTVSSGTGGGGSGGGGSGGGGSEFDIQMTQSPSSLSASVGDRVTITCKASQSVSNDVTWYQQKPGQAPKLLIYSASNRYSGVPARFSGSGYGTEFTFTISSVQSEDFAVYFCQQDYSSFGQGTKLEIKRLEDLKNVFPPEVAVFEPSEAEISHTQKATLVCLATGFYPDHVELSWWVNGKEVHSGVCTDPQPLKEQPALNDSRYCLSSRLRVSATFWQNPRNHFRCQVQFYGLSENDEWTQDRAKPVTQIVSAEAWGRADDVIKIHWQEKKSNTILGSQEGNTMKTNDTYMKFSWLTVPEKSLDKEHRCIVRHENNKNGVDQEIIFPPIKTDVITMDPKDNCSKDANDTLLLQLTNTSAYYMYLLLLLKSVVYFAIITCCLLMAMVKRKDSRGRAKRSGSGATNFSLLKQAGDVEENPGPTSMDWIWRILFLVGAATGAHSFEQVQLVESGPGVVQPGRSLRISCAVSGFSVTNYGVHWVRQPPGKGLEWLGVIWAGGITNYNSAFMSRLTISKDNSKNTVYLQMNSLRAEDTAMYYCASRGGHYGYALDYWGQGTLVTVSSTRIQNPDPAVYQLRDSKSSDKSVCLFTDFDSQTNVSQSKDSDVYITDKCVLDMRSMDFKSNSAVAWSNKSDFACANAFNNSIIPEDTFFPSPESSDSTDHVKPKETENTKQPSKSCHKPKAIVHTEKVNMMSLTVLGLRMLFAKTVAVNFLLTAKLFFLLTA

SEQ ID NO: 45546 - protein, 860 aa, synthetic construct
MALPVTALLLPLALLLHAARPEVQLVESGGGLVQPGGSLRLSCAASGFSFSDFWMSWVRQAPGKGLEWVATISQAGSEKDYVDSVKGRFTISRDNAKKSLYLQMNSLRAEDTAVYYCASGVYSFDYRGQGTLVTVSSGTGGGGSGGGGSGGGGSEFDIQMTQSPSSLSASVGDRVTITCKASQSVSNDVTWYQQKPGQAPKLLIYSASNRYSGVPARFSGSGYGTEFTFTISSVQSEDFAVYFCQQDYSSFGQGTKLEIKRLEIQNPDPAVYQLRDSKSSDKSVCLFTDFDSQTNVSQSKDSDVYITDKCVLDMRSMDFKSNSAVAWSNKSDFACANAFNNSIIPEDTFFPSPESSDSTDHVKPKETENTKQPSKSCHKPKAIVHTEKVNMMSLTVLGLRMLFAKTVAVNFLLTAKLFFLLTARAKRSGSGVKQTLNFDLLKLAGDVESNPGPTSMDWIWRILFLVGAATGAHSFEQVQLVESGPGVVQPGRSLRISCAVSGFSVTNYGVHWVRQPPGKGLEWLGVIWAGGITNYNSAFMSRLTISKDNSKNTVYLQMNSLRAEDTAMYYCASRGGHYGYALDYWGQGTLVTVSSTREDLKNVFPPEVAVFEPSEAEISHTQKATLVCLATGFYPDHVELSWWVNGKEVHSGVCTDPQPLKEQPALNDSRYCLSSRLRVSATFWQNPRNHFRCQVQFYGLSENDEWTQDRAKPVTQIVSAEAWGRADDVIKIHWQEKKSNTILGSQEGNTMKTNDTYMKFSWLTVPEKSLDKEHRCIVRHENNKNGVDQEIIFPPIKTDVITMDPKDNCSKDANDTLLLQLTNTSAYYMYLLLLLKSVVYFAIITCCLLMAMVKRKDSRG

SEQ ID NO: 45547 - protein, 993 aa, synthetic construct
MALPVTALLLPLALLLHAARPEVQLVESGGGLVQPGGSLRLSCAASGFSFSDFWMSWVRQAPGKGLEWVATISQAGSEKDYVDSVKGRFTISRDNAKKSLYLQMNSLRAEDTAVYYCASGVYSFDYRGQGTLVTVSSGTGGGGSGGGGSGGGGSEFDIQMTQSPSSLSASVGDRVTITCKASQSVSNDVTWYQQKPGQAPKLLIYSASNRYSGVPARFSGSGYGTEFTFTISSVQSEDFAVYFCQQDYSSFGQGTKLEIKRLEDLKNVFPPEVAVFEPSEAEISHTQKATLVCLATGFYPDHVELSWWVNGKEVHSGVCTDPQPLKEQPALNDSRYCLSSRLRVSATFWQNPRNHFRCQVQFYGLSENDEWTQDRAKPVTQIVSAEAWGRADDVIKIHWQEKKSNTILGSQEGNTMKTNDTYMKFSWLTVPEKSLDKEHRCIVRHENNKNGVDQEIIFPPIKTDVITMDPKDNCSKDANDTLLLQLTNTSAYYMYLLLLLKSVVYFAIITCCLLMAMVKRKDSRGRAKRSGSGATNFSLLKQAGDVEENPGPTSMDWIWRILFLVGAATGAHSGPQLQLQESGPGLVKPSETLSLTCTVSGDSISSGDYYWGWIRQPPGKGLEWIGHIYYSGVTYYNPSLKSRVTISVDTSRNQFSLKLSSVTAADTAVYYCTREDSSNWRSRGQGTLVTVSSGSGGGGSGGGGSGGGGSFEQVQLVESGPGVVQPGRSLRISCAVSGFSVTNYGVHWVRQPPGKGLEWLGVIWAGGITNYNSAFMSRLTISKDNSKNTVYLQMNSLRAEDTAMYYCASRGGHYGYALDYWGQGTLVTVSSTRIQNPDPAVYQLRDSKSSDKSVCLFTDFDSQTNVSQSKDSDVYITDKCVLDMRSMDFKSNSAVAWSNKSDFACANAFNNSIIPEDTFFPSPESSDSTDHVKPKETENTKQPSKSCHKPKAIVHTEKVNMMSLTVLGLRMLFAKTVAVNFLLTAKLFFLLTA

SEQ ID NO: 45548 - protein, 997 aa, synthetic construct
MALPVTALLLPLALLLHAARPEVQLVESGGGLVQPGGSLRLSCAASGFSFSDFWMSWVRQAPGKGLEWVATISQAGSEKDYVDSVKGRFTISRDNAKKSLYLQMNSLRAEDTAVYYCASGVYSFDYRGQGTLVTVSSGTGGGGSGGGGSGGGGSEFDIQMTQSPSSLSASVGDRVTITCKASQSVSNDVTWYQQKPGQAPKLLIYSASNRYSGVPARFSGSGYGTEFTFTISSVQSEDFAVYFCQQDYSSFGQGTKLEIKRLEIQNPDPAVYQLRDSKSSDKSVCLFTDFDSQTNVSQSKDSDVYITDKCVLDMRSMDFKSNSAVAWSNKSDFACANAFNNSIIPEDTFFPSPESSDSTDHVKPKETENTKQPSKSCHKPKAIVHTEKVNMMSLTVLGLRMLFAKTVAVNFLLTAKLFFLLTARAKRSGSGVKQTLNFDLLKLAGDVESNPGPTSMDWIWRILFLVGAATGAHSGPQLQLQESGPGLVKPSETLSLTCTVSGDSISSGDYYWGWIRQPPGKGLEWIGHIYYSGVTYYNPSLKSRVTISVDTSRNQFSLKLSSVTAADTAVYYCTREDSSNWRSRGQGTLVTVSSGSGGGGSGGGGSGGGGSFEQVQLVESGPGVVQPGRSLRISCAVSGFSVTNYGVHWVRQPPGKGLEWLGVIWAGGITNYNSAFMSRLTISKDNSKNTVYLQMNSLRAEDTAMYYCASRGGHYGYALDYWGQGTLVTVSSTREDLKNVFPPEVAVFEPSEAEISHTQKATLVCLATGFYPDHVELSWWVNGKEVHSGVCTDPQPLKEQPALNDSRYCLSSRLRVSATFWQNPRNHFRCQVQFYGLSENDEWTQDRAKPVTQIVSAEAWGRADDVIKIHWQEKKSNTILGSQEGNTMKTNDTYMKFSWLTVPEKSLDKEHRCIVRHENNKNGVDQEIIFPPIKTDVITMDPKDNCSKDANDTLLLQLTNTSAYYMYLLLLLKSVVYFAIITCCLLMAMVKRKDSRG

SEQ ID NO: 45549 - protein, 719 aa, synthetic construct
MALPVTALLLPLALLLHAARPDIQMTQSPSSLSASVGDRVTITCKASQSVSNDVTWYQQKPGQAPKLLIYSASNRYSGVPARFSGSGYGTEFTFTISSVQSEDFAVYFCQQDYSSFGQGTKLEIKRLEDLKNVFPPEVAVFEPSEAEISHTQKATLVCLATGFYPDHVELSWWVNGKEVHSGVCTDPQPLKEQPALNDSRYCLSSRLRVSATFWQNPRNHFRCQVQFYGLSENDEWTQDRAKPVTQIVSAEAWGRADDVIKIHWQEKKSNTILGSQEGNTMKTNDTYMKFSWLTVPEKSLDKEHRCIVRHENNKNGVDQEIIFPPIKTDVITMDPKDNCSKDANDTLLLQLTNTSAYYMYLLLLLKSVVYFAIITCCLLRRTAFCCNGEKSRAKRSGSGATNFSLLKQAGDVEENPGPTSMDWIWRILFLVGAATGAHSFEQVQLVESGPGVVQPGRSLRISCAVSGFSVTNYGVHWVRQPPGKGLEWLGVIWAGGITNYNSAFMSRLTISKDNSKNTVYLQMNSLRAEDTAMYYCASRGGHYGYALDYWGQGTLVTVSSTRIQNPDPAVYQLRDSKSSDKSVCLFTDFDSQTNVSQSKDSDVYITDKCVLDMRSMDFKSNSAVAWSNKSDFACANAFNNSIIPEDTFFPSPESSDSTDHVKPKETENTKQPSKSCHKPKAIVHTEKVNMMSLTVLGLRMLFAKTVAVNFLLTAKLFFL

SEQ ID NO: 45550 - protein, 723 aa, synthetic construct
MALPVTALLLPLALLLHAARPDIQMTQSPSSLSASVGDRVTITCKASQSVSNDVTWYQQKPGQAPKLLIYSASNRYSGVPARFSGSGYGTEFTFTISSVQSEDFAVYFCQQDYSSFGQGTKLEIKRLEIQNPDPAVYQLRDSKSSDKSVCLFTDFDSQTNVSQSKDSDVYITDKCVLDMRSMDFKSNSAVAWSNKSDFACANAFNNSIIPEDTFFPSPESSDSTDHVKPKETENTKQPSKSCHKPKAIVHTEKVNMMSLTVLGLRMLFAKTVAVNFLLTAKLFFLRAKRSGSGVKQTLNFDLLKLAGDVESNPGPTSMDWIWRILFLVGAATGAHSFEQVQLVESGPGVVQPGRSLRISCAVSGFSVTNYGVHWVRQPPGKGLEWLGVIWAGGITNYNSAFMSRLTISKDNSKNTVYLQMNSLRAEDTAMYYCASRGGHYGYALDYWGQGTLVTVSSTREDLKNVFPPEVAVFEPSEAEISHTQKATLVCLATGFYPDHVELSWWVNGKEVHSGVCTDPQPLKEQPALNDSRYCLSSRLRVSATFWQNPRNHFRCQVQFYGLSENDEWTQDRAKPVTQIVSAEAWGRADDVIKIHWQEKKSNTILGSQEGNTMKTNDTYMKFSWLTVPEKSLDKEHRCIVRHENNKNGVDQEIIFPPIKTDVITMDPKDNCSKDANDTLLLQLTNTSAYYMYLLLLLKSVVYFAIITCCLLRRTAFCCNGEKS

SEQ ID NO: 45551 - protein, 854 aa, synthetic construct
MALPVTALLLPLALLLHAARPEVQLVESGGGLVQPGGSLRLSCAASGFSFSDFWMSWVRQAPGKGLEWVATISQAGSEKDYVDSVKGRFTISRDNAKKSLYLQMNSLRAEDTAVYYCASGVYSFDYRGQGTLVTVSSGTGGGGSGGGGSGGGGSEFDIQMTQSPSSLSASVGDRVTITCKASQSVSNDVTWYQQKPGQAPKLLIYSASNRYSGVPARFSGSGYGTEFTFTISSVQSEDFAVYFCQQDYSSFGQGTKLEIKRLEDLKNVFPPEVAVFEPSEAEISHTQKATLVCLATGFYPDHVELSWWVNGKEVHSGVCTDPQPLKEQPALNDSRYCLSSRLRVSATFWQNPRNHFRCQVQFYGLSENDEWTQDRAKPVTQIVSAEAWGRADDVIKIHWQEKKSNTILGSQEGNTMKTNDTYMKFSWLTVPEKSLDKEHRCIVRHENNKNGVDQEIIFPPIKTDVITMDPKDNCSKDANDTLLLQLTNTSAYYMYLLLLLKSVVYFAIITCCLLRRTAFCCNGEKSRAKRSGSGATNFSLLKQAGDVEENPGPTSMDWIWRILFLVGAATGAHSFEQVQLVESGPGVVQPGRSLRISCAVSGFSVTNYGVHWVRQPPGKGLEWLGVIWAGGITNYNSAFMSRLTISKDNSKNTVYLQMNSLRAEDTAMYYCASRGGHYGYALDYWGQGTLVTVSSTRIQNPDPAVYQLRDSKSSDKSVCLFTDFDSQTNVSQSKDSDVYITDKCVLDMRSMDFKSNSAVAWSNKSDFACANAFNNSIIPEDTFFPSPESSDSTDHVKPKETENTKQPSKSCHKPKAIVHTEKVNMMSLTVLGLRMLFAKTVAVNFLLTAKLFFL

SEQ ID NO: 45552 - protein, 991 aa, synthetic construct
MALPVTALLLPLALLLHAARPEVQLVESGGGLVQPGGSLRLSCAASGFSFSDFWMSWVRQAPGKGLEWVATISQAGSEKDYVDSVKGRFTISRDNAKKSLYLQMNSLRAEDTAVYYCASGVYSFDYRGQGTLVTVSSGTGGGGSGGGGSGGGGSEFDIQMTQSPSSLSASVGDRVTITCKASQSVSNDVTWYQQKPGQAPKLLIYSASNRYSGVPARFSGSGYGTEFTFTISSVQSEDFAVYFCQQDYSSFGQGTKLEIKRLEDLKNVFPPEVAVFEPSEAEISHTQKATLVCLATGFYPDHVELSWWVNGKEVHSGVCTDPQPLKEQPALNDSRYCLSSRLRVSATFWQNPRNHFRCQVQFYGLSENDEWTQDRAKPVTQIVSAEAWGRADDVIKIHWQEKKSNTILGSQEGNTMKTNDTYMKFSWLTVPEKSLDKEHRCIVRHENNKNGVDQEIIFPPIKTDVITMDPKDNCSKDANDTLLLQLTNTSAYYMYLLLLLKSVVYFAIITCCLLRRTAFCCNGEKSRAKRSGSGATNFSLLKQAGDVEENPGPTSMDWIWRILFLVGAATGAHSGPQLQLQESGPGLVKPSETLSLTCTVSGDSISSGDYYWGWIRQPPGKGLEWIGHIYYSGVTYYNPSLKSRVTISVDTSRNQFSLKLSSVTAADTAVYYCTREDSSNWRSRGQGTLVTVSSGSGGGGSGGGGSGGGGSFEQVQLVESGPGVVQPGRSLRISCAVSGFSVTNYGVHWVRQPPGKGLEWLGVIWAGGITNYNSAFMSRLTISKDNSKNTVYLQMNSLRAEDTAMYYCASRGGHYGYALDYWGQGTLVTVSSTRIQNPDPAVYQLRDSKSSDKSVCLFTDFDSQTNVSQSKDSDVYITDKCVLDMRSMDFKSNSAVAWSNKSDFACANAFNNSIIPEDTFFPSPESSDSTDHVKPKETENTKQPSKSCHKPKAIVHTEKVNMMSLTVLGLRMLFAKTVAVNFLLTAKLFFL

SEQ ID NO: 45553 - protein, 617 aa, synthetic construct
MALPVTALLLPLALLLHAARPDIQMTQSPSSLSASVGDRVTITCKASQSVSNDVTWYQQKPGQAPKLLIYSASNRYSGVPARFSGSGYGTEFTFTISSVQSEDFAVYFCQQDYSSFGQGTKLEIKRLEDLKNVFPPEVAVFEPSEAEISHTQKATLVCLATGFYPDHVELSWWVNGKEVHSGVSTDPQPLKEQPALNDSRYCLSSRLRVSATFWQNPRNHFRCQVQFYGLSENDEWTQDRAKPVTQIVSAEAWGRADCDVKLVEKSFETDTNLNFQNLSVIGFRILLLKVAGFNLLMTLRLWSSRAKRSGSGATNFSLLKQAGDVEENPGPTSMDWIWRILFLVGAATGAHSFEQVQLVESGPGVVQPGRSLRISCAVSGFSVTNYGVHWVRQPPGKGLEWLGVIWAGGITNYNSAFMSRLTISKDNSKNTVYLQMNSLRAEDTAMYYCASRGGHYGYALDYWGQGTLVTVSSTRIQNPDPAVYQLRDSKSSDKSVCLFTDFDSQTNVSQSKDSDVYITDKTVLDMRSMDFKSNSAVAWSNKSDFACANAFNNSIIPEDTFFPSPESSCGFTSESYQQGVLSATILYEILLGKATLYAVLVSALVLMAMVKRKDSRG

SEQ ID NO: 45554 - protein, 617 aa, synthetic construct
MALPVTALLLPLALLLHAARPDIQMTQSPSSLSASVGDRVTITCKASQSVSNDVTWYQQKPGQAPKLLIYSASNRYSGVPARFSGSGYGTEFTFTISSVQSEDFAVYFCQQDYSSFGQGTKLEIKRLEDLKNVFPPEVAVFEPSEAEISHTQKATLVCLATGFYPDHVELSWWVNGKEVHSGVSTDPQPLKEQPALNDSRYCLSSRLRVSATFWQNPRNHFRCQVQFYGLSENDEWTQDRAKPVTQIVSAEAWGRADCGFTSESYQQGVLSATNLSVIGFRILLLKVAGFNLLMTLRLWSSRAKRSGSGATNFSLLKQAGDVEENPGPTSMDWIWRILFLVGAATGAHSFEQVQLVESGPGVVQPGRSLRISCAVSGFSVTNYGVHWVRQPPGKGLEWLGVIWAGGITNYNSAFMSRLTISKDNSKNTVYLQMNSLRAEDTAMYYCASRGGHYGYALDYWGQGTLVTVSSTRIQNPDPAVYQLRDSKSSDKSVCLFTDFDSQTNVSQSKDSDVYITDKTVLDMRSMDFKSNSAVAWSNKSDFACANAFNNSIIPEDTFFPSPESSCDVKLVEKSFETDTNLNFQILYEILLGKATLYAVLVSALVLMAMVKRKDSRG

SEQ ID NO: 45555 - protein, 721 aa, synthetic construct
MALPVTALLLPLALLLHAARPDIQMTQSPSSLSASVGDRVTITCKASQSVSNDVTWYQQKPGQAPKLLIYSASNRYSGVPARFSGSGYGTEFTFTISSVQSEDFAVYFCQQDYSSFGQGTKLEIKRLEDLKNVFPPEVAVFEPSEAEISHTQKATLVCLATGFYPDHVELSWWVNGKEVHSGVSTDPQPLKEQPALNDSRYCLSSRLRVSATFWQNPRNHFRCQVQFYGLSENDEWTQDRAKPVTQIVSAEAWGRADDVIKIHWQEKKSNTILGSQEGNTMKTNDTYMKFSWLTVPEKSLDKEHRCIVRHENNKNGVDQEIIFPPIKTDVITMDPKDNCSKDANDTLLLQLTNTSAYYMYLLLLLKSVVYFAIITCCLLMAMVKRKDSRGRAKRSGSGATNFSLLKQAGDVEENPGPTSMDWIWRILFLVGAATGAHSFEQVQLVESGPGVVQPGRSLRISCAVSGFSVTNYGVHWVRQPPGKGLEWLGVIWAGGITNYNSAFMSRLTISKDNSKNTVYLQMNSLRAEDTAMYYCASRGGHYGYALDYWGQGTLVTVSSTRIQNPDPAVYQLRDSKSSDKSVCLFTDFDSQTNVSQSKDSDVYITDKTVLDMRSMDFKSNSAVAWSNKSDFACANAFNNSIIPEDTFFPSPESSDSTDHVKPKETENTKQPSKSCHKPKAIVHTEKVNMMSLTVLGLRMLFAKTVAVNFLLTAKLFFLLTA

SEQ ID NO: 45556 - protein, 719 aa, synthetic construct
MALPVTALLLPLALLLHAARPDIQMTQSPSSLSASVGDRVTITCKASQSVSNDVTWYQQKPGQAPKLLIYSASNRYSGVPARFSGSGYGTEFTFTISSVQSEDFAVYFCQQDYSSFGQGTKLEIKRLEDLKNVFPPEVAVFEPSEAEISHTQKATLVCLATGFYPDHVELSWWVNGKEVHSGVSTDPQPLKEQPALNDSRYCLSSRLRVSATFWQNPRNHFRCQVQFYGLSENDEWTQDRAKPVTQIVSAEAWGRADDVIKIHWQEKKSNTILGSQEGNTMKTNDTYMKFSWLTVPEKSLDKEHRCIVRHENNKNGVDQEIIFPPIKTDVITMDPKDNCSKDANDTLLLQLTNTSAYYMYLLLLLKSVVYFAIITCCLLRRTAFCCNGEKSRAKRSGSGATNFSLLKQAGDVEENPGPTSMDWIWRILFLVGAATGAHSFEQVQLVESGPGVVQPGRSLRISCAVSGFSVTNYGVHWVRQPPGKGLEWLGVIWAGGITNYNSAFMSRLTISKDNSKNTVYLQMNSLRAEDTAMYYCASRGGHYGYALDYWGQGTLVTVSSTRIQNPDPAVYQLRDSKSSDKSVCLFTDFDSQTNVSQSKDSDVYITDKTVLDMRSMDFKSNSAVAWSNKSDFACANAFNNSIIPEDTFFPSPESSDSTDHVKPKETENTKQPSKSCHKPKAIVHTEKVNMMSLTVLGLRMLFAKTVAVNFLLTAKLFFL

SEQ ID NO: 45557 - protein, 862 aa, synthetic construct
MALPVTALLLPLALLLHAARPLEEDLKNVFPPEVAVFEPSEAEISHTQKATLVCLATGFYPDHVELSWWVNGKEVHSGVCTDPQPLKEQPALNDSRYCLSSRLRVSATFWQNPRNHFRCQVQFYGLSENDEWTQDRAKPVTQIVSAEAWGRADCGFTSESYQQGVLSATNLSVIGFRILLLKVAGFNLLMTLRLWSSRAKRSGSGATNFSLLKQAGDVEENPGPTSMALPVTALLLPLALLLHAARPDIQMTQSPSSLSASVGDRVTITCKASQSVSNDVTWYQQKPGQAPKLLIYSASNRYSGVPARFSGSGYGTEFTFTISSVQSEDFAVYFCQQDYSSFGQGTKLEIKRGGGGSGGGGSGGGGSQVQLVESGPGVVQPGRSLRISCAVSGFSVTNYGVHWVRQPPGKGLEWLGVIWAGGITNYNSAFMSRLTISKDNSKNTVYLQMNSLRAEDTAMYYCASRGGHYGYALDYWGQGTLVTVSSTRIQNPDPAVYQLRDSKSSDKSVCLFTDFDSQTNVSQSKDSDVYITDKCVLDMRSMDFKSNSAVAWSNKSDFACANAFNNSIIPEDTFFPSPESSCDVKLVEKSFETDTNLNFQILYEVIGFRILLLKVAGFNLLMTLRLWSSRAKRSGSGVKQTLNFDLLKLAGDVESNPGPSRGHMTEYKPTVRLATRDDVPRAVRTLAAAFADYPATRHTVDPDRHIERVTELQELFLTRVGLDIGKVWVADDGAAVAVWTTPESVEAGAVFAEIGPRMAELSGSRLAAQQQMEGLLAPHRPKEPAWFLATVGVSPDHQGKGLGSAVVLPGVEAAERAGVPAFLETSAPRNLPFYERLGFTVTADVEVPEGPRTWCMTRKPGA

SEQ ID NO: 45558 - protein, 862 aa, synthetic construct
MALPVTALLLPLALLLHAARPLEIQNPDPAVYQLRDSKSSDKSVCLFTDFDSQTNVSQSKDSDVYITDKCVLDMRSMDFKSNSAVAWSNKSDFACANAFNNSIIPEDTFFPSPESSCDVKLVEKSFETDTNLNFQILYEVIGFRILLLKVAGFNLLMTLRLWSSRAKRSGSGATNFSLLKQAGDVEENPGPTSMALPVTALLLPLALLLHAARPDIQMTQSPSSLSASVGDRVTITCKASQSVSNDVTWYQQKPGQAPKLLIYSASNRYSGVPARFSGSGYGTEFTFTISSVQSEDFAVYFCQQDYSSFGQGTKLEIKRGGGGSGGGGSGGGGSQVQLVESGPGVVQPGRSLRISCAVSGFSVTNYGVHWVRQPPGKGLEWLGVIWAGGITNYNSAFMSRLTISKDNSKNTVYLQMNSLRAEDTAMYYCASRGGHYGYALDYWGQGTLVTVSSTREDLKNVFPPEVAVFEPSEAEISHTQKATLVCLATGFYPDHVELSWWVNGKEVHSGVCTDPQPLKEQPALNDSRYCLSSRLRVSATFWQNPRNHFRCQVQFYGLSENDEWTQDRAKPVTQIVSAEAWGRADCGFTSESYQQGVLSATNLSVIGFRILLLKVAGFNLLMTLRLWSSRAKRSGSGVKQTLNFDLLKLAGDVESNPGPSRGHMTEYKPTVRLATRDDVPRAVRTLAAAFADYPATRHTVDPDRHIERVTELQELFLTRVGLDIGKVWVADDGAAVAVWTTPESVEAGAVFAEIGPRMAELSGSRLAAQQQMEGLLAPHRPKEPAWFLATVGVSPDHQGKGLGSAVVLPGVEAAERAGVPAFLETSAPRNLPFYERLGFTVTADVEVPEGPRTWCMTRKPGA

SEQ ID NO: 45559 - protein, 862 aa, synthetic construct; identical to SEQ ID NO: 45557

SEQ ID NO: 45560 - protein, 970 aa, synthetic construct
MALPVTALLLPLALLLHAARPLEEDLKNVFPPEVAVFEPSEAEISHTQKATLVCLATGFYPDHVELSWWVNGKEVHSGVSTDPQPLKEQPALNDSRYCLSSRLRVSATFWQNPRNHFRCQVQFYGLSENDEWTQDRAKPVTQIVSAEAWGRADDVIKIHWQEKKSNTILGSQEGNTMKTNDTYMKFSWLTVPEKSLDKEHRCIVRHENNKNGVDQEIIFPPIKTDVITMDPKDNCSKDANDTLLLQLTNTSAYYMYLLLLLKSVVYFAIITCCLLMAMVKRKDSRGRAKRSGSGATNFSLLKQAGDVEENPGPTSMALPVTALLLPLALLLHAARPDIQMTQSPSSLSASVGDRVTITCKASQSVSNDVTWYQQKPGQAPKLLIYSASNRYSGVPARFSGSGYGTEFTFTISSVQSEDFAVYFCQQDYSSFGQGTKLEIKRGGGGSGGGGSGGGGSQVQLVESGPGVVQPGRSLRISCAVSGFSVTNYGVHWVRQPPGKGLEWLGVIWAGGITNYNSAFMSRLTISKDNSKNTVYLQMNSLRAEDTAMYYCASRGGHYGYALDYWGQGTLVTVSSTRIQNPDPAVYQLRDSKSSDKSVCLFTDFDSQTNVSQSKDSDVYITDKTVLDMRSMDFKSNSAVAWSNKSDFACANAFNNSIIPEDTFFPSPESSDSTDHVKPKETENTKQPSKSCHKPKAIVHTEKVNMMSLTVLGLRMLFAKTVAVNFLLTAKLFFLLTARAKRSGSGVKQTLNFDLLKLAGDVESNPGPSRGHMTEYKPTVRLATRDDVPRAVRTLAAAFADYPATRHTVDPDRHIERVTELQELFLTRVGLDIGKVWVADDGAAVAVWTTPESVEAGAVFAEIGPRMAELSGSRLAAQQQMEGLLAPHRPKEPAWFLATVGVSPDHQGKGLGSAVVLPGVEAAERAGVPAFLETSAPRNLPFYERLGFTVTADVEVPEGPRTWCMTRKPGA

SEQ ID NO: 45561 - protein, 970 aa, synthetic construct
MALPVTALLLPLALLLHAARPLEIQNPDPAVYQLRDSKSSDKSVCLFTDFDSQTNVSQSKDSDVYITDKTVLDMRSMDFKSNSAVAWSNKSDFACANAFNNSIIPEDTFFPSPESSDSTDHVKPKETENTKQPSKSCHKPKAIVHTEKVNMMSLTVLGLRMLFAKTVAVNFLLTAKLFFLLTARAKRSGSGATNFSLLKQAGDVEENPGPTSMALPVTALLLPLALLLHAARPDIQMTQSPSSLSASVGDRVTITCKASQSVSNDVTWYQQKPGQAPKLLIYSASNRYSGVPARFSGSGYGTEFTFTISSVQSEDFAVYFCQQDYSSFGQGTKLEIKRGGGGSGGGGSGGGGSQVQLVESGPGVVQPGRSLRISCAVSGFSVTNYGVHWVRQPPGKGLEWLGVIWAGGITNYNSAFMSRLTISKDNSKNTVYLQMNSLRAEDTAMYYCASRGGHYGYALDYWGQGTLVTVSSTREDLKNVFPPEVAVFEPSEAEISHTQKATLVCLATGFYPDHVELSWWVNGKEVHSGVSTDPQPLKEQPALNDSRYCLSSRLRVSATFWQNPRNHFRCQVQFYGLSENDEWTQDRAKPVTQIVSAEAWGRADDVIKIHWQEKKSNTILGSQEGNTMKTNDTYMKFSWLTVPEKSLDKEHRCIVRHENNKNGVDQEIIFPPIKTDVITMDPKDNCSKDANDTLLLQLTNTSAYYMYLLLLLKSVVYFAIITCCLLMAMVKRKDSRGRAKRSGSGVKQTLNFDLLKLAGDVESNPGPSRGHMTEYKPTVRLATRDDVPRAVRTLAAAFADYPATRHTVDPDRHIERVTELQELFLTRVGLDIGKVWVADDGAAVAVWTTPESVEAGAVFAEIGPRMAELSGSRLAAQQQMEGLLAPHRPKEPAWFLATVGVSPDHQGKGLGSAVVLPGVEAAERAGVPAFLETSAPRNLPFYERLGFTVTADVEVPEGPRTWCMTRKPGA

SEQ ID NO: 45562 - protein, 968 aa, synthetic construct
MALPVTALLLPLALLLHAARPLEEDLKNVFPPEVAVFEPSEAEISHTQKATLVCLATGFYPDHVELSWWVNGKEVHSGVCTDPQPLKEQPALNDSRYCLSSRLRVSATFWQNPRNHFRCQVQFYGLSENDEWTQDRAKPVTQIVSAEAWGRADDVIKIHWQEKKSNTILGSQEGNTMKTNDTYMKFSWLTVPEKSLDKEHRCIVRHENNKNGVDQEIIFPPIKTDVITMDPKDNCSKDANDTLLLQLTNTSAYYMYLLLLLKSVVYFAIITCCLLRRTAFCCNGEKSRAKRSGSGATNFSLLKQAGDVEENPGPTSMALPVTALLLPLALLLHAARPDIQMTQSPSSLSASVGDRVTITCKASQSVSNDVTWYQQKPGQAPKLLIYSASNRYSGVPARFSGSGYGTEFTFTISSVQSEDFAVYFCQQDYSSFGQGTKLEIKRGGGGSGGGGSGGGGSQVQLVESGPGVVQPGRSLRISCAVSGFSVTNYGVHWVRQPPGKGLEWLGVIWAGGITNYNSAFMSRLTISKDNSKNTVYLQMNSLRAEDTAMYYCASRGGHYGYALDYWGQGTLVTVSSTRIQNPDPAVYQLRDSKSSDKSVCLFTDFDSQTNVSQSKDSDVYITDKCVLDMRSMDFKSNSAVAWSNKSDFACANAFNNSIIPEDTFFPSPESSDSTDHVKPKETENTKQPSKSCHKPKAIVHTEKVNMMSLTVLGLRMLFAKTVAVNFLLTAKLFFLRAKRSGSGVKQTLNFDLLKLAGDVESNPGPSRGHMTEYKPTVRLATRDDVPRAVRTLAAAFADYPATRHTVDPDRHIERVTELQELFLTRVGLDIGKVWVADDGAAVAVWTTPESVEAGAVFAEIGPRMAELSGSRLAAQQQMEGLLAPHRPKEPAWFLATVGVSPDHQGKGLGSAVVLPGVEAAERAGVPAFLETSAPRNLPFYERLGFTVTADVEVPEGPRTWCMTRKPGA

SEQ ID NO: 45563 - protein, 968 aa, synthetic construct
MALPVTALLLPLALLLHAARPLEIQNPDPAVYQLRDSKSSDKSVCLFTDFDSQTNVSQSKDSDVYITDKCVLDMRSMDFKSNSAVAWSNKSDFACANAFNNSIIPEDTFFPSPESSDSTDHVKPKETENTKQPSKSCHKPKAIVHTEKVNMMSLTVLGLRMLFAKTVAVNFLLTAKLFFLRAKRSGSGATNFSLLKQAGDVEENPGPTSMALPVTALLLPLALLLHAARPDIQMTQSPSSLSASVGDRVTITCKASQSVSNDVTWYQQKPGQAPKLLIYSASNRYSGVPARFSGSGYGTEFTFTISSVQSEDFAVYFCQQDYSSFGQGTKLEIKRGGGGSGGGGSGGGGSQVQLVESGPGVVQPGRSLRISCAVSGFSVTNYGVHWVRQPPGKGLEWLGVIWAGGITNYNSAFMSRLTISKDNSKNTVYLQMNSLRAEDTAMYYCASRGGHYGYALDYWGQGTLVTVSSTREDLKNVFPPEVAVFEPSEAEISHTQKATLVCLATGFYPDHVELSWWVNGKEVHSGVCTDPQPLKEQPALNDSRYCLSSRLRVSATFWQNPRNHFRCQVQFYGLSENDEWTQDRAKPVTQIVSAEAWGRADDVIKIHWQEKKSNTILGSQEGNTMKTNDTYMKFSWLTVPEKSLDKEHRCIVRHENNKNGVDQEIIFPPIKTDVITMDPKDNCSKDANDTLLLQLTNTSAYYMYLLLLLKSVVYFAIITCCLLRRTAFCCNGEKSRAKRSGSGVKQTLNFDLLKLAGDVESNPGPSRGHMTEYKPTVRLATRDDVPRAVRTLAAAFADYPATRHTVDPDRHIERVTELQELFLTRVGLDIGKVWVADDGAAVAVWTTPESVEAGAVFAEIGPRMAELSGSRLAAQQQMEGLLAPHRPKEPAWFLATVGVSPDHQGKGLGSAVVLPGVEAAERAGVPAFLETSAPRNLPFYERLGFTVTADVEVPEGPRTWCMTRKPGA

SEQ ID NO: 45564 - protein, 968 aa, synthetic construct
MALPVTALLLPLALLLHAARPLEEDLKNVFPPEVAVFEPSEAEISHTQKATLVCLATGFYPDHVELSWWVNGKEVHSGVSTDPQPLKEQPALNDSRYCLSSRLRVSATFWQNPRNHFRCQVQFYGLSENDEWTQDRAKPVTQIVSAEAWGRADDVIKIHWQEKKSNTILGSQEGNTMKTNDTYMKFSWLTVPEKSLDKEHRCIVRHENNKNGVDQEIIFPPIKTDVITMDPKDNCSKDANDTLLLQLTNTSAYYMYLLLLLKSVVYFAIITCCLLRRTAFCCNGEKSRAKRSGSGATNFSLLKQAGDVEENPGPTSMALPVTALLLPLALLLHAARPDIQMTQSPSSLSASVGDRVTITCKASQSVSNDVTWYQQKPGQAPKLLIYSASNRYSGVPARFSGSGYGTEFTFTISSVQSEDFAVYFCQQDYSSFGQGTKLEIKRGGGGSGGGGSGGGGSQVQLVESGPGVVQPGRSLRISCAVSGFSVTNYGVHWVRQPPGKGLEWLGVIWAGGITNYNSAFMSRLTISKDNSKNTVYLQMNSLRAEDTAMYYCASRGGHYGYALDYWGQGTLVTVSSTRIQNPDPAVYQLRDSKSSDKSVCLFTDFDSQTNVSQSKDSDVYITDKTVLDMRSMDFKSNSAVAWSNKSDFACANAFNNSIIPEDTFFPSPESSDSTDHVKPKETENTKQPSKSCHKPKAIVHTEKVNMMSLTVLGLRMLFAKTVAVNFLLTAKLFFLRAKRSGSGVKQTLNFDLLKLAGDVESNPGPSRGHMTEYKPTVRLATRDDVPRAVRTLAAAFADYPATRHTVDPDRHIERVTELQELFLTRVGLDIGKVWVADDGAAVAVWTTPESVEAGAVFAEIGPRMAELSGSRLAAQQQMEGLLAPHRPKEPAWFLATVGVSPDHQGKGLGSAVVLPGVEAAERAGVPAFLETSAPRNLPFYERLGFTVTADVEVPEGPRTWCMTRKPGA

SEQ ID NO: 45565 - protein, 968 aa, synthetic construct
MALPVTALLLPLALLLHAARPLEIQNPDPAVYQLRDSKSSDKSVCLFTDFDSQTNVSQSKDSDVYITDKTVLDMRSMDFKSNSAVAWSNKSDFACANAFNNSIIPEDTFFPSPESSDSTDHVKPKETENTKQPSKSCHKPKAIVHTEKVNMMSLTVLGLRMLFAKTVAVNFLLTAKLFFLRAKRSGSGATNFSLLKQAGDVEENPGPTSMALPVTALLLPLALLLHAARPDIQMTQSPSSLSASVGDRVTITCKASQSVSNDVTWYQQKPGQAPKLLIYSASNRYSGVPARFSGSGYGTEFTFTISSVQSEDFAVYFCQQDYSSFGQGTKLEIKRGGGGSGGGGSGGGGSQVQLVESGPGVVQPGRSLRISCAVSGFSVTNYGVHWVRQPPGKGLEWLGVIWAGGITNYNSAFMSRLTISKDNSKNTVYLQMNSLRAEDTAMYYCASRGGHYGYALDYWGQGTLVTVSSTREDLKNVFPPEVAVFEPSEAEISHTQKATLVCLATGFYPDHVELSWWVNGKEVHSGVSTDPQPLKEQPALNDSRYCLSSRLRVSATFWQNPRNHFRCQVQFYGLSENDEWTQDRAKPVTQIVSAEAWGRADDVIKIHWQEKKSNTILGSQEGNTMKTNDTYMKFSWLTVPEKSLDKEHRCIVRHENNKNGVDQEIIFPPIKTDVITMDPKDNCSKDANDTLLLQLTNTSAYYMYLLLLLKSVVYFAIITCCLLRRTAFCCNGEKSRAKRSGSGVKQTLNFDLLKLAGDVESNPGPSRGHMTEYKPTVRLATRDDVPRAVRTLAAAFADYPATRHTVDPDRHIERVTELQELFLTRVGLDIGKVWVADDGAAVAVWTTPESVEAGAVFAEIGPRMAELSGSRLAAQQQMEGLLAPHRPKEPAWFLATVGVSPDHQGKGLGSAVVLPGVEAAERAGVPAFLETSAPRNLPFYERLGFTVTADVEVPEGPRTWCMTRKPGA

SEQ ID NO: 45566 - protein, 866 aa, synthetic construct
MALPVTALLLPLALLLHAARPLEEDLKNVFPPEVAVFEPSKAEIAHTQKATLVCLATGFYPDHVELSWWVNGKEVHSGVCTDPQPLKEQPALNDSRYCLSSRLRVSATFWQNPRNHFRCQVQFYGLSENDEWTQDRAKPVTQIVSAEAWGRADCGITSASYHQGVLSATILYEILLGKATLYAVLVSALVLMAMVKRKDSRGRAKRSGSGATNFSLLKQAGDVEENPGPTSMALPVTALLLPLALLLHAARPDIQMTQSPSSLSASVGDRVTITCKASQSVSNDVTWYQQKPGQAPKLLIYSASNRYSGVPARFSGSGYGTEFTFTISSVQSEDFAVYFCQQDYSSFGQGTKLEIKRGGGGSGGGGSGGGGSQVQLVESGPGVVQPGRSLRISCAVSGFSVTNYGVHWVRQPPGKGLEWLGVIWAGGITNYNSAFMSRLTISKDNSKNTVYLQMNSLRAEDTAMYYCASRGGHYGYALDYWGQGTLVTVSSTRIQNPDPAVYQLRDSKSSDKSVCLFTDFDSQTNVSQSKDSDVYITDKCVLDMRSMDFKSNSAVAWSNKSDFACANAFNNSIIPEDTFFPSSDVPCDVKLVEKSFETDTNLNFQNLSVIGFRILLLKVAGFNLLMTLRLWSSRAKRSGSGVKQTLNFDLLKLAGDVESNPGPSRGHMTEYKPTVRLATRDDVPRAVRTLAAAFADYPATRHTVDPDRHIERVTELQELFLTRVGLDIGKVWVADDGAAVAVWTTPESVEAGAVFAEIGPRMAELSGSRLAAQQQMEGLLAPHRPKEPAWFLATVGVSPDHQGKGLGSAVVLPGVEAAERAGVPAFLETSAPRNLPFYERLGFTVTADVEVPEGPRTWCMTRKPGA

SEQ ID NO: 45567 - protein, 866 aa, synthetic construct
MALPVTALLLPLALLLHAARPLEIQNPDPAVYQLRDSKSSDKSVCLFTDFDSQTNVSQSKDSDVYITDKCVLDMRSMDFKSNSAVAWSNKSDFACANAFNNSIIPEDTFFPSSDVPCDVKLVEKSFETDTNLNFQNLSVIGFRILLLKVAGFNLLMTLRLWSSRAKRSGSGATNFSLLKQAGDVEENPGPTSMALPVTALLLPLALLLHAARPDIQMTQSPSSLSASVGDRVTITCKASQSVSNDVTWYQQKPGQAPKLLIYSASNRYSGVPARFSGSGYGTEFTFTISSVQSEDFAVYFCQQDYSSFGQGTKLEIKRGGGGSGGGGSGGGGSQVQLVESGPGVVQPGRSLRISCAVSGFSVTNYGVHWVRQPPGKGLEWLGVIWAGGITNYNSAFMSRLTISKDNSKNTVYLQMNSLRAEDTAMYYCASRGGHYGYALDYWGQGTLVTVSSTREDLKNVFPPEVAVFEPSKAEIAHTQKATLVCLATGFYPDHVELSWWVNGKEVHSGVCTDPQPLKEQPALNDSRYCLSSRLRVSATFWQNPRNHFRCQVQFYGLSENDEWTQDRAKPVTQIVSAEAWGRADCGITSASYHQGVLSATILYEILLGKATLYAVLVSALVLMAMVKRKDSRGRAKRSGSGVKQTLNFDLLKLAGDVESNPGPSRGHMTEYKPTVRLATRDDVPRAVRTLAAAFADYPATRHTVDPDRHIERVTELQELFLTRVGLDIGKVWVADDGAAVAVWTTPESVEAGAVFAEIGPRMAELSGSRLAAQQQMEGLLAPHRPKEPAWFLATVGVSPDHQGKGLGSAVVLPGVEAAERAGVPAFLETSAPRNLPFYERLGFTVTADVEVPEGPRTWCMTRKPGA

SEQ ID NO: 45568 - protein, 759 aa, synthetic construct
MALPVTALLLPLALLLHAARPLEQSFGLLDPKLCYLLDGILFIYGVILTALFLRVKFSRSADAPAYQQGQNQLYNELNLGRREEYDVLDKRRGRDPEMGGKPQRRKNPQEGLYNELQKDKMAEAYSEIGMKGERRRGKGHDGLYQGLSTATKDTYDALHMQALPPRRAKRSGSGATNFSLLKQAGDVEENPGPTSMALPVTALLLPLALLLHAARPDIQMTQSPSSLSASVGDRVTITCKASQSVSNDVTWYQQKPGQAPKLLIYSASNRYSGVPARFSGSGYGTEFTFTISSVQSEDFAVYFCQQDYSSFGQGTKLEIKRGGGGSGGGGSGGGGSQVQLVESGPGVVQPGRSLRISCAVSGFSVTNYGVHWVRQPPGKGLEWLGVIWAGGITNYNSAFMSRLTISKDNSKNTVYLQMNSLRAEDTAMYYCASRGGHYGYALDYWGQGTLVTVSSTRELGEPQLCYILDAILFLYGIVLTLLYCRLKIQVRKAAITSYEKSDGVYTGLSTRNQETYETLKHEKPPQRAKRSGSGVKQTLNFDLLKLAGDVESNPGPSRGHMTEYKPTVRLATRDDVPRAVRTLAAAFADYPATRHTVDPDRHIERVTELQELFLTRVGLDIGKVWVADDGAAVAVWTTPESVEAGAVFAEIGPRMAELSGSRLAAQQQMEGLLAPHRPKEPAWFLATVGVSPDHQGKGLGSAVVLPGVEAAERAGVPAFLETSAPRNLPFYERLGFTVTADVEVPEGPRTWCMTRKPGA

SEQ ID NO: 45569 - protein, 970 aa, synthetic construct; identical to SEQ ID NO: 45560

SEQ ID NO: 45570 - protein, 970 aa, synthetic construct; identical to SEQ ID NO: 45561

SEQ ID NO: 45571 - protein, 969 aa, synthetic construct
MALPVTALLLPLALLLHAARPLEEEDLKNVFPPEVAVFEPSEAEISHTQKATLVCLATGFYPDHVELSWWVNGKEVHSGVCTDPQPLKEQPALNDSRYCLSSRLRVSATFWQNPRNHFRCQVQFYGLSENDEWTQDRAKPVTQIVSAEAWGRADDVIKIHWQEKKSNTILGSQEGNTMKTNDTYMKFSWLTVPEKSLDKEHRCIVRHENNKNGVDQEIIFPPIKTDVITMDPKDNCSKDANDTLLLQLTNTSAYYMYLLLLLKSVVYFAIITCCLLRRTAFCCNGEKSRAKRSGSGATNFSLLKQAGDVEENPGPTSMALPVTALLLPLALLLHAARPDIQMTQSPSSLSASVGDRVTITCKASQSVSNDVTWYQQKPGQAPKLLIYSASNRYSGVPARFSGSGYGTEFTFTISSVQSEDFAVYFCQQDYSSFGQGTKLEIKRGGGGSGGGGSGGGGSQVQLVESGPGVVQPGRSLRISCAVSGFSVTNYGVHWVRQPPGKGLEWLGVIWAGGITNYNSAFMSRLTISKDNSKNTVYLQMNSLRAEDTAMYYCASRGGHYGYALDYWGQGTLVTVSSTRIQNPDPAVYQLRDSKSSDKSVCLFTDFDSQTNVSQSKDSDVYITDKCVLDMRSMDFKSNSAVAWSNKSDFACANAFNNSIIPEDTFFPSPESSDSTDHVKPKETENTKQPSKSCHKPKAIVHTEKVNMMSLTVLGLRMLFAKTVAVNFLLTAKLFFLRAKRSGSGVKQTLNFDLLKLAGDVESNPGPSRGHMTEYKPTVRLATRDDVPRAVRTLAAAFADYPATRHTVDPDRHIERVTELQELFLTRVGLDIGKVWVADDGAAVAVWTTPESVEAGAVFAEIGPRMAELSGSRLAAQQQMEGLLAPHRPKEPAWFLATVGVSPDHQGKGLGSAVVLPGVEAAERAGVPAFLETSAPRNLPFYERLGFTVTADVEVPEGPRTWCMTRKPGA

SEQ ID NO: 45572 - protein, 969 aa, synthetic construct
MALPVTALLLPLALLLHAARPLEIQNPDPAVYQLRDSKSSDKSVCLFTDFDSQTNVSQSKDSDVYITDKCVLDMRSMDFKSNSAVAWSNKSDFACANAFNNSIIPEDTFFPSPESSDSTDHVKPKETENTKQPSKSCHKPKAIVHTEKVNMMSLTVLGLRMLFAKTVAVNFLLTAKLFFLRAKRSGSGATNFSLLKQAGDVEENPGPTSMALPVTALLLPLALLLHAARPDIQMTQSPSSLSASVGDRVTITCKASQSVSNDVTWYQQKPGQAPKLLIYSASNRYSGVPARFSGSGYGTEFTFTISSVQSEDFAVYFCQQDYSSFGQGTKLEIKRGGGGSGGGGSGGGGSQVQLVESGPGVVQPGRSLRISCAVSGFSVTNYGVHWVRQPPGKGLEWLGVIWAGGITNYNSAFMSRLTISKDNSKNTVYLQMNSLRAEDTAMYYCASRGGHYGYALDYWGQGTLVTVSSTREEDLKNVFPPEVAVFEPSEAEISHTQKATLVCLATGFYPDHVELSWWVNGKEVHSGVCTDPQPLKEQPALNDSRYCLSSRLRVSATFWQNPRNHFRCQVQFYGLSENDEWTQDRAKPVTQIVSAEAWGRADDVIKIHWQEKKSNTILGSQEGNTMKTNDTYMKFSWLTVPEKSLDKEHRCIVRHENNKNGVDQEIIFPPIKTDVITMDPKDNCSKDANDTLLLQLTNTSAYYMYLLLLLKSVVYFAIITCCLLRRTAFCCNGEKSRAKRSGSGVKQTLNFDLLKLAGDVESNPGPSRGHMTEYKPTVRLATRDDVPRAVRTLAAAFADYPATRHTVDPDRHIERVTELQELFLTRVGLDIGKVWVADDGAAVAVWTTPESVEAGAVFAEIGPRMAELSGSRLAAQQQMEGLLAPHRPKEPAWFLATVGVSPDHQGKGLGSAVVLPGVEAAERAGVPAFLETSAPRNLPFYERLGFTVTADVEVPEGPRTWCMTRKPGA

SEQ ID NO: 45573 - protein, 866 aa, synthetic construct
MALPVTALLLPLALLLHAARPLEEDLKNVFPPEVAVFEPSEAEISHTQKATLVCLATGFYPDHVELSWWVNGKEVHSGVSTDPQPLKEQPALNDSRYCLSSRLRVSATFWQNPRNHFRCQVQFYGLSENDEWTQDRAKPVTQIVSAEAWGRADCGFTSESYQQGVLSATNLSVIGFRILLLKVAGFNLLMTLRLWSSRAKRSGSGATNFSLLKQAGDVEENPGPTSMALPVTALLLPLALLLHAARPDIQMTQSPSSLSASVGDRVTITCKASQSVSNDVTWYQQKPGQAPKLLIYSASNRYSGVPARFSGSGYGTEFTFTISSVQSEDFAVYFCQQDYSSFGQGTKLEIKRGGGGSGGGGSGGGGSQVQLVESGPGVVQPGRSLRISCAVSGFSVTNYGVHWVRQPPGKGLEWLGVIWAGGITNYNSAFMSRLTISKDNSKNTVYLQMNSLRAEDTAMYYCASRGGHYGYALDYWGQGTLVTVSSTRIQNPDPAVYQLRDSKSSDKSVCLFTDFDSQTNVSQSKDSDVYITDKTVLDMRSMDFKSNSAVAWSNKSDFACANAFNNSIIPEDTFFPSPESSCDVKLVEKSFETDTNLNFQILYEILLGKATLYAVLVSALVLMAMVKRKDSRGRAKRSGSGVKQTLNFDLLKLAGDVESNPGPSRGHMTEYKPTVRLATRDDVPRAVRTLAAAFADYPATRHTVDPDRHIERVTELQELFLTRVGLDIGKVWVADDGAAVAVWTTPESVEAGAVFAEIGPRMAELSGSRLAAQQQMEGLLAPHRPKEPAWFLATVGVSPDHQGKGLGSAVVLPGVEAAERAGVPAFLETSAPRNLPFYERLGFTVTADVEVPEGPRTWCMTRKPGA

SEQ ID NO: 45574 - protein, 866 aa, synthetic construct
MALPVTALLLPLALLLHAARPLEIQNPDPAVYQLRDSKSSDKSVCLFTDFDSQTNVSQSKDSDVYITDKTVLDMRSMDFKSNSAVAWSNKSDFACANAFNNSIIPEDTFFPSPESSCDVKLVEKSFETDTNLNFQILYEILLGKATLYAVLVSALVLMAMVKRKDSRGRAKRSGSGATNFSLLKQAGDVEENPGPTSMALPVTALLLPLALLLHAARPDIQMTQSPSSLSASVGDRVTITCKASQSVSNDVTWYQQKPGQAPKLLIYSASNRYSGVPARFSGSGYGTEFTFTISSVQSEDFAVYFCQQDYSSFGQGTKLEIKRGGGGSGGGGSGGGGSQVQLVESGPGVVQPGRSLRISCAVSGFSVTNYGVHWVRQPPGKGLEWLGVIWAGGITNYNSAFMSRLTISKDNSKNTVYLQMNSLRAEDTAMYYCASRGGHYGYALDYWGQGTLVTVSSTREDLKNVFPPEVAVFEPSEAEISHTQKATLVCLATGFYPDHVELSWWVNGKEVHSGVSTDPQPLKEQPALNDSRYCLSSRLRVSATFWQNPRNHFRCQVQFYGLSENDEWTQDRAKPVTQIVSAEAWGRADCGFTSESYQQGVLSATNLSVIGFRILLLKVAGFNLLMTLRLWSSRAKRSGSGVKQTLNFDLLKLAGDVESNPGPSRGHMTEYKPTVRLATRDDVPRAVRTLAAAFADYPATRHTVDPDRHIERVTELQELFLTRVGLDIGKVWVADDGAAVAVWTTPESVEAGAVFAEIGPRMAELSGSRLAAQQQMEGLLAPHRPKEPAWFLATVGVSPDHQGKGLGSAVVLPGVEAAERAGVPAFLETSAPRNLPFYERLGFTVTADVEVPEGPRTWCMTRKPGA

SEQ ID NO: 45575 - protein, 866 aa, synthetic construct
MALPVTALLLPLALLLHAARPLEEDLKNVFPPEVAVFEPSEAEISHTQKATLVCLATGFYPDHVELSWWVNGKEVHSGVCTDPQPLKEQPALNDSRYCLSSRLRVSATFWQNPRNHFRCQVQFYGLSENDEWTQDRAKPVTQIVSAEAWGRADCDVKLVEKSFETDTNLNFQNLSVIGFRILLLKVAGFNLLMTLRLWSSRAKRSGSGATNFSLLKQAGDVEENPGPTSMALPVTALLLPLALLLHAARPDIQMTQSPSSLSASVGDRVTITCKASQSVSNDVTWYQQKPGQAPKLLIYSASNRYSGVPARFSGSGYGTEFTFTISSVQSEDFAVYFCQQDYSSFGQGTKLEIKRGGGGSGGGGSGGGGSQVQLVESGPGVVQPGRSLRISCAVSGFSVTNYGVHWVRQPPGKGLEWLGVIWAGGITNYNSAFMSRLTISKDNSKNTVYLQMNSLRAEDTAMYYCASRGGHYGYALDYWGQGTLVTVSSTRIQNPDPAVYQLRDSKSSDKSVCLFTDFDSQTNVSQSKDSDVYITDKCVLDMRSMDFKSNSAVAWSNKSDFACANAFNNSIIPEDTFFPSPESSCGFTSESYQQGVLSATILYEILLGKATLYAVLVSALVLMAMVKRKDSRGRAKRSGSGVKQTLNFDLLKLAGDVESNPGPSRGHMTEYKPTVRLATRDDVPRAVRTLAAAFADYPATRHTVDPDRHIERVTELQELFLTRVGLDIGKVWVADDGAAVAVWTTPESVEAGAVFAEIGPRMAELSGSRLAAQQQMEGLLAPHRPKEPAWFLATVGVSPDHQGKGLGSAVVLPGVEAAERAGVPAFLETSAPRNLPFYERLGFTVTADVEVPEGPRTWCMTRKPGA

SEQ ID NO: 45576 - protein, 866 aa, synthetic construct
MALPVTALLLPLALLLHAARPLEEDLKNVFPPEVAVFEPSEAEISHTQKATLVCLATGFYPDHVELSWWVNGKEVHSGVSTDPQPLKEQPALNDSRYCLSSRLRVSATFWQNPRNHFRCQVQFYGLSENDEWTQDRAKPVTQIVSAEAWGRADCDVKLVEKSFETDTNLNFQNLSVIGFRILLLKVAGFNLLMTLRLWSSRAKRSGSGATNFSLLKQAGDVEENPGPTSMALPVTALLLPLALLLHAARPDIQMTQSPSSLSASVGDRVTITCKASQSVSNDVTWYQQKPGQAPKLLIYSASNRYSGVPARFSGSGYGTEFTFTISSVQSEDFAVYFCQQDYSSFGQGTKLEIKRGGGGSGGGGSGGGGSQVQLVESGPGVVQPGRSLRISCAVSGFSVTNYGVHWVRQPPGKGLEWLGVIWAGGITNYNSAFMSRLTISKDNSKNTVYLQMNSLRAEDTAMYYCASRGGHYGYALDYWGQGTLVTVSSTRIQNPDPAVYQLRDSKSSDKSVCLFTDFDSQTNVSQSKDSDVYITDKTVLDMRSMDFKSNSAVAWSNKSDFACANAFNNSIIPEDTFFPSPESSCGFTSESYQQGVLSATILYEILLGKATLYAVLVSALVLMAMVKRKDSRGRAKRSGSGVKQTLNFDLLKLAGDVESNPGPSRGHMTEYKPTVRLATRDDVPRAVRTLAAAFADYPATRHTVDPDRHIERVTELQELFLTRVGLDIGKVWVADDGAAVAVWTTPESVEAGAVFAEIGPRMAELSGSRLAAQQQMEGLLAPHRPKEPAWFLATVGVSPDHQGKGLGSAVVLPGVEAAERAGVPAFLETSAPRNLPFYERLGFTVTADVEVPEGPRTWCMTRKPGA

SEQ ID NO: 45577 - protein, 969 aa, synthetic construct
MALPVTALLLPLALLLHAARPLEEEDLKNVFPPEVAVFEPSEAEISHTQKATLVCLATGFYPDHVELSWWVNGKEVHSGVSTDPQPLKEQPALNDSRYCLSSRLRVSATFWQNPRNHFRCQVQFYGLSENDEWTQDRAKPVTQIVSAEAWGRADDVIKIHWQEKKSNTILGSQEGNTMKTNDTYMKFSWLTVPEKSLDKEHRCIVRHENNKNGVDQEIIFPPIKTDVITMDPKDNCSKDANDTLLLQLTNTSAYYMYLLLLLKSVVYFAIITCCLLRRTAFCCNGEKSRAKRSGSGATNFSLLKQAGDVEENPGPTSMALPVTALLLPLALLLHAARPDIQMTQSPSSLSASVGDRVTITCKASQSVSNDVTWYQQKPGQAPKLLIYSASNRYSGVPARFSGSGYGTEFTFTISSVQSEDFAVYFCQQDYSSFGQGTKLEIKRGGGGSGGGGSGGGGSQVQLVESGPGVVQPGRSLRISCAVSGFSVTNYGVHWVRQPPGKGLEWLGVIWAGGITNYNSAFMSRLTISKDNSKNTVYLQMNSLRAEDTAMYYCASRGGHYGYALDYWGQGTLVTVSSTRIQNPDPAVYQLRDSKSSDKSVCLFTDFDSQTNVSQSKDSDVYITDKTVLDMRSMDFKSNSAVAWSNKSDFACANAFNNSIIPEDTFFPSPESSDSTDHVKPKETENTKQPSKSCHKPKAIVHTEKVNMMSLTVLGLRMLFAKTVAVNFLLTAKLFFLRAKRSGSGVKQTLNFDLLKLAGDVESNPGPSRGHMTEYKPTVRLATRDDVPRAVRTLAAAFADYPATRHTVDPDRHIERVTELQELFLTRVGLDIGKVWVADDGAAVAVWTTPESVEAGAVFAEIGPRMAELSGSRLAAQQQMEGLLAPHRPKEPAWFLATVGVSPDHQGKGLGSAVVLPGVEAAERAGVPAFLETSAPRNLPFYERLGFTVTADVEVPEGPRTWCMTRKPGA

SEQ ID NO: 45578 - protein, 866 aa, synthetic construct
MALPVTALLLPLALLLHAARPLEEDLKNVFPPEVAVFEPSEAEISHTQKATLVCLATGFYPDHVELSWWVNGKEVHSGVCTDPQPLKEQPALNDSRYCLSSRLRVSATFWQNPRNHFRCQVQFYGLSENDEWTQDRAKPVTQIVSAEAWGRADCGFTSESYQQGVLSATNLSVIGFRILLLKVAGFNLLMTLRLWSSRAKRSGSGATNFSLLKQAGDVEENPGPTSMALPVTALLLPLALLLHAARPDIQMTQSPSSLSASVGDRVTITCKASQSVSNDVTWYQQKPGQAPKLLIYSASNRYSGVPARFSGSGYGTEFTFTISSVQSEDFAVYFCQQDYSSFGQGTKLEIKRGGGGSGGGGSGGGGSQVQLVESGPGVVQPGRSLRISCAVSGFSVTNYGVHWVRQPPGKGLEWLGVIWAGGITNYNSAFMSRLTISKDNSKNTVYLQMNSLRAEDTAMYYCASRGGHYGYALDYWGQGTLVTVSSTRIQNPDPAVYQLRDSKSSDKSVCLFTDFDSQTNVSQSKDSDVYITDKCVLDMRSMDFKSNSAVAWSNKSDFACANAFNNSIIPEDTFFPSPESSCDVKLVEKSFETDTNLNFQILYEILLGKATLYAVLVSALVLMAMVKRKDSRGRAKRSGSGVKQTLNFDLLKLAGDVESNPGPSRGHMTEYKPTVRLATRDDVPRAVRTLAAAFADYPATRHTVDPDRHIERVTELQELFLTRVGLDIGKVWVADDGAAVAVWTTPESVEAGAVFAEIGPRMAELSGSRLAAQQQMEGLLAPHRPKEPAWFLATVGVSPDHQGKGLGSAVVLPGVEAAERAGVPAFLETSAPRNLPFYERLGFTVTADVEVPEGPRTWCMTRKPGA

SEQ ID NO: 45579 - protein, 895 aa, synthetic construct
MALPVTALLLPLALLLHAARPLEEEDLKNVFPPEVAVFEPSEAEISHTQKATLVCLATGFYPDHVELSWWVNGKEVHSGVCTDPQPLKEQPALNDSRYCLSSRLRVSATFWQNPRNHFRCQVQFYGLSENDEWTQDRAKPVTQIVSAEAWGRADCGFTSESYQQGVLSATNLSVIGFRILLLKVAGFNLLMTLRLWSSRAKRSGSGATNFSLLKQAGDVEENPGPTSMALPVTALLLPLALLLHAARPDIQMTQSPSSLSASVGDRVTITCKASQSVSNDVTWYQQKPGQAPKLLIYSASNRYSGVPARFSGSGYGTEFTFTISSVQSEDFAVYFCQQDYSSFGQGTKLEIKRGGGGSGGGGSGGGGSQVQLVESGPGVVQPGRSLRISCAVSGFSVTNYGVHWVRQPPGKGLEWLGVIWAGGITNYNSAFMSRLTISKDNSKNTVYLQMNSLRAEDTAMYYCASRGGHYGYALDYWGQGTLVTVSSTRGQPKANPTVTLFPPSSEELQANKATLVCLISDFYPGAVTVAWKADGSPVKAGVETTKPSKQSNNKYAASSYLSLTPEQWKSHRSYSCQVTHEGSTVEKTVAPTECSPIKTDVITMDPKDNCSKDANDTLLLQLTNTSAYYMYLLLLLKSVVYFAIITCCLLRRTAFCCNGEKSRAKRSGSGVKQTLNFDLLKLAGDVESNPGPSRGHMTEYKPTVRLATRDDVPRAVRTLAAAFADYPATRHTVDPDRHIERVTELQELFLTRVGLDIGKVWVADDGAAVAVWTTPESVEAGAVFAEIGPRMAELSGSRLAAQQQMEGLLAPHRPKEPAWFLATVGVSPDHQGKGLGSAVVLPGVEAAERAGVPAFLETSAPRNLPFYERLGFTVTADVEVPEGPRTWCMTRKPGA

SEQ ID NO: 45580 - protein, 895 aa, synthetic construct
MALPVTALLLPLALLLHAARPLEGQPKANPTVTLFPPSSEELQANKATLVCLISDFYPGAVTVAWKADGSPVKAGVETTKPSKQSNNKYAASSYLSLTPEQWKSHRSYSCQVTHEGSTVEKTVAPTECSPIKTDVITMDPKDNCSKDANDTLLLQLTNTSAYYMYLLLLLKSVVYFAIITCCLLRRTAFCCNGEKSRAKRSGSGATNFSLLKQAGDVEENPGPTSMALPVTALLLPLALLLHAARPDIQMTQSPSSLSASVGDRVTITCKASQSVSNDVTWYQQKPGQAPKLLIYSASNRYSGVPARFSGSGYGTEFTFTISSVQSEDFAVYFCQQDYSSFGQGTKLEIKRGGGGSGGGGSGGGGSQVQLVESGPGVVQPGRSLRISCAVSGFSVTNYGVHWVRQPPGKGLEWLGVIWAGGITNYNSAFMSRLTISKDNSKNTVYLQMNSLRAEDTAMYYCASRGGHYGYALDYWGQGTLVTVSSTREEDLKNVFPPEVAVFEPSEAEISHTQKATLVCLATGFYPDHVELSWWVNGKEVHSGVCTDPQPLKEQPALNDSRYCLSSRLRVSATFWQNPRNHFRCQVQFYGLSENDEWTQDRAKPVTQIVSAEAWGRADCGFTSESYQQGVLSATNLSVIGFRILLLKVAGFNLLMTLRLWSSRAKRSGSGVKQTLNFDLLKLAGDVESNPGPSRGHMTEYKPTVRLATRDDVPRAVRTLAAAFADYPATRHTVDPDRHIERVTELQELFLTRVGLDIGKVWVADDGAAVAVWTTPESVEAGAVFAEIGPRMAELSGSRLAAQQQMEGLLAPHRPKEPAWFLATVGVSPDHQGKGLGSAVVLPGVEAAERAGVPAFLETSAPRNLPFYERLGFTVTADVEVPEGPRTWCMTRKPGA

SEQ ID NO: 45581 - protein, 892 aa, synthetic construct
MALPVTALLLPLALLLHAARPLEEASTKGPSVFPLAPSSKSTSGGTAALGCLVKDYFPEPVTVSWNSGALTSGVHTFPAVLQSSGLYSLSSVVTVPSSSLGTQTYICNVNHKPSNTKVDKRVEPKSCPIKTDVITMDPKDNCSKDANDTLLLQLTNTSAYYMYLLLLLKSVVYFAIITCCLLRRTAFCCNGEKSRAKRSGSGATNFSLLKQAGDVEENPGPTSMALPVTALLLPLALLLHAARPDIQMTQSPSSLSASVGDRVTITCKASQSVSNDVTWYQQKPGQAPKLLIYSASNRYSGVPARFSGSGYGTEFTFTISSVQSEDFAVYFCQQDYSSFGQGTKLEIKRGGGGSGGGGSGGGGSQVQLVESGPGVVQPGRSLRISCAVSGFSVTNYGVHWVRQPPGKGLEWLGVIWAGGITNYNSAFMSRLTISKDNSKNTVYLQMNSLRAEDTAMYYCASRGGHYGYALDYWGQGTLVTVSSTRGQPKANPTVTLFPPSSEELQANKATLVCLISDFYPGAVTVAWKADGSPVKAGVETTKPSKQSNNKYAASSYLSLTPEQWKSHRSYSCQVTHEGSTVEKTVAPTECSEVKTDSTDHVKPKETENTKQPSKSCHKPKAIVHTEKVNMMSLTVLGLRMLFAKTVAVNFLLTAKLFFLRAKRSGSGVKQTLNFDLLKLAGDVESNPGPSRGHMTEYKPTVRLATRDDVPRAVRTLAAAFADYPATRHTVDPDRHIERVTELQELFLTRVGLDIGKVWVADDGAAVAVWTTPESVEAGAVFAEIGPRMAELSGSRLAAQQQMEGLLAPHRPKEPAWFLATVGVSPDHQGKGLGSAVVLPGVEAAERAGVPAFLETSAPRNLPFYERLGFTVTADVEVPEGPRTWCMTRKPGA

SEQ ID NO: 45582 - protein, 870 aa, synthetic construct
MALPVTALLLPLALLLHAARPLEEASTKGPSVFPLAPSSKSTSGGTAALGCLVKDYFPEPVTVSWNSGALTSGVHTFPAVLQSSGLYSLSSVVTVPSSSLGTQTYICNVNHKPSNTKVDKRVEPKSCGRADCGFTSESYQQGVLSATILYEILLGKATLYAVLVSALVLMAMVKRKDSRGRAKRSGSGATNFSLLKQAGDVEENPGPTSMALPVTALLLPLALLLHAARPDIQMTQSPSSLSASVGDRVTITCKASQSVSNDVTWYQQKPGQAPKLLIYSASNRYSGVPARFSGSGYGTEFTFTISSVQSEDFAVYFCQQDYSSFGQGTKLEIKRGGGGSGGGGSGGGGSQVQLVESGPGVVQPGRSLRISCAVSGFSVTNYGVHWVRQPPGKGLEWLGVIWAGGITNYNSAFMSRLTISKDNSKNTVYLQMNSLRAEDTAMYYCASRGGHYGYALDYWGQGTLVTVSSTRGQPKANPTVTLFPPSSEELQANKATLVCLISDFYPGAVTVAWKADGSPVKAGVETTKPSKQSNNKYAASSYLSLTPEQWKSHRSYSCQVTHEGSTVEKTVAPTECSIPEDTFFPSPESSCDVKLVEKSFETDTNLNFQNLSVIGFRILLLKVAGFNLLMTLRLWSSRAKRSGSGVKQTLNFDLLKLAGDVESNPGPSRGHMTEYKPTVRLATRDDVPRAVRTLAAAFADYPATRHTVDPDRHIERVTELQELFLTRVGLDIGKVWVADDGAAVAVWTTPESVEAGAVFAEIGPRMAELSGSRLAAQQQMEGLLAPHRPKEPAWFLATVGVSPDHQGKGLGSAVVLPGVEAAERAGVPAFLETSAPRNLPFYERLGFTVTADVEVPEGPRTWCMTRKPGA

SEQ ID NO: 45583 - protein, 870 aa, synthetic construct
MALPVTALLLPLALLLHAARPLEEASTKGPSVFPLAPSSKSTSGGTAALGCLVKDYFPEPVTVSWNSGALTSGVHTFPAVLQSSGLYSLSSVVTVPSSSLGTQTYICNVNHKPSNTKVDKRVEPKSCIPEDTFFPSPESSCDVKLVEKSFETDTNLNFQNLSVIGFRILLLKVAGFNLLMTLRLWSSRAKRSGSGATNFSLLKQAGDVEENPGPTSMALPVTALLLPLALLLHAARPDIQMTQSPSSLSASVGDRVTITCKASQSVSNDVTWYQQKPGQAPKLLIYSASNRYSGVPARFSGSGYGTEFTFTISSVQSEDFAVYFCQQDYSSFGQGTKLEIKRGGGGSGGGGSGGGGSQVQLVESGPGVVQPGRSLRISCAVSGFSVTNYGVHWVRQPPGKGLEWLGVIWAGGITNYNSAFMSRLTISKDNSKNTVYLQMNSLRAEDTAMYYCASRGGHYGYALDYWGQGTLVTVSSTRGQPKANPTVTLFPPSSEELQANKATLVCLISDFYPGAVTVAWKADGSPVKAGVETTKPSKQSNNKYAASSYLSLTPEQWKSHRSYSCQVTHEGSTVEKTVAPTECSGRADCGFTSESYQQGVLSATILYEILLGKATLYAVLVSALVLMAMVKRKDSRGRAKRSGSGVKQTLNFDLLKLAGDVESNPGPSRGHMTEYKPTVRLATRDDVPRAVRTLAAAFADYPATRHTVDPDRHIERVTELQELFLTRVGLDIGKVWVADDGAAVAVWTTPESVEAGAVFAEIGPRMAELSGSRLAAQQQMEGLLAPHRPKEPAWFLATVGVSPDHQGKGLGSAVVLPGVEAAERAGVPAFLETSAPRNLPFYERLGFTVTADVEVPEGPRTWCMTRKPGA

SEQ ID NO: 45584 - protein, 617 aa, synthetic construct
MALPVTALLLPLALLLHAARPDIQMTQSPSSLSASVGDRVTITCKASQSVSNDVTWYQQKPGQAPKLLIYSASNRYSGVPARFSGSGYGTEFTFTISSVQSEDFAVYFCQQDYSSFGQGTKLEIKRLEDLKNVFPPEVAVFEPSEAEISHTQKATLVCLATGFYPDHVELSWWVNGKEVHSGVCTDPQPLKEQPALNDSRYCLSSRLRVSATFWQNPRNHFRCQVQFYGLSENDEWTQDRAKPVTQIVSAEAWGRADSGFTSESYQQGVLSATILYEILLGKATLYAVLVSALVLMAMVKRKDSRGRAKRSGSGATNFSLLKQAGDVEENPGPTSMDWIWRILFLVGAATGAHSFEQVQLVESGPGVVQPGRSLRISCAVSGFSVTNYGVHWVRQPPGKGLEWLGVIWAGGITNYNSAFMSRLTISKDNSKNTVYLQMNSLRAEDTAMYYCASRGGHYGYALDYWGQGTLVTVSSTRIQNPDPAVYQLRDSKSSDKSVCLFTDFDSQTNVSQSKDSDVYITDKCVLDMRSMDFKSNSAVAWSNKSDFACANAFNNSIIPEDTFFPSPESSSDVKLVEKSFETDTNLNFQNLSVIGFRILLLKVAGFNLLMTLRLWSS

SEQ ID NO: 45585 - protein, 896 aa, synthetic construct
MALPVTALLLPLALLLHAARPEVQLLESGGGLVQPGGSLRLSCAASGRTFSMGWYRQAPGKGLEFVSAITYSGGSPYYADSVKGRFTISRDNSKNTVYLQMNSLRAEDTAVYYCAANPTYGSDWNAENWGQGTLVTVSSGTGGGGSGGGGSGGGGSEFDIQMTQSPSSLSASVGDRVTITCKASQSVSNDVTWYQQKPGQAPKLLIYSASNRYSGVPARFSGSGYGTEFTFTISSVQSEDFAVYFCQQDYSSFGQGTKLEIKRLEIQNPDPAVYQLRDSKSSDKSVCLFTDFDSQTNVSQSKDSDVYITDKCVLDMRSMDFKSNSAVAWSNKSDFACANAFNNSIIPEDTFFPSSDVPCDVKLVEKSFETDTNLNFQNLSVIGFRILLLKVAGFNLLMTLRLWSSRAKRSGSGVKQTLNFDLLKLAGDVESNPGPTSTMDWIWRILFLVGAATGTHSGPEVQLVESGGGLVQPGGSLRLSCAASGRTFTMGWYRQAPGKEREFVAAISLSPTLAYYADSVKGRFTISRDNSKNTVVLQMNSLRAEDTALYYCAADRKSVMSIRPDYWGQGTLVTVSSGSGGGGSGGGGSGGGGSFEQVQLVESGPGVVQPGRSLRISCAVSGFSVTNYGVHWVRQPPGKGLEWLGVIWAGGITNYNSAFMSRLTISKDNSKNTVYLQMNSLRAEDTAMYYCASRGGHYGYALDYWGQGTLVTVSSTREDLKNVFPPEVAVFEPSKAEIAHTQKATLVCLATGFYPDHVELSWWVNGKEVHSGVCTDPQPLKEQPALNDSRYCLSSRLRVSATFWQNPRNHFRCQVQFYGLSENDEWTQDRAKPVTQIVSAEAWGRADCGITSASYHQGVLSATILYEILLGKATLYAVLVSALVLMAMVKRKDSRG

SEQ ID NO: 45586 - protein, 896 aa, synthetic construct
MALPVTALLLPLALLLHAARPEVQLVESGGGLVQAGGSLRLSCAASGRTFSMGWFRQAPGKEREFVAAITYSGGSPYYADSVKGRFTISRDNAKNTVYLQMNSLKPEDTAVYYCAANPTYGSDWNAENWGQGTQVTVSSGTGGGGSGGGGSGGGGSEFDIQMTQSPSSLSASVGDRVTITCKASQSVSNDVTWYQQKPGQAPKLLIYSASNRYSGVPARFSGSGYGTEFTFTISSVQSEDFAVYFCQQDYSSFGQGTKLEIKRLEIQNPDPAVYQLRDSKSSDKSVCLFTDFDSQTNVSQSKDSDVYITDKCVLDMRSMDFKSNSAVAWSNKSDFACANAFNNSIIPEDTFFPSSDVPCDVKLVEKSFETDTNLNFQNLSVIGFRILLLKVAGFNLLMTLRLWSSRAKRSGSGVKQTLNFDLLKLAGDVESNPGPTSTMDWIWRILFLVGAATGAHSGPEVQLVESGGGLVQPGGSLRLSCAASGRTFTMGWYRQAPGKEREFVAAISLSPTLAYYADSVKGRFTISRDNSKNTVVLQMNSLRAEDTALYYCAADRKSVMSIRPDYWGQGTLVTVSSGSGGGGSGGGGSGGGGSFEQVQLVESGPGVVQPGRSLRISCAVSGFSVTNYGVHWVRQPPGKGLEWLGVIWAGGITNYNSAFMSRLTISKDNSKNTVYLQMNSLRAEDTAMYYCASRGGHYGYALDYWGQGTLVTVSSTREDLKNVFPPEVAVFEPSKAEIAHTQKATLVCLATGFYPDHVELSWWVNGKEVHSGVCTDPQPLKEQPALNDSRYCLSSRLRVSATFWQNPRNHFRCQVQFYGLSENDEWTQDRAKPVTQIVSAEAWGRADCGITSASYHQGVLSATILYEILLGKATLYAVLVSALVLMAMVKRKDSRG

SEQ ID NO: 45587 - protein, 893 aa, synthetic construct
MALPVTALLLPLALLLHAARPEVQLVESGGGLVQAGGSLRLSCAASGRTFSMGWFRQAPGKEREFVAAITYSGGSPYYADSVKGRFTISRDNAKNTVYLQMNSLKPEDTAVYYCAANPTYGSDWNAENWGQGTQVTVSSGTGGGGSGGGGSGGGGSEFDIQMTQSPSSLSASVGDRVTITCKASQSVSNDVTWYQQKPGQAPKLLIYSASNRYSGVPARFSGSGYGTEFTFTISSVQSEDFAVYFCQQDYSSFGQGTKLEIKRLEDLKNVFPPEVAVFEPSEAEISHTQKATLVCLATGFYPDHVELSWWVNGKEVHSGVCTDPQPLKEQPALNDSRYCLSSRLRVSATFWQNPRNHFRCQVQFYGLSENDEWTQDRAKPVTQIVSAEAWGRADCGFTSESYQQGVLSATILYEILLGKATLYAVLVSALVLMAMVKRKDSRGRAKRSGSGATNFSLLKQAGDVEENPGPTSATMDWIWRILFLVGAATGAHSGPEVQLVESGGGLVQAGGSLRLSCAASGRTFTMGWFRQAPGKEREFVAAISLSPTLAYYADSVKGRFTISRDNAKNTVVLQMNSLKPEDTALYYCAADRKSVMSIRPDYWGQGTQVTVSSGSGGGGSGGGGSGGGGSFEQVQLVESGPGVVQPGRSLRISCAVSGFSVTNYGVHWVRQPPGKGLEWLGVIWAGGITNYNSAFMSRLTISKDNSKNTVYLQMNSLRAEDTAMYYCASRGGHYGYALDYWGQGTLVTVSSTRIQNPDPAVYQLRDSKSSDKSVCLFTDFDSQTNVSQSKDSDVYITDKCVLDMRSMDFKSNSAVAWSNKSDFACANAFNNSIIPEDTFFPSPESSCDVKLVEKSFETDTNLNFQNLSVIGFRILLLKVAGFNLLMTLRLWSS

SEQ ID NO: 45588 - protein, 764 aa, synthetic construct
MALPVTALLLPLALLLHAARPEVQLVESGGGLVQPGGSLRLSCEASGFASDDYIIGWFRQAPGKEREGVSCISSKYANTVYTDSVKGRFRLSRGTAKNTVYLQMSALKPEDTAVYYCAMDSRRVTCPEISTMHRNFDSWGQGTLVTVSSGTGGGGSGGGGSGGGGSEFDIQMTQSPSSLSASVGDRVTITCKASQSVSNDVTWYQQKPGQAPKLLIYSASNRYSGVPARFSGSGYGTEFTFTISSVQSEDFAVYFCQQDYSSFGQGTKLEIKRLEDLKNVFPPEVAVFEPSKAEIAHTQKATLVCLATGFYPDHVELSWWVNGKEVHSGVCTDPQPLKEQPALNDSRYCLSSRLRVSATFWQNPRNHFRCQVQFYGLSENDEWTQDRAKPVTQIVSAEAWGRADCGITSASYHQGVLSATILYEILLGKATLYAVLVSALVLMAMVKRKDSRGRAKRSGSGATNFSLLKQAGDVEENPGPTSMDWIWRILFLVGAATGAHSFEQVQLVESGPGVVQPGRSLRISCAVSGFSVTNYGVHWVRQPPGKGLEWLGVIWAGGITNYNSAFMSRLTISKDNSKNTVYLQMNSLRAEDTAMYYCASRGGHYGYALDYWGQGTLVTVSSTRIQNPDPAVYQLRDSKSSDKSVCLFTDFDSQTNVSQSKDSDVYITDKCVLDMRSMDFKSNSAVAWSNKSDFACANAFNNSIIPEDTFFPSSDVPCDVKLVEKSFETDTNLNFQNLSVIGFRILLLKVAGFNLLMTLRLWSS

SEQ ID NO: 45589 - protein, 755 aa, synthetic construct
MALPVTALLLPLALLLHAARPDIQMTQSPSSLSASVGDRVTITCKASQSVSNDVTWYQQKPGQAPKLLIYSASNRYSGVPARFSGSGYGTEFTFTISSVQSEDFAVYFCQQDYSSFGQGTKLEIKRLEDLKNVFPPEVAVFEPSEAEISHTQKATLVCLATGFYPDHVELSWWVNGKEVHSGVCTDPQPLKEQPALNDSRYCLSSRLRVSATFWQNPRNHFRCQVQFYGLSENDEWTQDRAKPVTQIVSAEAWGRADCGFTSESYQQGVLSATILYEILLGKATLYAVLVSALVLMAMVKRKDSRGRAKRSGSGATNFSLLKQAGDVEENPGPTSTMDWIWRILFLVGAATGAHSGPEVQLVESGGGLVQPGGSLRLSCAASGRTFTMGWYRQAPGKEREFVAAISLSPTLAYYADSVKGRFTISRDNSKNTVVLQMNSLRAEDTALYYCAADRKSVMSIRPDYWGQGTLVTVSSGSGGGGSGGGGSGGGGSFEQVQLVESGPGVVQPGRSLRISCAVSGFSVTNYGVHWVRQPPGKGLEWLGVIWAGGITNYNSAFMSRLTISKDNSKNTVYLQMNSLRAEDTAMYYCASRGGHYGYALDYWGQGTLVTVSSTRIQNPDPAVYQLRDSKSSDKSVCLFTDFDSQTNVSQSKDSDVYITDKCVLDMRSMDFKSNSAVAWSNKSDFACANAFNNSIIPEDTFFPSPESSCDVKLVEKSFETDTNLNFQNLSVIGFRILLLKVAGFNLLMTLRLWSS

SEQ ID NO: 45590 - protein, 762 aa, synthetic construct
MALPVTALLLPLALLLHAARPDIQMTQSPSSLSASVGDRVTITCKASQSVSNDVTWYQQKPGQAPKLLIYSASNRYSGVPARFSGSGYGTEFTFTISSVQSEDFAVYFCQQDYSSFGQGTKLEIKRLEDLKNVFPPEVAVFEPSEAEISHTQKATLVCLATGFYPDHVELSWWVNGKEVHSGVCTDPQPLKEQPALNDSRYCLSSRLRVSATFWQNPRNHFRCQVQFYGLSENDEWTQDRAKPVTQIVSAEAWGRADCGFTSESYQQGVLSATILYEILLGKATLYAVLVSALVLMAMVKRKDSRGRAKRSGSGATNFSLLKQAGDVEENPGPTSTMDWIWRILFLVGAATGAHSGPQVQLVESGGGLVQPGGSLRLSCAASGNINSRNCMGWFRQAPGKGREGVAAIGQVTGRTYYVDSVKGRFTISLDNSKNTLYLQMNSLRAEDTAVYYCAAAPGCLLSALRSADYRNWGQGTLVTVSSGSGGGGSGGGGSGGGGSFEQVQLVESGPGVVQPGRSLRISCAVSGFSVTNYGVHWVRQPPGKGLEWLGVIWAGGITNYNSAFMSRLTISKDNSKNTVYLQMNSLRAEDTAMYYCASRGGHYGYALDYWGQGTLVTVSSTRIQNPDPAVYQLRDSKSSDKSVCLFTDFDSQTNVSQSKDSDVYITDKCVLDMRSMDFKSNSAVAWSNKSDFACANAFNNSIIPEDTFFPSPESSCDVKLVEKSFETDTNLNFQNLSVIGFRILLLKVAGFNLLMTLRLWSS

SEQ ID NO: 45591 - protein, 762 aa, synthetic construct
MALPVTALLLPLALLLHAARPDIQMTQSPSSLSASVGDRVTITCKASQSVSNDVTWYQQKPGQAPKLLIYSASNRYSGVPARFSGSGYGTEFTFTISSVQSEDFAVYFCQQDYSSFGQGTKLEIKRLEDLKNVFPPEVAVFEPSEAEISHTQKATLVCLATGFYPDHVELSWWVNGKEVHSGVCTDPQPLKEQPALNDSRYCLSSRLRVSATFWQNPRNHFRCQVQFYGLSENDEWTQDRAKPVTQIVSAEAWGRADCGFTSESYQQGVLSATILYEILLGKATLYAVLVSALVLMAMVKRKDSRGRAKRSGSGATNFSLLKQAGDVEENPGPTSTMDWIWRILFLVGAATGAHSGPQVQLVESGGGSVQAGGSLRLSCGASGNISSRNCMGWFRQAPGKEREGVAAIGQVTGRSYYVDSVKGRFTISLDNAKNTLYLQMNTLKPEDTAMYYCAAAPGCLLSALRSADYRNWGQGTQVTVSSGSGGGGSGGGGSGGGGSFEQVQLVESGPGVVQPGRSLRISCAVSGFSVTNYGVHWVRQPPGKGLEWLGVIWAGGITNYNSAFMSRLTISKDNSKNTVYLQMNSLRAEDTAMYYCASRGGHYGYALDYWGQGTLVTVSSTRIQNPDPAVYQLRDSKSSDKSVCLFTDFDSQTNVSQSKDSDVYITDKCVLDMRSMDFKSNSAVAWSNKSDFACANAFNNSIIPEDTFFPSPESSCDVKLVEKSFETDTNLNFQNLSVIGFRILLLKVAGFNLLMTLRLWSS

SEQ ID NO: 45592 - protein, 903 aa, synthetic construct
MALPVTALLLPLALLLHAARPEVQLVESGGGLVQAGGSLRLSCAASGRTFSMGWFRQAPGKEREFVAAITYSGGSPYYADSVKGRFTISRDNAKNTVYLQMNSLKPEDTAVYYCAANPTYGSDWNAENWGQGTQVTVSSGTGGGGSGGGGSGGGGSEFDIQMTQSPSSLSASVGDRVTITCKASQSVSNDVTWYQQKPGQAPKLLIYSASNRYSGVPARFSGSGYGTEFTFTISSVQSEDFAVYFCQQDYSSFGQGTKLEIKRLEIQNPDPAVYQLRDSKSSDKSVCLFTDFDSQTNVSQSKDSDVYITDKCVLDMRSMDFKSNSAVAWSNKSDFACANAFNNSIIPEDTFFPSSDVPCDVKLVEKSFETDTNLNFQNLSVIGFRILLLKVAGFNLLMTLRLWSSRAKRSGSGVKQTLNFDLLKLAGDVESNPGPTSTMDWIWRILFLVGAATGAHSGPQVQLVESGGGSVQAGGSLRLSCGASGNISSRNCMGWFRQAPGKEREGVAAIGQVTGRSYYVDSVKGRFTISLDNAKNTLYLQMNTLKPEDTAMYYCAAAPGCLLSALRSADYRNWGQGTQVTVSSGSGGGGSGGGGSGGGGSFEQVQLVESGPGVVQPGRSLRISCAVSGFSVTNYGVHWVRQPPGKGLEWLGVIWAGGITNYNSAFMSRLTISKDNSKNTVYLQMNSLRAEDTAMYYCASRGGHYGYALDYWGQGTLVTVSSTREDLKNVFPPEVAVFEPSKAEIAHTQKATLVCLATGFYPDHVELSWWVNGKEVHSGVCTDPQPLKEQPALNDSRYCLSSRLRVSATFWQNPRNHFRCQVQFYGLSENDEWTQDRAKPVTQIVSAEAWGRADCGITSASYHQGVLSATILYEILLGKATLYAVLVSALVLMAMVKRKDSRG

SEQ ID NO: 45593 - protein, 900 aa, synthetic construct
MALPVTALLLPLALLLHAARPQVQLVESGGGSVQAGGSLRLSCGASGNISSRNCMGWFRQAPGKEREGVAAIGQVTGRSYYVDSVKGRFTISLDNAKNTLYLQMNTLKPEDTAMYYCAAAPGCLLSALRSADYRNWGQGTQVTVSSGTGGGGSGGGGSGGGGSEFDIQMTQSPSSLSASVGDRVTITCKASQSVSNDVTWYQQKPGQAPKLLIYSASNRYSGVPARFSGSGYGTEFTFTISSVQSEDFAVYFCQQDYSSFGQGTKLEIKRLEDLKNVFPPEVAVFEPSEAEISHTQKATLVCLATGFYPDHVELSWWVNGKEVHSGVCTDPQPLKEQPALNDSRYCLSSRLRVSATFWQNPRNHFRCQVQFYGLSENDEWTQDRAKPVTQIVSAEAWGRADCGFTSESYQQGVLSATILYEILLGKATLYAVLVSALVLMAMVKRKDSRGRAKRSGSGATNFSLLKQAGDVEENPGPTSATMDWIWRILFLVGAATGAHSGPEVQLVESGGGLVQAGGSLRLSCAASGRTFTMGWFRQAPGKEREFVAAISLSPTLAYYADSVKGRFTISRDNAKNTVVLQMNSLKPEDTALYYCAADRKSVMSIRPDYWGQGTQVTVSSGSGGGGSGGGGSGGGGSFEQVQLVESGPGVVQPGRSLRISCAVSGFSVTNYGVHWVRQPPGKGLEWLGVIWAGGITNYNSAFMSRLTISKDNSKNTVYLQMNSLRAEDTAMYYCASRGGHYGYALDYWGQGTLVTVSSTRIQNPDPAVYQLRDSKSSDKSVCLFTDFDSQTNVSQSKDSDVYITDKCVLDMRSMDFKSNSAVAWSNKSDFACANAFNNSIIPEDTFFPSPESSCDVKLVEKSFETDTNLNFQNLSVIGFRILLLKVAGFNLLMTLRLWSS

SEQ ID NO: 45594 - protein, 763 aa, synthetic construct
MALPVTALLLPLALLLHAARPQVQLVESGGGSVQAGGSLRLSCGASGNISSRNCMGWFRQAPGKEREGVAAIGQVTGRSYYVDSVKGRFTISLDNAKNTLYLQMNTLKPEDTAMYYCAAAPGCLLSALRSADYRNWGQGTQVTVSSGTGGGGSGGGGSGGGGSEFDIQMTQSPSSLSASVGDRVTITCKASQSVSNDVTWYQQKPGQAPKLLIYSASNRYSGVPARFSGSGYGTEFTFTISSVQSEDFAVYFCQQDYSSFGQGTKLEIKRLEDLKNVFPPEVAVFEPSEAEISHTQKATLVCLATGFYPDHVELSWWVNGKEVHSGVCTDPQPLKEQPALNDSRYCLSSRLRVSATFWQNPRNHFRCQVQFYGLSENDEWTQDRAKPVTQIVSAEAWGRADCGFTSESYQQGVLSATILYEILLGKATLYAVLVSALVLMAMVKRKDSRGRAKRSGSGATNFSLLKQAGDVEENPGPTSATMDWIWRILFLVGAATGAHSFEQVQLVESGPGVVQPGRSLRISCAVSGFSVTNYGVHWVRQPPGKGLEWLGVIWAGGITNYNSAFMSRLTISKDNSKNTVYLQMNSLRAEDTAMYYCASRGGHYGYALDYWGQGTLVTVSSTRIQNPDPAVYQLRDSKSSDKSVCLFTDFDSQTNVSQSKDSDVYITDKCVLDMRSMDFKSNSAVAWSNKSDFACANAFNNSIIPEDTFFPSPESSCDVKLVEKSFETDTNLNFQNLSVIGFRILLLKVAGFNLLMTLRLWSS

SEQ ID NO: 45595 - protein, 763 aa, synthetic construct
MALPVTALLLPLALLLHAARPQVQLVESGGGVVQPGGSLRLSCAASGLSFSTYTVAWFRQAPGKGLEGVAAIPYTSQHMVYTDSVRGRFTISRDNSKNTLYLQMNSLRAEDTAVYYCATDRRPGTSMLAINGYNRWGQGTTVTVSSGTGGGGSGGGGSGGGGSEFDIQMTQSPSSLSASVGDRVTITCKASQSVSNDVTWYQQKPGQAPKLLIYSASNRYSGVPARFSGSGYGTEFTFTISSVQSEDFAVYFCQQDYSSFGQGTKLEIKRLEDLKNVFPPEVAVFEPSEAEISHTQKATLVCLATGFYPDHVELSWWVNGKEVHSGVCTDPQPLKEQPALNDSRYCLSSRLRVSATFWQNPRNHFRCQVQFYGLSENDEWTQDRAKPVTQIVSAEAWGRADCGFTSESYQQGVLSATILYEILLGKATLYAVLVSALVLMAMVKRKDSRGRAKRSGSGATNFSLLKQAGDVEENPGPTSATMDWIWRILFLVGAATGAHSFEQVQLVESGPGVVQPGRSLRISCAVSGFSVTNYGVHWVRQPPGKGLEWLGVIWAGGITNYNSAFMSRLTISKDNSKNTVYLQMNSLRAEDTAMYYCASRGGHYGYALDYWGQGTLVTVSSTRIQNPDPAVYQLRDSKSSDKSVCLFTDFDSQTNVSQSKDSDVYITDKCVLDMRSMDFKSNSAVAWSNKSDFACANAFNNSIIPEDTFFPSPESSCDVKLVEKSFETDTNLNFQNLSVIGFRILLLKVAGFNLLMTLRLWSS

SEQ ID NO: 45596 - protein, 762 aa, synthetic construct
MALPVTALLLPLALLLHAARPDIQMTQSPSSLSASVGDRVTITCKASQSVSNDVTWYQQKPGQAPKLLIYSASNRYSGVPARFSGSGYGTEFTFTISSVQSEDFAVYFCQQDYSSFGQGTKLEIKRLEDLKNVFPPEVAVFEPSEAEISHTQKATLVCLATGFYPDHVELSWWVNGKEVHSGVCTDPQPLKEQPALNDSRYCLSSRLRVSATFWQNPRNHFRCQVQFYGLSENDEWTQDRAKPVTQIVSAEAWGRADCGFTSESYQQGVLSATILYEILLGKATLYAVLVSALVLMAMVKRKDSRGRAKRSGSGATNFSLLKQAGDVEENPGPTSTMDWIWRILFLVGAATGAHSGPQVQLVESGGGVVQPGGSLRLSCAASGLSFSTYTVAWFRQAPGKGLEGVAAIPYTSQHMVYTDSVRGRFTISRDNSKNTLYLQMNSLRAEDTAVYYCATDRRPGTSMLAINGYNRWGQGTTVTVSSGSGGGGSGGGGSGGGGSFEQVQLVESGPGVVQPGRSLRISCAVSGFSVTNYGVHWVRQPPGKGLEWLGVIWAGGITNYNSAFMSRLTISKDNSKNTVYLQMNSLRAEDTAMYYCASRGGHYGYALDYWGQGTLVTVSSTRIQNPDPAVYQLRDSKSSDKSVCLFTDFDSQTNVSQSKDSDVYITDKCVLDMRSMDFKSNSAVAWSNKSDFACANAFNNSIIPEDTFFPSPESSCDVKLVEKSFETDTNLNFQNLSVIGFRILLLKVAGFNLLMTLRLWSS

SEQ ID NO: 45597 - protein, 764 aa, synthetic construct
MALPVTALLLPLALLLHAARPDIQMTQSPSSLSASVGDRVTITCKASQSVSNDVTWYQQKPGQAPKLLIYSASNRYSGVPARFSGSGYGTEFTFTISSVQSEDFAVYFCQQDYSSFGQGTKLEIKRLEDLKNVFPPEVAVFEPSEAEISHTQKATLVCLATGFYPDHVELSWWVNGKEVHSGVCTDPQPLKEQPALNDSRYCLSSRLRVSATFWQNPRNHFRCQVQFYGLSENDEWTQDRAKPVTQIVSAEAWGRADCGFTSESYQQGVLSATILYEILLGKATLYAVLVSALVLMAMVKRKDSRGRAKRSGSGATNFSLLKQAGDVEENPGPTSTMDWIWRILFLVGAATGAHSGPEVQLVESGGGSVQAGGSLRLSCAASGYTYSINCMGWFRQAPGKEREGVAAISTGGGRTDYRDSVKGRFTISQDNAKNTVYLQMNSLKPEDTAMYYCAGKTTYPGYGCGLGRSAYNYWGQGTQVTVSSGSGGGGSGGGGSGGGGSFEQVQLVESGPGVVQPGRSLRISCAVSGFSVTNYGVHWVRQPPGKGLEWLGVIWAGGITNYNSAFMSRLTISKDNSKNTVYLQMNSLRAEDTAMYYCASRGGHYGYALDYWGQGTLVTVSSTRIQNPDPAVYQLRDSKSSDKSVCLFTDFDSQTNVSQSKDSDVYITDKCVLDMRSMDFKSNSAVAWSNKSDFACANAFNNSIIPEDTFFPSPESSCDVKLVEKSFETDTNLNFQNLSVIGFRILLLKVAGFNLLMTLRLWSS

SEQ ID NO: 45598 - protein, 617 aa, synthetic construct
MALPVTALLLPLALLLHAARPDIQMTQSPSSLSASVGDRVTITCKASQSVSNDVTWYQQKPGQAPKLLIYSASNRYSGVPARFSGSGYGTEFTFTISSVQSEDFAVYFCQQDYSSFGQGTKLEIKRLEDLKHVFPPEVAVFEPSDAEIWHTQKATLVCLATGFYPDHVELSWWVNGKEVHSGVSTDPQPLKEQPALNDSRYCLSSRLRVSATFWQNPRNHFRCQVQFYGLSENDEWTQDRAKPVTQIVSAEAWGRADCGFTSESYQQGVLSATILYEILLGKATLYAVLVSALVLMAMVKRKDSRGRAKRSGSGATNFSLLKQAGDVEENPGPTSMDWIWRILFLVGAATGAHSFEQVQLVESGPGVVQPGRSLRISCAVSGFSVTNYGVHWVRQPPGKGLEWLGVIWAGGITNYNSAFMSRLTISKDNSKNTVYLQMNSLRAEDTAMYYCASRGGHYGYALDYWGQGTLVTVSSTRIQNPDPAVYQLRDSKSSDKSVCLFTDFDSQTNVSQSKDSDVYITDKTVLDMRSMDFKSNSAVAWSSKSDFACANAFNNSIIPEDTFFPSPEMACDVKLVEKSFETDTNLNFQNLLVIWLRILLLKVAGFNLLMTLRLWSS

SEQ ID NO: 45599 - protein, 617 aa, synthetic construct
MALPVTALLLPLALLLHAARPDIQMTQSPSSLSASVGDRVTITCKASQSVSNDVTWYQQKPGQAPKLLIYSASNRYSGVPARFSGSGYGTEFTFTISSVQSEDFAVYFCQQDYSSFGQGTKLEIKRLEDLKHVFPPEVAVFEPSDAEIWHTQKATLVCLATGFYPDHVELSWWVNGKEVHSGVSTDPQPLKEQPALNDSRYCLSSRLRVSATFWQNPRNHFRCQVQFYGLSENDEWTQDRAKPVTQIVSAEAWGRADCGFTSESYQQGVLSATILYEILLGKATLYAVLVSALVLMAMVKRKDSRGRAKRSGSGATNFSLLKQAGDVEENPGPTSMDWIWRILFLVGAATGAHSFEQVQLVESGPGVVQPGRSLRISCAVSGFSVTNYGVHWVRQPPGKGLEWLGVIWAGGITNYNSAFMSRLTISKDNSKNTVYLQMNSLRAEDTAMYYCASRGGHYGYALDYWGQGTLVTVSSTRIQNPDPAVYQLRDSKSSDKSVCLFTDFDSQTNVSQSKDSDVYITDKTVLDMRSMDFKSNSAVAWSTKSDFACANAFNNSIIPEDTFFPSPEVVCDVKLVEKSFETDTNLNFQNLVVIGARILLLKVAGFNLLMTLRLWSS

SEQ ID NO: 45600 - protein, 617 aa, synthetic construct
MALPVTALLLPLALLLHAARPDIQMTQSPSSLSASVGDRVTITCKASQSVSNDVTWYQQKPGQAPKLLIYSASNRYSGVPARFSGSGYGTEFTFTISSVQSEDFAVYFCQQDYSSFGQGTKLEIKRLEDLKNVFPPEVAVFEPSKAEISRTQKATLVCLATGFYPPHVELSWWVNGKEVHDGVCTDPQPLKEQPALNDSRYCLSSRLRVSATFWQNPRNHFRCQVQFYGLSENDEWTQDRAKPVTQIVSAEAWGRADCGFTSESYQQGVLSATILYEILLGKATLYAVLVSALVLMAMVKRKDSRGRAKRSGSGATNFSLLKQAGDVEENPGPTSMDWIWRILFLVGAATGAHSFEQVQLVESGPGVVQPGRSLRISCAVSGFSVTNYGVHWVRQPPGKGLEWLGVIWAGGITNYNSAFMSRLTISKDNSKNTVYLQMNSLRAEDTAMYYCASRGGHYGYALDYWGQGTLVTVSSTRIQNPDPAVYQLRDSKSSDKFVCLFTDFDSQINVSQSKDSDVYITDKCVLDMRSMDFKSNSAVAWSNKSDFTCANAFNNSIIPEDTFFPSPESSCDVKLVEKSFETDTNLNFQNLSVIGFRILLLKVAGFNLLMTLRLWSS

SEQ ID NO: 45601 - protein, 759 aa, synthetic construct
MALPVTALLLPLALLLHAARPDIQMTQSPSSLSASVGDRVTITCKASQSVSNDVTWYQQKPGQAPKLLIYSASNRYSGVPARFSGSGYGTEFTFTISSVQSEDFAVYFCQQDYSSFGQGTKLEIKRLEDLKNVFPPEVAVFEPSEAEISHTQKATLVCLATGFYPDHVELSWWVNGKEVHSGVCTDPQPLKEQPALNDSRYCLSSRLRVSATFWQNPRNHFRCQVQFYGLSENDEWTQDRAKPVTQIVSAEAWGRADCGFTSESYQQGVLSATILYEILLGKATLYAVLVSALVLMAMVKRKDSRGRAKRSGSGATNFSLLKQAGDVEENPGPTSTMDWIWRILFLVGAATGAHSGPQVQLQESGPGLVKPSQTLSLTCTVSGASITTGEYYWNWFRQPPGKGLEWMGAIAASGSTTYSPSFESRTSISRDTSKNQFSLKLSSVTAADTAVYYCGRSFGVAAVTTGQNRGQGTLVTVSSGSGGGGSGGGGSGGGGSFEQVQLVESGPGVVQPGRSLRISCAVSGFSVTNYGVHWVRQPPGKGLEWLGVIWAGGITNYNSAFMSRLTISKDNSKNTVYLQMNSLRAEDTAMYYCASRGGHYGYALDYWGQGTLVTVSSTRIQNPDPAVYQLRDSKSSDKSVCLFTDFDSQTNVSQSKDSDVYITDKCVLDMRSMDFKSNSAVAWSNKSDFACANAFNNSIIPEDTFFPSPESSCDVKLVEKSFETDTNLNFQNLSVIGFRILLLKVAGFNLLMTLRLWSS

SEQ ID NO: 45602 - protein, 900 aa, synthetic construct
MALPVTALLLPLALLLHAARPQVQLQESGPGLVKPSQTLSLTCTVSGGSITTGEFYWNWFRQPPGKGLEWMGAIAASGSTTYSPSFESRTSISRDTSKNQFSLKLSSVTAADTAVYYCGRSFGVAAVTTGQNRGQGTLVTVSSGTGGGGSGGGGSGGGGSEFDIQMTQSPSSLSASVGDRVTITCKASQSVSNDVTWYQQKPGQAPKLLIYSASNRYSGVPARFSGSGYGTEFTFTISSVQSEDFAVYFCQQDYSSFGQGTKLEIKRLEIQNPDPAVYQLRDSKSSDKSVCLFTDFDSQTNVSQSKDSDVYITDKCVLDMRSMDFKSNSAVAWSNKSDFACANAFNNSIIPEDTFFPSSDVPCDVKLVEKSFETDTNLNFQNLSVIGFRILLLKVAGFNLLMTLRLWSSRAKRSGSGVKQTLNFDLLKLAGDVESNPGPTSTMDWIWRILFLVGAATGAHSGPEVQLVESGGGLVQPGGSLRLSCAASGRTFTMGWYRQAPGKEREFVAAISLSPTLAYYADSVKGRFTISRDNSKNTVVLQMNSLRAEDTALYYCAADRKSVMSIRPDYWGQGTLVTVSSGSGGGGSGGGGSGGGGSFEQVQLVESGPGVVQPGRSLRISCAVSGFSVTNYGVHWVRQPPGKGLEWLGVIWAGGITNYNSAFMSRLTISKDNSKNTVYLQMNSLRAEDTAMYYCASRGGHYGYALDYWGQGTLVTVSSTREDLKNVFPPEVAVFEPSKAEIAHTQKATLVCLATGFYPDHVELSWWVNGKEVHSGVCTDPQPLKEQPALNDSRYCLSSRLRVSATFWQNPRNHFRCQVQFYGLSENDEWTQDRAKPVTQIVSAEAWGRADCGITSASYHQGVLSATILYEILLGKATLYAVLVSALVLMAMVKRKDSRG

SEQ ID NO: 45603 - protein, 763 aa, synthetic construct
MALPVTALLLPLALLLHAARPQVQLQESGPGLVKPSQTLSLTCTVSGGSITTGEFYWNWFRQPPGKGLEWMGAIAASGSTTYSPSFESRTSISRDTSKNQFSLKLSSVTAADTAVYYCGRSFGVAAVTTGQNRGQGTLVTVSSGTGGGGSGGGGSGGGGSEFDIQMTQSPSSLSASVGDRVTITCKASQSVSNDVTWYQQKPGQAPKLLIYSASNRYSGVPARFSGSGYGTEFTFTISSVQSEDFAVYFCQQDYSSFGQGTKLEIKRLEIQNPDPAVYQLRDSKSSDKSVCLFTDFDSQTNVSQSKDSDVYITDKCVLDMRSMDFKSNSAVAWSNKSDFACANAFNNSIIPEDTFFPSSDVPCDVKLVEKSFETDTNLNFQNLSVIGFRILLLKVAGFNLLMTLRLWSSRAKRSGSGVKQTLNFDLLKLAGDVESNPGPTSTMDWIWRILFLVGAATGAHSFEQVQLVESGPGVVQPGRSLRISCAVSGFSVTNYGVHWVRQPPGKGLEWLGVIWAGGITNYNSAFMSRLTISKDNSKNTVYLQMNSLRAEDTAMYYCASRGGHYGYALDYWGQGTLVTVSSTREDLKNVFPPEVAVFEPSKAEIAHTQKATLVCLATGFYPDHVELSWWVNGKEVHSGVCTDPQPLKEQPALNDSRYCLSSRLRVSATFWQNPRNHFRCQVQFYGLSENDEWTQDRAKPVTQIVSAEAWGRADCGITSASYHQGVLSATILYEILLGKATLYAVLVSALVLMAMVKRKDSRG

SEQ ID NO: 45604 - protein, 896 aa, synthetic construct
MALPVTALLLPLALLLHAARPEVQLVESGGGLVQAGGSLRLSCAASGRTFSMGWFRQAPGKEREFVAAITYSGGSPYYADSVKGRFTISRDNAKNTVYLQMNSLKPEDTAVYYCAANPTYGSDWNAENWGQGTQVTVSSGTGGGGSGGGGSGGGGSEFDIQMTQSPSSLSASVGDRVTITCKASQSVSNDVTWYQQKPGQAPKLLIYSASNRYSGVPARFSGSGYGTEFTFTISSVQSEDFAVYFCQQDYSSFGQGTKLEIKRLEDLKNVFPPEVAVFEPSEAEISHTQKATLVCLATGFYPDHVELSWWVNGKEVHSGVCTDPQPLKEQPALNDSRYCLSSRLRVSATFWQNPRNHFRCQVQFYGLSENDEWTQDRAKPVTQIVSAEAWGRADCGFTSESYQQGVLSATILYEILLGKATLYAVLVSALVLMAMVKRKDSRGRAKRSGSGATNFSLLKQAGDVEENPGPTSTMDWIWRILFLVGAATGAHSGPQVQLQESGPGLVKPSQTLSLTCTVSGASITTGEYYWNWFRQPPGKGLEWMGAIAASGSTTYSPSFESRTSISRDTSKNQFSLKLSSVTAADTAVYYCGRSFGVAAVTTGQNRGQGTLVTVSSGSGGGGSGGGGSGGGGSFEQVQLVESGPGVVQPGRSLRISCAVSGFSVTNYGVHWVRQPPGKGLEWLGVIWAGGITNYNSAFMSRLTISKDNSKNTVYLQMNSLRAEDTAMYYCASRGGHYGYALDYWGQGTLVTVSSTRIQNPDPAVYQLRDSKSSDKSVCLFTDFDSQTNVSQSKDSDVYITDKCVLDMRSMDFKSNSAVAWSNKSDFACANAFNNSIIPEDTFFPSPESSCDVKLVEKSFETDTNLNFQNLSVIGFRILLLKVAGFNLLMTLRLWSS

SEQ ID NO: 45605 - protein, 903 aa, synthetic construct
MALPVTALLLPLALLLHAARPEVQLVESGGGLVQAGGSLRLSCAASGRTFSMGWFRQAPGKEREFVAAITYSGGSPYYADSVKGRFTISRDNAKNTVYLQMNSLKPEDTAVYYCAANPTYGSDWNAENWGQGTQVTVSSGTGGGGSGGGGSGGGGSEFDIQMTQSPSSLSASVGDRVTITCKASQSVSNDVTWYQQKPGQAPKLLIYSASNRYSGVPARFSGSGYGTEFTFTISSVQSEDFAVYFCQQDYSSFGQGTKLEIKRLEIQNPDPAVYQLRDSKSSDKSVCLFTDFDSQTNVSQSKDSDVYITDKCVLDMRSMDFKSNSAVAWSNKSDFACANAFNNSIIPEDTFFPSSDVPCDVKLVEKSFETDTNLNFQNLSVIGFRILLLKVAGFNLLMTLRLWSSRAKRSGSGVKQTLNFDLLKLAGDVESNPGPTSTMDWIWRILFLVGAATGAHSGPQVQLVESGGGLVQPGGSLRLSCAASGNINSRNCMGWFRQAPGKGREGVAAIGQVTGRTYYVDSVKGRFTISLDNSKNTLYLQMNSLRAEDTAVYYCAAAPGCLLSALRSADYRNWGQGTLVTVSSGSGGGGSGGGGSGGGGSFEQVQLVESGPGVVQPGRSLRISCAVSGFSVTNYGVHWVRQPPGKGLEWLGVIWAGGITNYNSAFMSRLTISKDNSKNTVYLQMNSLRAEDTAMYYCASRGGHYGYALDYWGQGTLVTVSSTREDLKNVFPPEVAVFEPSKAEIAHTQKATLVCLATGFYPDHVELSWWVNGKEVHSGVCTDPQPLKEQPALNDSRYCLSSRLRVSATFWQNPRNHFRCQVQFYGLSENDEWTQDRAKPVTQIVSAEAWGRADCGITSASYHQGVLSATILYEILLGKATLYAVLVSALVLMAMVKRKDSRG

SEQ ID NO: 45606 - protein, 899 aa, synthetic construct
MALPVTALLLPLALLLHAARPEVQLVESGGGLVQAGGSLRLSCAASGRTFSMGWFRQAPGKEREFVAAITYSGGSPYYADSVKGRFTISRDNAKNTVYLQMNSLKPEDTAVYYCAANPTYGSDWNAENWGQGTQVTVSSGTGGGGSGGGGSGGGGSEFDIQMTQSPSSLSASVGDRVTITCKASQSVSNDVTWYQQKPGQAPKLLIYSASNRYSGVPARFSGSGYGTEFTFTISSVQSEDFAVYFCQQDYSSFGQGTKLEIKRLEDLKNVFPPEVAVFEPSEAEISHTQKATLVCLATGFYPDHVELSWWVNGKEVHSGVCTDPQPLKEQPALNDSRYCLSSRLRVSATFWQNPRNHFRCQVQFYGLSENDEWTQDRAKPVTQIVSAEAWGRADCGFTSESYQQGVLSATILYEILLGKATLYAVLVSALVLMAMVKRKDSRGRAKRSGSGATNFSLLKQAGDVEENPGPTSTMDWIWRILFLVGAATGAHSGPQVQLVESGGGLVQPGGSLRLSCAASGNINSRNCMGWFRQAPGKGREGVAAIGQVTGRTYYVDSVKGRFTISLDNSKNTLYLQMNSLRAEDTAVYYCAAAPGCLLSALRSADYRNWGQGTLVTVSSGSGGGGSGGGGSGGGGSFEQVQLVESGPGVVQPGRSLRISCAVSGFSVTNYGVHWVRQPPGKGLEWLGVIWAGGITNYNSAFMSRLTISKDNSKNTVYLQMNSLRAEDTAMYYCASRGGHYGYALDYWGQGTLVTVSSTRIQNPDPAVYQLRDSKSSDKSVCLFTDFDSQTNVSQSKDSDVYITDKCVLDMRSMDFKSNSAVAWSNKSDFACANAFNNSIIPEDTFFPSPESSCDVKLVEKSFETDTNLNFQNLSVIGFRILLLKVAGFNLLMTLRLWSS

SEQ ID NO: 45607 - protein, 899 aa, synthetic construct
MALPVTALLLPLALLLHAARPEVQLVESGGGLVQAGGSLRLSCAASGRTFTMGWFRQAPGKEREFVAAISLSPTLAYYADSVKGRFTISRDNAKNTVVLQMNSLKPEDTALYYCAADRKSVMSIRPDYWGQGTQVTVSSGTGGGGSGGGGSGGGGSEFDIQMTQSPSSLSASVGDRVTITCKASQSVSNDVTWYQQKPGQAPKLLIYSASNRYSGVPARFSGSGYGTEFTFTISSVQSEDFAVYFCQQDYSSFGQGTKLEIKRLEDLKNVFPPEVAVFEPSEAEISHTQKATLVCLATGFYPDHVELSWWVNGKEVHSGVCTDPQPLKEQPALNDSRYCLSSRLRVSATFWQNPRNHFRCQVQFYGLSENDEWTQDRAKPVTQIVSAEAWGRADCGFTSESYQQGVLSATILYEILLGKATLYAVLVSALVLMAMVKRKDSRGRAKRSGSGATNFSLLKQAGDVEENPGPTSTMDWIWRILFLVGAATGAHSGPQVQLVESGGGLVQPGGSLRLSCAASGNINSRNCMGWFRQAPGKGREGVAAIGQVTGRTYYVDSVKGRFTISLDNSKNTLYLQMNSLRAEDTAVYYCAAAPGCLLSALRSADYRNWGQGTLVTVSSGSGGGGSGGGGSGGGGSFEQVQLVESGPGVVQPGRSLRISCAVSGFSVTNYGVHWVRQPPGKGLEWLGVIWAGGITNYNSAFMSRLTISKDNSKNTVYLQMNSLRAEDTAMYYCASRGGHYGYALDYWGQGTLVTVSSTRIQNPDPAVYQLRDSKSSDKSVCLFTDFDSQTNVSQSKDSDVYITDKCVLDMRSMDFKSNSAVAWSNKSDFACANAFNNSIIPEDTFFPSPESSCDVKLVEKSFETDTNLNFQNLSVIGFRILLLKVAGFNLLMTLRLWSS

SEQ ID NO: 45608 - protein, 903 aa, synthetic construct
MALPVTALLLPLALLLHAARPQVQLQESGPGLVKPSQTLSLTCTVSGGSITTGEFYWNWFRQPPGKGLEWMGAIAASGSTTYSPSFESRTSISRDTSKNQFSLKLSSVTAADTAVYYCGRSFGVAAVTTGQNRGQGTLVTVSSGTGGGGSGGGGSGGGGSEFDIQMTQSPSSLSASVGDRVTITCKASQSVSNDVTWYQQKPGQAPKLLIYSASNRYSGVPARFSGSGYGTEFTFTISSVQSEDFAVYFCQQDYSSFGQGTKLEIKRLEDLKNVFPPEVAVFEPSEAEISHTQKATLVCLATGFYPDHVELSWWVNGKEVHSGVCTDPQPLKEQPALNDSRYCLSSRLRVSATFWQNPRNHFRCQVQFYGLSENDEWTQDRAKPVTQIVSAEAWGRADCGFTSESYQQGVLSATILYEILLGKATLYAVLVSALVLMAMVKRKDSRGRAKRSGSGATNFSLLKQAGDVEENPGPTSTMDWIWRILFLVGAATGAHSGPQVQLVESGGGLVQPGGSLRLSCAASGNINSRNCMGWFRQAPGKGREGVAAIGQVTGRTYYVDSVKGRFTISLDNSKNTLYLQMNSLRAEDTAVYYCAAAPGCLLSALRSADYRNWGQGTLVTVSSGSGGGGSGGGGSGGGGSFEQVQLVESGPGVVQPGRSLRISCAVSGFSVTNYGVHWVRQPPGKGLEWLGVIWAGGITNYNSAFMSRLTISKDNSKNTVYLQMNSLRAEDTAMYYCASRGGHYGYALDYWGQGTLVTVSSTRIQNPDPAVYQLRDSKSSDKSVCLFTDFDSQTNVSQSKDSDVYITDKCVLDMRSMDFKSNSAVAWSNKSDFACANAFNNSIIPEDTFFPSPESSCDVKLVEKSFETDTNLNFQNLSVIGFRILLLKVAGFNLLMTLRLWSS

SEQ ID NO: 45609 - protein, 486 aa, synthetic construct
MALPVTALLLPLALLLHAARPENVLTQSPAIMSASPGEKVTMTCRASSSVSSSYLHWYQQKSGASPKVWIYSTSNLASGVPGRFSGSGSGTSYSLTISSVEAEDAATYYCQQYSGYPITFGAGTKVEVKRGGGGSGGGGSGGGGSQVQLKESGPVLVAPSQTLSITCTVSGFSLASYNIHWVRQPPGKGLEWLGVIWAGGSTNYNSALMSRLSISKDNSKSQVFLQMNSLQTDDTAMYYCAKRSDDYSWFAYWGQGTLVTVSASTRKIEVMYPPPYLDNEKSNGTIIHVKGKHLCPSPLFPGPSKPFWVLVVVGGVLACYSLLVTVAFIIFWVRSKRSRLLHSDYMNMTPRRPGPTRKHYQPYAPPRDFAAYRSRVKFSRSADAPAYQQGQNQLYNELNLGRREEYDVLDKRRGRDPEMGGKPRRKNPQEGLYNELQKDKMAEAYSEIGMKGERRRGKGHDGLYQGLSTATKDTYDALHMQALPPR

SEQ ID NO: 45610 - protein, 492 aa, synthetic construct
MALPVTALLLPLALLLHAARPENVLTQSPAIMSASPGEKVTMTCRASSSVSSSYLHWYQQKSGASPKVWIYSTSNLASGVPGRFSGSGSGTSYSLTISSVEAEDAATYYCQQYSGYPITFGAGTKVEVKRGGGGSGGGGSGGGGSQVQLKESGPVLVAPSQTLSITCTVSGFSLASYNIHWVRQPPGKGLEWLGVIWAGGSTNYNSALMSRLSISKDNSKSQVFLQMNSLQTDDTAMYYCAKRSDDYSWFAYWGQGTLVTVSASTRAKPTTTPAPRPPTPAPTIASQPLSLRPEACRPAAGGAVHTRGLDFACDIYIWAPLAGTCGVLLLSLVITLYCKRGRKKLLYIFKQPFMRPVQTTQEEDGCSCRFPEEEEGGCELRVKFSRSADAPAYQQGQNQLYNELNLGRREEYDVLDKRRGRDPEMGGKPRRKNPQEGLYNELQKDKMAEAYSEIGMKGERRRGKGHDGLYQGLSTATKDTYDALHMQALPPR

SEQ ID NO: 45611 - protein, 492 aa, synthetic construct
MALPVTALLLPLALLLHAARPQVQLKESGPVLVAPSQTLSITCTVSGFSLASYNIHWVRQPPGKGLEWLGVIWAGGSTNYNSALMSRLSISKDNSKSQVFLQMNSLQTDDTAMYYCAKRSDDYSWFAYWGQGTLVTVSASGGGGSGGGGSGGGGSENVLTQSPAIMSASPGEKVTMTCRASSSVSSSYLHWYQQKSGASPKVWIYSTSNLASGVPGRFSGSGSGTSYSLTISSVEAEDAATYYCQQYSGYPITFGAGTKVEVKRTRAKPTTTPAPRPPTPAPTIASQPLSLRPEACRPAAGGAVHTRGLDFACDIYIWAPLAGTCGVLLLSLVITLYCKRGRKKLLYIFKQPFMRPVQTTQEEDGCSCRFPEEEEGGCELRVKFSRSADAPAYQQGQNQLYNELNLGRREEYDVLDKRRGRDPEMGGKPRRKNPQEGLYNELQKDKMAEAYSEIGMKGERRRGKGHDGLYQGLSTATKDTYDALHMQALPPR

SEQ ID NO: 45612 - protein, 625 aa, synthetic construct
MALPVTALLLPLALLLHAARPENVLTQSPAIMSASPGEKVTMTCRASSSVSSSYLHWYQQKSGASPKVWIYSTSNLASGVPGRFSGSGSGTSYSLTISSVEAEDAATYYCQQYSGYPITFGAGTKVEVKRLEIQNPDPAVYQLRDSKSSDKSVCLFTDFDSQTNVSQSKDSDVYITDKCVLDMRSMDFKSNSAVAWSNKSDFACANAFNNSIIPEDTFFPSSDVPCDVKLVEKSFETDTNLNFQNLSVIGFRILLLKVAGFNLLMTLRLWSSRAKRSGSGVKQTLNFDLLKLAGDVESNPGPTSMDWIWRILFLVGAATGAHSFEQVQLKESGPVLVAPSQTLSITCTVSGFSLASYNIHWVRQPPGKGLEWLGVIWAGGSTNYNSALMSRLSISKDNSKSQVFLQMNSLQTDDTAMYYCAKRSDDYSWFAYWGQGTLVTVSASTREDLKNVFPPEVAVFEPSKAEIAHTQKATLVCLATGFYPDHVELSWWVNGKEVHSGVCTDPQPLKEQPALNDSRYCLSSRLRVSATFWQNPRNHFRCQVQFYGLSENDEWTQDRAKPVTQIVSAEAWGRADCGITSASYHQGVLSATILYEILLGKATLYAVLVSALVLMAMVKRKDSRG

SEQ ID NO: 45613 - protein, 621 aa, synthetic construct
MALPVTALLLPLALLLHAARPENVLTQSPAIMSASPGEKVTMTCRASSSVSSSYLHWYQQKSGASPKVWIYSTSNLASGVPGRFSGSGSGTSYSLTISSVEAEDAATYYCQQYSGYPITFGAGTKVEVKRLEDLKNVFPPEVAVFEPSKAEIAHTQKATLVCLATGFYPDHVELSWWVNGKEVHSGVCTDPQPLKEQPALNDSRYCLSSRLRVSATFWQNPRNHFRCQVQFYGLSENDEWTQDRAKPVTQIVSAEAWGRADCGITSASYHQGVLSATILYEILLGKATLYAVLVSALVLMAMVKRKDSRGRAKRSGSGATNFSLLKQAGDVEENPGPTSMDWIWRILFLVGAATGAHSFEQVQLKESGPVLVAPSQTLSITCTVSGFSLASYNIHWVRQPPGKGLEWLGVIWAGGSTNYNSALMSRLSISKDNSKSQVFLQMNSLQTDDTAMYYCAKRSDDYSWFAYWGQGTLVTVSASTRIQNPDPAVYQLRDSKSSDKSVCLFTDFDSQTNVSQSKDSDVYITDKCVLDMRSMDFKSNSAVAWSNKSDFACANAFNNSIIPEDTFFPSSDVPCDVKLVEKSFETDTNLNFQNLSVIGFRILLLKVAGFNLLMTLRLWSS

SEQ ID NO: 45614 - protein, 621 aa, synthetic construct
MALPVTALLLPLALLLHAARPENVLTQSPAIMSASPGEKVTMTCRASSSVSSSYLHWYQQKSGASPKVWIYSTSNLASGVPGRFSGSGSGTSYSLTISSVEAEDAATYYCQQYSGYPITFGAGTKVEVKRLEDLKNVFPPEVAVFEPSEAEISHTQKATLVCLATGFYPDHVELSWWVNGKEVHSGVCTDPQPLKEQPALNDSRYCLSSRLRVSATFWQNPRNHFRCQVQFYGLSENDEWTQDRAKPVTQIVSAEAWGRADCGFTSESYQQGVLSATILYEILLGKATLYAVLVSALVLMAMVKRKDSRGRAKRSGSGATNFSLLKQAGDVEENPGPTSMDWIWRILFLVGAATGAHSFEQVQLKESGPVLVAPSQTLSITCTVSGFSLASYNIHWVRQPPGKGLEWLGVIWAGGSTNYNSALMSRLSISKDNSKSQVFLQMNSLQTDDTAMYYCAKRSDDYSWFAYWGQGTLVTVSASTRIQNPDPAVYQLRDSKSSDKSVCLFTDFDSQTNVSQSKDSDVYITDKCVLDMRSMDFKSNSAVAWSNKSDFACANAFNNSIIPEDTFFPSPESSCDVKLVEKSFETDTNLNFQNLSVIGFRILLLKVAGFNLLMTLRLWSS

SEQ ID NO: 45615 - protein, 625 aa, synthetic construct
MALPVTALLLPLALLLHAARPENVLTQSPAIMSASPGEKVTMTCRASSSVSSSYLHWYQQKSGASPKVWIYSTSNLASGVPGRFSGSGSGTSYSLTISSVEAEDAATYYCQQYSGYPITFGAGTKVEVKRLEIQNPDPAVYQLRDSKSSDKSVCLFTDFDSQTNVSQSKDSDVYITDKCVLDMRSMDFKSNSAVAWSNKSDFACANAFNNSIIPEDTFFPSPESSCDVKLVEKSFETDTNLNFQNLSVIGFRILLLKVAGFNLLMTLRLWSSRAKRSGSGVKQTLNFDLLKLAGDVESNPGPTSMDWIWRILFLVGAATGAHSFEQVQLKESGPVLVAPSQTLSITCTVSGFSLASYNIHWVRQPPGKGLEWLGVIWAGGSTNYNSALMSRLSISKDNSKSQVFLQMNSLQTDDTAMYYCAKRSDDYSWFAYWGQGTLVTVSASTREDLKNVFPPEVAVFEPSEAEISHTQKATLVCLATGFYPDHVELSWWVNGKEVHSGVCTDPQPLKEQPALNDSRYCLSSRLRVSATFWQNPRNHFRCQVQFYGLSENDEWTQDRAKPVTQIVSAEAWGRADCGFTSESYQQGVLSATILYEILLGKATLYAVLVSALVLMAMVKRKDSRG

SEQ ID NO: 45616 - protein, 637 aa, synthetic construct
MALPVTALLLPLALLLHAARPLEEDLKNVFPPEVAVFEPSKAEIAHTQKATLVCLATGFYPDHVELSWWVNGKEVHSGVCTDPQPLKEQPALNDSRYCLSSRLRVSATFWQNPRNHFRCQVQFYGLSENDEWTQDRAKPVTQIVSAEAWGRADCGITSASYHQGVLSATILYEILLGKATLYAVLVSALVLMAMVKRKDSRGRAKRSGSGATNFSLLKQAGDVEENPGPTSMALPVTALLLPLALLLHAARPENVLTQSPAIMSASPGEKVTMTCRASSSVSSSYLHWYQQKSGASPKVWIYSTSNLASGVPGRFSGSGSGTSYSLTISSVEAEDAATYYCQQYSGYPITFGAGTKVEVKRGGGGSGGGGSGGGGSQVQLKESGPVLVAPSQTLSITCTVSGFSLASYNIHWVRQPPGKGLEWLGVIWAGGSTNYNSALMSRLSISKDNSKSQVFLQMNSLQTDDTAMYYCAKRSDDYSWFAYWGQGTLVTVSASTRIQNPDPAVYQLRDSKSSDKSVCLFTDFDSQTNVSQSKDSDVYITDKCVLDMRSMDFKSNSAVAWSNKSDFACANAFNNSIIPEDTFFPSSDVPCDVKLVEKSFETDTNLNFQNLSVIGFRILLLKVAGFNLLMTLRLWSS

SEQ ID NO: 45617 - protein, 644 aa, synthetic construct
MALPVTALLLPLALLLHAARPLEGSGDRPDPAVYQLRDSKSSDKSVCLFTDFDSQTNVSQSKDSDVYITDKCVLDMRSMDFKSNSAVAWSNKSDFACANAFNNSIIPEDTFFPSPESSCDVKLVEKSFETDTNLNFQNLSVIGFRILLLKVAGFNLLMTLRLWSSSSRAKRSGSGVKQTLNFDLLKLAGDVESNPGPTSMALPVTALLLPLALLLHAARPENVLTQSPAIMSASPGEKVTMTCRASSSVSSSYLHWYQQKSGASPKVWIYSTSNLASGVPGRFSGSGSGTSYSLTISSVEAEDAATYYCQQYSGYPITFGAGTKVEVKRGGGGSGGGGSGGGGSQVQLKESGPVLVAPSQTLSITCTVSGFSLASYNIHWVRQPPGKGLEWLGVIWAGGSTNYNSALMSRLSISKDNSKSQVFLQMNSLQTDDTAMYYCAKRSDDYSWFAYWGQGTLVTVSASTREDLKNVFPPEVAVFEPSEAEISHTQKATLVCLATGFYPDHVELSWWVNGKEVHSGVCTDPQPLKEQPALNDSRYCLSSRLRVSATFWQNPRNHFRCQVQFYGLSENDEWTQDRAKPVTQIVSAEAWGRADCGFTSESYQQGVLSATILYEILLGKATLYAVLVSALVLMAMVKRKDSRG

SEQ ID NO: 45618 - protein, 621 aa, synthetic construct
MALPVTALLLPLALLLHAARPENVLTQSPAIMSASPGEKVTMTCRASSSVSSSYLHWYQQKSGASPKVWIYSTSNLASGVPGRFSGSGSGTSYSLTISSVEAEDAATYYCQQYSGYPITFGAGTKVEVKRLEDLKNVFPPEVAVFEPSEAEISHTQKATLVCLATGFYPDHVELSWWVNGKEVHSGVSTDPQPLKEQPALNDSRYCLSSRLRVSATFWQNPRNHFRCQVQFYGLSENDEWTQDRAKPVTQIVSAEAWGRADCGFTSESYQQGVLSATILYEILLGKATLYAVLVSALVLMAMVKRKDSRGRAKRSGSGATNFSLLKQAGDVEENPGPTSMDWIWRILFLVGAATGAHSFEQVQLKESGPVLVAPSQTLSITCTVSGFSLASYNIHWVRQPPGKGLEWLGVIWAGGSTNYNSALMSRLSISKDNSKSQVFLQMNSLQTDDTAMYYCAKRSDDYSWFAYWGQGTLVTVSASTRIQNPDPAVYQLRDSKSSDKSVCLFTDFDSQTNVSQSKDSDVYITDKTVLDMRSMDFKSNSAVAWSNKSDFACANAFNNSIIPEDTFFPSPESSCDVKLVEKSFETDTNLNFQNLSVIGFRILLLKVAGFNLLMTLRLWSS

SEQ ID NO: 45619 - protein, 629 aa, synthetic construct
MALPVTALLLPLALLLHAARPENVLTQSPAIMSASPGEKVTMTCRASSSVSSSYLHWYQQKSGASPKVWIYSTSNLASGVPGRFSGSGSGTSYSLTISSVEAEDAATYYCQQYSGYPITFGAGTKVEVKRLEDKQLDADVSPKPTIFLPSIAETKLQKAGTYLCLLEKFFPDVIKIHWQEKKSNTILGSQEGNTMKTNDTYMKFSWLTVPEKSLDKEHRCIVRHENNKNGVDQEIIFPPIKTDVITMDPKDNCSKDANDTLLLQLTNTSAYYMYLLLLLKSVVYFAIITCCLLRRTAFCCNGEKSRAKRSGSGATNFSLLKQAGDVEENPGPTSMDWIWRILFLVGAATGAHSFEQVQLKESGPVLVAPSQTLSITCTVSGFSLASYNIHWVRQPPGKGLEWLGVIWAGGSTNYNSALMSRLSISKDNSKSQVFLQMNSLQTDDTAMYYCAKRSDDYSWFAYWGQGTLVTVSASTRSQPHTKPSVFVMKNGTNVACLVKEFYPKDIRINLVSSKKITEFDPAIVISPSGKYNAVKLGKYEDSNSVTCSVQHDNKTVHSTDFEVKTDSTDHVKPKETENTKQPSKSCHKPKAIVHTEKVNMMSLTVLGLRMLFAKTVAVNFLLTAKLFFL

SEQ ID NO: 45620 - protein, 629 aa, synthetic construct
MALPVTALLLPLALLLHAARPENVLTQSPAIMSASPGEKVTMTCRASSSVSSSYLHWYQQKSGASPKVWIYSTSNLASGVPGRFSGSGSGTSYSLTISSVEAEDAATYYCQQYSGYPITFGAGTKVEVKRLESQPHTKPSVFVMKNGTNVACLVKEFYPKDIRINLVSSKKITEFDPAIVISPSGKYNAVKLGKYEDSNSVTCSVQHDNKTVHSTDFEVKTDSTDHVKPKETENTKQPSKSCHKPKAIVHTEKVNMMSLTVLGLRMLFAKTVAVNFLLTAKLFFLRAKRSGSGATNFSLLKQAGDVEENPGPTSMDWIWRILFLVGAATGAHSFEQVQLKESGPVLVAPSQTLSITCTVSGFSLASYNIHWVRQPPGKGLEWLGVIWAGGSTNYNSALMSRLSISKDNSKSQVFLQMNSLQTDDTAMYYCAKRSDDYSWFAYWGQGTLVTVSASTRDKQLDADVSPKPTIFLPSIAETKLQKAGTYLCLLEKFFPDVIKIHWQEKKSNTILGSQEGNTMKTNDTYMKFSWLTVPEKSLDKEHRCIVRHENNKNGVDQEIIFPPIKTDVITMDPKDNCSKDANDTLLLQLTNTSAYYMYLLLLLKSVVYFAIITCCLLRRTAFCCNGEKS

SEQ ID NO: 45621 - protein, 644 aa, synthetic construct
MALPVTALLLPLALLLHAARPLEDKQLDADVSPKPTIFLPSIAETKLQKAGTYLCLLEKFFPDVIKIHWQEKKSNTILGSQEGNTMKTNDTYMKFSWLTVPEKSLDKEHRCIVRHENNKNGVDQEIIFPPIKTDVITMDPKDNCSKDANDTLLLQLTNTSAYYMYLLLLLKSVVYFAIITCCLLRRTAFCCNGEKSRAKRSGSGATNFSLLKQAGDVEENPGPTSMALPVTALLLPLALLLHAARPENVLTQSPAIMSASPGEKVTMTCRASSSVSSSYLHWYQQKSGASPKVWIYSTSNLASGVPGRFSGSGSGTSYSLTISSVEAEDAATYYCQQYSGYPITFGAGTKVEVKRGGGGSGGGGSGGGGSQVQLKESGPVLVAPSQTLSITCTVSGFSLASYNIHWVRQPPGKGLEWLGVIWAGGSTNYNSALMSRLSISKDNSKSQVFLQMNSLQTDDTAMYYCAKRSDDYSWFAYWGQGTLVTVSASTRSQPHTKPSVFVMKNGTNVACLVKEFYPKDIRINLVSSKKITEFDPAIVISPSGKYNAVKLGKYEDSNSVTCSVQHDNKTVHSTDFEVKTDSTDHVKPKETENTKQPSKSCHKPKAIVHTEKVNMMSLTVLGLRMLFAKTVAVNFLLTAKLFFL

SEQ ID NO: 45622 - protein, 798 aa, synthetic construct
MALPVTALLLPLALLLHAARPENVLTQSPAIMSASPGEKVTMTCRASSSVSSSYLHWYQQKSGASPKVWIYSTSNLASGVPGRFSGSGSGTSYSLTISSVEAEDAATYYCQQYSGYPITFGAGTKVEVKRGQPKANPTVTLFPPSSEELQANKATLVCLISDFYPGAVTVAWKADGSPVKAGVETTKPSKQSNNKYAASSYLSLTPEQWKSHRSYSCQVTHEGSTVEKTVAPTECSGSQSFGLLDPKLCYLLDGILFIYGVILTALFLRVKFSRSADAPAYQQGQNQLYNELNLGRREEYDVLDKRRGRDPEMGGKPQRRKNPQEGLYNELQKDKMAEAYSEIGMKGERRRGKGHDGLYQGLSTATKDTYDALHMQALPPRRAKRSGSGATNFSLLKQAGDVEENPGPTSMDWIWRILFLVGAATGAHSFEQVQLKESGPVLVAPSQTLSITCTVSGFSLASYNIHWVRQPPGKGLEWLGVIWAGGSTNYNSALMSRLSISKDNSKSQVFLQMNSLQTDDTAMYYCAKRSDDYSWFAYWGQGTLVTVSASASTKGPSVFPLAPSSKSTSGGTAALGCLVKDYFPEPVTVSWNSGALTSGVHTFPAVLQSSGLYSLSSVVTVPSSSLGTQTYICNVNHKPSNTKVDKRVEPKSCGTQSFGLLDPKLCYLLDGILFIYGVILTALFLRVKFSRSADAPAYQQGQNQLYNELNLGRREEYDVLDKRRGRDPEMGGKPQRRKNPQEGLYNELQKDKMAEAYSEIGMKGERRRGKGHDGLYQGLSTATKDTYDALHMQALPPR

SEQ ID NO: 45623 - protein, 817 aa, synthetic construct
MALPVTALLLPLALLLHAARPENVLTQSPAIMSASPGEKVTMTCRASSSVSSSYLHWYQQKSGASPKVWIYSTSNLASGVPGRFSGSGSGTSYSLTISSVEAEDAATYYCQQYSGYPITFGAGTKVEVKRLEDLKNVFPPEVAVFEPSEAEISHTQKATLVCLATGFYPDHVELSWWVNGKEVHSGVSTDPQPLKEQPALNDSRYCLSSRLRVSATFWQNPRNHFRCQVQFYGLSENDEWTQDRAKPVTQIVSAEAWGRADCGSQSFGLLDPKLCYLLDGILFIYGVILTALFLRVKFSRSADAPAYQQGQNQLYNELNLGRREEYDVLDKRRGRDPEMGGKPQRRKNPQEGLYNELQKDKMAEAYSEIGMKGERRRGKGHDGLYQGLSTATKDTYDALHMQALPPRRAKRSGSGATNFSLLKQAGDVEENPGPTSMDWIWRILFLVGAATGAHSFEQVQLKESGPVLVAPSQTLSITCTVSGFSLASYNIHWVRQPPGKGLEWLGVIWAGGSTNYNSALMSRLSISKDNSKSQVFLQMNSLQTDDTAMYYCAKRSDDYSWFAYWGQGTLVTVSASTRIQNPDPAVYQLRDSKSSDKSVCLFTDFDSQTNVSQSKDSDVYITDKTVLDMRSMDFKSNSAVAWSNKSDFACANAFNNSIIPEDTFFPSPESSCGTQSFGLLDPKLCYLLDGILFIYGVILTALFLRVKFSRSADAPAYQQGQNQLYNELNLGRREEYDVLDKRRGRDPEMGGKPQRRKNPQEGLYNELQKDKMAEAYSEIGMKGERRRGKGHDGLYQGLSTATKDTYDALHMQALPPR

SEQ ID NO: 45624 - protein, 859 aa, synthetic construct
MALPVTALLLPLALLLHAARPENVLTQSPAIMSASPGEKVTMTCRASSSVSSSYLHWYQQKSGASPKVWIYSTSNLASGVPGRFSGSGSGTSYSLTISSVEAEDAATYYCQQYSGYPITFGAGTKVEVKRLEEDLKNVFPPEVAVFEPSEAEISHTQKATLVCLATGFYPDHVELSWWVNGKEVHSGVSTDPQPLKEQPALNDSRYCLSSRLRVSATFWQNPRNHFRCQVQFYGLSENDEWTQDRAKPVTQIVSAEAWGRADCGSQSFGLLDPKLCYLLDGILFIYGVILTALFLRVKFSRSADAPAYQQGQNQLYNELNLGRREEYDVLDKRRGRDPEMGGKPQRRKNPQEGLYNELQKDKMAEAYSEIGMKGERRRGKGHDGLYQGLSTATKDTYDALHMQALPPRRAKRSGSGATNFSLLKQAGDVEENPGPTSMDWIWRILFLVGAATGAHSFEQVQLKESGPVLVAPSQTLSITCTVSGFSLASYNIHWVRQPPGKGLEWLGVIWAGGSTNYNSALMSRLSISKDNSKSQVFLQMNSLQTDDTAMYYCAKRSDDYSWFAYWGQGTLVTVSASTRIQNPDPAVYQLRDSKSSDKSVCLFTDFDSQTNVSQSKDSDVYITDKTVLDMRSMDFKSNSAVAWSNKSDFACANAFNNSIIPEDTFFPSPESSCGTQSFGLLDPKLCYLLDGILFIYGVILTALFLRSKRSRLLHSDYMNMTPRRPGPTRKHYQPYAPPRDFAAYRSRVKFSRSADAPAYQQGQNQLYNELNLGRREEYDVLDKRRGRDPEMGGKPQRRKNPQEGLYNELQKDKMAEAYSEIGMKGERRRGKGHDGLYQGLSTATKDTYDALHMQALPPR

SEQ ID NO: 45625 - protein, 902 aa, synthetic construct
MALPVTALLLPLALLLHAARPENVLTQSPAIMSASPGEKVTMTCRASSSVSSSYLHWYQQKSGASPKVWIYSTSNLASGVPGRFSGSGSGTSYSLTISSVEAEDAATYYCQQYSGYPITFGAGTKVEVKRLEEDLKNVFPPEVAVFEPSEAEISHTQKATLVCLATGFYPDHVELSWWVNGKEVHSGVSTDPQPLKEQPALNDSRYCLSSRLRVSATFWQNPRNHFRCQVQFYGLSENDEWTQDRAKPVTQIVSAEAWGRADCGSQSFGLLDPKLCYLLDGILFIYGVILTALFLKRGRKKLLYIFKQPFMRPVQTTQEEDGCSCRFPEEEEGGCELRVKFSRSADAPAYQQGQNQLYNELNLGRREEYDVLDKRRGRDPEMGGKPQRRKNPQEGLYNELQKDKMAEAYSEIGMKGERRRGKGHDGLYQGLSTATKDTYDALHMQALPPRRAKRSGSGATNFSLLKQAGDVEENPGPTSMDWIWRILFLVGAATGAHSFEQVQLKESGPVLVAPSQTLSITCTVSGFSLASYNIHWVRQPPGKGLEWLGVIWAGGSTNYNSALMSRLSISKDNSKSQVFLQMNSLQTDDTAMYYCAKRSDDYSWFAYWGQGTLVTVSASTRIQNPDPAVYQLRDSKSSDKSVCLFTDFDSQTNVSQSKDSDVYITDKTVLDMRSMDFKSNSAVAWSNKSDFACANAFNNSIIPEDTFFPSPESSCGTQSFGLLDPKLCYLLDGILFIYGVILTALFLKRGRKKLLYIFKQPFMRPVQTTQEEDGCSCRFPEEEEGGCELRVKFSRSADAPAYQQGQNQLYNELNLGRREEYDVLDKRRGRDPEMGGKPQRRKNPQEGLYNELQKDKMAEAYSEIGMKGERRRGKGHDGLYQGLSTATKDTYDALHMQALPPR

SEQ ID NO: 45626 - protein, 589 aa, synthetic construct
MALPVTALLLPLALLLHAARPENVLTQSPAIMSASPGEKVTMTCRASSSVSSSYLHWYQQKSGASPKVWIYSTSNLASGVPGRFSGSGSGTSYSLTISSVEAEDAATYYCQQYSGYPITFGAGTKVEVKRLEQSFGLLDPKLCYLLDGILFIYGVILTALFLRVKFSRSADAPAYQQGQNQLYNELNLGRREEYDVLDKRRGRDPEMGGKPQRRKNPQEGLYNELQKDKMAEAYSEIGMKGERRRGKGHDGLYQGLSTATKDTYDALHMQALPPRRAKRSGSGATNFSLLKQAGDVEENPGPTSMDWIWRILFLVGAATGAHSFEQVQLKESGPVLVAPSQTLSITCTVSGFSLASYNIHWVRQPPGKGLEWLGVIWAGGSTNYNSALMSRLSISKDNSKSQVFLQMNSLQTDDTAMYYCAKRSDDYSWFAYWGQGTLVTVSASTRQSFGLLDPKLCYLLDGILFIYGVILTALFLRVKFSRSADAPAYQQGQNQLYNELNLGRREEYDVLDKRRGRDPEMGGKPQRRKNPQEGLYNELQKDKMAEAYSEIGMKGERRRGKGHDGLYQGLSTATKDTYDALHMQALPPR

SEQ ID NO: 45627 - protein, 647 aa, synthetic construct
MALPVTALLLPLALLLHAARPENVLTQSPAIMSASPGEKVTMTCRASSSVSSSYLHWYQQKSGASPKVWIYSTSNLASGVPGRFSGSGSGTSYSLTISSVEAEDAATYYCQQYSGYPITFGAGTKVEVKRLEGQPKANPTVTLFPPSSEELQANKATLVCLISDFYPGAVTVAWKADGSPVKAGVETTKPSKQSNNKYAASSYLSLTPEQWKSHRSYSCQVTHEGSTVEKTVAPTECSPIKTDVITMDPKDNCSKDANDTLLLQLTNTSAYYMYLLLLLKSVVYFAIITCCLLRRTAFCCNGEKSRAKRSGSGATNFSLLKQAGDVEENPGPTSMDWIWRILFLVGAATGAHSFEQVQLKESGPVLVAPSQTLSITCTVSGFSLASYNIHWVRQPPGKGLEWLGVIWAGGSTNYNSALMSRLSISKDNSKSQVFLQMNSLQTDDTAMYYCAKRSDDYSWFAYWGQGTLVTVSASTRASTKGPSVFPLAPSSKSTSGGTAALGCLVKDYFPEPVTVSWNSGALTSGVHTFPAVLQSSGLYSLSSVVTVPSSSLGTQTYICNVNHKPSNTKVDKRVEPKSCEVKTDSTDHVKPKETENTKQPSKSCHKPKAIVHTEKVNMMSLTVLGLRMLFAKTVAVNFLLTAKLFFL

SEQ ID NO: 45628 - protein, 625 aa, synthetic construct
MALPVTALLLPLALLLHAARPENVLTQSPAIMSASPGEKVTMTCRASSSVSSSYLHWYQQKSGASPKVWIYSTSNLASGVPGRFSGSGSGTSYSLTISSVEAEDAATYYCQQYSGYPITFGAGTKVEVKRLEGQPKANPTVTLFPPSSEELQANKATLVCLISDFYPGAVTVAWKADGSPVKAGVETTKPSKQSNNKYAASSYLSLTPEQWKSHRSYSCQVTHEGSTVEKTVAPTECSGRADCGITSASYHQGVLSATILYEILLGKATLYAVLVSALVLMAMVKRKDSRGRAKRSGSGATNFSLLKQAGDVEENPGPTSMDWIWRILFLVGAATGAHSFEQVQLKESGPVLVAPSQTLSITCTVSGFSLASYNIHWVRQPPGKGLEWLGVIWAGGSTNYNSALMSRLSISKDNSKSQVFLQMNSLQTDDTAMYYCAKRSDDYSWFAYWGQGTLVTVSASTRASTKGPSVFPLAPSSKSTSGGTAALGCLVKDYFPEPVTVSWNSGALTSGVHTFPAVLQSSGLYSLSSVVTVPSSSLGTQTYICNVNHKPSNTKVDKRVEPKSCIPEDTFFPSSDVPCDVKLVEKSFETDTNLNFQNLSVIGFRILLLKVAGFNLLMTLRLWSS

SEQ ID NO: 45629 - protein, 625 aa, synthetic construct
MALPVTALLLPLALLLHAARPENVLTQSPAIMSASPGEKVTMTCRASSSVSSSYLHWYQQKSGASPKVWIYSTSNLASGVPGRFSGSGSGTSYSLTISSVEAEDAATYYCQQYSGYPITFGAGTKVEVKRLEGQPKANPTVTLFPPSSEELQANKATLVCLISDFYPGAVTVAWKADGSPVKAGVETTKPSKQSNNKYAASSYLSLTPEQWKSHRSYSCQVTHEGSTVEKTVAPTECSGRADCGFTSESYQQGVLSATILYEILLGKATLYAVLVSALVLMAMVKRKDSRGRAKRSGSGATNFSLLKQAGDVEENPGPTSMDWIWRILFLVGAATGAHSFEQVQLKESGPVLVAPSQTLSITCTVSGFSLASYNIHWVRQPPGKGLEWLGVIWAGGSTNYNSALMSRLSISKDNSKSQVFLQMNSLQTDDTAMYYCAKRSDDYSWFAYWGQGTLVTVSASTRASTKGPSVFPLAPSSKSTSGGTAALGCLVKDYFPEPVTVSWNSGALTSGVHTFPAVLQSSGLYSLSSVVTVPSSSLGTQTYICNVNHKPSNTKVDKRVEPKSCIPEDTFFPSPESSCDVKLVEKSFETDTNLNFQNLSVIGFRILLLKVAGFNLLMTLRLWSS

SEQ ID NO: 45630 - protein, 451 aa, synthetic construct
MALPVTALLLPLALLLHAARPENVLTQSPAIMSASPGEKVTMTCRASSSVSSSYLHWYQQKSGASPKVWIYSTSNLASGVPGRFSGSGSGTSYSLTISSVEAEDAATYYCQQYSGYPITFGAGTKVEVKRGGGGSGGGGSGGGGSQVQLKESGPVLVAPSQTLSITCTVSGFSLASYNIHWVRQPPGKGLEWLGVIWAGGSTNYNSALMSRLSISKDNSKSQVFLQMNSLQTDDTAMYYCAKRSDDYSWFAYWGQGTLVTVSASTRDGNEEMGGITQTPYKVSISGTTVILTCPQYPGSEILWQHNDKNIGGDEDDKNIGSDEDHLSLKEFSELEQSGYYVCYPRGSKPEDANFYLYLRARVCENCMEMDVMSVATIVIVDICITGGLLLLVYYWSKNRKAKAKPVTRGAGAGGRQRGQNKERPPPVPNPDYEPIRKGQRDLYSGLNQRRI

SEQ ID NO: 45631 - protein, 416 aa, synthetic construct
MALPVTALLLPLALLLHAARPENVLTQSPAIMSASPGEKVTMTCRASSSVSSSYLHWYQQKSGASPKVWIYSTSNLASGVPGRFSGSGSGTSYSLTISSVEAEDAATYYCQQYSGYPITFGAGTKVEVKRGGGGSGGGGSGGGGSQVQLKESGPVLVAPSQTLSITCTVSGFSLASYNIHWVRQPPGKGLEWLGVIWAGGSTNYNSALMSRLSISKDNSKSQVFLQMNSLQTDDTAMYYCAKRSDDYSWFAYWGQGTLVTVSASTRFKIPIEELEDRVFVNCNTSITWVEGTVGTLLSDITRLDLGKRILDPRGIYRCNGTDIYKDKESTVQVHYRMCQSCVELDPATVAGIIVTDVIATLLLALGVFCFAGHETGRLSGAADTQALLRNDQVYQPLRDRDDAQYSHLGGNWARNK

SEQ ID NO: 45632 - protein, 426 aa, synthetic construct
MALPVTALLLPLALLLHAARPENVLTQSPAIMSASPGEKVTMTCRASSSVSSSYLHWYQQKSGASPKVWIYSTSNLASGVPGRFSGSGSGTSYSLTISSVEAEDAATYYCQQYSGYPITFGAGTKVEVKRGGGGSGGGGSGGGGSQVQLKESGPVLVAPSQTLSITCTVSGFSLASYNIHWVRQPPGKGLEWLGVIWAGGSTNYNSALMSRLSISKDNSKSQVFLQMNSLQTDDTAMYYCAKRSDDYSWFAYWGQGTLVTVSASTRQSIKGNHLVKVYDYQEDGSVLLTCDAEAKNITWFKDGKMIGFLTEDKKKWNLGSNAKDPRGMYQCKGSQNKSKPLQVYYRMCQNCIELNAATISGFLFAEIVSIFVLAVGVYFIAGQDGVRQSRASDKQTLLPNDQLYQPLKDREDDQYSHLQGNQLRRN

SEQ ID NO: 45633 - protein, 409 aa, synthetic construct
MALPVTALLLPLALLLHAARPENVLTQSPAIMSASPGEKVTMTCRASSSVSSSYLHWYQQKSGASPKVWIYSTSNLASGVPGRFSGSGSGTSYSLTISSVEAEDAATYYCQQYSGYPITFGAGTKVEVKRGGGGSGGGGSGGGGSQVQLKESGPVLVAPSQTLSITCTVSGFSLASYNIHWVRQPPGKGLEWLGVIWAGGSTNYNSALMSRLSISKDNSKSQVFLQMNSLQTDDTAMYYCAKRSDDYSWFAYWGQGTLVTVSASTRQSFGLLDPKLCYLLDGILFIYGVILTALFLRVKFSRSADAPAYQQGQNQLYNELNLGRREEYDVLDKRRGRDPEMGGKPQRRKNPQEGLYNELQKDKMAEAYSEIGMKGERRRGKGHDGLYQGLSTATKDTYDALHMQALPPR

SEQ ID NO: 45634 - protein, 504 aa, synthetic construct
MALPVTALLLPLALLLHAARPENVLTQSPAIMSASPGEKVTMTCRASSSVSSSYLHWYQQKSGASPKVWIYSTSNLASGVPGRFSGSGSGTSYSLTISSVEAEDAATYYCQQYSGYPITFGAGTKVEVKRGGGGSGGGGSGGGGSQVQLKESGPVLVAPSQTLSITCTVSGFSLASYNIHWVRQPPGKGLEWLGVIWAGGSTNYNSALMSRLSISKDNSKSQVFLQMNSLQTDDTAMYYCAKRSDDYSWFAYWGQGTLVTVSASTRGMRTEDLPKAVVFLEPQWYRVLEKDSVTLKCQGAYSPEDNSTQWFHNESLISSQASSYFIDAATVDDSGEYRCQTNLSTLSDPVQLEVHIGWLLLQAPRWVFKEEDPIHLRCHSWKNTALHKVTYLQNGKGRKYFHHNSDFYIPKATLKDSGSYFCRGLVGSKNVSSETVNITITQGLAVPTISSFFPPGYQVSFCLVMVLLFAVDTGLYFSVKTNIRSSTRDWKDHKFKWRKDPQDK

SEQ ID NO: 45635 - protein, 479 aa, synthetic construct
MALPVTALLLPLALLLHAARPENVLTQSPAIMSASPGEKVTMTCRASSSVSSSYLHWYQQKSGASPKVWIYSTSNLASGVPGRFSGSGSGTSYSLTISSVEAEDAATYYCQQYSGYPITFGAGTKVEVKRGGGGSGGGGSGGGGSQVQLKESGPVLVAPSQTLSITCTVSGFSLASYNIHWVRQPPGKGLEWLGVIWAGGSTNYNSALMSRLSISKDNSKSQVFLQMNSLQTDDTAMYYCAKRSDDYSWFAYWGQGTLVTVSASTRGMRTEDLPKAVVFLEPQWYRVLEKDSVTLKCQGAYSPEDNSTQWFHNESLISSQASSYFIDAATVDDSGEYRCQTNLSTLSDPVQLEVHIGWLLLQAPRWVFKEEDPIHLRCHSWKNTALHKVTYLQNGKGRKYFHHNSDFYIPKATLKDSGSYFCRGLVGSKNVSSETVNITITQGLAVPTISSFFPPGYQVSFCLVMVLLFAVDTGLYFSV

SEQ ID NO: 45636 - protein, 480 aa, synthetic construct
MALPVTALLLPLALLLHAARPENVLTQSPAIMSASPGEKVTMTCRASSSVSSSYLHWYQQKSGASPKVWIYSTSNLASGVPGRFSGSGSGTSYSLTISSVEAEDAATYYCQQYSGYPITFGAGTKVEVKRGGGGSGGGGSGGGGSQVQLKESGPVLVAPSQTLSITCTVSGFSLASYNIHWVRQPPGKGLEWLGVIWAGGSTNYNSALMSRLSISKDNSKSQVFLQMNSLQTDDTAMYYCAKRSDDYSWFAYWGQGTLVTVSASTRGMRTEDLPKAVVFLEPQWYRVLEKDSVTLKCQGAYSPEDNSTQWFHNESLISSQASSYFIDAATVDDSGEYRCQTNLSTLSDPVQLEVHIGWLLLQAPRWVFKEEDPIHLRCHSWKNTALHKVTYLQNGKGRKYFHHNSDFYIPKATLKDSGSYFCRGLVGSKNVSSETVNITITQGLAVPTISSFFPPGYQVSFCLVMVLLFAVDTGLYFSVK

SEQ ID NO: 45637 - protein, 724 aa, synthetic construct
MALPVTALLLPLALLLHAARPENVLTQSPAIMSASPGEKVTMTCRASSSVSSSYLHWYQQKSGASPKVWIYSTSNLASGVPGRFSGSGSGTSYSLTISSVEAEDAATYYCQQYSGYPITFGAGTKVEVKRLEGQPKANPTVTLFPPSSEELQANKATLVCLISDFYPGAVTVAWKADGSPVKAGVETTKPSKQSNNKYAASSYLSLTPEQWKSHRSYSCQVTHEGSTVEKTVAPTECSGSQSFGLLDPKLCYLLDGILFIYGVILTALFLRVKFSRSADAPAYQQGQNQLYNELNLGRREEYDVLDKRRGRDPEMGGKPQRRKNPQEGLYNELQKDKMAEAYSEIGMKGERRRGKGHDGLYQGLSTATKDTYDALHMQALPPRRAKRSGSGATNFSLLKQAGDVEENPGPTSMDWIWRILFLVGAATGAHSFEQVQLKESGPVLVAPSQTLSITCTVSGFSLASYNIHWVRQPPGKGLEWLGVIWAGGSTNYNSALMSRLSISKDNSKSQVFLQMNSLQTDDTAMYYCAKRSDDYSWFAYWGQGTLVTVSASTRASTKGPSVFPLAPSSKSTSGGTAALGCLVKDYFPEPVTVSWNSGALTSGVHTFPAVLQSSGLYSLSSVVTVPSSSLGTQTYICNVNHKPSNTKVDKRVEPKSCGTITQGLAVSTISSFFPPGYQVSFCLVMVLLFAVDTGLYFSVKTNIRSSTRDWKDHKFKWRKDPQDK

SEQ ID NO: 45638 - protein, 739 aa, synthetic construct
MALPVTALLLPLALLLHAARPENVLTQSPAIMSASPGEKVTMTCRASSSVSSSYLHWYQQKSGASPKVWIYSTSNLASGVPGRFSGSGSGTSYSLTISSVEAEDAATYYCQQYSGYPITFGAGTKVEVKRLEDLKNVFPPEVAVFEPSEAEISHTQKATLVCLATGFYPDHVELSWWVNGKEVHSGVSTDPQPLKEQPALNDSRYCLSSRLRVSATFWQNPRNHFRCQVQFYGLSENDEWTQDRAKPVTQIVSAEAWGRADCGSQSFGLLDPKLCYLLDGILFIYGVILTALFLRVKFSRSADAPAYQQGQNQLYNELNLGRREEYDVLDKRRGRDPEMGGKPQRRKNPQEGLYNELQKDKMAEAYSEIGMKGERRRGKGHDGLYQGLSTATKDTYDALHMQALPPRRAKRSGSGATNFSLLKQAGDVEENPGPTSMDWIWRILFLVGAATGAHSFEQVQLKESGPVLVAPSQTLSITCTVSGFSLASYNIHWVRQPPGKGLEWLGVIWAGGSTNYNSALMSRLSISKDNSKSQVFLQMNSLQTDDTAMYYCAKRSDDYSWFAYWGQGTLVTVSASTRIQNPDPAVYQLRDSKSSDKSVCLFTDFDSQTNVSQSKDSDVYITDKTVLDMRSMDFKSNSAVAWSNKSDFACANAFNNSIIPEDTFFPSPESSCGTITQGLAVSTISSFFPPGYQVSFCLVMVLLFAVDTGLYFSVKTNIRSSTRDWKDHKFKWRKDPQDK

SEQ ID NO: 45639 - protein, 714 aa, synthetic construct
MALPVTALLLPLALLLHAARPENVLTQSPAIMSASPGEKVTMTCRASSSVSSSYLHWYQQKSGASPKVWIYSTSNLASGVPGRFSGSGSGTSYSLTISSVEAEDAATYYCQQYSGYPITFGAGTKVEVKRLEDLKNVFPPEVAVFEPSEAEISHTQKATLVCLATGFYPDHVELSWWVNGKEVHSGVSTDPQPLKEQPALNDSRYCLSSRLRVSATFWQNPRNHFRCQVQFYGLSENDEWTQDRAKPVTQIVSAEAWGRADCGSQSFGLLDPKLCYLLDGILFIYGVILTALFLRVKFSRSADAPAYQQGQNQLYNELNLGRREEYDVLDKRRGRDPEMGGKPQRRKNPQEGLYNELQKDKMAEAYSEIGMKGERRRGKGHDGLYQGLSTATKDTYDALHMQALPPRRAKRSGSGATNFSLLKQAGDVEENPGPTSMDWIWRILFLVGAATGAHSFEQVQLKESGPVLVAPSQTLSITCTVSGFSLASYNIHWVRQPPGKGLEWLGVIWAGGSTNYNSALMSRLSISKDNSKSQVFLQMNSLQTDDTAMYYCAKRSDDYSWFAYWGQGTLVTVSASTRIQNPDPAVYQLRDSKSSDKSVCLFTDFDSQTNVSQSKDSDVYITDKTVLDMRSMDFKSNSAVAWSNKSDFACANAFNNSIIPEDTFFPSPESSCGTITQGLAVSTISSFFPPGYQVSFCLVMVLLFAVDTGLYFSV

SEQ ID NO: 45640 - protein, 715 aa, synthetic construct
MALPVTALLLPLALLLHAARPENVLTQSPAIMSASPGEKVTMTCRASSSVSSSYLHWYQQKSGASPKVWIYSTSNLASGVPGRFSGSGSGTSYSLTISSVEAEDAATYYCQQYSGYPITFGAGTKVEVKRLEDLKNVFPPEVAVFEPSEAEISHTQKATLVCLATGFYPDHVELSWWVNGKEVHSGVSTDPQPLKEQPALNDSRYCLSSRLRVSATFWQNPRNHFRCQVQFYGLSENDEWTQDRAKPVTQIVSAEAWGRADCGSQSFGLLDPKLCYLLDGILFIYGVILTALFLRVKFSRSADAPAYQQGQNQLYNELNLGRREEYDVLDKRRGRDPEMGGKPQRRKNPQEGLYNELQKDKMAEAYSEIGMKGERRRGKGHDGLYQGLSTATKDTYDALHMQALPPRRAKRSGSGATNFSLLKQAGDVEENPGPTSMDWIWRILFLVGAATGAHSFEQVQLKESGPVLVAPSQTLSITCTVSGFSLASYNIHWVRQPPGKGLEWLGVIWAGGSTNYNSALMSRLSISKDNSKSQVFLQMNSLQTDDTAMYYCAKRSDDYSWFAYWGQGTLVTVSASTRIQNPDPAVYQLRDSKSSDKSVCLFTDFDSQTNVSQSKDSDVYITDKTVLDMRSMDFKSNSAVAWSNKSDFACANAFNNSIIPEDTFFPSPESSCGTITQGLAVSTISSFFPPGYQVSFCLVMVLLFAVDTGLYFSVK

SEQ ID NO: 45641 - protein, 716 aa, synthetic construct
MALPVTALLLPLALLLHAARPENVLTQSPAIMSASPGEKVTMTCRASSSVSSSYLHWYQQKSGASPKVWIYSTSNLASGVPGRFSGSGSGTSYSLTISSVEAEDAATYYCQQYSGYPITFGAGTKVEVKRLEDLKNVFPPEVAVFEPSEAEISHTQKATLVCLATGFYPDHVELSWWVNGKEVHSGVSTDPQPLKEQPALNDSRYCLSSRLRVSATFWQNPRNHFRCQVQFYGLSENDEWTQDRAKPVTQIVSAEAWGRADCGSQSFGLLDPKLCYLLDGILFIYGVILTALFLRVKFSRSADAPAYQQGQNQLYNELNLGRREEYDVLDKRRGRDPEMGGKPQRRKNPQEGLYNELQKDKMAEAYSEIGMKGERRRGKGHDGLYQGLSTATKDTYDALHMQALPPRRAKRSGSGATNFSLLKQAGDVEENPGPTSMDWIWRILFLVGAATGAHSFEQVQLKESGPVLVAPSQTLSITCTVSGFSLASYNIHWVRQPPGKGLEWLGVIWAGGSTNYNSALMSRLSISKDNSKSQVFLQMNSLQTDDTAMYYCAKRSDDYSWFAYWGQGTLVTVSASTRIQNPDPAVYQLRDSKSSDKSVCLFTDFDSQTNVSQSKDSDVYITDKTVLDMRSMDFKSNSAVAWSNKSDFACANAFNNSIIPEDTFFPSPESSCGTITQGLAVSTISSFFPPGYQVSFCLVMVLLFAVDTGLYFSVKT

SEQ ID NO: 45642 - protein, 652 aa, synthetic construct
MALPVTALLLPLALLLHAARPENVLTQSPAIMSASPGEKVTMTCRASSSVSSSYLHWYQQKSGASPKVWIYSTSNLASGVPGRFSGSGSGTSYSLTISSVEAEDAATYYCQQYSGYPITFGAGTKVEVKRLEGQPKANPTVTLFPPSSEELQANKATLVCLISDFYPGAVTVAWKADGSPVKAGVETTKPSKQSNNKYAASSYLSLTPEQWKSHRSYSCQVTHEGSTVEKTVAPTECSGSLGEPQLCYILDAILFLYGIVLTLLYCRLKIQVRKAAITSYEKSDGVYTGLSTRNQETYETLKHEKPPQRAKRSGSGATNFSLLKQAGDVEENPGPTSMDWIWRILFLVGAATGAHSFEQVQLKESGPVLVAPSQTLSITCTVSGFSLASYNIHWVRQPPGKGLEWLGVIWAGGSTNYNSALMSRLSISKDNSKSQVFLQMNSLQTDDTAMYYCAKRSDDYSWFAYWGQGTLVTVSASTRASTKGPSVFPLAPSSKSTSGGTAALGCLVKDYFPEPVTVSWNSGALTSGVHTFPAVLQSSGLYSLSSVVTVPSSSLGTQTYICNVNHKPSNTKVDKRVEPKSCGTLGEPQLCYILDAILFLYGIVLTLLYCRLKIQVRKAAITSYEKSDGVYTGLSTRNQETYETLKHEKPPQ

SEQ ID NO: 45643 - protein, 622 aa, synthetic construct
MALPVTALLLPLALLLHAARPENVLTQSPAIMSASPGEKVTMTCRASSSVSSSYLHWYQQKSGASPKVWIYSTSNLASGVPGRFSGSGSGTSYSLTISSVEAEDAATYYCQQYSGYPITFGAGTKVEVKRLEDLKNVFPPEVAVFEPSEAEISHTQKATLVCLATGFYPDHVELSWWVNGKEVHSGVCTDPQPLKEQPALNDSRYCLSSRLRVSATFWQNPRNHFRCQVQFYGLSENDEWTQDRAKPVTQIVSAEAWGRADCGFTSESYQQGVLSAYYMYLLLLLKSVVYFAIITCCLLRRTAFCCNGEKSRAKRSGSGATNFSLLKQAGDVEENPGPTSMDWIWRILFLVGAATGAHSFEQVQLKESGPVLVAPSQTLSITCTVSGFSLASYNIHWVRQPPGKGLEWLGVIWAGGSTNYNSALMSRLSISKDNSKSQVFLQMNSLQTDDTAMYYCAKRSDDYSWFAYWGQGTLVTVSASTRIQNPDPAVYQLRDSKSSDKSVCLFTDFDSQTNVSQSKDSDVYITDKCVLDMRSMDFKSNSAVAWSNKSDFACANAFNNSIIPEDTFFPSPESSCDVKLVEKSFETDTNLNFQNLSVIGFRILLLKVAGFNLLMTLRLWSS

SEQ ID NO: 45644 - protein, 628 aa, synthetic construct
MALPVTALLLPLALLLHAARPENVLTQSPAIMSASPGEKVTMTCRASSSVSSSYLHWYQQKSGASPKVWIYSTSNLASGVPGRFSGSGSGTSYSLTISSVEAEDAATYYCQQYSGYPITFGAGTKVEVKRLEDKQLDADVSPKPTIFLPSIAETKLQKAGTYLCLLEKFFPDVIKIHWQEKKSNTILGSQEGNTMKTNDTYMKFSWLTVPEKSLDKEHRCIVRHENNKNGVDQEIIFPPIKTDVITMDPKDNCSKDANDTLLLQLTNTSAYYMYEILLGKATLYAVLVSALVLMAMVKRKDSRGRAKRSGSGATNFSLLKQAGDVEENPGPTSMDWIWRILFLVGAATGAHSFEQVQLKESGPVLVAPSQTLSITCTVSGFSLASYNIHWVRQPPGKGLEWLGVIWAGGSTNYNSALMSRLSISKDNSKSQVFLQMNSLQTDDTAMYYCAKRSDDYSWFAYWGQGTLVTVSASTRSQPHTKPSVFVMKNGTNVACLVKEFYPKDIRINLVSSKKITEFDPAIVISPSGKYNAVKLGKYEDSNSVTCSVQHDNKTVHSTDFEVKTDSTDHVKPKETENTKQPSKSCHKPKAIVHTEKVNMMSLTVIGFRILLLKVAGFNLLMTLRLWSS

SEQ ID NO: 45645 - protein, 628 aa, synthetic construct
MALPVTALLLPLALLLHAARPENVLTQSPAIMSASPGEKVTMTCRASSSVSSSYLHWYQQKSGASPKVWIYSTSNLASGVPGRFSGSGSGTSYSLTISSVEAEDAATYYCQQYSGYPITFGAGTKVEVKRLEDKQLDADVSPKPTIFLPSIAETKLQKAGTYLCLLEKFFPDVIKIHWQEKKSNTILGSQEGNTMKTNDTYMKFSWLTVPEKSLDKEHRCIVRHENNKNGVDQEIIFPPIKTDVITMDPKDNCSKDANDTLLLQLTNTSATILYEILLGKATLYAVLVSALVLMAMVKRKDSRGRAKRSGSGATNFSLLKQAGDVEENPGPTSMDWIWRILFLVGAATGAHSFEQVQLKESGPVLVAPSQTLSITCTVSGFSLASYNIHWVRQPPGKGLEWLGVIWAGGSTNYNSALMSRLSISKDNSKSQVFLQMNSLQTDDTAMYYCAKRSDDYSWFAYWGQGTLVTVSASTRSQPHTKPSVFVMKNGTNVACLVKEFYPKDIRINLVSSKKITEFDPAIVISPSGKYNAVKLGKYEDSNSVTCSVQHDNKTVHSTDFEVKTDSTDHVKPKETENTKQPSKSCHKPKAIVHTEKVNMMSLTVIGFRILLLKVAGFNLLMTLRLWSS

SEQ ID NO: 45646 - protein, 628 aa, synthetic construct
MALPVTALLLPLALLLHAARPENVLTQSPAIMSASPGEKVTMTCRASSSVSSSYLHWYQQKSGASPKVWIYSTSNLASGVPGRFSGSGSGTSYSLTISSVEAEDAATYYCQQYSGYPITFGAGTKVEVKRLEDKQLDADVSPKPTIFLPSIAETKLQKAGTYLCLLEKFFPDVIKIHWQEKKSNTILGSQEGNTMKTNDTYMKFSWLTVPEKSLDKEHRCIVRHENNKNGVDQEIIFPPIKTDVITMDPKDNCSKDANDTLLLQLTNTSAYYMYEILLGKATLYAVLVSALVLMAMVKRKDSRGRAKRSGSGATNFSLLKQAGDVEENPGPTSMDWIWRILFLVGAATGAHSFEQVQLKESGPVLVAPSQTLSITCTVSGFSLASYNIHWVRQPPGKGLEWLGVIWAGGSTNYNSALMSRLSISKDNSKSQVFLQMNSLQTDDTAMYYCAKRSDDYSWFAYWGQGTLVTVSASTRSQPHTKPSVFVMKNGTNVACLVKEFYPKDIRINLVSSKKITEFDPAIVISPSGKYNAVKLGKYEDSNSVTCSVQHDNKTVHSTDFEVKTDSTDHVKPKETENTKQPSKSCHKPKAIVHTEKVNMMSLTVLGFRILLLKVAGFNLLMTLRLWSS

SEQ ID NO: 45647 - protein, 628 aa, synthetic construct
MALPVTALLLPLALLLHAARPENVLTQSPAIMSASPGEKVTMTCRASSSVSSSYLHWYQQKSGASPKVWIYSTSNLASGVPGRFSGSGSGTSYSLTISSVEAEDAATYYCQQYSGYPITFGAGTKVEVKRLEDKQLDADVSPKPTIFLPSIAETKLQKAGTYLCLLEKFFPDVIKIHWQEKKSNTILGSQEGNTMKTNDTYMKFSWLTVPEKSLDKEHRCIVRHENNKNGVDQEIIFPPIKTDVITMDPKDNCSKDANDTLLLQLTNTSATILYEILLGKATLYAVLVSALVLMAMVKRKDSRGRAKRSGSGATNFSLLKQAGDVEENPGPTSMDWIWRILFLVGAATGAHSFEQVQLKESGPVLVAPSQTLSITCTVSGFSLASYNIHWVRQPPGKGLEWLGVIWAGGSTNYNSALMSRLSISKDNSKSQVFLQMNSLQTDDTAMYYCAKRSDDYSWFAYWGQGTLVTVSASTRSQPHTKPSVFVMKNGTNVACLVKEFYPKDIRINLVSSKKITEFDPAIVISPSGKYNAVKLGKYEDSNSVTCSVQHDNKTVHSTDFEVKTDSTDHVKPKETENTKQPSKSCHKPKAIVHTEKVNMMSLTVLGFRILLLKVAGFNLLMTLRLWSS

SEQ ID NO: 45648 - protein, 622 aa, synthetic construct
MALPVTALLLPLALLLHAARPENVLTQSPAIMSASPGEKVTMTCRASSSVSSSYLHWYQQKSGASPKVWIYSTSNLASGVPGRFSGSGSGTSYSLTISSVEAEDAATYYCQQYSGYPITFGAGTKVEVKRLEDLKNVFPPEVAVFEPSEAEISHTQKATLVCLATGFYPDHVELSWWVNGKEVHSGVCTDPQPLKEQPALNDSRYCLSSRLRVSATFWQNPRNHFRCQVQFYGLSENDEWTQDRAKPVTQIVSAEAWGRADCGFTSESYQQGVLSATILYLLLLLKSVVYFAIITCCLLRRTAFCCNGEKSRAKRSGSGATNFSLLKQAGDVEENPGPTSMDWIWRILFLVGAATGAHSFEQVQLKESGPVLVAPSQTLSITCTVSGFSLASYNIHWVRQPPGKGLEWLGVIWAGGSTNYNSALMSRLSISKDNSKSQVFLQMNSLQTDDTAMYYCAKRSDDYSWFAYWGQGTLVTVSASTRIQNPDPAVYQLRDSKSSDKSVCLFTDFDSQTNVSQSKDSDVYITDKCVLDMRSMDFKSNSAVAWSNKSDFACANAFNNSIIPEDTFFPSPESSCDVKLVEKSFETDTNLNFQNLSVIGLRMLFAKTVAVNFLLTAKLFFL

SEQ ID NO: 45649 - protein, 651 aa, synthetic construct
MALPVTALLLPLALLLHAARPENVLTQSPAIMSASPGEKVTMTCRASSSVSSSYLHWYQQKSGASPKVWIYSTSNLASGVPGRFSGSGSGTSYSLTISSVEAEDAATYYCQQYSGYPITFGAGTKVEVKRLEDLKNVFPPEVAVFEPSEAEISHTQKATLVCLATGFYPDHVELSWWVNGKEVHSGVSTDPQPLKEQPALNDSRYCLSSRLRVSATFWQNPRNHFRCQVQFYGLSENDEWTQDRAKPVTQIVSAEAWGRADCGSSKDANDTLLLQLTNTSAYYMYLLLLLKSVVYFAIITCCLLRRTAFCCNGEKSRAKRSGSGATNFSLLKQAGDVEENPGPTSMDWIWRILFLVGAATGAHSFEQVQLKESGPVLVAPSQTLSITCTVSGFSLASYNIHWVRQPPGKGLEWLGVIWAGGSTNYNSALMSRLSISKDNSKSQVFLQMNSLQTDDTAMYYCAKRSDDYSWFAYWGQGTLVTVSASTRIQNPDPAVYQLRDSKSSDKSVCLFTDFDSQTNVSQSKDSDVYITDKTVLDMRSMDFKSNSAVAWSNKSDFACANAFNNSIIPEDTFFPSPESSCGTEVKTDSTDHVKPKETENTKQPSKSCHKPKAIVHTEKVNMMSLTVLGLRMLFAKTVAVNFLLTAKLFFL

SEQ ID NO: 45650 - protein, 621 aa, synthetic construct
MALPVTALLLPLALLLHAARPENVLTQSPAIMSASPGEKVTMTCRASSSVSSSYLHWYQQKSGASPKVWIYSTSNLASGVPGRFSGSGSGTSYSLTISSVEAEDAATYYCQQYSGYPITFGAGTKVEVKRLEDLKNVFPPEVAVFEPSEAEISHTQKATLVCLATGFYPDHVELSWWVNGKEVHSGVCTDPQPLKEQPALNDSRYCLSSRLRVSATFWQNPRNHFRCQVQFYGLSENDEWTQDRAKPVTQIVSAEAWGRADCDVKLVEKSFETDTNLNFQNLSVIGFRILLLKVAGFNLLMTLRLWSSRAKRSGSGATNFSLLKQAGDVEENPGPTSMDWIWRILFLVGAATGAHSFEQVQLKESGPVLVAPSQTLSITCTVSGFSLASYNIHWVRQPPGKGLEWLGVIWAGGSTNYNSALMSRLSISKDNSKSQVFLQMNSLQTDDTAMYYCAKRSDDYSWFAYWGQGTLVTVSASTRIQNPDPAVYQLRDSKSSDKSVCLFTDFDSQTNVSQSKDSDVYITDKCVLDMRSMDFKSNSAVAWSNKSDFACANAFNNSIIPEDTFFPSPESSCGFTSESYQQGVLSATILYEILLGKATLYAVLVSALVLMAMVKRKDSRG

SEQ ID NO: 45651 - protein, 621 aa, synthetic construct
MALPVTALLLPLALLLHAARPENVLTQSPAIMSASPGEKVTMTCRASSSVSSSYLHWYQQKSGASPKVWIYSTSNLASGVPGRFSGSGSGTSYSLTISSVEAEDAATYYCQQYSGYPITFGAGTKVEVKRLEDLKNVFPPEVAVFEPSEAEISHTQKATLVCLATGFYPDHVELSWWVNGKEVHSGVCTDPQPLKEQPALNDSRYCLSSRLRVSATFWQNPRNHFRCQVQFYGLSENDEWTQDRAKPVTQIVSAEAWGRADCGFTSESYQQGVLSATNLSVIGFRILLLKVAGFNLLMTLRLWSSRAKRSGSGATNFSLLKQAGDVEENPGPTSMDWIWRILFLVGAATGAHSFEQVQLKESGPVLVAPSQTLSITCTVSGFSLASYNIHWVRQPPGKGLEWLGVIWAGGSTNYNSALMSRLSISKDNSKSQVFLQMNSLQTDDTAMYYCAKRSDDYSWFAYWGQGTLVTVSASTRIQNPDPAVYQLRDSKSSDKSVCLFTDFDSQTNVSQSKDSDVYITDKCVLDMRSMDFKSNSAVAWSNKSDFACANAFNNSIIPEDTFFPSPESSCDVKLVEKSFETDTNLNFQILYEILLGKATLYAVLVSALVLMAMVKRKDSRG

SEQ ID NO: 45652 - protein, 621 aa, synthetic construct; identical to SEQ ID NO: 45650

SEQ ID NO: 45653 - protein, 621 aa, synthetic construct; identical to SEQ ID NO: 45651

SEQ ID NO: 45654 - protein, 621 aa, synthetic construct; identical to SEQ ID NO: 45650

SEQ ID NO: 45655 - protein, 624 aa, synthetic construct
MALPVTALLLPLALLLHAARPENVLTQSPAIMSASPGEKVTMTCRASSSVSSSYLHWYQQKSGASPKVWIYSTSNLASGVPGRFSGSGSGTSYSLTISSVEAEDAATYYCQQYSGYPITFGAGTKVEVKRLEADVSPKPTIFLPSIAETKLQKAGTYLCLLEKFFPDVIKIHWQEKKSNTILGSQEGNTMKTNDTYMKFSWLTVPEKSLDKEHRCIVRHENNKNGVDQEIIFPPIKTDVITMDPKDNCSKDANDTLLLQLTNTSAYYMYLLLLLKSVVYFAIITCCLLRRTAFCCNGEKSRAKRSGSGATNFSLLKQAGDVEENPGPTSMDWIWRILFLVGAATGAHSFEQVQLKESGPVLVAPSQTLSITCTVSGFSLASYNIHWVRQPPGKGLEWLGVIWAGGSTNYNSALMSRLSISKDNSKSQVFLQMNSLQTDDTAMYYCAKRSDDYSWFAYWGQGTLVTVSASTRSQPHTKPSVFVMKNGTNVACLVKEFYPKDIRINLVSSKKITEFDPAIVISPSGKYNAVKLGKYEDSNSVTCSVQHDNKTVHSTDFEVKTDSTDHVKPKETENTKQPSKSCHKPKAIVHTEKVNMMSLTVIGFRILLLKVAGFNLLMTLRLWSS

SEQ ID NO: 45656 - protein, 624 aa, synthetic construct
MALPVTALLLPLALLLHAARPENVLTQSPAIMSASPGEKVTMTCRASSSVSSSYLHWYQQKSGASPKVWIYSTSNLASGVPGRFSGSGSGTSYSLTISSVEAEDAATYYCQQYSGYPITFGAGTKVEVKRLEADVSPKPTIFLPSIAETKLQKAGTYLCLLEKFFPDVIKIHWQEKKSNTILGSQEGNTMKTNDTYMKFSWLTVPEKSLDKEHRCIVRHENNKNGVDQEIIFPPIKTDVITMDPKDNCSKDANDTLLLQLTNTSAYYMYLLLLLKSVVYFAIITCCLLRRTAFCCNGEKSRAKRSGSGATNFSLLKQAGDVEENPGPTSMDWIWRILFLVGAATGAHSFEQVQLKESGPVLVAPSQTLSITCTVSGFSLASYNIHWVRQPPGKGLEWLGVIWAGGSTNYNSALMSRLSISKDNSKSQVFLQMNSLQTDDTAMYYCAKRSDDYSWFAYWGQGTLVTVSASTRSQPHTKPSVFVMKNGTNVACLVKEFYPKDIRINLVSSKKITEFDPAIVISPSGKYNAVKLGKYEDSNSVTCSVQHDNKTVHSTDFEVKTDSTDHVKPKETENTKQPSKSCHKPKAIVHTEKVNMMSLTVLGFRILLLKVAGFNLLMTLRLWSS

SEQ ID NO: 45657 - protein, 621 aa, synthetic construct; identical to SEQ ID NO: 45650

SEQ ID NO: 45658 - protein, 625 aa, synthetic construct
MALPVTALLLPLALLLHAARPENVLTQSPAIMSASPGEKVTMTCRASSSVSSSYLHWYQQKSGASPKVWIYSTSNLASGVPGRFSGSGSGTSYSLTISSVEAEDAATYYCQQYSGYPITFGAGTKVEVKRLEIQNPDPAVYQLRDSKSSDKSVCLFTDFDSQTNVSQSKDSDVYITDKCVLDMRSMDFKSNSAVAWSNKSDFACANAFNNSIIPEDTFFPSPESSCGFTSESYQQGVLSATILYEILLGKATLYAVLVSALVLMAMVKRKDSRGRAKRSGSGVKQTLNFDLLKLAGDVESNPGPTSMDWIWRILFLVGAATGAHSFEQVQLKESGPVLVAPSQTLSITCTVSGFSLASYNIHWVRQPPGKGLEWLGVIWAGGSTNYNSALMSRLSISKDNSKSQVFLQMNSLQTDDTAMYYCAKRSDDYSWFAYWGQGTLVTVSASTREDLKNVFPPEVAVFEPSEAEISHTQKATLVCLATGFYPDHVELSWWVNGKEVHSGVCTDPQPLKEQPALNDSRYCLSSRLRVSATFWQNPRNHFRCQVQFYGLSENDEWTQDRAKPVTQIVSAEAWGRADCDVKLVEKSFETDTNLNFQNLSVIGFRILLLKVAGFNLLMTLRLWSS

SEQ ID NO: 45659 - protein, 756 aa, synthetic construct
MALPVTALLLPLALLLHAARPEVQLVESGGGLVQPGGSLRLSCAASGFSFSDFWMSWVRQAPGKGLEWVATISQAGSEKDYVDSVKGRFTISRDNAKKSLYLQMNSLRAEDTAVYYCASGVYSFDYRGQGTLVTVSSGTGGGGSGGGGSGGGGSEFENVLTQSPAIMSASPGEKVTMTCRASSSVSSSYLHWYQQKSGASPKVWIYSTSNLASGVPGRFSGSGSGTSYSLTISSVEAEDAATYYCQQYSGYPITFGAGTKVEVKRLEDLKNVFPPEVAVFEPSEAEISHTQKATLVCLATGFYPDHVELSWWVNGKEVHSGVCTDPQPLKEQPALNDSRYCLSSRLRVSATFWQNPRNHFRCQVQFYGLSENDEWTQDRAKPVTQIVSAEAWGRADCDVKLVEKSFETDTNLNFQNLSVIGFRILLLKVAGFNLLMTLRLWSSRAKRSGSGATNFSLLKQAGDVEENPGPTSMDWIWRILFLVGAATGAHSFEQVQLKESGPVLVAPSQTLSITCTVSGFSLASYNIHWVRQPPGKGLEWLGVIWAGGSTNYNSALMSRLSISKDNSKSQVFLQMNSLQTDDTAMYYCAKRSDDYSWFAYWGQGTLVTVSASTRIQNPDPAVYQLRDSKSSDKSVCLFTDFDSQTNVSQSKDSDVYITDKCVLDMRSMDFKSNSAVAWSNKSDFACANAFNNSIIPEDTFFPSPESSCGFTSESYQQGVLSATILYEILLGKATLYAVLVSALVLMAMVKRKDSRG

SEQ ID NO: 45660 - protein, 760 aa, synthetic construct
MALPVTALLLPLALLLHAARPEVQLVESGGGLVQPGGSLRLSCAASGFSFSDFWMSWVRQAPGKGLEWVATISQAGSEKDYVDSVKGRFTISRDNAKKSLYLQMNSLRAEDTAVYYCASGVYSFDYRGQGTLVTVSSGTGGGGSGGGGSGGGGSEFENVLTQSPAIMSASPGEKVTMTCRASSSVSSSYLHWYQQKSGASPKVWIYSTSNLASGVPGRFSGSGSGTSYSLTISSVEAEDAATYYCQQYSGYPITFGAGTKVEVKRLEIQNPDPAVYQLRDSKSSDKSVCLFTDFDSQTNVSQSKDSDVYITDKCVLDMRSMDFKSNSAVAWSNKSDFACANAFNNSIIPEDTFFPSPESSCGFTSESYQQGVLSATILYEILLGKATLYAVLVSALVLMAMVKRKDSRGRAKRSGSGVKQTLNFDLLKLAGDVESNPGPTSMDWIWRILFLVGAATGAHSFEQVQLKESGPVLVAPSQTLSITCTVSGFSLASYNIHWVRQPPGKGLEWLGVIWAGGSTNYNSALMSRLSISKDNSKSQVFLQMNSLQTDDTAMYYCAKRSDDYSWFAYWGQGTLVTVSASTREDLKNVFPPEVAVFEPSEAEISHTQKATLVCLATGFYPDHVELSWWVNGKEVHSGVCTDPQPLKEQPALNDSRYCLSSRLRVSATFWQNPRNHFRCQVQFYGLSENDEWTQDRAKPVTQIVSAEAWGRADCDVKLVEKSFETDTNLNFQNLSVIGFRILLLKVAGFNLLMTLRLWSS

SEQ ID NO: 45661 - protein, 893 aa, synthetic construct
MALPVTALLLPLALLLHAARPEVQLVESGGGLVQPGGSLRLSCAASGFSFSDFWMSWVRQAPGKGLEWVATISQAGSEKDYVDSVKGRFTISRDNAKKSLYLQMNSLRAEDTAVYYCASGVYSFDYRGQGTLVTVSSGTGGGGSGGGGSGGGGSEFENVLTQSPAIMSASPGEKVTMTCRASSSVSSSYLHWYQQKSGASPKVWIYSTSNLASGVPGRFSGSGSGTSYSLTISSVEAEDAATYYCQQYSGYPITFGAGTKVEVKRLEDLKNVFPPEVAVFEPSEAEISHTQKATLVCLATGFYPDHVELSWWVNGKEVHSGVCTDPQPLKEQPALNDSRYCLSSRLRVSATFWQNPRNHFRCQVQFYGLSENDEWTQDRAKPVTQIVSAEAWGRADCDVKLVEKSFETDTNLNFQNLSVIGFRILLLKVAGFNLLMTLRLWSSRAKRSGSGATNFSLLKQAGDVEENPGPTSMDWIWRILFLVGAATGAHSGPQLQLQESGPGLVKPSETLSLTCTVSGDSISSGDYYWGWIRQPPGKGLEWIGHIYYSGVTYYNPSLKSRVTISVDTSRNQFSLKLSSVTAADTAVYYCTREDSSNWRSRGQGTLVTVSSGSGGGGSGGGGSGGGGSFEQVQLKESGPVLVAPSQTLSITCTVSGFSLASYNIHWVRQPPGKGLEWLGVIWAGGSTNYNSALMSRLSISKDNSKSQVFLQMNSLQTDDTAMYYCAKRSDDYSWFAYWGQGTLVTVSASTRIQNPDPAVYQLRDSKSSDKSVCLFTDFDSQTNVSQSKDSDVYITDKCVLDMRSMDFKSNSAVAWSNKSDFACANAFNNSIIPEDTFFPSPESSCGFTSESYQQGVLSATILYEILLGKATLYAVLVSALVLMAMVKRKDSRG

SEQ ID NO: 45662 - protein, 897 aa, synthetic construct
MALPVTALLLPLALLLHAARPEVQLVESGGGLVQPGGSLRLSCAASGFSFSDFWMSWVRQAPGKGLEWVATISQAGSEKDYVDSVKGRFTISRDNAKKSLYLQMNSLRAEDTAVYYCASGVYSFDYRGQGTLVTVSSGTGGGGSGGGGSGGGGSEFENVLTQSPAIMSASPGEKVTMTCRASSSVSSSYLHWYQQKSGASPKVWIYSTSNLASGVPGRFSGSGSGTSYSLTISSVEAEDAATYYCQQYSGYPITFGAGTKVEVKRLEIQNPDPAVYQLRDSKSSDKSVCLFTDFDSQTNVSQSKDSDVYITDKCVLDMRSMDFKSNSAVAWSNKSDFACANAFNNSIIPEDTFFPSPESSCGFTSESYQQGVLSATILYEILLGKATLYAVLVSALVLMAMVKRKDSRGRAKRSGSGVKQTLNFDLLKLAGDVESNPGPTSMDWIWRILFLVGAATGAHSGPQLQLQESGPGLVKPSETLSLTCTVSGDSISSGDYYWGWIRQPPGKGLEWIGHIYYSGVTYYNPSLKSRVTISVDTSRNQFSLKLSSVTAADTAVYYCTREDSSNWRSRGQGTLVTVSSGSGGGGSGGGGSGGGGSFEQVQLKESGPVLVAPSQTLSITCTVSGFSLASYNIHWVRQPPGKGLEWLGVIWAGGSTNYNSALMSRLSISKDNSKSQVFLQMNSLQTDDTAMYYCAKRSDDYSWFAYWGQGTLVTVSASTREDLKNVFPPEVAVFEPSEAEISHTQKATLVCLATGFYPDHVELSWWVNGKEVHSGVCTDPQPLKEQPALNDSRYCLSSRLRVSATFWQNPRNHFRCQVQFYGLSENDEWTQDRAKPVTQIVSAEAWGRADCDVKLVEKSFETDTNLNFQNLSVIGFRILLLKVAGFNLLMTLRLWSS

SEQ ID NO: 45663 - protein, 691 aa, synthetic construct
MALPVTALLLPLALLLHAARPENVLTQSPAIMSASPGEKVTMTCRASSSVSSSYLHWYQQKSGASPKVWIYSTSNLASGVPGRFSGSGSGTSYSLTISSVEAEDAATYYCQQYSGYPITFGAGTKVEVKRLEDLKNVFPPEVAVFEPSEAEISHTQKATLVCLATGFYPDHVELSWWVNGKEVHSGVCTDPQPLKEQPALNDSRYCLSSRLRVSATFWQNPRNHFRCQVQFYGLSENDEWTQDRAKPVTQIVSAEAWGRADCDVKLVEKSFETDTNLNFQNLSVIGFRILLLKVAGFNLLMTLRLWSSRAKRSGSGATNFSLLKQAGDVEENPGPTSMDWIWRILFLVGAATGAHSGPMDPDLEIRAAFLRQRNTALRTEVAELEQEVQRLENEVSQYETRYGPLGGGKGSGGGGSGGGGSGGGGSFEQVQLKESGPVLVAPSQTLSITCTVSGFSLASYNIHWVRQPPGKGLEWLGVIWAGGSTNYNSALMSRLSISKDNSKSQVFLQMNSLQTDDTAMYYCAKRSDDYSWFAYWGQGTLVTVSASTRIQNPDPAVYQLRDSKSSDKSVCLFTDFDSQTNVSQSKDSDVYITDKCVLDMRSMDFKSNSAVAWSNKSDFACANAFNNSIIPEDTFFPSPESSCGFTSESYQQGVLSATILYEILLGKATLYAVLVSALVLMAMVKRKDSRG

SEQ ID NO: 45664 - protein, 695 aa, synthetic construct
MALPVTALLLPLALLLHAARPENVLTQSPAIMSASPGEKVTMTCRASSSVSSSYLHWYQQKSGASPKVWIYSTSNLASGVPGRFSGSGSGTSYSLTISSVEAEDAATYYCQQYSGYPITFGAGTKVEVKRLEIQNPDPAVYQLRDSKSSDKSVCLFTDFDSQTNVSQSKDSDVYITDKCVLDMRSMDFKSNSAVAWSNKSDFACANAFNNSIIPEDTFFPSPESSCGFTSESYQQGVLSATILYEILLGKATLYAVLVSALVLMAMVKRKDSRGRAKRSGSGVKQTLNFDLLKLAGDVESNPGPTSMDWIWRILFLVGAATGAHSGPMDPDLEIRAAFLRQRNTALRTEVAELEQEVQRLENEVSQYETRYGPLGGGKGSGGGGSGGGGSGGGGSFEQVQLKESGPVLVAPSQTLSITCTVSGFSLASYNIHWVRQPPGKGLEWLGVIWAGGSTNYNSALMSRLSISKDNSKSQVFLQMNSLQTDDTAMYYCAKRSDDYSWFAYWGQGTLVTVSASTREDLKNVFPPEVAVFEPSEAEISHTQKATLVCLATGFYPDHVELSWWVNGKEVHSGVCTDPQPLKEQPALNDSRYCLSSRLRVSATFWQNPRNHFRCQVQFYGLSENDEWTQDRAKPVTQIVSAEAWGRADCDVKLVEKSFETDTNLNFQNLSVIGFRILLLKVAGFNLLMTLRLWSS

SEQ ID NO: 45665 - protein, 668 aa, synthetic construct
MALPVTALLLPLALLLHAARPENVLTQSPAIMSASPGEKVTMTCRASSSVSSSYLHWYQQKSGASPKVWIYSTSNLASGVPGRFSGSGSGTSYSLTISSVEAEDAATYYCQQYSGYPITFGAGTKVEVKRLEDLKNVFPPEVAVFEPSEAEISHTQKATLVCLATGFYPDHVELSWWVNGKEVHSGVCTDPQPLKEQPALNDSRYCLSSRLRVSATFWQNPRNHFRCQVQFYGLSENDEWTQDRAKPVTQIVSAEAWGRADCDVKLVEKSFETDTNLNFQNLSVIGFRILLLKVAGFNLLMTLRLWSSRAKRSGSGATNFSLLKQAGDVEENPGPTSMDWIWRILFLVGAATGAHSGPEVAALEKEVAALEKEVAALEKEVAALEKGSGGGGSGGGGSGGGGSFEQVQLKESGPVLVAPSQTLSITCTVSGFSLASYNIHWVRQPPGKGLEWLGVIWAGGSTNYNSALMSRLSISKDNSKSQVFLQMNSLQTDDTAMYYCAKRSDDYSWFAYWGQGTLVTVSASTRIQNPDPAVYQLRDSKSSDKSVCLFTDFDSQTNVSQSKDSDVYITDKCVLDMRSMDFKSNSAVAWSNKSDFACANAFNNSIIPEDTFFPSPESSCGFTSESYQQGVLSATILYEILLGKATLYAVLVSALVLMAMVKRKDSRG

SEQ ID NO: 45666 - protein, 672 aa, synthetic construct
MALPVTALLLPLALLLHAARPENVLTQSPAIMSASPGEKVTMTCRASSSVSSSYLHWYQQKSGASPKVWIYSTSNLASGVPGRFSGSGSGTSYSLTISSVEAEDAATYYCQQYSGYPITFGAGTKVEVKRLEIQNPDPAVYQLRDSKSSDKSVCLFTDFDSQTNVSQSKDSDVYITDKCVLDMRSMDFKSNSAVAWSNKSDFACANAFNNSIIPEDTFFPSPESSCGFTSESYQQGVLSATILYEILLGKATLYAVLVSALVLMAMVKRKDSRGRAKRSGSGVKQTLNFDLLKLAGDVESNPGPTSMDWIWRILFLVGAATGAHSGPEVAALEKEVAALEKEVAALEKEVAALEKGSGGGGSGGGGSGGGGSFEQVQLKESGPVLVAPSQTLSITCTVSGFSLASYNIHWVRQPPGKGLEWLGVIWAGGSTNYNSALMSRLSISKDNSKSQVFLQMNSLQTDDTAMYYCAKRSDDYSWFAYWGQGTLVTVSASTREDLKNVFPPEVAVFEPSEAEISHTQKATLVCLATGFYPDHVELSWWVNGKEVHSGVCTDPQPLKEQPALNDSRYCLSSRLRVSATFWQNPRNHFRCQVQFYGLSENDEWTQDRAKPVTQIVSAEAWGRADCDVKLVEKSFETDTNLNFQNLSVIGFRILLLKVAGFNLLMTLRLWSS

SEQ ID NO: 45667 - protein, 758 aa, synthetic construct
MALPVTALLLPLALLLHAARPENVLTQSPAIMSASPGEKVTMTCRASSSVSSSYLHWYQQKSGASPKVWIYSTSNLASGVPGRFSGSGSGTSYSLTISSVEAEDAATYYCQQYSGYPITFGAGTKVEVKRLEDLKNVFPPEVAVFEPSEAEISHTQKATLVCLATGFYPDHVELSWWVNGKEVHSGVCTDPQPLKEQPALNDSRYCLSSRLRVSATFWQNPRNHFRCQVQFYGLSENDEWTQDRAKPVTQIVSAEAWGRADCDVKLVEKSFETDTNLNFQNLSVIGFRILLLKVAGFNLLMTLRLWSSRAKRSGSGATNFSLLKQAGDVEENPGPTSMDWIWRILFLVGAATGAHSGPQVQLQESGGGLAQAGGSLRLSCAASGRTFSMGWFRQAPGKEREFVAAITYSGGSPYYASSVRGRFTISRDNAKNTVYLQMNSLKPEDTAVYYCAANPTYGSDWNAENWGQGTQVTVSSGSGGGGSGGGGSGGGGSFEQVQLKESGPVLVAPSQTLSITCTVSGFSLASYNIHWVRQPPGKGLEWLGVIWAGGSTNYNSALMSRLSISKDNSKSQVFLQMNSLQTDDTAMYYCAKRSDDYSWFAYWGQGTLVTVSASTRIQNPDPAVYQLRDSKSSDKSVCLFTDFDSQTNVSQSKDSDVYITDKCVLDMRSMDFKSNSAVAWSNKSDFACANAFNNSIIPEDTFFPSPESSCGFTSESYQQGVLSATILYEILLGKATLYAVLVSALVLMAMVKRKDSRG

SEQ ID NO: 45668 - protein, 762 aa, synthetic construct
MALPVTALLLPLALLLHAARPENVLTQSPAIMSASPGEKVTMTCRASSSVSSSYLHWYQQKSGASPKVWIYSTSNLASGVPGRFSGSGSGTSYSLTISSVEAEDAATYYCQQYSGYPITFGAGTKVEVKRLEIQNPDPAVYQLRDSKSSDKSVCLFTDFDSQTNVSQSKDSDVYITDKCVLDMRSMDFKSNSAVAWSNKSDFACANAFNNSIIPEDTFFPSPESSCGFTSESYQQGVLSATILYEILLGKATLYAVLVSALVLMAMVKRKDSRGRAKRSGSGVKQTLNFDLLKLAGDVESNPGPTSMDWIWRILFLVGAATGAHSGPQVQLQESGGGLAQAGGSLRLSCAASGRTFSMGWFRQAPGKEREFVAAITYSGGSPYYASSVRGRFTISRDNAKNTVYLQMNSLKPEDTAVYYCAANPTYGSDWNAENWGQGTQVTVSSGSGGGGSGGGGSGGGGSFEQVQLKESGPVLVAPSQTLSITCTVSGFSLASYNIHWVRQPPGKGLEWLGVIWAGGSTNYNSALMSRLSISKDNSKSQVFLQMNSLQTDDTAMYYCAKRSDDYSWFAYWGQGTLVTVSASTREDLKNVFPPEVAVFEPSEAEISHTQKATLVCLATGFYPDHVELSWWVNGKEVHSGVCTDPQPLKEQPALNDSRYCLSSRLRVSATFWQNPRNHFRCQVQFYGLSENDEWTQDRAKPVTQIVSAEAWGRADCDVKLVEKSFETDTNLNFQNLSVIGFRILLLKVAGFNLLMTLRLWSS

SEQ ID NO: 45669 - protein, 764 aa, synthetic construct
MALPVTALLLPLALLLHAARPEVQLVESGGSLVQPGGSLRLSCAASGFTFDDYAMSWVRQVPGKGLEWVSSINWSGTHTDYADSVKGRFTISRNNANNTLYLQMNSLKSEDTAVYYCAKNWRDAGTTWFEKSGSAGQGTQVTVSSGTGGGGSGGGGSGGGGSEFENVLTQSPAIMSASPGEKVTMTCRASSSVSSSYLHWYQQKSGASPKVWIYSTSNLASGVPGRFSGSGSGTSYSLTISSVEAEDAATYYCQQYSGYPITFGAGTKVEVKRLEDLKNVFPPEVAVFEPSEAEISHTQKATLVCLATGFYPDHVELSWWVNGKEVHSGVCTDPQPLKEQPALNDSRYCLSSRLRVSATFWQNPRNHFRCQVQFYGLSENDEWTQDRAKPVTQIVSAEAWGRADCDVKLVEKSFETDTNLNFQNLSVIGFRILLLKVAGFNLLMTLRLWSSRAKRSGSGATNFSLLKQAGDVEENPGPTSMDWIWRILFLVGAATGAHSFEQVQLKESGPVLVAPSQTLSITCTVSGFSLASYNIHWVRQPPGKGLEWLGVIWAGGSTNYNSALMSRLSISKDNSKSQVFLQMNSLQTDDTAMYYCAKRSDDYSWFAYWGQGTLVTVSASTRIQNPDPAVYQLRDSKSSDKSVCLFTDFDSQTNVSQSKDSDVYITDKCVLDMRSMDFKSNSAVAWSNKSDFACANAFNNSIIPEDTFFPSPESSCGFTSESYQQGVLSATILYEILLGKATLYAVLVSALVLMAMVKRKDSRG

SEQ ID NO: 45670 - protein, 768 aa, synthetic construct
MALPVTALLLPLALLLHAARPEVQLVESGGSLVQPGGSLRLSCAASGFTFDDYAMSWVRQVPGKGLEWVSSINWSGTHTDYADSVKGRFTISRNNANNTLYLQMNSLKSEDTAVYYCAKNWRDAGTTWFEKSGSAGQGTQVTVSSGTGGGGSGGGGSGGGGSEFENVLTQSPAIMSASPGEKVTMTCRASSSVSSSYLHWYQQKSGASPKVWIYSTSNLASGVPGRFSGSGSGTSYSLTISSVEAEDAATYYCQQYSGYPITFGAGTKVEVKRLEIQNPDPAVYQLRDSKSSDKSVCLFTDFDSQTNVSQSKDSDVYITDKCVLDMRSMDFKSNSAVAWSNKSDFACANAFNNSIIPEDTFFPSPESSCGFTSESYQQGVLSATILYEILLGKATLYAVLVSALVLMAMVKRKDSRGRAKRSGSGVKQTLNFDLLKLAGDVESNPGPTSMDWIWRILFLVGAATGAHSFEQVQLKESGPVLVAPSQTLSITCTVSGFSLASYNIHWVRQPPGKGLEWLGVIWAGGSTNYNSALMSRLSISKDNSKSQVFLQMNSLQTDDTAMYYCAKRSDDYSWFAYWGQGTLVTVSASTREDLKNVFPPEVAVFEPSEAEISHTQKATLVCLATGFYPDHVELSWWVNGKEVHSGVCTDPQPLKEQPALNDSRYCLSSRLRVSATFWQNPRNHFRCQVQFYGLSENDEWTQDRAKPVTQIVSAEAWGRADCDVKLVEKSFETDTNLNFQNLSVIGFRILLLKVAGFNLLMTLRLWSS

SEQ ID NO: 45671 - protein, 762 aa, synthetic construct
MALPVTALLLPLALLLHAARPEVQLLESGGGLVQPGGSLRLSCAASGFIFSSYAMSWVRQAPGKGQEWVSGVSGTGVNTYYADSVKGRFTISRDNSKNTLYLQMNSLRAEDTAVYYCASGKGWDSGSWYEDYRGQGTLVTVSSGTGGGGSGGGGSGGGGSEFENVLTQSPAIMSASPGEKVTMTCRASSSVSSSYLHWYQQKSGASPKVWIYSTSNLASGVPGRFSGSGSGTSYSLTISSVEAEDAATYYCQQYSGYPITFGAGTKVEVKRLEDLKNVFPPEVAVFEPSEAEISHTQKATLVCLATGFYPDHVELSWWVNGKEVHSGVCTDPQPLKEQPALNDSRYCLSSRLRVSATFWQNPRNHFRCQVQFYGLSENDEWTQDRAKPVTQIVSAEAWGRADCDVKLVEKSFETDTNLNFQNLSVIGFRILLLKVAGFNLLMTLRLWSSRAKRSGSGATNFSLLKQAGDVEENPGPTSMDWIWRILFLVGAATGAHSFEQVQLKESGPVLVAPSQTLSITCTVSGFSLASYNIHWVRQPPGKGLEWLGVIWAGGSTNYNSALMSRLSISKDNSKSQVFLQMNSLQTDDTAMYYCAKRSDDYSWFAYWGQGTLVTVSASTRIQNPDPAVYQLRDSKSSDKSVCLFTDFDSQTNVSQSKDSDVYITDKCVLDMRSMDFKSNSAVAWSNKSDFACANAFNNSIIPEDTFFPSPESSCGFTSESYQQGVLSATILYEILLGKATLYAVLVSALVLMAMVKRKDSRG

SEQ ID NO: 45672 - protein, 766 aa, synthetic construct
MALPVTALLLPLALLLHAARPEVQLLESGGGLVQPGGSLRLSCAASGFIFSSYAMSWVRQAPGKGQEWVSGVSGTGVNTYYADSVKGRFTISRDNSKNTLYLQMNSLRAEDTAVYYCASGKGWDSGSWYEDYRGQGTLVTVSSGTGGGGSGGGGSGGGGSEFENVLTQSPAIMSASPGEKVTMTCRASSSVSSSYLHWYQQKSGASPKVWIYSTSNLASGVPGRFSGSGSGTSYSLTISSVEAEDAATYYCQQYSGYPITFGAGTKVEVKRLEIQNPDPAVYQLRDSKSSDKSVCLFTDFDSQTNVSQSKDSDVYITDKCVLDMRSMDFKSNSAVAWSNKSDFACANAFNNSIIPEDTFFPSPESSCGFTSESYQQGVLSATILYEILLGKATLYAVLVSALVLMAMVKRKDSRGRAKRSGSGVKQTLNFDLLKLAGDVESNPGPTSMDWIWRILFLVGAATGAHSFEQVQLKESGPVLVAPSQTLSITCTVSGFSLASYNIHWVRQPPGKGLEWLGVIWAGGSTNYNSALMSRLSISKDNSKSQVFLQMNSLQTDDTAMYYCAKRSDDYSWFAYWGQGTLVTVSASTREDLKNVFPPEVAVFEPSEAEISHTQKATLVCLATGFYPDHVELSWWVNGKEVHSGVCTDPQPLKEQPALNDSRYCLSSRLRVSATFWQNPRNHFRCQVQFYGLSENDEWTQDRAKPVTQIVSAEAWGRADCDVKLVEKSFETDTNLNFQNLSVIGFRILLLKVAGFNLLMTLRLWSS

SEQ ID NO: 45673 - protein, 730 aa, synthetic construct
MALPVTALLLPLALLLHAARPMLPAPKNLVVSRITEDSARLSWTAPDAAFDSFPIRYIETLIWGEAIWLDVPGSERSYDLTGLKPGTEYAVVITGVKGGRFSSPLVASFTTGTGGGGSGGGGSGGGGSEFENVLTQSPAIMSASPGEKVTMTCRASSSVSSSYLHWYQQKSGASPKVWIYSTSNLASGVPGRFSGSGSGTSYSLTISSVEAEDAATYYCQQYSGYPITFGAGTKVEVKRLEDLKNVFPPEVAVFEPSEAEISHTQKATLVCLATGFYPDHVELSWWVNGKEVHSGVCTDPQPLKEQPALNDSRYCLSSRLRVSATFWQNPRNHFRCQVQFYGLSENDEWTQDRAKPVTQIVSAEAWGRADCDVKLVEKSFETDTNLNFQNLSVIGFRILLLKVAGFNLLMTLRLWSSRAKRSGSGATNFSLLKQAGDVEENPGPTSMDWIWRILFLVGAATGAHSFEQVQLKESGPVLVAPSQTLSITCTVSGFSLASYNIHWVRQPPGKGLEWLGVIWAGGSTNYNSALMSRLSISKDNSKSQVFLQMNSLQTDDTAMYYCAKRSDDYSWFAYWGQGTLVTVSASTRIQNPDPAVYQLRDSKSSDKSVCLFTDFDSQTNVSQSKDSDVYITDKCVLDMRSMDFKSNSAVAWSNKSDFACANAFNNSIIPEDTFFPSPESSCGFTSESYQQGVLSATILYEILLGKATLYAVLVSALVLMAMVKRKDSRG

SEQ ID NO: 45674 - protein, 734 aa, synthetic construct
MALPVTALLLPLALLLHAARPMLPAPKNLVVSRITEDSARLSWTAPDAAFDSFPIRYIETLIWGEAIWLDVPGSERSYDLTGLKPGTEYAVVITGVKGGRFSSPLVASFTTGTGGGGSGGGGSGGGGSEFENVLTQSPAIMSASPGEKVTMTCRASSSVSSSYLHWYQQKSGASPKVWIYSTSNLASGVPGRFSGSGSGTSYSLTISSVEAEDAATYYCQQYSGYPITFGAGTKVEVKRLEIQNPDPAVYQLRDSKSSDKSVCLFTDFDSQTNVSQSKDSDVYITDKCVLDMRSMDFKSNSAVAWSNKSDFACANAFNNSIIPEDTFFPSPESSCGFTSESYQQGVLSATILYEILLGKATLYAVLVSALVLMAMVKRKDSRGRAKRSGSGVKQTLNFDLLKLAGDVESNPGPTSMDWIWRILFLVGAATGAHSFEQVQLKESGPVLVAPSQTLSITCTVSGFSLASYNIHWVRQPPGKGLEWLGVIWAGGSTNYNSALMSRLSISKDNSKSQVFLQMNSLQTDDTAMYYCAKRSDDYSWFAYWGQGTLVTVSASTREDLKNVFPPEVAVFEPSEAEISHTQKATLVCLATGFYPDHVELSWWVNGKEVHSGVCTDPQPLKEQPALNDSRYCLSSRLRVSATFWQNPRNHFRCQVQFYGLSENDEWTQDRAKPVTQIVSAEAWGRADCDVKLVEKSFETDTNLNFQNLSVIGFRILLLKVAGFNLLMTLRLWSS

SEQ ID NO: 45675 - protein, 759 aa, synthetic construct
MALPVTALLLPLALLLHAARPEVQLVESGGGLVQPGGSLRLSCAASGFNIKDTCIGWVRRAPGKEEELVAKICKYSGHTRYADSVKGRFTISADTSKNTAYLQMNSLRAEDTAVYYCAAVSVRDGHYNYWGQGTTVTVSSGTGGGGSGGGGSGGGGSEFENVLTQSPAIMSASPGEKVTMTCRASSSVSSSYLHWYQQKSGASPKVWIYSTSNLASGVPGRFSGSGSGTSYSLTISSVEAEDAATYYCQQYSGYPITFGAGTKVEVKRLEDLKNVFPPEVAVFEPSEAEISHTQKATLVCLATGFYPDHVELSWWVNGKEVHSGVCTDPQPLKEQPALNDSRYCLSSRLRVSATFWQNPRNHFRCQVQFYGLSENDEWTQDRAKPVTQIVSAEAWGRADCDVKLVEKSFETDTNLNFQNLSVIGFRILLLKVAGFNLLMTLRLWSSRAKRSGSGATNFSLLKQAGDVEENPGPTSMDWIWRILFLVGAATGAHSFEQVQLKESGPVLVAPSQTLSITCTVSGFSLASYNIHWVRQPPGKGLEWLGVIWAGGSTNYNSALMSRLSISKDNSKSQVFLQMNSLQTDDTAMYYCAKRSDDYSWFAYWGQGTLVTVSASTRIQNPDPAVYQLRDSKSSDKSVCLFTDFDSQTNVSQSKDSDVYITDKCVLDMRSMDFKSNSAVAWSNKSDFACANAFNNSIIPEDTFFPSPESSCGFTSESYQQGVLSATILYEILLGKATLYAVLVSALVLMAMVKRKDSRG

SEQ ID NO: 45676 - protein, 763 aa, synthetic construct
MALPVTALLLPLALLLHAARPEVQLVESGGGLVQPGGSLRLSCAASGFNIKDTCIGWVRRAPGKEEELVAKICKYSGHTRYADSVKGRFTISADTSKNTAYLQMNSLRAEDTAVYYCAAVSVRDGHYNYWGQGTTVTVSSGTGGGGSGGGGSGGGGSEFENVLTQSPAIMSASPGEKVTMTCRASSSVSSSYLHWYQQKSGASPKVWIYSTSNLASGVPGRFSGSGSGTSYSLTISSVEAEDAATYYCQQYSGYPITFGAGTKVEVKRLEIQNPDPAVYQLRDSKSSDKSVCLFTDFDSQTNVSQSKDSDVYITDKCVLDMRSMDFKSNSAVAWSNKSDFACANAFNNSIIPEDTFFPSPESSCGFTSESYQQGVLSATILYEILLGKATLYAVLVSALVLMAMVKRKDSRGRAKRSGSGVKQTLNFDLLKLAGDVESNPGPTSMDWIWRILFLVGAATGAHSFEQVQLKESGPVLVAPSQTLSITCTVSGFSLASYNIHWVRQPPGKGLEWLGVIWAGGSTNYNSALMSRLSISKDNSKSQVFLQMNSLQTDDTAMYYCAKRSDDYSWFAYWGQGTLVTVSASTREDLKNVFPPEVAVFEPSEAEISHTQKATLVCLATGFYPDHVELSWWVNGKEVHSGVCTDPQPLKEQPALNDSRYCLSSRLRVSATFWQNPRNHFRCQVQFYGLSENDEWTQDRAKPVTQIVSAEAWGRADCDVKLVEKSFETDTNLNFQNLSVIGFRILLLKVAGFNLLMTLRLWSS

SEQ ID NO: 45677 - protein, 1130 aa, synthetic construct
MALPVTALLLPLALLLHAARPEVQLVESGGGLVQAGGSLRLSCAASGRTFSMGWFRQAPGKEREFVAAITYSGGSPYYADSVKGRFTISRDNAKNTVYLQMNSLKPEDTAVYYCAANPTYGSDWNAENWGQGTQVTVSSGTGGGGSGGGGSGGGGSEFENVLTQSPAIMSASPGEKVTMTCRASSSVSSSYLHWYQQKSGASPKVWIYSTSNLASGVPGRFSGSGSGTSYSLTISSVEAEDAATYYCQQYSGYPITFGAGTKVEVKRLEDLKNVFPPEVAVFEPSEAEISHTQKATLVCLATGFYPDHVELSWWVNGKEVHSGVCTDPQPLKEQPALNDSRYCLSSRLRVSATFWQNPRNHFRCQVQFYGLSENDEWTQDRAKPVTQIVSAEAWGRADCDVKLVEKSFETDTNLNFQNLSVIGFRILLLKVAGFNLLMTLRLWSSRAKRSGSGATNFSLLKQAGDVEENPGPTSATMDWIWRILFLVGAATGAHSGPEVQLVESGGGLVQAGGSLRLSCAASGRTFTMGWFRQAPGKEREFVAAISLSPTLAYYADSVKGRFTISRDNAKNTVVLQMNSLKPEDTALYYCAADRKSVMSIRPDYWGQGTQVTVSSGSGGGGSGGGGSGGGGSFEQVQLKESGPVLVAPSQTLSITCTVSGFSLASYNIHWVRQPPGKGLEWLGVIWAGGSTNYNSALMSRLSISKDNSKSQVFLQMNSLQTDDTAMYYCAKRSDDYSWFAYWGQGTLVTVSASTRIQNPDPAVYQLRDSKSSDKSVCLFTDFDSQTNVSQSKDSDVYITDKCVLDMRSMDFKSNSAVAWSNKSDFACANAFNNSIIPEDTFFPSPESSCGFTSESYQQGVLSATILYEILLGKATLYAVLVSALVLMAMVKRKDSRGRAKRSGSGVKQTLNFDLLKLAGDVESNPGPSRGHMTEYKPTVRLATRDDVPRAVRTLAAAFADYPATRHTVDPDRHIERVTELQELFLTRVGLDIGKVWVADDGAAVAVWTTPESVEAGAVFAEIGPRMAELSGSRLAAQQQMEGLLAPHRPKEPAWFLATVGVSPDHQGKGLGSAVVLPGVEAAERAGVPAFLETSAPRNLPFYERLGFTVTADVEVPEGPRTWCMTRKPGA

SEQ ID NO: 45678 - protein, 768 aa, synthetic construct
MALPVTALLLPLALLLHAARPEVQLVESGGGLVQPGGSLRLSCAASGFASDYYIIGWFRQAPGKEREGVSCISSRYANTNYADSVKGRFTISRDNAKNTVYLQMNSLKPEDTAVYYCAADTRRYTCPDIATMHRNFDSWGQGTLVTVSSGTGGGGSGGGGSGGGGSEFENVLTQSPAIMSASPGEKVTMTCRASSSVSSSYLHWYQQKSGASPKVWIYSTSNLASGVPGRFSGSGSGTSYSLTISSVEAEDAATYYCQQYSGYPITFGAGTKVEVKRLEDLKNVFPPEVAVFEPSEAEISHTQKATLVCLATGFYPDHVELSWWVNGKEVHSGVCTDPQPLKEQPALNDSRYCLSSRLRVSATFWQNPRNHFRCQVQFYGLSENDEWTQDRAKPVTQIVSAEAWGRADCDVKLVEKSFETDTNLNFQNLSVIGFRILLLKVAGFNLLMTLRLWSSRAKRSGSGATNFSLLKQAGDVEENPGPTSMDWIWRILFLVGAATGAHSFEQVQLKESGPVLVAPSQTLSITCTVSGFSLASYNIHWVRQPPGKGLEWLGVIWAGGSTNYNSALMSRLSISKDNSKSQVFLQMNSLQTDDTAMYYCAKRSDDYSWFAYWGQGTLVTVSASTRIQNPDPAVYQLRDSKSSDKSVCLFTDFDSQTNVSQSKDSDVYITDKCVLDMRSMDFKSNSAVAWSNKSDFACANAFNNSIIPEDTFFPSPESSCGFTSESYQQGVLSATILYEILLGKATLYAVLVSALVLMAMVKRKDSRG

SEQ ID NO: 45679 - protein, 768 aa, synthetic construct
MALPVTALLLPLALLLHAARPEVQLVESGGGLVQPGGSLRLSCEASGFASDDYIIGWFRQAPGKEREGVSCISSKYANTVYTDSVKGRFRLSRGTAKNTVYLQMSALKPEDTAVYYCAMDSRRVTCPEISTMHRNFDSWGQGTLVTVSSGTGGGGSGGGGSGGGGSEFENVLTQSPAIMSASPGEKVTMTCRASSSVSSSYLHWYQQKSGASPKVWIYSTSNLASGVPGRFSGSGSGTSYSLTISSVEAEDAATYYCQQYSGYPITFGAGTKVEVKRLEDLKNVFPPEVAVFEPSEAEISHTQKATLVCLATGFYPDHVELSWWVNGKEVHSGVCTDPQPLKEQPALNDSRYCLSSRLRVSATFWQNPRNHFRCQVQFYGLSENDEWTQDRAKPVTQIVSAEAWGRADCDVKLVEKSFETDTNLNFQNLSVIGFRILLLKVAGFNLLMTLRLWSSRAKRSGSGATNFSLLKQAGDVEENPGPTSMDWIWRILFLVGAATGAHSFEQVQLKESGPVLVAPSQTLSITCTVSGFSLASYNIHWVRQPPGKGLEWLGVIWAGGSTNYNSALMSRLSISKDNSKSQVFLQMNSLQTDDTAMYYCAKRSDDYSWFAYWGQGTLVTVSASTRIQNPDPAVYQLRDSKSSDKSVCLFTDFDSQTNVSQSKDSDVYITDKCVLDMRSMDFKSNSAVAWSNKSDFACANAFNNSIIPEDTFFPSPESSCGFTSESYQQGVLSATILYEILLGKATLYAVLVSALVLMAMVKRKDSRG

SEQ ID NO: 45680 - protein, 768 aa, synthetic construct
MALPVTALLLPLALLLHAARPEVQLVESGGGLVQPGGSLRLSCAASGFASDYYIIGWFRQAPGKEREGVSCISSRYANTNYADSVKGRFTISRDNAKNTVYLQMNSLKPEDTAVYYCAADTRRYTCPDIATMHRNFDSWGQGTLVTVSSGTGGGGSGGGGSGGGGSEFENVLTQSPAIMSASPGEKVTMTCRASSSVSSSYLHWYQQKSGASPKVWIYSTSNLASGVPGRFSGSGSGTSYSLTISSVEAEDAATYYCQQYSGYPITFGAGTKVEVKRLEIQNPDPAVYQLRDSKSSDKSVCLFTDFDSQTNVSQSKDSDVYITDKCVLDMRSMDFKSNSAVAWSNKSDFACANAFNNSIIPEDTFFPSPESSCGFTSESYQQGVLSATILYEILLGKATLYAVLVSALVLMAMVKRKDSRGRAKRSGSGATNFSLLKQAGDVEENPGPTSMDWIWRILFLVGAATGAHSFEQVQLKESGPVLVAPSQTLSITCTVSGFSLASYNIHWVRQPPGKGLEWLGVIWAGGSTNYNSALMSRLSISKDNSKSQVFLQMNSLQTDDTAMYYCAKRSDDYSWFAYWGQGTLVTVSASTRDLKNVFPPEVAVFEPSEAEISHTQKATLVCLATGFYPDHVELSWWVNGKEVHSGVCTDPQPLKEQPALNDSRYCLSSRLRVSATFWQNPRNHFRCQVQFYGLSENDEWTQDRAKPVTQIVSAEAWGRADCDVKLVEKSFETDTNLNFQNLSVIGFRILLLKVAGFNLLMTLRLWSS

SEQ ID NO: 45681 - protein, 768 aa, synthetic construct
MALPVTALLLPLALLLHAARPEVQLVESGGGLVQPGGSLRLSCEASGFASDDYIIGWFRQAPGKEREGVSCISSKYANTVYTDSVKGRFRLSRGTAKNTVYLQMSALKPEDTAVYYCAMDSRRVTCPEISTMHRNFDSWGQGTLVTVSSGTGGGGSGGGGSGGGGSEFENVLTQSPAIMSASPGEKVTMTCRASSSVSSSYLHWYQQKSGASPKVWIYSTSNLASGVPGRFSGSGSGTSYSLTISSVEAEDAATYYCQQYSGYPITFGAGTKVEVKRLEIQNPDPAVYQLRDSKSSDKSVCLFTDFDSQTNVSQSKDSDVYITDKCVLDMRSMDFKSNSAVAWSNKSDFACANAFNNSIIPEDTFFPSPESSCGFTSESYQQGVLSATILYEILLGKATLYAVLVSALVLMAMVKRKDSRGRAKRSGSGATNFSLLKQAGDVEENPGPTSMDWIWRILFLVGAATGAHSFEQVQLKESGPVLVAPSQTLSITCTVSGFSLASYNIHWVRQPPGKGLEWLGVIWAGGSTNYNSALMSRLSISKDNSKSQVFLQMNSLQTDDTAMYYCAKRSDDYSWFAYWGQGTLVTVSASTRDLKNVFPPEVAVFEPSEAEISHTQKATLVCLATGFYPDHVELSWWVNGKEVHSGVCTDPQPLKEQPALNDSRYCLSSRLRVSATFWQNPRNHFRCQVQFYGLSENDEWTQDRAKPVTQIVSAEAWGRADCDVKLVEKSFETDTNLNFQNLSVIGFRILLLKVAGFNLLMTLRLWSS

SEQ ID NO: 45682 - protein, 759 aa, synthetic construct
MALPVTALLLPLALLLHAARPQVKLEESGGGLVQPGESLRLSCSASGSIFKVFRVFAMSWYRQGPGKQRELVASISSGETTTYAESVKGRFTISRDNAKNTAYLQMDSLKPEDTAVYYCNADHTFTGDFWGQGTQVTVSSGTGGGGSGGGGSGGGGSEFENVLTQSPAIMSASPGEKVTMTCRASSSVSSSYLHWYQQKSGASPKVWIYSTSNLASGVPGRFSGSGSGTSYSLTISSVEAEDAATYYCQQYSGYPITFGAGTKVEVKRLEIQNPDPAVYQLRDSKSSDKSVCLFTDFDSQTNVSQSKDSDVYITDKCVLDMRSMDFKSNSAVAWSNKSDFACANAFNNSIIPEDTFFPSPESSCGFTSESYQQGVLSATILYEILLGKATLYAVLVSALVLMAMVKRKDSRGRAKRSGSGATNFSLLKQAGDVEENPGPTSMDWIWRILFLVGAATGAHSFEQVQLKESGPVLVAPSQTLSITCTVSGFSLASYNIHWVRQPPGKGLEWLGVIWAGGSTNYNSALMSRLSISKDNSKSQVFLQMNSLQTDDTAMYYCAKRSDDYSWFAYWGQGTLVTVSASTRDLKNVFPPEVAVFEPSEAEISHTQKATLVCLATGFYPDHVELSWWVNGKEVHSGVCTDPQPLKEQPALNDSRYCLSSRLRVSATFWQNPRNHFRCQVQFYGLSENDEWTQDRAKPVTQIVSAEAWGRADCDVKLVEKSFETDTNLNFQNLSVIGFRILLLKVAGFNLLMTLRLWSS

SEQ ID NO: 45683 - protein, 760 aa, synthetic construct
MALPVTALLLPLALLLHAARPENVLTQSPAIMSASPGEKVTMTCRASSSVSSSYLHWYQQKSGASPKVWIYSTSNLASGVPGRFSGSGSGTSYSLTISSVEAEDAATYYCQQYSGYPITFGAGTKVEVKRLEDLKNVFPPEVAVFEPSEAEISHTQKATLVCLATGFYPDHVELSWWVNGKEVHSGVCTDPQPLKEQPALNDSRYCLSSRLRVSATFWQNPRNHFRCQVQFYGLSENDEWTQDRAKPVTQIVSAEAWGRADCDVKLVEKSFETDTNLNFQNLSVIGFRILLLKVAGFNLLMTLRLWSSRAKRSGSGATNFSLLKQAGDVEENPGPTSATMDWIWRILFLVGAATGAHSGPEVQLVESGGGLVQAGGSLRLSCAASGRTFSMGWFRQAPGKEREFVAAITYSGGSPYYADSVKGRFTISRDNAKNTVYLQMNSLKPEDTAVYYCAANPTYGSDWNAENWGQGTQVTVSSGSGGGGSGGGGSGGGGSFEQVQLKESGPVLVAPSQTLSITCTVSGFSLASYNIHWVRQPPGKGLEWLGVIWAGGSTNYNSALMSRLSISKDNSKSQVFLQMNSLQTDDTAMYYCAKRSDDYSWFAYWGQGTLVTVSASTRIQNPDPAVYQLRDSKSSDKSVCLFTDFDSQTNVSQSKDSDVYITDKCVLDMRSMDFKSNSAVAWSNKSDFACANAFNNSIIPEDTFFPSPESSCGFTSESYQQGVLSATILYEILLGKATLYAVLVSALVLMAMVKRKDSRG

SEQ ID NO: 45684 - protein, 761 aa, synthetic construct
MALPVTALLLPLALLLHAARPENVLTQSPAIMSASPGEKVTMTCRASSSVSSSYLHWYQQKSGASPKVWIYSTSNLASGVPGRFSGSGSGTSYSLTISSVEAEDAATYYCQQYSGYPITFGAGTKVEVKRLEDLKNVFPPEVAVFEPSEAEISHTQKATLVCLATGFYPDHVELSWWVNGKEVHSGVCTDPQPLKEQPALNDSRYCLSSRLRVSATFWQNPRNHFRCQVQFYGLSENDEWTQDRAKPVTQIVSAEAWGRADCDVKLVEKSFETDTNLNFQNLSVIGFRILLLKVAGFNLLMTLRLWSSRAKRSGSGATNFSLLKQAGDVEENPGPTSATMDWIWRILFLVGAATGAHSGPEVQLVESGGGLVQPGGSLRLSCAASGSIFGFNDMAWYRQAPGKQRELVALISRVGVTSSADSVKGRFTISRVNAKDTVYLQMNSLKPEDTAVYYCYMDQRLDGSTLAYWGQGTQVTVSSGSGGGGSGGGGSGGGGSFEQVQLKESGPVLVAPSQTLSITCTVSGFSLASYNIHWVRQPPGKGLEWLGVIWAGGSTNYNSALMSRLSISKDNSKSQVFLQMNSLQTDDTAMYYCAKRSDDYSWFAYWGQGTLVTVSASTRIQNPDPAVYQLRDSKSSDKSVCLFTDFDSQTNVSQSKDSDVYITDKCVLDMRSMDFKSNSAVAWSNKSDFACANAFNNSIIPEDTFFPSPESSCGFTSESYQQGVLSATILYEILLGKATLYAVLVSALVLMAMVKRKDSRG

SEQ ID NO: 45685 - protein, 757 aa, synthetic construct
MALPVTALLLPLALLLHAARPENVLTQSPAIMSASPGEKVTMTCRASSSVSSSYLHWYQQKSGASPKVWIYSTSNLASGVPGRFSGSGSGTSYSLTISSVEAEDAATYYCQQYSGYPITFGAGTKVEVKRLEDLKNVFPPEVAVFEPSEAEISHTQKATLVCLATGFYPDHVELSWWVNGKEVHSGVCTDPQPLKEQPALNDSRYCLSSRLRVSATFWQNPRNHFRCQVQFYGLSENDEWTQDRAKPVTQIVSAEAWGRADCDVKLVEKSFETDTNLNFQNLSVIGFRILLLKVAGFNLLMTLRLWSSRAKRSGSGATNFSLLKQAGDVEENPGPTSATMDWIWRILFLVGAATGAHSGPEVQLVESGGGLVQAGGSLRLSCAASGSVFSGNVMGWYRQAPGKEREWVAAIASGGSIYYRDSVKGRFTISRDNAKNTVYLQMNSLKPEDTAVYYCNSHPPTLPYWGLGTQVTVSSGSGGGGSGGGGSGGGGSFEQVQLKESGPVLVAPSQTLSITCTVSGFSLASYNIHWVRQPPGKGLEWLGVIWAGGSTNYNSALMSRLSISKDNSKSQVFLQMNSLQTDDTAMYYCAKRSDDYSWFAYWGQGTLVTVSASTRIQNPDPAVYQLRDSKSSDKSVCLFTDFDSQTNVSQSKDSDVYITDKCVLDMRSMDFKSNSAVAWSNKSDFACANAFNNSIIPEDTFFPSPESSCGFTSESYQQGVLSATILYEILLGKATLYAVLVSALVLMAMVKRKDSRG

SEQ ID NO: 45686 - protein, 755 aa, synthetic construct
MALPVTALLLPLALLLHAARPENVLTQSPAIMSASPGEKVTMTCRASSSVSSSYLHWYQQKSGASPKVWIYSTSNLASGVPGRFSGSGSGTSYSLTISSVEAEDAATYYCQQYSGYPITFGAGTKVEVKRLEDLKNVFPPEVAVFEPSEAEISHTQKATLVCLATGFYPDHVELSWWVNGKEVHSGVCTDPQPLKEQPALNDSRYCLSSRLRVSATFWQNPRNHFRCQVQFYGLSENDEWTQDRAKPVTQIVSAEAWGRADCDVKLVEKSFETDTNLNFQNLSVIGFRILLLKVAGFNLLMTLRLWSSRAKRSGSGATNFSLLKQAGDVEENPGPTSATMDWIWRILFLVGAATGAHSGPEVQLLESGGGLVQPGGSLRLSCAASGFSFSSYALSWVRQAPGKGLEWVSSIGENDGTTDYADAVKGRFTISRDNSKNTLYLQMNSLRVEDTAVYYCVKDGIHWGQGTLVTVSSGSGGGGSGGGGSGGGGSFEQVQLKESGPVLVAPSQTLSITCTVSGFSLASYNIHWVRQPPGKGLEWLGVIWAGGSTNYNSALMSRLSISKDNSKSQVFLQMNSLQTDDTAMYYCAKRSDDYSWFAYWGQGTLVTVSASTRIQNPDPAVYQLRDSKSSDKSVCLFTDFDSQTNVSQSKDSDVYITDKCVLDMRSMDFKSNSAVAWSNKSDFACANAFNNSIIPEDTFFPSPESSCGFTSESYQQGVLSATILYEILLGKATLYAVLVSALVLMAMVKRKDSRG

SEQ ID NO: 45687 - protein, 1124 aa, synthetic construct
MGPRLLFWALLCLLGTGPVEAGVTQSPTHLIKTRGQQATLRCSPISGHTSVYWYQQALGLGLQFLLWYDEGEERNRGNFPPRFSGRQFPNYSSELNVNALELEDSALYLCASSLGGPRGLAGLRGDEQFFGPGTRLTVLEGTGGGGSGGGEFENVLTQSPAIMSASPGEKVTMTCRASSSVSSSYLHWYQQKSGASPKVWIYSTSNLASGVPGRFSGSGSGTSYSLTISSVEAEDAATYYCQQYSGYPITFGAGTKVEVKRLEDLKNVFPPEVAVFEPSEAEISHTQKATLVCLATGFYPDHVELSWWVNGKEVHSGVCTDPQPLKEQPALNDSRYCLSSRLRVSATFWQNPRNHFRCQVQFYGLSENDEWTQDRAKPVTQIVSAEAWGRADCDVKLVEKSFETDTNLNFQNLSVIGFRILLLKVAGFNLLMTLRLWSSRAKRSGSGATNFSLLKQAGDVEENPGPTSATMDWIWRILFLVGAATGAHSGPEVQLVESGGGLVQAGGSLRLSCAASGRTFSMGWFRQAPGKEREFVAAITYSGGSPYYADSVKGRFTISRDNAKNTVYLQMNSLKPEDTAVYYCAANPTYGSDWNAENWGQGTQVTVSSGSGGGGSGGGGSGGGGSFEQVQLKESGPVLVAPSQTLSITCTVSGFSLASYNIHWVRQPPGKGLEWLGVIWAGGSTNYNSALMSRLSISKDNSKSQVFLQMNSLQTDDTAMYYCAKRSDDYSWFAYWGQGTLVTVSASTRIQNPDPAVYQLRDSKSSDKSVCLFTDFDSQTNVSQSKDSDVYITDKCVLDMRSMDFKSNSAVAWSNKSDFACANAFNNSIIPEDTFFPSPESSCGFTSESYQQGVLSATILYEILLGKATLYAVLVSALVLMAMVKRKDSRGRAKRSGSGVKQTLNFDLLKLAGDVESNPGPSRGHMTEYKPTVRLATRDDVPRAVRTLAAAFADYPATRHTVDPDRHIERVTELQELFLTRVGLDIGKVWVADDGAAVAVWTTPESVEAGAVFAEIGPRMAELSGSRLAAQQQMEGLLAPHRPKEPAWFLATVGVSPDHQGKGLGSAVVLPGVEAAERAGVPAFLETSAPRNLPFYERLGFTVTADVEVPEGPRTWCMTRKPGA

SEQ ID NO: 45688 - protein, 1123 aa, synthetic construct
MGPRLLFWALLCLLGTGPVEAGVTQSPTHLIKTRGQQATLRCSPISGHTSVYWYQQALGLGLQFLLWYDEGEERNRGNFPPRFSGRQFPNYSSELNVNALELEDSALYLCASSLGGDELGADGNEQFFGPGTRLTVLEGTGGGGSGGGSEFENVLTQSPAIMSASPGEKVTMTCRASSSVSSSYLHWYQQKSGASPKVWIYSTSNLASGVPGRFSGSGSGTSYSLTISSVEAEDAATYYCQQYSGYPITFGAGTKVEVKRLEDLKNVFPPEVAVFEPSEAEISHTQKATLVCLATGFYPDHVELSWWVNGKEVHSGVCTDPQPLKEQPALNDSRYCLSSRLRVSATFWQNPRNHFRCQVQFYGLSENDEWTQDRAKPVTQIVSAEAWGRADCDVKLVEKSFETDTNLNFQNLSVIGFRILLLKVAGFNLLMTLRLWSSRAKRSGSGATNFSLLKQAGDVEENPGPTSATMDWIWRILFLVGAATGAHSGPEVQLVESGGGLVQAGGSLRLSCAASGRTFSMGWFRQAPGKEREFVAAITYSGGSPYYADSVKGRFTISRDNAKNTVYLQMNSLKPEDTAVYYCAANPTYGSDWNAENWGQGTQVTVSSGSGGGGSGGGGSGGGGSFEQVQLKESGPVLVAPSQTLSITCTVSGFSLASYNIHWVRQPPGKGLEWLGVIWAGGSTNYNSALMSRLSISKDNSKSQVFLQMNSLQTDDTAMYYCAKRSDDYSWFAYWGQGTLVTVSASTRIQNPDPAVYQLRDSKSSDKSVCLFTDFDSQTNVSQSKDSDVYITDKCVLDMRSMDFKSNSAVAWSNKSDFACANAFNNSIIPEDTFFPSPESSCGFTSESYQQGVLSATILYEILLGKATLYAVLVSALVLMAMVKRKDSRGRAKRSGSGVKQTLNFDLLKLAGDVESNPGPSRGHMTEYKPTVRLATRDDVPRAVRTLAAAFADYPATRHTVDPDRHIERVTELQELFLTRVGLDIGKVWVADDGAAVAVWTTPESVEAGAVFAEIGPRMAELSGSRLAAQQQMEGLLAPHRPKEPAWFLATVGVSPDHQGKGLGSAVVLPGVEAAERAGVPAFLETSAPRNLPFYERLGFTVTADVEVPEGPRTWCMTRKPGA

SEQ ID NO: 45689 - protein, 948 aa, synthetic construct
MALPVTALLLPLALLLHAARPENVLTQSPAIMSASPGEKVTMTCRASSSVSSSYLHWYQQKSGASPKVWIYSTSNLASGVPGRFSGSGSGTSYSLTISSVEAEDAATYYCQQYSGYPITFGAGTKVEVKRLEDLKNVFPPEVAVFEPSEAEISHTQKATLVCLATGFYPDHVELSWWVNGKEVHSGVCTDPQPLKEQPALNDSRYCLSSRLRVSATFWQNPRNHFRCQVQFYGLSENDEWTQDRAKPVTQIVSAEAWGRADCDVKLVEKSFETDTNLNFQNLSVIGFRILLLKVAGFNLLMTLRLWSSRAKRSGSGATNFSLLKQAGDVEENPGPTSATMDWIWRILFLVGAATGAHSGPMGSWLEFYHRLNAIDSRLWALGGSEAELAAFEKEIAAFESELQAYKGKGNPEVESLRDHAAHIREWLQAYRHNGSGGGGSGGGGSGGGGSFEQVQLKESGPVLVAPSQTLSITCTVSGFSLASYNIHWVRQPPGKGLEWLGVIWAGGSTNYNSALMSRLSISKDNSKSQVFLQMNSLQTDDTAMYYCAKRSDDYSWFAYWGQGTLVTVSASTRIQNPDPAVYQLRDSKSSDKSVCLFTDFDSQTNVSQSKDSDVYITDKCVLDMRSMDFKSNSAVAWSNKSDFACANAFNNSIIPEDTFFPSPESSCGFTSESYQQGVLSATILYEILLGKATLYAVLVSALVLMAMVKRKDSRGRAKRSGSGVKQTLNFDLLKLAGDVESNPGPSRGHMTEYKPTVRLATRDDVPRAVRTLAAAFADYPATRHTVDPDRHIERVTELQELFLTRVGLDIGKVWVADDGAAVAVWTTPESVEAGAVFAEIGPRMAELSGSRLAAQQQMEGLLAPHRPKEPAWFLATVGVSPDHQGKGLGSAVVLPGVEAAERAGVPAFLETSAPRNLPFYERLGFTVTADVEVPEGPRTWCMTRKPGA

SEQ ID NO: 45690 - protein, 948 aa, synthetic construct
MALPVTALLLPLALLLHAARPACMGSWFEFYDRLNAIDARLWALGGSEAELAAFEKEIAAFESELQAYKGKGNPEVENLRVHAAAIREWLQAYRHNGTGGGGSGGGGSGGGGSEFENVLTQSPAIMSASPGEKVTMTCRASSSVSSSYLHWYQQKSGASPKVWIYSTSNLASGVPGRFSGSGSGTSYSLTISSVEAEDAATYYCQQYSGYPITFGAGTKVEVKRLEDLKNVFPPEVAVFEPSEAEISHTQKATLVCLATGFYPDHVELSWWVNGKEVHSGVCTDPQPLKEQPALNDSRYCLSSRLRVSATFWQNPRNHFRCQVQFYGLSENDEWTQDRAKPVTQIVSAEAWGRADCDVKLVEKSFETDTNLNFQNLSVIGFRILLLKVAGFNLLMTLRLWSSRAKRSGSGATNFSLLKQAGDVEENPGPTSMDWIWRILFLVGAATGAHSFEQVQLKESGPVLVAPSQTLSITCTVSGFSLASYNIHWVRQPPGKGLEWLGVIWAGGSTNYNSALMSRLSISKDNSKSQVFLQMNSLQTDDTAMYYCAKRSDDYSWFAYWGQGTLVTVSASTRIQNPDPAVYQLRDSKSSDKSVCLFTDFDSQTNVSQSKDSDVYITDKCVLDMRSMDFKSNSAVAWSNKSDFACANAFNNSIIPEDTFFPSPESSCGFTSESYQQGVLSATILYEILLGKATLYAVLVSALVLMAMVKRKDSRGRAKRSGSGVKQTLNFDLLKLAGDVESNPGPSRGHMTEYKPTVRLATRDDVPRAVRTLAAAFADYPATRHTVDPDRHIERVTELQELFLTRVGLDIGKVWVADDGAAVAVWTTPESVEAGAVFAEIGPRMAELSGSRLAAQQQMEGLLAPHRPKEPAWFLATVGVSPDHQGKGLGSAVVLPGVEAAERAGVPAFLETSAPRNLPFYERLGFTVTADVEVPEGPRTWCMTRKPGA

SEQ ID NO: 45691 - protein, 1065 aa, synthetic construct
MALPVTALLLPLALLLHAARPACMDPDLEIRAAFLRQRNTALRTEVAELEQEVQRLENEVSQYETRYGPLGGGKGTGGGGSGGGGSGGGGSEFENVLTQSPAIMSASPGEKVTMTCRASSSVSSSYLHWYQQKSGASPKVWIYSTSNLASGVPGRFSGSGSGTSYSLTISSVEAEDAATYYCQQYSGYPITFGAGTKVEVKRLEDLKNVFPPEVAVFEPSEAEISHTQKATLVCLATGFYPDHVELSWWVNGKEVHSGVCTDPQPLKEQPALNDSRYCLSSRLRVSATFWQNPRNHFRCQVQFYGLSENDEWTQDRAKPVTQIVSAEAWGRADCDVKLVEKSFETDTNLNFQNLSVIGFRILLLKVAGFNLLMTLRLWSSRAKRSGSGATNFSLLKQAGDVEENPGPTSATMDWIWRILFLVGAATGAHSGPEVQLVESGGGLVQAGGSLRLSCAASGRTFSMGWFRQAPGKEREFVAAITYSGGSPYYADSVKGRFTISRDNAKNTVYLQMNSLKPEDTAVYYCAANPTYGSDWNAENWGQGTQVTVSSGSGGGGSGGGGSGGGGSFEQVQLKESGPVLVAPSQTLSITCTVSGFSLASYNIHWVRQPPGKGLEWLGVIWAGGSTNYNSALMSRLSISKDNSKSQVFLQMNSLQTDDTAMYYCAKRSDDYSWFAYWGQGTLVTVSASTRIQNPDPAVYQLRDSKSSDKSVCLFTDFDSQTNVSQSKDSDVYITDKCVLDMRSMDFKSNSAVAWSNKSDFACANAFNNSIIPEDTFFPSPESSCGFTSESYQQGVLSATILYEILLGKATLYAVLVSALVLMAMVKRKDSRGRAKRSGSGVKQTLNFDLLKLAGDVESNPGPSRGHMTEYKPTVRLATRDDVPRAVRTLAAAFADYPATRHTVDPDRHIERVTELQELFLTRVGLDIGKVWVADDGAAVAVWTTPESVEAGAVFAEIGPRMAELSGSRLAAQQQMEGLLAPHRPKEPAWFLATVGVSPDHQGKGLGSAVVLPGVEAAERAGVPAFLETSAPRNLPFYERLGFTVTADVEVPEGPRTWCMTRKPGA

SEQ ID NO: 45692 - protein, 948 aa, synthetic construct
MALPVTALLLPLALLLHAARPENVLTQSPAIMSASPGEKVTMTCRASSSVSSSYLHWYQQKSGASPKVWIYSTSNLASGVPGRFSGSGSGTSYSLTISSVEAEDAATYYCQQYSGYPITFGAGTKVEVKRLEDLKNVFPPEVAVFEPSEAEISHTQKATLVCLATGFYPDHVELSWWVNGKEVHSGVCTDPQPLKEQPALNDSRYCLSSRLRVSATFWQNPRNHFRCQVQFYGLSENDEWTQDRAKPVTQIVSAEAWGRADCDVKLVEKSFETDTNLNFQNLSVIGFRILLLKVAGFNLLMTLRLWSSRAKRSGSGATNFSLLKQAGDVEENPGPTSATMDWIWRILFLVGAATGAHSGPMGSWSEFYDRLHAIHHRLYALGGSEAELAAFEKEIAAFESELQAYKGKGNPEVEALRDTAAFIRTRLQAYRHNGSGGGGSGGGGSGGGGSFEQVQLKESGPVLVAPSQTLSITCTVSGFSLASYNIHWVRQPPGKGLEWLGVIWAGGSTNYNSALMSRLSISKDNSKSQVFLQMNSLQTDDTAMYYCAKRSDDYSWFAYWGQGTLVTVSASTRIQNPDPAVYQLRDSKSSDKSVCLFTDFDSQTNVSQSKDSDVYITDKCVLDMRSMDFKSNSAVAWSNKSDFACANAFNNSIIPEDTFFPSPESSCGFTSESYQQGVLSATILYEILLGKATLYAVLVSALVLMAMVKRKDSRGRAKRSGSGVKQTLNFDLLKLAGDVESNPGPSRGHMTEYKPTVRLATRDDVPRAVRTLAAAFADYPATRHTVDPDRHIERVTELQELFLTRVGLDIGKVWVADDGAAVAVWTTPESVEAGAVFAEIGPRMAELSGSRLAAQQQMEGLLAPHRPKEPAWFLATVGVSPDHQGKGLGSAVVLPGVEAAERAGVPAFLETSAPRNLPFYERLGFTVTADVEVPEGPRTWCMTRKPGA

SEQ ID NO: 45693 - protein, 1158 aa, synthetic construct
MALPVTALLLPLALLLHAARPENVLTQSPAIMSASPGEKVTMTCRASSSVSSSYLHWYQQKSGASPKVWIYSTSNLASGVPGRFSGSGSGTSYSLTISSVEAEDAATYYCQQYSGYPITFGAGTKVEVKRLEDLKNVFPPEVAVFEPSEAEISHTQKATLVCLATGFYPDHVELSWWVNGKEVHSGVCTDPQPLKEQPALNDSRYCLSSRLRVSATFWQNPRNHFRCQVQFYGLSENDEWTQDRAKPVTQIVSAEAWGRADCDVKLVEKSFETDTNLNFQNLSVIGFRILLLKVAGFNLLMTLRLWSSRAKRSGSGATNFSLLKQAGDVEENPGPTSTMDWIWRILFLVGAATGAHSLFNQEVQIPLTESYCGPCPKNWICYKNNCYQFFDESKNWYESQASCMSQNASLLKVYSKEDQDLLKLVKSAHWMGLVHIPTNGSWQWEDGSILSPNLLTIIEMQKGDCALYASSFKGYIENCSTPNTYICMQRTVSGGGGSGGGGSGGGGDLFNQEVQIPLTESYCGPCPKNWICYKNNCYQFFDESKNWYESQASCMSQNASLLKVYSKEDQDLLKLVKSAHWMGLVHIPTNGSWQWEDGSILSPNLLTIIEMQKGDCALYASSFKGYIENCSTPNTYICMQRTVGSGGGGSGGGGSGGGGSFEQVQLKESGPVLVAPSQTLSITCTVSGFSLASYNIHWVRQPPGKGLEWLGVIWAGGSTNYNSALMSRLSISKDNSKSQVFLQMNSLQTDDTAMYYCAKRSDDYSWFAYWGQGTLVTVSASTRIQNPDPAVYQLRDSKSSDKSVCLFTDFDSQTNVSQSKDSDVYITDKCVLDMRSMDFKSNSAVAWSNKSDFACANAFNNSIIPEDTFFPSPESSCGFTSESYQQGVLSATILYEILLGKATLYAVLVSALVLMAMVKRKDSRGRAKRSGSGVKQTLNFDLLKLAGDVESNPGPSRGHMTEYKPTVRLATRDDVPRAVRTLAAAFADYPATRHTVDPDRHIERVTELQELFLTRVGLDIGKVWVADDGAAVAVWTTPESVEAGAVFAEIGPRMAELSGSRLAAQQQMEGLLAPHRPKEPAWFLATVGVSPDHQGKGLGSAVVLPGVEAAERAGVPAFLETSAPRNLPFYERLGFTVTADVEVPEGPRTWCMTRKPGA

SEQ ID NO: 45694 - protein, 621 aa, synthetic construct; identical to SEQ ID NO: 45651

SEQ ID NO: 45695 - protein, 625 aa, synthetic construct
MALPVTALLLPLALLLHAARPENVLTQSPAIMSASPGEKVTMTCRASSSVSSSYLHWYQQKSGASPKVWIYSTSNLASGVPGRFSGSGSGTSYSLTISSVEAEDAATYYCQQYSGYPITFGAGTKVEVKRLEIQNPDPAVYQLRDSKSSDKSVCLFTDFDSQTNVSQSKDSDVYITDKCVLDMRSMDFKSNSAVAWSNKSDFACANAFNNSIIPEDTFFPSPESSCDVKLVEKSFETDTNLNFQILYEILLGKATLYAVLVSALVLMAMVKRKDSRGRAKRSGSGVKQTLNFDLLKLAGDVESNPGPTSMDWIWRILFLVGAATGAHSFEQVQLKESGPVLVAPSQTLSITCTVSGFSLASYNIHWVRQPPGKGLEWLGVIWAGGSTNYNSALMSRLSISKDNSKSQVFLQMNSLQTDDTAMYYCAKRSDDYSWFAYWGQGTLVTVSASTREDLKNVFPPEVAVFEPSEAEISHTQKATLVCLATGFYPDHVELSWWVNGKEVHSGVCTDPQPLKEQPALNDSRYCLSSRLRVSATFWQNPRNHFRCQVQFYGLSENDEWTQDRAKPVTQIVSAEAWGRADCGFTSESYQQGVLSATNLSVIGFRILLLKVAGFNLLMTLRLWSS

SEQ ID NO: 45696 - protein, 756 aa, synthetic construct
MALPVTALLLPLALLLHAARPEVQLVESGGGLVQPGGSLRLSCAASGFSFSDFWMSWVRQAPGKGLEWVATISQAGSEKDYVDSVKGRFTISRDNAKKSLYLQMNSLRAEDTAVYYCASGVYSFDYRGQGTLVTVSSGTGGGGSGGGGSGGGGSEFENVLTQSPAIMSASPGEKVTMTCRASSSVSSSYLHWYQQKSGASPKVWIYSTSNLASGVPGRFSGSGSGTSYSLTISSVEAEDAATYYCQQYSGYPITFGAGTKVEVKRLEDLKNVFPPEVAVFEPSEAEISHTQKATLVCLATGFYPDHVELSWWVNGKEVHSGVCTDPQPLKEQPALNDSRYCLSSRLRVSATFWQNPRNHFRCQVQFYGLSENDEWTQDRAKPVTQIVSAEAWGRADCGFTSESYQQGVLSATNLSVIGFRILLLKVAGFNLLMTLRLWSSRAKRSGSGATNFSLLKQAGDVEENPGPTSMDWIWRILFLVGAATGAHSFEQVQLKESGPVLVAPSQTLSITCTVSGFSLASYNIHWVRQPPGKGLEWLGVIWAGGSTNYNSALMSRLSISKDNSKSQVFLQMNSLQTDDTAMYYCAKRSDDYSWFAYWGQGTLVTVSASTRIQNPDPAVYQLRDSKSSDKSVCLFTDFDSQTNVSQSKDSDVYITDKCVLDMRSMDFKSNSAVAWSNKSDFACANAFNNSIIPEDTFFPSPESSCDVKLVEKSFETDTNLNFQILYEILLGKATLYAVLVSALVLMAMVKRKDSRG

SEQ ID NO: 45697 - protein, 760 aa, synthetic construct
MALPVTALLLPLALLLHAARPEVQLVESGGGLVQPGGSLRLSCAASGFSFSDFWMSWVRQAPGKGLEWVATISQAGSEKDYVDSVKGRFTISRDNAKKSLYLQMNSLRAEDTAVYYCASGVYSFDYRGQGTLVTVSSGTGGGGSGGGGSGGGGSEFENVLTQSPAIMSASPGEKVTMTCRASSSVSSSYLHWYQQKSGASPKVWIYSTSNLASGVPGRFSGSGSGTSYSLTISSVEAEDAATYYCQQYSGYPITFGAGTKVEVKRLEIQNPDPAVYQLRDSKSSDKSVCLFTDFDSQTNVSQSKDSDVYITDKCVLDMRSMDFKSNSAVAWSNKSDFACANAFNNSIIPEDTFFPSPESSCDVKLVEKSFETDTNLNFQILYEILLGKATLYAVLVSALVLMAMVKRKDSRGRAKRSGSGVKQTLNFDLLKLAGDVESNPGPTSMDWIWRILFLVGAATGAHSFEQVQLKESGPVLVAPSQTLSITCTVSGFSLASYNIHWVRQPPGKGLEWLGVIWAGGSTNYNSALMSRLSISKDNSKSQVFLQMNSLQTDDTAMYYCAKRSDDYSWFAYWGQGTLVTVSASTREDLKNVFPPEVAVFEPSEAEISHTQKATLVCLATGFYPDHVELSWWVNGKEVHSGVCTDPQPLKEQPALNDSRYCLSSRLRVSATFWQNPRNHFRCQVQFYGLSENDEWTQDRAKPVTQIVSAEAWGRADCGFTSESYQQGVLSATNLSVIGFRILLLKVAGFNLLMTLRLWSS

SEQ ID NO: 45698 - protein, 893 aa, synthetic construct
MALPVTALLLPLALLLHAARPEVQLVESGGGLVQPGGSLRLSCAASGFSFSDFWMSWVRQAPGKGLEWVATISQAGSEKDYVDSVKGRFTISRDNAKKSLYLQMNSLRAEDTAVYYCASGVYSFDYRGQGTLVTVSSGTGGGGSGGGGSGGGGSEFENVLTQSPAIMSASPGEKVTMTCRASSSVSSSYLHWYQQKSGASPKVWIYSTSNLASGVPGRFSGSGSGTSYSLTISSVEAEDAATYYCQQYSGYPITFGAGTKVEVKRLEDLKNVFPPEVAVFEPSEAEISHTQKATLVCLATGFYPDHVELSWWVNGKEVHSGVCTDPQPLKEQPALNDSRYCLSSRLRVSATFWQNPRNHFRCQVQFYGLSENDEWTQDRAKPVTQIVSAEAWGRADCGFTSESYQQGVLSATNLSVIGFRILLLKVAGFNLLMTLRLWSSRAKRSGSGATNFSLLKQAGDVEENPGPTSMDWIWRILFLVGAATGAHSGPQLQLQESGPGLVKPSETLSLTCTVSGDSISSGDYYWGWIRQPPGKGLEWIGHIYYSGVTYYNPSLKSRVTISVDTSRNQFSLKLSSVTAADTAVYYCTREDSSNWRSRGQGTLVTVSSGSGGGGSGGGGSGGGGSFEQVQLKESGPVLVAPSQTLSITCTVSGFSLASYNIHWVRQPPGKGLEWLGVIWAGGSTNYNSALMSRLSISKDNSKSQVFLQMNSLQTDDTAMYYCAKRSDDYSWFAYWGQGTLVTVSASTRIQNPDPAVYQLRDSKSSDKSVCLFTDFDSQTNVSQSKDSDVYITDKCVLDMRSMDFKSNSAVAWSNKSDFACANAFNNSIIPEDTFFPSPESSCDVKLVEKSFETDTNLNFQILYEILLGKATLYAVLVSALVLMAMVKRKDSRG

SEQ ID NO: 45699 - protein, 897 aa, synthetic construct
MALPVTALLLPLALLLHAARPEVQLVESGGGLVQPGGSLRLSCAASGFSFSDFWMSWVRQAPGKGLEWVATISQAGSEKDYVDSVKGRFTISRDNAKKSLYLQMNSLRAEDTAVYYCASGVYSFDYRGQGTLVTVSSGTGGGGSGGGGSGGGGSEFENVLTQSPAIMSASPGEKVTMTCRASSSVSSSYLHWYQQKSGASPKVWIYSTSNLASGVPGRFSGSGSGTSYSLTISSVEAEDAATYYCQQYSGYPITFGAGTKVEVKRLEIQNPDPAVYQLRDSKSSDKSVCLFTDFDSQTNVSQSKDSDVYITDKCVLDMRSMDFKSNSAVAWSNKSDFACANAFNNSIIPEDTFFPSPESSCDVKLVEKSFETDTNLNFQILYEILLGKATLYAVLVSALVLMAMVKRKDSRGRAKRSGSGVKQTLNFDLLKLAGDVESNPGPTSMDWIWRILFLVGAATGAHSGPQLQLQESGPGLVKPSETLSLTCTVSGDSISSGDYYWGWIRQPPGKGLEWIGHIYYSGVTYYNPSLKSRVTISVDTSRNQFSLKLSSVTAADTAVYYCTREDSSNWRSRGQGTLVTVSSGSGGGGSGGGGSGGGGSFEQVQLKESGPVLVAPSQTLSITCTVSGFSLASYNIHWVRQPPGKGLEWLGVIWAGGSTNYNSALMSRLSISKDNSKSQVFLQMNSLQTDDTAMYYCAKRSDDYSWFAYWGQGTLVTVSASTREDLKNVFPPEVAVFEPSEAEISHTQKATLVCLATGFYPDHVELSWWVNGKEVHSGVCTDPQPLKEQPALNDSRYCLSSRLRVSATFWQNPRNHFRCQVQFYGLSENDEWTQDRAKPVTQIVSAEAWGRADCGFTSESYQQGVLSATNLSVIGFRILLLKVAGFNLLMTLRLWSS

SEQ ID NO: 45700 - protein, 725 aa, synthetic construct
MALPVTALLLPLALLLHAARPENVLTQSPAIMSASPGEKVTMTCRASSSVSSSYLHWYQQKSGASPKVWIYSTSNLASGVPGRFSGSGSGTSYSLTISSVEAEDAATYYCQQYSGYPITFGAGTKVEVKRLEDLKNVFPPEVAVFEPSEAEISHTQKATLVCLATGFYPDHVELSWWVNGKEVHSGVCTDPQPLKEQPALNDSRYCLSSRLRVSATFWQNPRNHFRCQVQFYGLSENDEWTQDRAKPVTQIVSAEAWGRADDVIKIHWQEKKSNTILGSQEGNTMKTNDTYMKFSWLTVPEKSLDKEHRCIVRHENNKNGVDQEIIFPPIKTDVITMDPKDNCSKDANDTLLLQLTNTSAYYMYLLLLLKSVVYFAIITCCLLMAMVKRKDSRGRAKRSGSGATNFSLLKQAGDVEENPGPTSMDWIWRILFLVGAATGAHSFEQVQLKESGPVLVAPSQTLSITCTVSGFSLASYNIHWVRQPPGKGLEWLGVIWAGGSTNYNSALMSRLSISKDNSKSQVFLQMNSLQTDDTAMYYCAKRSDDYSWFAYWGQGTLVTVSASTRIQNPDPAVYQLRDSKSSDKSVCLFTDFDSQTNVSQSKDSDVYITDKCVLDMRSMDFKSNSAVAWSNKSDFACANAFNNSIIPEDTFFPSPESSDSTDHVKPKETENTKQPSKSCHKPKAIVHTEKVNMMSLTVLGLRMLFAKTVAVNFLLTAKLFFLLTA

SEQ ID NO: 45701 - protein, 729 aa, synthetic construct
MALPVTALLLPLALLLHAARPENVLTQSPAIMSASPGEKVTMTCRASSSVSSSYLHWYQQKSGASPKVWIYSTSNLASGVPGRFSGSGSGTSYSLTISSVEAEDAATYYCQQYSGYPITFGAGTKVEVKRLEIQNPDPAVYQLRDSKSSDKSVCLFTDFDSQTNVSQSKDSDVYITDKCVLDMRSMDFKSNSAVAWSNKSDFACANAFNNSIIPEDTFFPSPESSDSTDHVKPKETENTKQPSKSCHKPKAIVHTEKVNMMSLTVLGLRMLFAKTVAVNFLLTAKLFFLLTARAKRSGSGVKQTLNFDLLKLAGDVESNPGPTSMDWIWRILFLVGAATGAHSFEQVQLKESGPVLVAPSQTLSITCTVSGFSLASYNIHWVRQPPGKGLEWLGVIWAGGSTNYNSALMSRLSISKDNSKSQVFLQMNSLQTDDTAMYYCAKRSDDYSWFAYWGQGTLVTVSASTREDLKNVFPPEVAVFEPSEAEISHTQKATLVCLATGFYPDHVELSWWVNGKEVHSGVCTDPQPLKEQPALNDSRYCLSSRLRVSATFWQNPRNHFRCQVQFYGLSENDEWTQDRAKPVTQIVSAEAWGRADDVIKIHWQEKKSNTILGSQEGNTMKTNDTYMKFSWLTVPEKSLDKEHRCIVRHENNKNGVDQEIIFPPIKTDVITMDPKDNCSKDANDTLLLQLTNTSAYYMYLLLLLKSVVYFAIITCCLLMAMVKRKDSRG

SEQ ID NO: 45702 - protein, 860 aa, synthetic construct
MALPVTALLLPLALLLHAARPEVQLVESGGGLVQPGGSLRLSCAASGFSFSDFWMSWVRQAPGKGLEWVATISQAGSEKDYVDSVKGRFTISRDNAKKSLYLQMNSLRAEDTAVYYCASGVYSFDYRGQGTLVTVSSGTGGGGSGGGGSGGGGSEFENVLTQSPAIMSASPGEKVTMTCRASSSVSSSYLHWYQQKSGASPKVWIYSTSNLASGVPGRFSGSGSGTSYSLTISSVEAEDAATYYCQQYSGYPITFGAGTKVEVKRLEDLKNVFPPEVAVFEPSEAEISHTQKATLVCLATGFYPDHVELSWWVNGKEVHSGVCTDPQPLKEQPALNDSRYCLSSRLRVSATFWQNPRNHFRCQVQFYGLSENDEWTQDRAKPVTQIVSAEAWGRADDVIKIHWQEKKSNTILGSQEGNTMKTNDTYMKFSWLTVPEKSLDKEHRCIVRHENNKNGVDQEIIFPPIKTDVITMDPKDNCSKDANDTLLLQLTNTSAYYMYLLLLLKSVVYFAIITCCLLMAMVKRKDSRGRAKRSGSGATNFSLLKQAGDVEENPGPTSMDWIWRILFLVGAATGAHSFEQVQLKESGPVLVAPSQTLSITCTVSGFSLASYNIHWVRQPPGKGLEWLGVIWAGGSTNYNSALMSRLSISKDNSKSQVFLQMNSLQTDDTAMYYCAKRSDDYSWFAYWGQGTLVTVSASTRIQNPDPAVYQLRDSKSSDKSVCLFTDFDSQTNVSQSKDSDVYITDKCVLDMRSMDFKSNSAVAWSNKSDFACANAFNNSIIPEDTFFPSPESSDSTDHVKPKETENTKQPSKSCHKPKAIVHTEKVNMMSLTVLGLRMLFAKTVAVNFLLTAKLFFLLTA

SEQ ID NO: 45703 - protein, 864 aa, synthetic construct
MALPVTALLLPLALLLHAARPEVQLVESGGGLVQPGGSLRLSCAASGFSFSDFWMSWVRQAPGKGLEWVATISQAGSEKDYVDSVKGRFTISRDNAKKSLYLQMNSLRAEDTAVYYCASGVYSFDYRGQGTLVTVSSGTGGGGSGGGGSGGGGSEFENVLTQSPAIMSASPGEKVTMTCRASSSVSSSYLHWYQQKSGASPKVWIYSTSNLASGVPGRFSGSGSGTSYSLTISSVEAEDAATYYCQQYSGYPITFGAGTKVEVKRLEIQNPDPAVYQLRDSKSSDKSVCLFTDFDSQTNVSQSKDSDVYITDKCVLDMRSMDFKSNSAVAWSNKSDFACANAFNNSIIPEDTFFPSPESSDSTDHVKPKETENTKQPSKSCHKPKAIVHTEKVNMMSLTVLGLRMLFAKTVAVNFLLTAKLFFLLTARAKRSGSGVKQTLNFDLLKLAGDVESNPGPTSMDWIWRILFLVGAATGAHSFEQVQLKESGPVLVAPSQTLSITCTVSGFSLASYNIHWVRQPPGKGLEWLGVIWAGGSTNYNSALMSRLSISKDNSKSQVFLQMNSLQTDDTAMYYCAKRSDDYSWFAYWGQGTLVTVSASTREDLKNVFPPEVAVFEPSEAEISHTQKATLVCLATGFYPDHVELSWWVNGKEVHSGVCTDPQPLKEQPALNDSRYCLSSRLRVSATFWQNPRNHFRCQVQFYGLSENDEWTQDRAKPVTQIVSAEAWGRADDVIKIHWQEKKSNTILGSQEGNTMKTNDTYMKFSWLTVPEKSLDKEHRCIVRHENNKNGVDQEIIFPPIKTDVITMDPKDNCSKDANDTLLLQLTNTSAYYMYLLLLLKSVVYFAIITCCLLMAMVKRKDSRG

SEQ ID NO: 45704 - protein, 997 aa, synthetic construct
MALPVTALLLPLALLLHAARPEVQLVESGGGLVQPGGSLRLSCAASGFSFSDFWMSWVRQAPGKGLEWVATISQAGSEKDYVDSVKGRFTISRDNAKKSLYLQMNSLRAEDTAVYYCASGVYSFDYRGQGTLVTVSSGTGGGGSGGGGSGGGGSEFENVLTQSPAIMSASPGEKVTMTCRASSSVSSSYLHWYQQKSGASPKVWIYSTSNLASGVPGRFSGSGSGTSYSLTISSVEAEDAATYYCQQYSGYPITFGAGTKVEVKRLEDLKNVFPPEVAVFEPSEAEISHTQKATLVCLATGFYPDHVELSWWVNGKEVHSGVCTDPQPLKEQPALNDSRYCLSSRLRVSATFWQNPRNHFRCQVQFYGLSENDEWTQDRAKPVTQIVSAEAWGRADDVIKIHWQEKKSNTILGSQEGNTMKTNDTYMKFSWLTVPEKSLDKEHRCIVRHENNKNGVDQEIIFPPIKTDVITMDPKDNCSKDANDTLLLQLTNTSAYYMYLLLLLKSVVYFAIITCCLLMAMVKRKDSRGRAKRSGSGATNFSLLKQAGDVEENPGPTSMDWIWRILFLVGAATGAHSGPQLQLQESGPGLVKPSETLSLTCTVSGDSISSGDYYWGWIRQPPGKGLEWIGHIYYSGVTYYNPSLKSRVTISVDTSRNQFSLKLSSVTAADTAVYYCTREDSSNWRSRGQGTLVTVSSGSGGGGSGGGGSGGGGSFEQVQLKESGPVLVAPSQTLSITCTVSGFSLASYNIHWVRQPPGKGLEWLGVIWAGGSTNYNSALMSRLSISKDNSKSQVFLQMNSLQTDDTAMYYCAKRSDDYSWFAYWGQGTLVTVSASTRIQNPDPAVYQLRDSKSSDKSVCLFTDFDSQTNVSQSKDSDVYITDKCVLDMRSMDFKSNSAVAWSNKSDFACANAFNNSIIPEDTFFPSPESSDSTDHVKPKETENTKQPSKSCHKPKAIVHTEKVNMMSLTVLGLRMLFAKTVAVNFLLTAKLFFLLTA

SEQ ID NO: 45705 - protein, 1001 aa, synthetic construct
MALPVTALLLPLALLLHAARPEVQLVESGGGLVQPGGSLRLSCAASGFSFSDFWMSWVRQAPGKGLEWVATISQAGSEKDYVDSVKGRFTISRDNAKKSLYLQMNSLRAEDTAVYYCASGVYSFDYRGQGTLVTVSSGTGGGGSGGGGSGGGGSEFENVLTQSPAIMSASPGEKVTMTCRASSSVSSSYLHWYQQKSGASPKVWIYSTSNLASGVPGRFSGSGSGTSYSLTISSVEAEDAATYYCQQYSGYPITFGAGTKVEVKRLEIQNPDPAVYQLRDSKSSDKSVCLFTDFDSQTNVSQSKDSDVYITDKCVLDMRSMDFKSNSAVAWSNKSDFACANAFNNSIIPEDTFFPSPESSDSTDHVKPKETENTKQPSKSCHKPKAIVHTEKVNMMSLTVLGLRMLFAKTVAVNFLLTAKLFFLLTARAKRSGSGVKQTLNFDLLKLAGDVESNPGPTSMDWIWRILFLVGAATGAHSGPQLQLQESGPGLVKPSETLSLTCTVSGDSISSGDYYWGWIRQPPGKGLEWIGHIYYSGVTYYNPSLKSRVTISVDTSRNQFSLKLSSVTAADTAVYYCTREDSSNWRSRGQGTLVTVSSGSGGGGSGGGGSGGGGSFEQVQLKESGPVLVAPSQTLSITCTVSGFSLASYNIHWVRQPPGKGLEWLGVIWAGGSTNYNSALMSRLSISKDNSKSQVFLQMNSLQTDDTAMYYCAKRSDDYSWFAYWGQGTLVTVSASTREDLKNVFPPEVAVFEPSEAEISHTQKATLVCLATGFYPDHVELSWWVNGKEVHSGVCTDPQPLKEQPALNDSRYCLSSRLRVSATFWQNPRNHFRCQVQFYGLSENDEWTQDRAKPVTQIVSAEAWGRADDVIKIHWQEKKSNTILGSQEGNTMKTNDTYMKFSWLTVPEKSLDKEHRCIVRHENNKNGVDQEIIFPPIKTDVITMDPKDNCSKDANDTLLLQLTNTSAYYMYLLLLLKSVVYFAIITCCLLMAMVKRKDSRG

SEQ ID NO: 45706 - protein, 723 aa, synthetic construct
MALPVTALLLPLALLLHAARPENVLTQSPAIMSASPGEKVTMTCRASSSVSSSYLHWYQQKSGASPKVWIYSTSNLASGVPGRFSGSGSGTSYSLTISSVEAEDAATYYCQQYSGYPITFGAGTKVEVKRLEDLKNVFPPEVAVFEPSEAEISHTQKATLVCLATGFYPDHVELSWWVNGKEVHSGVCTDPQPLKEQPALNDSRYCLSSRLRVSATFWQNPRNHFRCQVQFYGLSENDEWTQDRAKPVTQIVSAEAWGRADDVIKIHWQEKKSNTILGSQEGNTMKTNDTYMKFSWLTVPEKSLDKEHRCIVRHENNKNGVDQEIIFPPIKTDVITMDPKDNCSKDANDTLLLQLTNTSAYYMYLLLLLKSVVYFAIITCCLLRRTAFCCNGEKSRAKRSGSGATNFSLLKQAGDVEENPGPTSMDWIWRILFLVGAATGAHSFEQVQLKESGPVLVAPSQTLSITCTVSGFSLASYNIHWVRQPPGKGLEWLGVIWAGGSTNYNSALMSRLSISKDNSKSQVFLQMNSLQTDDTAMYYCAKRSDDYSWFAYWGQGTLVTVSASTRIQNPDPAVYQLRDSKSSDKSVCLFTDFDSQTNVSQSKDSDVYITDKCVLDMRSMDFKSNSAVAWSNKSDFACANAFNNSIIPEDTFFPSPESSDSTDHVKPKETENTKQPSKSCHKPKAIVHTEKVNMMSLTVLGLRMLFAKTVAVNFLLTAKLFFL

SEQ ID NO: 45707 - protein, 727 aa, synthetic construct
MALPVTALLLPLALLLHAARPENVLTQSPAIMSASPGEKVTMTCRASSSVSSSYLHWYQQKSGASPKVWIYSTSNLASGVPGRFSGSGSGTSYSLTISSVEAEDAATYYCQQYSGYPITFGAGTKVEVKRLEIQNPDPAVYQLRDSKSSDKSVCLFTDFDSQTNVSQSKDSDVYITDKCVLDMRSMDFKSNSAVAWSNKSDFACANAFNNSIIPEDTFFPSPESSDSTDHVKPKETENTKQPSKSCHKPKAIVHTEKVNMMSLTVLGLRMLFAKTVAVNFLLTAKLFFLRAKRSGSGVKQTLNFDLLKLAGDVESNPGPTSMDWIWRILFLVGAATGAHSFEQVQLKESGPVLVAPSQTLSITCTVSGFSLASYNIHWVRQPPGKGLEWLGVIWAGGSTNYNSALMSRLSISKDNSKSQVFLQMNSLQTDDTAMYYCAKRSDDYSWFAYWGQGTLVTVSASTREDLKNVFPPEVAVFEPSEAEISHTQKATLVCLATGFYPDHVELSWWVNGKEVHSGVCTDPQPLKEQPALNDSRYCLSSRLRVSATFWQNPRNHFRCQVQFYGLSENDEWTQDRAKPVTQIVSAEAWGRADDVIKIHWQEKKSNTILGSQEGNTMKTNDTYMKFSWLTVPEKSLDKEHRCIVRHENNKNGVDQEIIFPPIKTDVITMDPKDNCSKDANDTLLLQLTNTSAYYMYLLLLLKSVVYFAIITCCLLRRTAFCCNGEKS

SEQ ID NO: 45708 - protein, 858 aa, synthetic construct
MALPVTALLLPLALLLHAARPEVQLVESGGGLVQPGGSLRLSCAASGFSFSDFWMSWVRQAPGKGLEWVATISQAGSEKDYVDSVKGRFTISRDNAKKSLYLQMNSLRAEDTAVYYCASGVYSFDYRGQGTLVTVSSGTGGGGSGGGGSGGGGSEFENVLTQSPAIMSASPGEKVTMTCRASSSVSSSYLHWYQQKSGASPKVWIYSTSNLASGVPGRFSGSGSGTSYSLTISSVEAEDAATYYCQQYSGYPITFGAGTKVEVKRLEDLKNVFPPEVAVFEPSEAEISHTQKATLVCLATGFYPDHVELSWWVNGKEVHSGVCTDPQPLKEQPALNDSRYCLSSRLRVSATFWQNPRNHFRCQVQFYGLSENDEWTQDRAKPVTQIVSAEAWGRADDVIKIHWQEKKSNTILGSQEGNTMKTNDTYMKFSWLTVPEKSLDKEHRCIVRHENNKNGVDQEIIFPPIKTDVITMDPKDNCSKDANDTLLLQLTNTSAYYMYLLLLLKSVVYFAIITCCLLRRTAFCCNGEKSRAKRSGSGATNFSLLKQAGDVEENPGPTSMDWIWRILFLVGAATGAHSFEQVQLKESGPVLVAPSQTLSITCTVSGFSLASYNIHWVRQPPGKGLEWLGVIWAGGSTNYNSALMSRLSISKDNSKSQVFLQMNSLQTDDTAMYYCAKRSDDYSWFAYWGQGTLVTVSASTRIQNPDPAVYQLRDSKSSDKSVCLFTDFDSQTNVSQSKDSDVYITDKCVLDMRSMDFKSNSAVAWSNKSDFACANAFNNSIIPEDTFFPSPESSDSTDHVKPKETENTKQPSKSCHKPKAIVHTEKVNMMSLTVLGLRMLFAKTVAVNFLLTAKLFFL

SEQ ID NO: 45709 - protein, 995 aa, synthetic construct
MALPVTALLLPLALLLHAARPEVQLVESGGGLVQPGGSLRLSCAASGFSFSDFWMSWVRQAPGKGLEWVATISQAGSEKDYVDSVKGRFTISRDNAKKSLYLQMNSLRAEDTAVYYCASGVYSFDYRGQGTLVTVSSGTGGGGSGGGGSGGGGSEFENVLTQSPAIMSASPGEKVTMTCRASSSVSSSYLHWYQQKSGASPKVWIYSTSNLASGVPGRFSGSGSGTSYSLTISSVEAEDAATYYCQQYSGYPITFGAGTKVEVKRLEDLKNVFPPEVAVFEPSEAEISHTQKATLVCLATGFYPDHVELSWWVNGKEVHSGVCTDPQPLKEQPALNDSRYCLSSRLRVSATFWQNPRNHFRCQVQFYGLSENDEWTQDRAKPVTQIVSAEAWGRADDVIKIHWQEKKSNTILGSQEGNTMKTNDTYMKFSWLTVPEKSLDKEHRCIVRHENNKNGVDQEIIFPPIKTDVITMDPKDNCSKDANDTLLLQLTNTSAYYMYLLLLLKSVVYFAIITCCLLRRTAFCCNGEKSRAKRSGSGATNFSLLKQAGDVEENPGPTSMDWIWRILFLVGAATGAHSGPQLQLQESGPGLVKPSETLSLTCTVSGDSISSGDYYWGWIRQPPGKGLEWIGHIYYSGVTYYNPSLKSRVTISVDTSRNQFSLKLSSVTAADTAVYYCTREDSSNWRSRGQGTLVTVSSGSGGGGSGGGGSGGGGSFEQVQLKESGPVLVAPSQTLSITCTVSGFSLASYNIHWVRQPPGKGLEWLGVIWAGGSTNYNSALMSRLSISKDNSKSQVFLQMNSLQTDDTAMYYCAKRSDDYSWFAYWGQGTLVTVSASTRIQNPDPAVYQLRDSKSSDKSVCLFTDFDSQTNVSQSKDSDVYITDKCVLDMRSMDFKSNSAVAWSNKSDFACANAFNNSIIPEDTFFPSPESSDSTDHVKPKETENTKQPSKSCHKPKAIVHTEKVNMMSLTVLGLRMLFAKTVAVNFLLTAKLFFL

SEQ ID NO: 45710 - protein, 621 aa, synthetic construct
MALPVTALLLPLALLLHAARPENVLTQSPAIMSASPGEKVTMTCRASSSVSSSYLHWYQQKSGASPKVWIYSTSNLASGVPGRFSGSGSGTSYSLTISSVEAEDAATYYCQQYSGYPITFGAGTKVEVKRLEDLKNVFPPEVAVFEPSEAEISHTQKATLVCLATGFYPDHVELSWWVNGKEVHSGVSTDPQPLKEQPALNDSRYCLSSRLRVSATFWQNPRNHFRCQVQFYGLSENDEWTQDRAKPVTQIVSAEAWGRADCDVKLVEKSFETDTNLNFQNLSVIGFRILLLKVAGFNLLMTLRLWSSRAKRSGSGATNFSLLKQAGDVEENPGPTSMDWIWRILFLVGAATGAHSFEQVQLKESGPVLVAPSQTLSITCTVSGFSLASYNIHWVRQPPGKGLEWLGVIWAGGSTNYNSALMSRLSISKDNSKSQVFLQMNSLQTDDTAMYYCAKRSDDYSWFAYWGQGTLVTVSASTRIQNPDPAVYQLRDSKSSDKSVCLFTDFDSQTNVSQSKDSDVYITDKTVLDMRSMDFKSNSAVAWSNKSDFACANAFNNSIIPEDTFFPSPESSCGFTSESYQQGVLSATILYEILLGKATLYAVLVSALVLMAMVKRKDSRG

SEQ ID NO: 45711 - protein, 621 aa, synthetic construct
MALPVTALLLPLALLLHAARPENVLTQSPAIMSASPGEKVTMTCRASSSVSSSYLHWYQQKSGASPKVWIYSTSNLASGVPGRFSGSGSGTSYSLTISSVEAEDAATYYCQQYSGYPITFGAGTKVEVKRLEDLKNVFPPEVAVFEPSEAEISHTQKATLVCLATGFYPDHVELSWWVNGKEVHSGVSTDPQPLKEQPALNDSRYCLSSRLRVSATFWQNPRNHFRCQVQFYGLSENDEWTQDRAKPVTQIVSAEAWGRADCGFTSESYQQGVLSATNLSVIGFRILLLKVAGFNLLMTLRLWSSRAKRSGSGATNFSLLKQAGDVEENPGPTSMDWIWRILFLVGAATGAHSFEQVQLKESGPVLVAPSQTLSITCTVSGFSLASYNIHWVRQPPGKGLEWLGVIWAGGSTNYNSALMSRLSISKDNSKSQVFLQMNSLQTDDTAMYYCAKRSDDYSWFAYWGQGTLVTVSASTRIQNPDPAVYQLRDSKSSDKSVCLFTDFDSQTNVSQSKDSDVYITDKTVLDMRSMDFKSNSAVAWSNKSDFACANAFNNSIIPEDTFFPSPESSCDVKLVEKSFETDTNLNFQILYEILLGKATLYAVLVSALVLMAMVKRKDSRG

SEQ ID NO: 45712 - protein, 725 aa, synthetic construct
MALPVTALLLPLALLLHAARPENVLTQSPAIMSASPGEKVTMTCRASSSVSSSYLHWYQQKSGASPKVWIYSTSNLASGVPGRFSGSGSGTSYSLTISSVEAEDAATYYCQQYSGYPITFGAGTKVEVKRLEDLKNVFPPEVAVFEPSEAEISHTQKATLVCLATGFYPDHVELSWWVNGKEVHSGVSTDPQPLKEQPALNDSRYCLSSRLRVSATFWQNPRNHFRCQVQFYGLSENDEWTQDRAKPVTQIVSAEAWGRADDVIKIHWQEKKSNTILGSQEGNTMKTNDTYMKFSWLTVPEKSLDKEHRCIVRHENNKNGVDQEIIFPPIKTDVITMDPKDNCSKDANDTLLLQLTNTSAYYMYLLLLLKSVVYFAIITCCLLMAMVKRKDSRGRAKRSGSGATNFSLLKQAGDVEENPGPTSMDWIWRILFLVGAATGAHSFEQVQLKESGPVLVAPSQTLSITCTVSGFSLASYNIHWVRQPPGKGLEWLGVIWAGGSTNYNSALMSRLSISKDNSKSQVFLQMNSLQTDDTAMYYCAKRSDDYSWFAYWGQGTLVTVSASTRIQNPDPAVYQLRDSKSSDKSVCLFTDFDSQTNVSQSKDSDVYITDKTVLDMRSMDFKSNSAVAWSNKSDFACANAFNNSIIPEDTFFPSPESSDSTDHVKPKETENTKQPSKSCHKPKAIVHTEKVNMMSLTVLGLRMLFAKTVAVNFLLTAKLFFLLTA

SEQ ID NO: 45713 - protein, 723 aa, synthetic construct
MALPVTALLLPLALLLHAARPENVLTQSPAIMSASPGEKVTMTCRASSSVSSSYLHWYQQKSGASPKVWIYSTSNLASGVPGRFSGSGSGTSYSLTISSVEAEDAATYYCQQYSGYPITFGAGTKVEVKRLEDLKNVFPPEVAVFEPSEAEISHTQKATLVCLATGFYPDHVELSWWVNGKEVHSGVSTDPQPLKEQPALNDSRYCLSSRLRVSATFWQNPRNHFRCQVQFYGLSENDEWTQDRAKPVTQIVSAEAWGRADDVIKIHWQEKKSNTILGSQEGNTMKTNDTYMKFSWLTVPEKSLDKEHRCIVRHENNKNGVDQEIIFPPIKTDVITMDPKDNCSKDANDTLLLQLTNTSAYYMYLLLLLKSVVYFAIITCCLLRRTAFCCNGEKSRAKRSGSGATNFSLLKQAGDVEENPGPTSMDWIWRILFLVGAATGAHSFEQVQLKESGPVLVAPSQTLSITCTVSGFSLASYNIHWVRQPPGKGLEWLGVIWAGGSTNYNSALMSRLSISKDNSKSQVFLQMNSLQTDDTAMYYCAKRSDDYSWFAYWGQGTLVTVSASTRIQNPDPAVYQLRDSKSSDKSVCLFTDFDSQTNVSQSKDSDVYITDKTVLDMRSMDFKSNSAVAWSNKSDFACANAFNNSIIPEDTFFPSPESSDSTDHVKPKETENTKQPSKSCHKPKAIVHTEKVNMMSLTVLGLRMLFAKTVAVNFLLTAKLFFL

SEQ ID NO: 45714 - protein, 866 aa, synthetic construct
MALPVTALLLPLALLLHAARPLEEDLKNVFPPEVAVFEPSEAEISHTQKATLVCLATGFYPDHVELSWWVNGKEVHSGVCTDPQPLKEQPALNDSRYCLSSRLRVSATFWQNPRNHFRCQVQFYGLSENDEWTQDRAKPVTQIVSAEAWGRADCGFTSESYQQGVLSATNLSVIGFRILLLKVAGFNLLMTLRLWSSRAKRSGSGATNFSLLKQAGDVEENPGPTSMALPVTALLLPLALLLHAARPENVLTQSPAIMSASPGEKVTMTCRASSSVSSSYLHWYQQKSGASPKVWIYSTSNLASGVPGRFSGSGSGTSYSLTISSVEAEDAATYYCQQYSGYPITFGAGTKVEVKRGGGGSGGGGSGGGGSQVQLKESGPVLVAPSQTLSITCTVSGFSLASYNIHWVRQPPGKGLEWLGVIWAGGSTNYNSALMSRLSISKDNSKSQVFLQMNSLQTDDTAMYYCAKRSDDYSWFAYWGQGTLVTVSASTRIQNPDPAVYQLRDSKSSDKSVCLFTDFDSQTNVSQSKDSDVYITDKCVLDMRSMDFKSNSAVAWSNKSDFACANAFNNSIIPEDTFFPSPESSCDVKLVEKSFETDTNLNFQILYEVIGFRILLLKVAGFNLLMTLRLWSSRAKRSGSGVKQTLNFDLLKLAGDVESNPGPSRGHMTEYKPTVRLATRDDVPRAVRTLAAAFADYPATRHTVDPDRHIERVTELQELFLTRVGLDIGKVWVADDGAAVAVWTTPESVEAGAVFAEIGPRMAELSGSRLAAQQQMEGLLAPHRPKEPAWFLATVGVSPDHQGKGLGSAVVLPGVEAAERAGVPAFLETSAPRNLPFYERLGFTVTADVEVPEGPRTWCMTRKPGA

SEQ ID NO: 45715 - protein, 866 aa, synthetic construct
MALPVTALLLPLALLLHAARPLEIQNPDPAVYQLRDSKSSDKSVCLFTDFDSQTNVSQSKDSDVYITDKCVLDMRSMDFKSNSAVAWSNKSDFACANAFNNSIIPEDTFFPSPESSCDVKLVEKSFETDTNLNFQILYEVIGFRILLLKVAGFNLLMTLRLWSSRAKRSGSGATNFSLLKQAGDVEENPGPTSMALPVTALLLPLALLLHAARPENVLTQSPAIMSASPGEKVTMTCRASSSVSSSYLHWYQQKSGASPKVWIYSTSNLASGVPGRFSGSGSGTSYSLTISSVEAEDAATYYCQQYSGYPITFGAGTKVEVKRGGGGSGGGGSGGGGSQVQLKESGPVLVAPSQTLSITCTVSGFSLASYNIHWVRQPPGKGLEWLGVIWAGGSTNYNSALMSRLSISKDNSKSQVFLQMNSLQTDDTAMYYCAKRSDDYSWFAYWGQGTLVTVSASTREDLKNVFPPEVAVFEPSEAEISHTQKATLVCLATGFYPDHVELSWWVNGKEVHSGVCTDPQPLKEQPALNDSRYCLSSRLRVSATFWQNPRNHFRCQVQFYGLSENDEWTQDRAKPVTQIVSAEAWGRADCGFTSESYQQGVLSATNLSVIGFRILLLKVAGFNLLMTLRLWSSRAKRSGSGVKQTLNFDLLKLAGDVESNPGPSRGHMTEYKPTVRLATRDDVPRAVRTLAAAFADYPATRHTVDPDRHIERVTELQELFLTRVGLDIGKVWVADDGAAVAVWTTPESVEAGAVFAEIGPRMAELSGSRLAAQQQMEGLLAPHRPKEPAWFLATVGVSPDHQGKGLGSAVVLPGVEAAERAGVPAFLETSAPRNLPFYERLGFTVTADVEVPEGPRTWCMTRKPGA

SEQ ID NO: 45716 - protein, 866 aa, synthetic construct; identical to SEQ ID NO: 45714

SEQ ID NO: 45717 - protein, 974 aa, synthetic construct
MALPVTALLLPLALLLHAARPLEEDLKNVFPPEVAVFEPSEAEISHTQKATLVCLATGFYPDHVELSWWVNGKEVHSGVSTDPQPLKEQPALNDSRYCLSSRLRVSATFWQNPRNHFRCQVQFYGLSENDEWTQDRAKPVTQIVSAEAWGRADDVIKIHWQEKKSNTILGSQEGNTMKTNDTYMKFSWLTVPEKSLDKEHRCIVRHENNKNGVDQEIIFPPIKTDVITMDPKDNCSKDANDTLLLQLTNTSAYYMYLLLLLKSVVYFAIITCCLLMAMVKRKDSRGRAKRSGSGATNFSLLKQAGDVEENPGPTSMALPVTALLLPLALLLHAARPENVLTQSPAIMSASPGEKVTMTCRASSSVSSSYLHWYQQKSGASPKVWIYSTSNLASGVPGRFSGSGSGTSYSLTISSVEAEDAATYYCQQYSGYPITFGAGTKVEVKRGGGGSGGGGSGGGGSQVQLKESGPVLVAPSQTLSITCTVSGFSLASYNIHWVRQPPGKGLEWLGVIWAGGSTNYNSALMSRLSISKDNSKSQVFLQMNSLQTDDTAMYYCAKRSDDYSWFAYWGQGTLVTVSASTRIQNPDPAVYQLRDSKSSDKSVCLFTDFDSQTNVSQSKDSDVYITDKTVLDMRSMDFKSNSAVAWSNKSDFACANAFNNSIIPEDTFFPSPESSDSTDHVKPKETENTKQPSKSCHKPKAIVHTEKVNMMSLTVLGLRMLFAKTVAVNFLLTAKLFFLLTARAKRSGSGVKQTLNFDLLKLAGDVESNPGPSRGHMTEYKPTVRLATRDDVPRAVRTLAAAFADYPATRHTVDPDRHIERVTELQELFLTRVGLDIGKVWVADDGAAVAVWTTPESVEAGAVFAEIGPRMAELSGSRLAAQQQMEGLLAPHRPKEPAWFLATVGVSPDHQGKGLGSAVVLPGVEAAERAGVPAFLETSAPRNLPFYERLGFTVTADVEVPEGPRTWCMTRKPGA

SEQ ID NO: 45718 - protein, 974 aa, synthetic construct
MALPVTALLLPLALLLHAARPLEIQNPDPAVYQLRDSKSSDKSVCLFTDFDSQTNVSQSKDSDVYITDKTVLDMRSMDFKSNSAVAWSNKSDFACANAFNNSIIPEDTFFPSPESSDSTDHVKPKETENTKQPSKSCHKPKAIVHTEKVNMMSLTVLGLRMLFAKTVAVNFLLTAKLFFLLTARAKRSGSGATNFSLLKQAGDVEENPGPTSMALPVTALLLPLALLLHAARPENVLTQSPAIMSASPGEKVTMTCRASSSVSSSYLHWYQQKSGASPKVWIYSTSNLASGVPGRFSGSGSGTSYSLTISSVEAEDAATYYCQQYSGYPITFGAGTKVEVKRGGGGSGGGGSGGGGSQVQLKESGPVLVAPSQTLSITCTVSGFSLASYNIHWVRQPPGKGLEWLGVIWAGGSTNYNSALMSRLSISKDNSKSQVFLQMNSLQTDDTAMYYCAKRSDDYSWFAYWGQGTLVTVSASTREDLKNVFPPEVAVFEPSEAEISHTQKATLVCLATGFYPDHVELSWWVNGKEVHSGVSTDPQPLKEQPALNDSRYCLSSRLRVSATFWQNPRNHFRCQVQFYGLSENDEWTQDRAKPVTQIVSAEAWGRADDVIKIHWQEKKSNTILGSQEGNTMKTNDTYMKFSWLTVPEKSLDKEHRCIVRHENNKNGVDQEIIFPPIKTDVITMDPKDNCSKDANDTLLLQLTNTSAYYMYLLLLLKSVVYFAIITCCLLMAMVKRKDSRGRAKRSGSGVKQTLNFDLLKLAGDVESNPGPSRGHMTEYKPTVRLATRDDVPRAVRTLAAAFADYPATRHTVDPDRHIERVTELQELFLTRVGLDIGKVWVADDGAAVAVWTTPESVEAGAVFAEIGPRMAELSGSRLAAQQQMEGLLAPHRPKEPAWFLATVGVSPDHQGKGLGSAVVLPGVEAAERAGVPAFLETSAPRNLPFYERLGFTVTADVEVPEGPRTWCMTRKPGA

SEQ ID NO: 45719 - protein, 972 aa, synthetic construct
MALPVTALLLPLALLLHAARPLEEDLKNVFPPEVAVFEPSEAEISHTQKATLVCLATGFYPDHVELSWWVNGKEVHSGVCTDPQPLKEQPALNDSRYCLSSRLRVSATFWQNPRNHFRCQVQFYGLSENDEWTQDRAKPVTQIVSAEAWGRADDVIKIHWQEKKSNTILGSQEGNTMKTNDTYMKFSWLTVPEKSLDKEHRCIVRHENNKNGVDQEIIFPPIKTDVITMDPKDNCSKDANDTLLLQLTNTSAYYMYLLLLLKSVVYFAIITCCLLRRTAFCCNGEKSRAKRSGSGATNFSLLKQAGDVEENPGPTSMALPVTALLLPLALLLHAARPENVLTQSPAIMSASPGEKVTMTCRASSSVSSSYLHWYQQKSGASPKVWIYSTSNLASGVPGRFSGSGSGTSYSLTISSVEAEDAATYYCQQYSGYPITFGAGTKVEVKRGGGGSGGGGSGGGGSQVQLKESGPVLVAPSQTLSITCTVSGFSLASYNIHWVRQPPGKGLEWLGVIWAGGSTNYNSALMSRLSISKDNSKSQVFLQMNSLQTDDTAMYYCAKRSDDYSWFAYWGQGTLVTVSASTRIQNPDPAVYQLRDSKSSDKSVCLFTDFDSQTNVSQSKDSDVYITDKCVLDMRSMDFKSNSAVAWSNKSDFACANAFNNSIIPEDTFFPSPESSDSTDHVKPKETENTKQPSKSCHKPKAIVHTEKVNMMSLTVLGLRMLFAKTVAVNFLLTAKLFFLRAKRSGSGVKQTLNFDLLKLAGDVESNPGPSRGHMTEYKPTVRLATRDDVPRAVRTLAAAFADYPATRHTVDPDRHIERVTELQELFLTRVGLDIGKVWVADDGAAVAVWTTPESVEAGAVFAEIGPRMAELSGSRLAAQQQMEGLLAPHRPKEPAWFLATVGVSPDHQGKGLGSAVVLPGVEAAERAGVPAFLETSAPRNLPFYERLGFTVTADVEVPEGPRTWCMTRKPGA

SEQ ID NO: 45720 - protein, 972 aa, synthetic construct
MALPVTALLLPLALLLHAARPLEIQNPDPAVYQLRDSKSSDKSVCLFTDFDSQTNVSQSKDSDVYITDKCVLDMRSMDFKSNSAVAWSNKSDFACANAFNNSIIPEDTFFPSPESSDSTDHVKPKETENTKQPSKSCHKPKAIVHTEKVNMMSLTVLGLRMLFAKTVAVNFLLTAKLFFLRAKRSGSGATNFSLLKQAGDVEENPGPTSMALPVTALLLPLALLLHAARPENVLTQSPAIMSASPGEKVTMTCRASSSVSSSYLHWYQQKSGASPKVWIYSTSNLASGVPGRFSGSGSGTSYSLTISSVEAEDAATYYCQQYSGYPITFGAGTKVEVKRGGGGSGGGGSGGGGSQVQLKESGPVLVAPSQTLSITCTVSGFSLASYNIHWVRQPPGKGLEWLGVIWAGGSTNYNSALMSRLSISKDNSKSQVFLQMNSLQTDDTAMYYCAKRSDDYSWFAYWGQGTLVTVSASTREDLKNVFPPEVAVFEPSEAEISHTQKATLVCLATGFYPDHVELSWWVNGKEVHSGVCTDPQPLKEQPALNDSRYCLSSRLRVSATFWQNPRNHFRCQVQFYGLSENDEWTQDRAKPVTQIVSAEAWGRADDVIKIHWQEKKSNTILGSQEGNTMKTNDTYMKFSWLTVPEKSLDKEHRCIVRHENNKNGVDQEIIFPPIKTDVITMDPKDNCSKDANDTLLLQLTNTSAYYMYLLLLLKSVVYFAIITCCLLRRTAFCCNGEKSRAKRSGSGVKQTLNFDLLKLAGDVESNPGPSRGHMTEYKPTVRLATRDDVPRAVRTLAAAFADYPATRHTVDPDRHIERVTELQELFLTRVGLDIGKVWVADDGAAVAVWTTPESVEAGAVFAEIGPRMAELSGSRLAAQQQMEGLLAPHRPKEPAWFLATVGVSPDHQGKGLGSAVVLPGVEAAERAGVPAFLETSAPRNLPFYERLGFTVTADVEVPEGPRTWCMTRKPGA

SEQ ID NO: 45721 - protein, 972 aa, synthetic construct
MALPVTALLLPLALLLHAARPLEEDLKNVFPPEVAVFEPSEAEISHTQKATLVCLATGFYPDHVELSWWVNGKEVHSGVSTDPQPLKEQPALNDSRYCLSSRLRVSATFWQNPRNHFRCQVQFYGLSENDEWTQDRAKPVTQIVSAEAWGRADDVIKIHWQEKKSNTILGSQEGNTMKTNDTYMKFSWLTVPEKSLDKEHRCIVRHENNKNGVDQEIIFPPIKTDVITMDPKDNCSKDANDTLLLQLTNTSAYYMYLLLLLKSVVYFAIITCCLLRRTAFCCNGEKSRAKRSGSGATNFSLLKQAGDVEENPGPTSMALPVTALLLPLALLLHAARPENVLTQSPAIMSASPGEKVTMTCRASSSVSSSYLHWYQQKSGASPKVWIYSTSNLASGVPGRFSGSGSGTSYSLTISSVEAEDAATYYCQQYSGYPITFGAGTKVEVKRGGGGSGGGGSGGGGSQVQLKESGPVLVAPSQTLSITCTVSGFSLASYNIHWVRQPPGKGLEWLGVIWAGGSTNYNSALMSRLSISKDNSKSQVFLQMNSLQTDDTAMYYCAKRSDDYSWFAYWGQGTLVTVSASTRIQNPDPAVYQLRDSKSSDKSVCLFTDFDSQTNVSQSKDSDVYITDKTVLDMRSMDFKSNSAVAWSNKSDFACANAFNNSIIPEDTFFPSPESSDSTDHVKPKETENTKQPSKSCHKPKAIVHTEKVNMMSLTVLGLRMLFAKTVAVNFLLTAKLFFLRAKRSGSGVKQTLNFDLLKLAGDVESNPGPSRGHMTEYKPTVRLATRDDVPRAVRTLAAAFADYPATRHTVDPDRHIERVTELQELFLTRVGLDIGKVWVADDGAAVAVWTTPESVEAGAVFAEIGPRMAELSGSRLAAQQQMEGLLAPHRPKEPAWFLATVGVSPDHQGKGLGSAVVLPGVEAAERAGVPAFLETSAPRNLPFYERLGFTVTADVEVPEGPRTWCMTRKPGA

SEQ ID NO: 45722 - protein, 972 aa, synthetic construct
MALPVTALLLPLALLLHAARPLEIQNPDPAVYQLRDSKSSDKSVCLFTDFDSQTNVSQSKDSDVYITDKTVLDMRSMDFKSNSAVAWSNKSDFACANAFNNSIIPEDTFFPSPESSDSTDHVKPKETENTKQPSKSCHKPKAIVHTEKVNMMSLTVLGLRMLFAKTVAVNFLLTAKLFFLRAKRSGSGATNFSLLKQAGDVEENPGPTSMALPVTALLLPLALLLHAARPENVLTQSPAIMSASPGEKVTMTCRASSSVSSSYLHWYQQKSGASPKVWIYSTSNLASGVPGRFSGSGSGTSYSLTISSVEAEDAATYYCQQYSGYPITFGAGTKVEVKRGGGGSGGGGSGGGGSQVQLKESGPVLVAPSQTLSITCTVSGFSLASYNIHWVRQPPGKGLEWLGVIWAGGSTNYNSALMSRLSISKDNSKSQVFLQMNSLQTDDTAMYYCAKRSDDYSWFAYWGQGTLVTVSASTREDLKNVFPPEVAVFEPSEAEISHTQKATLVCLATGFYPDHVELSWWVNGKEVHSGVSTDPQPLKEQPALNDSRYCLSSRLRVSATFWQNPRNHFRCQVQFYGLSENDEWTQDRAKPVTQIVSAEAWGRADDVIKIHWQEKKSNTILGSQEGNTMKTNDTYMKFSWLTVPEKSLDKEHRCIVRHENNKNGVDQEIIFPPIKTDVITMDPKDNCSKDANDTLLLQLTNTSAYYMYLLLLLKSVVYFAIITCCLLRRTAFCCNGEKSRAKRSGSGVKQTLNFDLLKLAGDVESNPGPSRGHMTEYKPTVRLATRDDVPRAVRTLAAAFADYPATRHTVDPDRHIERVTELQELFLTRVGLDIGKVWVADDGAAVAVWTTPESVEAGAVFAEIGPRMAELSGSRLAAQQQMEGLLAPHRPKEPAWFLATVGVSPDHQGKGLGSAVVLPGVEAAERAGVPAFLETSAPRNLPFYERLGFTVTADVEVPEGPRTWCMTRKPGA

SEQ ID NO: 45723 - protein, 870 aa, synthetic construct
MALPVTALLLPLALLLHAARPLEEDLKNVFPPEVAVFEPSKAEIAHTQKATLVCLATGFYPDHVELSWWVNGKEVHSGVCTDPQPLKEQPALNDSRYCLSSRLRVSATFWQNPRNHFRCQVQFYGLSENDEWTQDRAKPVTQIVSAEAWGRADCGITSASYHQGVLSATILYEILLGKATLYAVLVSALVLMAMVKRKDSRGRAKRSGSGATNFSLLKQAGDVEENPGPTSMALPVTALLLPLALLLHAARPENVLTQSPAIMSASPGEKVTMTCRASSSVSSSYLHWYQQKSGASPKVWIYSTSNLASGVPGRFSGSGSGTSYSLTISSVEAEDAATYYCQQYSGYPITFGAGTKVEVKRGGGGSGGGGSGGGGSQVQLKESGPVLVAPSQTLSITCTVSGFSLASYNIHWVRQPPGKGLEWLGVIWAGGSTNYNSALMSRLSISKDNSKSQVFLQMNSLQTDDTAMYYCAKRSDDYSWFAYWGQGTLVTVSASTRIQNPDPAVYQLRDSKSSDKSVCLFTDFDSQTNVSQSKDSDVYITDKCVLDMRSMDFKSNSAVAWSNKSDFACANAFNNSIIPEDTFFPSSDVPCDVKLVEKSFETDTNLNFQNLSVIGFRILLLKVAGFNLLMTLRLWSSRAKRSGSGVKQTLNFDLLKLAGDVESNPGPSRGHMTEYKPTVRLATRDDVPRAVRTLAAAFADYPATRHTVDPDRHIERVTELQELFLTRVGLDIGKVWVADDGAAVAVWTTPESVEAGAVFAEIGPRMAELSGSRLAAQQQMEGLLAPHRPKEPAWFLATVGVSPDHQGKGLGSAVVLPGVEAAERAGVPAFLETSAPRNLPFYERLGFTVTADVEVPEGPRTWCMTRKPGA

SEQ ID NO: 45724 - protein, 870 aa, synthetic construct
MALPVTALLLPLALLLHAARPLEIQNPDPAVYQLRDSKSSDKSVCLFTDFDSQTNVSQSKDSDVYITDKCVLDMRSMDFKSNSAVAWSNKSDFACANAFNNSIIPEDTFFPSSDVPCDVKLVEKSFETDTNLNFQNLSVIGFRILLLKVAGFNLLMTLRLWSSRAKRSGSGATNFSLLKQAGDVEENPGPTSMALPVTALLLPLALLLHAARPENVLTQSPAIMSASPGEKVTMTCRASSSVSSSYLHWYQQKSGASPKVWIYSTSNLASGVPGRFSGSGSGTSYSLTISSVEAEDAATYYCQQYSGYPITFGAGTKVEVKRGGGGSGGGGSGGGGSQVQLKESGPVLVAPSQTLSITCTVSGFSLASYNIHWVRQPPGKGLEWLGVIWAGGSTNYNSALMSRLSISKDNSKSQVFLQMNSLQTDDTAMYYCAKRSDDYSWFAYWGQGTLVTVSASTREDLKNVFPPEVAVFEPSKAEIAHTQKATLVCLATGFYPDHVELSWWVNGKEVHSGVCTDPQPLKEQPALNDSRYCLSSRLRVSATFWQNPRNHFRCQVQFYGLSENDEWTQDRAKPVTQIVSAEAWGRADCGITSASYHQGVLSATILYEILLGKATLYAVLVSALVLMAMVKRKDSRGRAKRSGSGVKQTLNFDLLKLAGDVESNPGPSRGHMTEYKPTVRLATRDDVPRAVRTLAAAFADYPATRHTVDPDRHIERVTELQELFLTRVGLDIGKVWVADDGAAVAVWTTPESVEAGAVFAEIGPRMAELSGSRLAAQQQMEGLLAPHRPKEPAWFLATVGVSPDHQGKGLGSAVVLPGVEAAERAGVPAFLETSAPRNLPFYERLGFTVTADVEVPEGPRTWCMTRKPGA

SEQ ID NO: 45725 - protein, 763 aa, synthetic construct
MALPVTALLLPLALLLHAARPLEQSFGLLDPKLCYLLDGILFIYGVILTALFLRVKFSRSADAPAYQQGQNQLYNELNLGRREEYDVLDKRRGRDPEMGGKPQRRKNPQEGLYNELQKDKMAEAYSEIGMKGERRRGKGHDGLYQGLSTATKDTYDALHMQALPPRRAKRSGSGATNFSLLKQAGDVEENPGPTSMALPVTALLLPLALLLHAARPENVLTQSPAIMSASPGEKVTMTCRASSSVSSSYLHWYQQKSGASPKVWIYSTSNLASGVPGRFSGSGSGTSYSLTISSVEAEDAATYYCQQYSGYPITFGAGTKVEVKRGGGGSGGGGSGGGGSQVQLKESGPVLVAPSQTLSITCTVSGFSLASYNIHWVRQPPGKGLEWLGVIWAGGSTNYNSALMSRLSISKDNSKSQVFLQMNSLQTDDTAMYYCAKRSDDYSWFAYWGQGTLVTVSASTRELGEPQLCYILDAILFLYGIVLTLLYCRLKIQVRKAAITSYEKSDGVYTGLSTRNQETYETLKHEKPPQRAKRSGSGVKQTLNFDLLKLAGDVESNPGPSRGHMTEYKPTVRLATRDDVPRAVRTLAAAFADYPATRHTVDPDRHIERVTELQELFLTRVGLDIGKVWVADDGAAVAVWTTPESVEAGAVFAEIGPRMAELSGSRLAAQQQMEGLLAPHRPKEPAWFLATVGVSPDHQGKGLGSAVVLPGVEAAERAGVPAFLETSAPRNLPFYERLGFTVTADVEVPEGPRTWCMTRKPGA

SEQ ID NO: 45726 - protein, 974 aa, synthetic construct; identical to SEQ ID NO: 45717

SEQ ID NO: 45727 - protein, 974 aa, synthetic construct; identical to SEQ ID NO: 45718

SEQ ID NO: 45728 - protein, 973 aa, synthetic construct
MALPVTALLLPLALLLHAARPLEEEDLKNVFPPEVAVFEPSEAEISHTQKATLVCLATGFYPDHVELSWWVNGKEVHSGVCTDPQPLKEQPALNDSRYCLSSRLRVSATFWQNPRNHFRCQVQFYGLSENDEWTQDRAKPVTQIVSAEAWGRADDVIKIHWQEKKSNTILGSQEGNTMKTNDTYMKFSWLTVPEKSLDKEHRCIVRHENNKNGVDQEIIFPPIKTDVITMDPKDNCSKDANDTLLLQLTNTSAYYMYLLLLLKSVVYFAIITCCLLRRTAFCCNGEKSRAKRSGSGATNFSLLKQAGDVEENPGPTSMALPVTALLLPLALLLHAARPENVLTQSPAIMSASPGEKVTMTCRASSSVSSSYLHWYQQKSGASPKVWIYSTSNLASGVPGRFSGSGSGTSYSLTISSVEAEDAATYYCQQYSGYPITFGAGTKVEVKRGGGGSGGGGSGGGGSQVQLKESGPVLVAPSQTLSITCTVSGFSLASYNIHWVRQPPGKGLEWLGVIWAGGSTNYNSALMSRLSISKDNSKSQVFLQMNSLQTDDTAMYYCAKRSDDYSWFAYWGQGTLVTVSASTRIQNPDPAVYQLRDSKSSDKSVCLFTDFDSQTNVSQSKDSDVYITDKCVLDMRSMDFKSNSAVAWSNKSDFACANAFNNSIIPEDTFFPSPESSDSTDHVKPKETENTKQPSKSCHKPKAIVHTEKVNMMSLTVLGLRMLFAKTVAVNFLLTAKLFFLRAKRSGSGVKQTLNFDLLKLAGDVESNPGPSRGHMTEYKPTVRLATRDDVPRAVRTLAAAFADYPATRHTVDPDRHIERVTELQELFLTRVGLDIGKVWVADDGAAVAVWTTPESVEAGAVFAEIGPRMAELSGSRLAAQQQMEGLLAPHRPKEPAWFLATVGVSPDHQGKGLGSAVVLPGVEAAERAGVPAFLETSAPRNLPFYERLGFTVTADVEVPEGPRTWCMTRKPGA

SEQ ID NO: 45729 - protein, 973 aa, synthetic construct
MALPVTALLLPLALLLHAARPLEIQNPDPAVYQLRDSKSSDKSVCLFTDFDSQTNVSQSKDSDVYITDKCVLDMRSMDFKSNSAVAWSNKSDFACANAFNNSIIPEDTFFPSPESSDSTDHVKPKETENTKQPSKSCHKPKAIVHTEKVNMMSLTVLGLRMLFAKTVAVNFLLTAKLFFLRAKRSGSGATNFSLLKQAGDVEENPGPTSMALPVTALLLPLALLLHAARPENVLTQSPAIMSASPGEKVTMTCRASSSVSSSYLHWYQQKSGASPKVWIYSTSNLASGVPGRFSGSGSGTSYSLTISSVEAEDAATYYCQQYSGYPITFGAGTKVEVKRGGGGSGGGGSGGGGSQVQLKESGPVLVAPSQTLSITCTVSGFSLASYNIHWVRQPPGKGLEWLGVIWAGGSTNYNSALMSRLSISKDNSKSQVFLQMNSLQTDDTAMYYCAKRSDDYSWFAYWGQGTLVTVSASTREEDLKNVFPPEVAVFEPSEAEISHTQKATLVCLATGFYPDHVELSWWVNGKEVHSGVCTDPQPLKEQPALNDSRYCLSSRLRVSATFWQNPRNHFRCQVQFYGLSENDEWTQDRAKPVTQIVSAEAWGRADDVIKIHWQEKKSNTILGSQEGNTMKTNDTYMKFSWLTVPEKSLDKEHRCIVRHENNKNGVDQEIIFPPIKTDVITMDPKDNCSKDANDTLLLQLTNTSAYYMYLLLLLKSVVYFAIITCCLLRRTAFCCNGEKSRAKRSGSGVKQTLNFDLLKLAGDVESNPGPSRGHMTEYKPTVRLATRDDVPRAVRTLAAAFADYPATRHTVDPDRHIERVTELQELFLTRVGLDIGKVWVADDGAAVAVWTTPESVEAGAVFAEIGPRMAELSGSRLAAQQQMEGLLAPHRPKEPAWFLATVGVSPDHQGKGLGSAVVLPGVEAAERAGVPAFLETSAPRNLPFYERLGFTVTADVEVPEGPRTWCMTRKPGA

SEQ ID NO: 45730 - protein, 870 aa, synthetic construct
MALPVTALLLPLALLLHAARPLEEDLKNVFPPEVAVFEPSEAEISHTQKATLVCLATGFYPDHVELSWWVNGKEVHSGVSTDPQPLKEQPALNDSRYCLSSRLRVSATFWQNPRNHFRCQVQFYGLSENDEWTQDRAKPVTQIVSAEAWGRADCGFTSESYQQGVLSATNLSVIGFRILLLKVAGFNLLMTLRLWSSRAKRSGSGATNFSLLKQAGDVEENPGPTSMALPVTALLLPLALLLHAARPENVLTQSPAIMSASPGEKVTMTCRASSSVSSSYLHWYQQKSGASPKVWIYSTSNLASGVPGRFSGSGSGTSYSLTISSVEAEDAATYYCQQYSGYPITFGAGTKVEVKRGGGGSGGGGSGGGGSQVQLKESGPVLVAPSQTLSITCTVSGFSLASYNIHWVRQPPGKGLEWLGVIWAGGSTNYNSALMSRLSISKDNSKSQVFLQMNSLQTDDTAMYYCAKRSDDYSWFAYWGQGTLVTVSASTRIQNPDPAVYQLRDSKSSDKSVCLFTDFDSQTNVSQSKDSDVYITDKTVLDMRSMDFKSNSAVAWSNKSDFACANAFNNSIIPEDTFFPSPESSCDVKLVEKSFETDTNLNFQILYEILLGKATLYAVLVSALVLMAMVKRKDSRGRAKRSGSGVKQTLNFDLLKLAGDVESNPGPSRGHMTEYKPTVRLATRDDVPRAVRTLAAAFADYPATRHTVDPDRHIERVTELQELFLTRVGLDIGKVWVADDGAAVAVWTTPESVEAGAVFAEIGPRMAELSGSRLAAQQQMEGLLAPHRPKEPAWFLATVGVSPDHQGKGLGSAVVLPGVEAAERAGVPAFLETSAPRNLPFYERLGFTVTADVEVPEGPRTWCMTRKPGA

SEQ ID NO: 45731 - protein, 870 aa, synthetic construct
MALPVTALLLPLALLLHAARPLEIQNPDPAVYQLRDSKSSDKSVCLFTDFDSQTNVSQSKDSDVYITDKTVLDMRSMDFKSNSAVAWSNKSDFACANAFNNSIIPEDTFFPSPESSCDVKLVEKSFETDTNLNFQILYEILLGKATLYAVLVSALVLMAMVKRKDSRGRAKRSGSGATNFSLLKQAGDVEENPGPTSMALPVTALLLPLALLLHAARPENVLTQSPAIMSASPGEKVTMTCRASSSVSSSYLHWYQQKSGASPKVWIYSTSNLASGVPGRFSGSGSGTSYSLTISSVEAEDAATYYCQQYSGYPITFGAGTKVEVKRGGGGSGGGGSGGGGSQVQLKESGPVLVAPSQTLSITCTVSGFSLASYNIHWVRQPPGKGLEWLGVIWAGGSTNYNSALMSRLSISKDNSKSQVFLQMNSLQTDDTAMYYCAKRSDDYSWFAYWGQGTLVTVSASTREDLKNVFPPEVAVFEPSEAEISHTQKATLVCLATGFYPDHVELSWWVNGKEVHSGVSTDPQPLKEQPALNDSRYCLSSRLRVSATFWQNPRNHFRCQVQFYGLSENDEWTQDRAKPVTQIVSAEAWGRADCGFTSESYQQGVLSATNLSVIGFRILLLKVAGFNLLMTLRLWSSRAKRSGSGVKQTLNFDLLKLAGDVESNPGPSRGHMTEYKPTVRLATRDDVPRAVRTLAAAFADYPATRHTVDPDRHIERVTELQELFLTRVGLDIGKVWVADDGAAVAVWTTPESVEAGAVFAEIGPRMAELSGSRLAAQQQMEGLLAPHRPKEPAWFLATVGVSPDHQGKGLGSAVVLPGVEAAERAGVPAFLETSAPRNLPFYERLGFTVTADVEVPEGPRTWCMTRKPGA

SEQ ID NO: 45732 - protein, 870 aa, synthetic construct
MALPVTALLLPLALLLHAARPLEEDLKNVFPPEVAVFEPSEAEISHTQKATLVCLATGFYPDHVELSWWVNGKEVHSGVCTDPQPLKEQPALNDSRYCLSSRLRVSATFWQNPRNHFRCQVQFYGLSENDEWTQDRAKPVTQIVSAEAWGRADCDVKLVEKSFETDTNLNFQNLSVIGFRILLLKVAGFNLLMTLRLWSSRAKRSGSGATNFSLLKQAGDVEENPGPTSMALPVTALLLPLALLLHAARPENVLTQSPAIMSASPGEKVTMTCRASSSVSSSYLHWYQQKSGASPKVWIYSTSNLASGVPGRFSGSGSGTSYSLTISSVEAEDAATYYCQQYSGYPITFGAGTKVEVKRGGGGSGGGGSGGGGSQVQLKESGPVLVAPSQTLSITCTVSGFSLASYNIHWVRQPPGKGLEWLGVIWAGGSTNYNSALMSRLSISKDNSKSQVFLQMNSLQTDDTAMYYCAKRSDDYSWFAYWGQGTLVTVSASTRIQNPDPAVYQLRDSKSSDKSVCLFTDFDSQTNVSQSKDSDVYITDKCVLDMRSMDFKSNSAVAWSNKSDFACANAFNNSIIPEDTFFPSPESSCGFTSESYQQGVLSATILYEILLGKATLYAVLVSALVLMAMVKRKDSRGRAKRSGSGVKQTLNFDLLKLAGDVESNPGPSRGHMTEYKPTVRLATRDDVPRAVRTLAAAFADYPATRHTVDPDRHIERVTELQELFLTRVGLDIGKVWVADDGAAVAVWTTPESVEAGAVFAEIGPRMAELSGSRLAAQQQMEGLLAPHRPKEPAWFLATVGVSPDHQGKGLGSAVVLPGVEAAERAGVPAFLETSAPRNLPFYERLGFTVTADVEVPEGPRTWCMTRKPGA

SEQ ID NO: 45733 - protein, 870 aa, synthetic construct
MALPVTALLLPLALLLHAARPLEEDLKNVFPPEVAVFEPSEAEISHTQKATLVCLATGFYPDHVELSWWVNGKEVHSGVSTDPQPLKEQPALNDSRYCLSSRLRVSATFWQNPRNHFRCQVQFYGLSENDEWTQDRAKPVTQIVSAEAWGRADCDVKLVEKSFETDTNLNFQNLSVIGFRILLLKVAGFNLLMTLRLWSSRAKRSGSGATNFSLLKQAGDVEENPGPTSMALPVTALLLPLALLLHAARPENVLTQSPAIMSASPGEKVTMTCRASSSVSSSYLHWYQQKSGASPKVWIYSTSNLASGVPGRFSGSGSGTSYSLTISSVEAEDAATYYCQQYSGYPITFGAGTKVEVKRGGGGSGGGGSGGGGSQVQLKESGPVLVAPSQTLSITCTVSGFSLASYNIHWVRQPPGKGLEWLGVIWAGGSTNYNSALMSRLSISKDNSKSQVFLQMNSLQTDDTAMYYCAKRSDDYSWFAYWGQGTLVTVSASTRIQNPDPAVYQLRDSKSSDKSVCLFTDFDSQTNVSQSKDSDVYITDKTVLDMRSMDFKSNSAVAWSNKSDFACANAFNNSIIPEDTFFPSPESSCGFTSESYQQGVLSATILYEILLGKATLYAVLVSALVLMAMVKRKDSRGRAKRSGSGVKQTLNFDLLKLAGDVESNPGPSRGHMTEYKPTVRLATRDDVPRAVRTLAAAFADYPATRHTVDPDRHIERVTELQELFLTRVGLDIGKVWVADDGAAVAVWTTPESVEAGAVFAEIGPRMAELSGSRLAAQQQMEGLLAPHRPKEPAWFLATVGVSPDHQGKGLGSAVVLPGVEAAERAGVPAFLETSAPRNLPFYERLGFTVTADVEVPEGPRTWCMTRKPGA

SEQ ID NO: 45734 - protein, 973 aa, synthetic construct
MALPVTALLLPLALLLHAARPLEEEDLKNVFPPEVAVFEPSEAEISHTQKATLVCLATGFYPDHVELSWWVNGKEVHSGVSTDPQPLKEQPALNDSRYCLSSRLRVSATFWQNPRNHFRCQVQFYGLSENDEWTQDRAKPVTQIVSAEAWGRADDVIKIHWQEKKSNTILGSQEGNTMKTNDTYMKFSWLTVPEKSLDKEHRCIVRHENNKNGVDQEIIFPPIKTDVITMDPKDNCSKDANDTLLLQLTNTSAYYMYLLLLLKSVVYFAIITCCLLRRTAFCCNGEKSRAKRSGSGATNFSLLKQAGDVEENPGPTSMALPVTALLLPLALLLHAARPENVLTQSPAIMSASPGEKVTMTCRASSSVSSSYLHWYQQKSGASPKVWIYSTSNLASGVPGRFSGSGSGTSYSLTISSVEAEDAATYYCQQYSGYPITFGAGTKVEVKRGGGGSGGGGSGGGGSQVQLKESGPVLVAPSQTLSITCTVSGFSLASYNIHWVRQPPGKGLEWLGVIWAGGSTNYNSALMSRLSISKDNSKSQVFLQMNSLQTDDTAMYYCAKRSDDYSWFAYWGQGTLVTVSASTRIQNPDPAVYQLRDSKSSDKSVCLFTDFDSQTNVSQSKDSDVYITDKTVLDMRSMDFKSNSAVAWSNKSDFACANAFNNSIIPEDTFFPSPESSDSTDHVKPKETENTKQPSKSCHKPKAIVHTEKVNMMSLTVLGLRMLFAKTVAVNFLLTAKLFFLRAKRSGSGVKQTLNFDLLKLAGDVESNPGPSRGHMTEYKPTVRLATRDDVPRAVRTLAAAFADYPATRHTVDPDRHIERVTELQELFLTRVGLDIGKVWVADDGAAVAVWTTPESVEAGAVFAEIGPRMAELSGSRLAAQQQMEGLLAPHRPKEPAWFLATVGVSPDHQGKGLGSAVVLPGVEAAERAGVPAFLETSAPRNLPFYERLGFTVTADVEVPEGPRTWCMTRKPGA

SEQ ID NO: 45735 - protein, 870 aa, synthetic construct
MALPVTALLLPLALLLHAARPLEEDLKNVFPPEVAVFEPSEAEISHTQKATLVCLATGFYPDHVELSWWVNGKEVHSGVCTDPQPLKEQPALNDSRYCLSSRLRVSATFWQNPRNHFRCQVQFYGLSENDEWTQDRAKPVTQIVSAEAWGRADCGFTSESYQQGVLSATNLSVIGFRILLLKVAGFNLLMTLRLWSSRAKRSGSGATNFSLLKQAGDVEENPGPTSMALPVTALLLPLALLLHAARPENVLTQSPAIMSASPGEKVTMTCRASSSVSSSYLHWYQQKSGASPKVWIYSTSNLASGVPGRFSGSGSGTSYSLTISSVEAEDAATYYCQQYSGYPITFGAGTKVEVKRGGGGSGGGGSGGGGSQVQLKESGPVLVAPSQTLSITCTVSGFSLASYNIHWVRQPPGKGLEWLGVIWAGGSTNYNSALMSRLSISKDNSKSQVFLQMNSLQTDDTAMYYCAKRSDDYSWFAYWGQGTLVTVSASTRIQNPDPAVYQLRDSKSSDKSVCLFTDFDSQTNVSQSKDSDVYITDKCVLDMRSMDFKSNSAVAWSNKSDFACANAFNNSIIPEDTFFPSPESSCDVKLVEKSFETDTNLNFQILYEILLGKATLYAVLVSALVLMAMVKRKDSRGRAKRSGSGVKQTLNFDLLKLAGDVESNPGPSRGHMTEYKPTVRLATRDDVPRAVRTLAAAFADYPATRHTVDPDRHIERVTELQELFLTRVGLDIGKVWVADDGAAVAVWTTPESVEAGAVFAEIGPRMAELSGSRLAAQQQMEGLLAPHRPKEPAWFLATVGVSPDHQGKGLGSAVVLPGVEAAERAGVPAFLETSAPRNLPFYERLGFTVTADVEVPEGPRTWCMTRKPGA

SEQ ID NO: 45736 - protein, 899 aa, synthetic construct
MALPVTALLLPLALLLHAARPLEEEDLKNVFPPEVAVFEPSEAEISHTQKATLVCLATGFYPDHVELSWWVNGKEVHSGVCTDPQPLKEQPALNDSRYCLSSRLRVSATFWQNPRNHFRCQVQFYGLSENDEWTQDRAKPVTQIVSAEAWGRADCGFTSESYQQGVLSATNLSVIGFRILLLKVAGFNLLMTLRLWSSRAKRSGSGATNFSLLKQAGDVEENPGPTSMALPVTALLLPLALLLHAARPENVLTQSPAIMSASPGEKVTMTCRASSSVSSSYLHWYQQKSGASPKVWIYSTSNLASGVPGRFSGSGSGTSYSLTISSVEAEDAATYYCQQYSGYPITFGAGTKVEVKRGGGGSGGGGSGGGGSQVQLKESGPVLVAPSQTLSITCTVSGFSLASYNIHWVRQPPGKGLEWLGVIWAGGSTNYNSALMSRLSISKDNSKSQVFLQMNSLQTDDTAMYYCAKRSDDYSWFAYWGQGTLVTVSASTRGQPKANPTVTLFPPSSEELQANKATLVCLISDFYPGAVTVAWKADGSPVKAGVETTKPSKQSNNKYAASSYLSLTPEQWKSHRSYSCQVTHEGSTVEKTVAPTECSPIKTDVITMDPKDNCSKDANDTLLLQLTNTSAYYMYLLLLLKSVVYFAIITCCLLRRTAFCCNGEKSRAKRSGSGVKQTLNFDLLKLAGDVESNPGPSRGHMTEYKPTVRLATRDDVPRAVRTLAAAFADYPATRHTVDPDRHIERVTELQELFLTRVGLDIGKVWVADDGAAVAVWTTPESVEAGAVFAEIGPRMAELSGSRLAAQQQMEGLLAPHRPKEPAWFLATVGVSPDHQGKGLGSAVVLPGVEAAERAGVPAFLETSAPRNLPFYERLGFTVTADVEVPEGPRTWCMTRKPGA

SEQ ID NO: 45737 - protein, 899 aa, synthetic construct
MALPVTALLLPLALLLHAARPLEGQPKANPTVTLFPPSSEELQANKATLVCLISDFYPGAVTVAWKADGSPVKAGVETTKPSKQSNNKYAASSYLSLTPEQWKSHRSYSCQVTHEGSTVEKTVAPTECSPIKTDVITMDPKDNCSKDANDTLLLQLTNTSAYYMYLLLLLKSVVYFAIITCCLLRRTAFCCNGEKSRAKRSGSGATNFSLLKQAGDVEENPGPTSMALPVTALLLPLALLLHAARPENVLTQSPAIMSASPGEKVTMTCRASSSVSSSYLHWYQQKSGASPKVWIYSTSNLASGVPGRFSGSGSGTSYSLTISSVEAEDAATYYCQQYSGYPITFGAGTKVEVKRGGGGSGGGGSGGGGSQVQLKESGPVLVAPSQTLSITCTVSGFSLASYNIHWVRQPPGKGLEWLGVIWAGGSTNYNSALMSRLSISKDNSKSQVFLQMNSLQTDDTAMYYCAKRSDDYSWFAYWGQGTLVTVSASTREEDLKNVFPPEVAVFEPSEAEISHTQKATLVCLATGFYPDHVELSWWVNGKEVHSGVCTDPQPLKEQPALNDSRYCLSSRLRVSATFWQNPRNHFRCQVQFYGLSENDEWTQDRAKPVTQIVSAEAWGRADCGFTSESYQQGVLSATNLSVIGFRILLLKVAGFNLLMTLRLWSSRAKRSGSGVKQTLNFDLLKLAGDVESNPGPSRGHMTEYKPTVRLATRDDVPRAVRTLAAAFADYPATRHTVDPDRHIERVTELQELFLTRVGLDIGKVWVADDGAAVAVWTTPESVEAGAVFAEIGPRMAELSGSRLAAQQQMEGLLAPHRPKEPAWFLATVGVSPDHQGKGLGSAVVLPGVEAAERAGVPAFLETSAPRNLPFYERLGFTVTADVEVPEGPRTWCMTRKPGA

SEQ ID NO: 45738 - protein, 896 aa, synthetic construct
MALPVTALLLPLALLLHAARPLEEASTKGPSVFPLAPSSKSTSGGTAALGCLVKDYFPEPVTVSWNSGALTSGVHTFPAVLQSSGLYSLSSVVTVPSSSLGTQTYICNVNHKPSNTKVDKRVEPKSCPIKTDVITMDPKDNCSKDANDTLLLQLTNTSAYYMYLLLLLKSVVYFAIITCCLLRRTAFCCNGEKSRAKRSGSGATNFSLLKQAGDVEENPGPTSMALPVTALLLPLALLLHAARPENVLTQSPAIMSASPGEKVTMTCRASSSVSSSYLHWYQQKSGASPKVWIYSTSNLASGVPGRFSGSGSGTSYSLTISSVEAEDAATYYCQQYSGYPITFGAGTKVEVKRGGGGSGGGGSGGGGSQVQLKESGPVLVAPSQTLSITCTVSGFSLASYNIHWVRQPPGKGLEWLGVIWAGGSTNYNSALMSRLSISKDNSKSQVFLQMNSLQTDDTAMYYCAKRSDDYSWFAYWGQGTLVTVSASTRGQPKANPTVTLFPPSSEELQANKATLVCLISDFYPGAVTVAWKADGSPVKAGVETTKPSKQSNNKYAASSYLSLTPEQWKSHRSYSCQVTHEGSTVEKTVAPTECSEVKTDSTDHVKPKETENTKQPSKSCHKPKAIVHTEKVNMMSLTVLGLRMLFAKTVAVNFLLTAKLFFLRAKRSGSGVKQTLNFDLLKLAGDVESNPGPSRGHMTEYKPTVRLATRDDVPRAVRTLAAAFADYPATRHTVDPDRHIERVTELQELFLTRVGLDIGKVWVADDGAAVAVWTTPESVEAGAVFAEIGPRMAELSGSRLAAQQQMEGLLAPHRPKEPAWFLATVGVSPDHQGKGLGSAVVLPGVEAAERAGVPAFLETSAPRNLPFYERLGFTVTADVEVPEGPRTWCMTRKPGA

SEQ ID NO: 45739 - protein, 874 aa, synthetic construct
MALPVTALLLPLALLLHAARPLEEASTKGPSVFPLAPSSKSTSGGTAALGCLVKDYFPEPVTVSWNSGALTSGVHTFPAVLQSSGLYSLSSVVTVPSSSLGTQTYICNVNHKPSNTKVDKRVEPKSCGRADCGFTSESYQQGVLSATILYEILLGKATLYAVLVSALVLMAMVKRKDSRGRAKRSGSGATNFSLLKQAGDVEENPGPTSMALPVTALLLPLALLLHAARPENVLTQSPAIMSASPGEKVTMTCRASSSVSSSYLHWYQQKSGASPKVWIYSTSNLASGVPGRFSGSGSGTSYSLTISSVEAEDAATYYCQQYSGYPITFGAGTKVEVKRGGGGSGGGGSGGGGSQVQLKESGPVLVAPSQTLSITCTVSGFSLASYNIHWVRQPPGKGLEWLGVIWAGGSTNYNSALMSRLSISKDNSKSQVFLQMNSLQTDDTAMYYCAKRSDDYSWFAYWGQGTLVTVSASTRGQPKANPTVTLFPPSSEELQANKATLVCLISDFYPGAVTVAWKADGSPVKAGVETTKPSKQSNNKYAASSYLSLTPEQWKSHRSYSCQVTHEGSTVEKTVAPTECSIPEDTFFPSPESSCDVKLVEKSFETDTNLNFQNLSVIGFRILLLKVAGFNLLMTLRLWSSRAKRSGSGVKQTLNFDLLKLAGDVESNPGPSRGHMTEYKPTVRLATRDDVPRAVRTLAAAFADYPATRHTVDPDRHIERVTELQELFLTRVGLDIGKVWVADDGAAVAVWTTPESVEAGAVFAEIGPRMAELSGSRLAAQQQMEGLLAPHRPKEPAWFLATVGVSPDHQGKGLGSAVVLPGVEAAERAGVPAFLETSAPRNLPFYERLGFTVTADVEVPEGPRTWCMTRKPGA

SEQ ID NO: 45740 - protein, 874 aa, synthetic construct
MALPVTALLLPLALLLHAARPLEEASTKGPSVFPLAPSSKSTSGGTAALGCLVKDYFPEPVTVSWNSGALTSGVHTFPAVLQSSGLYSLSSVVTVPSSSLGTQTYICNVNHKPSNTKVDKRVEPKSCIPEDTFFPSPESSCDVKLVEKSFETDTNLNFQNLSVIGFRILLLKVAGFNLLMTLRLWSSRAKRSGSGATNFSLLKQAGDVEENPGPTSMALPVTALLLPLALLLHAARPENVLTQSPAIMSASPGEKVTMTCRASSSVSSSYLHWYQQKSGASPKVWIYSTSNLASGVPGRFSGSGSGTSYSLTISSVEAEDAATYYCQQYSGYPITFGAGTKVEVKRGGGGSGGGGSGGGGSQVQLKESGPVLVAPSQTLSITCTVSGFSLASYNIHWVRQPPGKGLEWLGVIWAGGSTNYNSALMSRLSISKDNSKSQVFLQMNSLQTDDTAMYYCAKRSDDYSWFAYWGQGTLVTVSASTRGQPKANPTVTLFPPSSEELQANKATLVCLISDFYPGAVTVAWKADGSPVKAGVETTKPSKQSNNKYAASSYLSLTPEQWKSHRSYSCQVTHEGSTVEKTVAPTECSGRADCGFTSESYQQGVLSATILYEILLGKATLYAVLVSALVLMAMVKRKDSRGRAKRSGSGVKQTLNFDLLKLAGDVESNPGPSRGHMTEYKPTVRLATRDDVPRAVRTLAAAFADYPATRHTVDPDRHIERVTELQELFLTRVGLDIGKVWVADDGAAVAVWTTPESVEAGAVFAEIGPRMAELSGSRLAAQQQMEGLLAPHRPKEPAWFLATVGVSPDHQGKGLGSAVVLPGVEAAERAGVPAFLETSAPRNLPFYERLGFTVTADVEVPEGPRTWCMTRKPGA

SEQ ID NO: 45741 - protein, 621 aa, synthetic construct
MALPVTALLLPLALLLHAARPENVLTQSPAIMSASPGEKVTMTCRASSSVSSSYLHWYQQKSGASPKVWIYSTSNLASGVPGRFSGSGSGTSYSLTISSVEAEDAATYYCQQYSGYPITFGAGTKVEVKRLEDLKNVFPPEVAVFEPSEAEISHTQKATLVCLATGFYPDHVELSWWVNGKEVHSGVCTDPQPLKEQPALNDSRYCLSSRLRVSATFWQNPRNHFRCQVQFYGLSENDEWTQDRAKPVTQIVSAEAWGRADSGFTSESYQQGVLSATILYEILLGKATLYAVLVSALVLMAMVKRKDSRGRAKRSGSGATNFSLLKQAGDVEENPGPTSMDWIWRILFLVGAATGAHSFEQVQLKESGPVLVAPSQTLSITCTVSGFSLASYNIHWVRQPPGKGLEWLGVIWAGGSTNYNSALMSRLSISKDNSKSQVFLQMNSLQTDDTAMYYCAKRSDDYSWFAYWGQGTLVTVSASTRIQNPDPAVYQLRDSKSSDKSVCLFTDFDSQTNVSQSKDSDVYITDKCVLDMRSMDFKSNSAVAWSNKSDFACANAFNNSIIPEDTFFPSPESSSDVKLVEKSFETDTNLNFQNLSVIGFRILLLKVAGFNLLMTLRLWSS

SEQ ID NO: 45742 - protein, 900 aa, synthetic construct
MALPVTALLLPLALLLHAARPEVQLLESGGGLVQPGGSLRLSCAASGRTFSMGWYRQAPGKGLEFVSAITYSGGSPYYADSVKGRFTISRDNSKNTVYLQMNSLRAEDTAVYYCAANPTYGSDWNAENWGQGTLVTVSSGTGGGGSGGGGSGGGGSEFENVLTQSPAIMSASPGEKVTMTCRASSSVSSSYLHWYQQKSGASPKVWIYSTSNLASGVPGRFSGSGSGTSYSLTISSVEAEDAATYYCQQYSGYPITFGAGTKVEVKRLEIQNPDPAVYQLRDSKSSDKSVCLFTDFDSQTNVSQSKDSDVYITDKCVLDMRSMDFKSNSAVAWSNKSDFACANAFNNSIIPEDTFFPSSDVPCDVKLVEKSFETDTNLNFQNLSVIGFRILLLKVAGFNLLMTLRLWSSRAKRSGSGVKQTLNFDLLKLAGDVESNPGPTSTMDWIWRILFLVGAATGTHSGPEVQLVESGGGLVQPGGSLRLSCAASGRTFTMGWYRQAPGKEREFVAAISLSPTLAYYADSVKGRFTISRDNSKNTVVLQMNSLRAEDTALYYCAADRKSVMSIRPDYWGQGTLVTVSSGSGGGGSGGGGSGGGGSFEQVQLKESGPVLVAPSQTLSITCTVSGFSLASYNIHWVRQPPGKGLEWLGVIWAGGSTNYNSALMSRLSISKDNSKSQVFLQMNSLQTDDTAMYYCAKRSDDYSWFAYWGQGTLVTVSASTREDLKNVFPPEVAVFEPSKAEIAHTQKATLVCLATGFYPDHVELSWWVNGKEVHSGVCTDPQPLKEQPALNDSRYCLSSRLRVSATFWQNPRNHFRCQVQFYGLSENDEWTQDRAKPVTQIVSAEAWGRADCGITSASYHQGVLSATILYEILLGKATLYAVLVSALVLMAMVKRKDSRG

SEQ ID NO: 45743 - protein, 900 aa, synthetic construct
MALPVTALLLPLALLLHAARPEVQLVESGGGLVQAGGSLRLSCAASGRTFSMGWFRQAPGKEREFVAAITYSGGSPYYADSVKGRFTISRDNAKNTVYLQMNSLKPEDTAVYYCAANPTYGSDWNAENWGQGTQVTVSSGTGGGGSGGGGSGGGGSEFENVLTQSPAIMSASPGEKVTMTCRASSSVSSSYLHWYQQKSGASPKVWIYSTSNLASGVPGRFSGSGSGTSYSLTISSVEAEDAATYYCQQYSGYPITFGAGTKVEVKRLEIQNPDPAVYQLRDSKSSDKSVCLFTDFDSQTNVSQSKDSDVYITDKCVLDMRSMDFKSNSAVAWSNKSDFACANAFNNSIIPEDTFFPSSDVPCDVKLVEKSFETDTNLNFQNLSVIGFRILLLKVAGFNLLMTLRLWSSRAKRSGSGVKQTLNFDLLKLAGDVESNPGPTSTMDWIWRILFLVGAATGAHSGPEVQLVESGGGLVQPGGSLRLSCAASGRTFTMGWYRQAPGKEREFVAAISLSPTLAYYADSVKGRFTISRDNSKNTVVLQMNSLRAEDTALYYCAADRKSVMSIRPDYWGQGTLVTVSSGSGGGGSGGGGSGGGGSFEQVQLKESGPVLVAPSQTLSITCTVSGFSLASYNIHWVRQPPGKGLEWLGVIWAGGSTNYNSALMSRLSISKDNSKSQVFLQMNSLQTDDTAMYYCAKRSDDYSWFAYWGQGTLVTVSASTREDLKNVFPPEVAVFEPSKAEIAHTQKATLVCLATGFYPDHVELSWWVNGKEVHSGVCTDPQPLKEQPALNDSRYCLSSRLRVSATFWQNPRNHFRCQVQFYGLSENDEWTQDRAKPVTQIVSAEAWGRADCGITSASYHQGVLSATILYEILLGKATLYAVLVSALVLMAMVKRKDSRG

SEQ ID NO: 45744 - protein, 897 aa, synthetic construct
MALPVTALLLPLALLLHAARPEVQLVESGGGLVQAGGSLRLSCAASGRTFSMGWFRQAPGKEREFVAAITYSGGSPYYADSVKGRFTISRDNAKNTVYLQMNSLKPEDTAVYYCAANPTYGSDWNAENWGQGTQVTVSSGTGGGGSGGGGSGGGGSEFENVLTQSPAIMSASPGEKVTMTCRASSSVSSSYLHWYQQKSGASPKVWIYSTSNLASGVPGRFSGSGSGTSYSLTISSVEAEDAATYYCQQYSGYPITFGAGTKVEVKRLEDLKNVFPPEVAVFEPSEAEISHTQKATLVCLATGFYPDHVELSWWVNGKEVHSGVCTDPQPLKEQPALNDSRYCLSSRLRVSATFWQNPRNHFRCQVQFYGLSENDEWTQDRAKPVTQIVSAEAWGRADCGFTSESYQQGVLSATILYEILLGKATLYAVLVSALVLMAMVKRKDSRGRAKRSGSGATNFSLLKQAGDVEENPGPTSATMDWIWRILFLVGAATGAHSGPEVQLVESGGGLVQAGGSLRLSCAASGRTFTMGWFRQAPGKEREFVAAISLSPTLAYYADSVKGRFTISRDNAKNTVVLQMNSLKPEDTALYYCAADRKSVMSIRPDYWGQGTQVTVSSGSGGGGSGGGGSGGGGSFEQVQLKESGPVLVAPSQTLSITCTVSGFSLASYNIHWVRQPPGKGLEWLGVIWAGGSTNYNSALMSRLSISKDNSKSQVFLQMNSLQTDDTAMYYCAKRSDDYSWFAYWGQGTLVTVSASTRIQNPDPAVYQLRDSKSSDKSVCLFTDFDSQTNVSQSKDSDVYITDKCVLDMRSMDFKSNSAVAWSNKSDFACANAFNNSIIPEDTFFPSPESSCDVKLVEKSFETDTNLNFQNLSVIGFRILLLKVAGFNLLMTLRLWSS

SEQ ID NO: 45745 - protein, 768 aa, synthetic construct
MALPVTALLLPLALLLHAARPEVQLVESGGGLVQPGGSLRLSCEASGFASDDYIIGWFRQAPGKEREGVSCISSKYANTVYTDSVKGRFRLSRGTAKNTVYLQMSALKPEDTAVYYCAMDSRRVTCPEISTMHRNFDSWGQGTLVTVSSGTGGGGSGGGGSGGGGSEFENVLTQSPAIMSASPGEKVTMTCRASSSVSSSYLHWYQQKSGASPKVWIYSTSNLASGVPGRFSGSGSGTSYSLTISSVEAEDAATYYCQQYSGYPITFGAGTKVEVKRLEDLKNVFPPEVAVFEPSKAEIAHTQKATLVCLATGFYPDHVELSWWVNGKEVHSGVCTDPQPLKEQPALNDSRYCLSSRLRVSATFWQNPRNHFRCQVQFYGLSENDEWTQDRAKPVTQIVSAEAWGRADCGITSASYHQGVLSATILYEILLGKATLYAVLVSALVLMAMVKRKDSRGRAKRSGSGATNFSLLKQAGDVEENPGPTSMDWIWRILFLVGAATGAHSFEQVQLKESGPVLVAPSQTLSITCTVSGFSLASYNIHWVRQPPGKGLEWLGVIWAGGSTNYNSALMSRLSISKDNSKSQVFLQMNSLQTDDTAMYYCAKRSDDYSWFAYWGQGTLVTVSASTRIQNPDPAVYQLRDSKSSDKSVCLFTDFDSQTNVSQSKDSDVYITDKCVLDMRSMDFKSNSAVAWSNKSDFACANAFNNSIIPEDTFFPSSDVPCDVKLVEKSFETDTNLNFQNLSVIGFRILLLKVAGFNLLMTLRLWSS

SEQ ID NO: 45746 - protein, 759 aa, synthetic construct
MALPVTALLLPLALLLHAARPENVLTQSPAIMSASPGEKVTMTCRASSSVSSSYLHWYQQKSGASPKVWIYSTSNLASGVPGRFSGSGSGTSYSLTISSVEAEDAATYYCQQYSGYPITFGAGTKVEVKRLEDLKNVFPPEVAVFEPSEAEISHTQKATLVCLATGFYPDHVELSWWVNGKEVHSGVCTDPQPLKEQPALNDSRYCLSSRLRVSATFWQNPRNHFRCQVQFYGLSENDEWTQDRAKPVTQIVSAEAWGRADCGFTSESYQQGVLSATILYEILLGKATLYAVLVSALVLMAMVKRKDSRGRAKRSGSGATNFSLLKQAGDVEENPGPTSTMDWIWRILFLVGAATGAHSGPEVQLVESGGGLVQPGGSLRLSCAASGRTFTMGWYRQAPGKEREFVAAISLSPTLAYYADSVKGRFTISRDNSKNTVVLQMNSLRAEDTALYYCAADRKSVMSIRPDYWGQGTLVTVSSGSGGGGSGGGGSGGGGSFEQVQLKESGPVLVAPSQTLSITCTVSGFSLASYNIHWVRQPPGKGLEWLGVIWAGGSTNYNSALMSRLSISKDNSKSQVFLQMNSLQTDDTAMYYCAKRSDDYSWFAYWGQGTLVTVSASTRIQNPDPAVYQLRDSKSSDKSVCLFTDFDSQTNVSQSKDSDVYITDKCVLDMRSMDFKSNSAVAWSNKSDFACANAFNNSIIPEDTFFPSPESSCDVKLVEKSFETDTNLNFQNLSVIGFRILLLKVAGFNLLMTLRLWSS

SEQ ID NO: 45747 - protein, 766 aa, synthetic construct
MALPVTALLLPLALLLHAARPENVLTQSPAIMSASPGEKVTMTCRASSSVSSSYLHWYQQKSGASPKVWIYSTSNLASGVPGRFSGSGSGTSYSLTISSVEAEDAATYYCQQYSGYPITFGAGTKVEVKRLEDLKNVFPPEVAVFEPSEAEISHTQKATLVCLATGFYPDHVELSWWVNGKEVHSGVCTDPQPLKEQPALNDSRYCLSSRLRVSATFWQNPRNHFRCQVQFYGLSENDEWTQDRAKPVTQIVSAEAWGRADCGFTSESYQQGVLSATILYEILLGKATLYAVLVSALVLMAMVKRKDSRGRAKRSGSGATNFSLLKQAGDVEENPGPTSTMDWIWRILFLVGAATGAHSGPQVQLVESGGGLVQPGGSLRLSCAASGNINSRNCMGWFRQAPGKGREGVAAIGQVTGRTYYVDSVKGRFTISLDNSKNTLYLQMNSLRAEDTAVYYCAAAPGCLLSALRSADYRNWGQGTLVTVSSGSGGGGSGGGGSGGGGSFEQVQLKESGPVLVAPSQTLSITCTVSGFSLASYNIHWVRQPPGKGLEWLGVIWAGGSTNYNSALMSRLSISKDNSKSQVFLQMNSLQTDDTAMYYCAKRSDDYSWFAYWGQGTLVTVSASTRIQNPDPAVYQLRDSKSSDKSVCLFTDFDSQTNVSQSKDSDVYITDKCVLDMRSMDFKSNSAVAWSNKSDFACANAFNNSIIPEDTFFPSPESSCDVKLVEKSFETDTNLNFQNLSVIGFRILLLKVAGFNLLMTLRLWSS

SEQ ID NO: 45748 - protein, 766 aa, synthetic construct
MALPVTALLLPLALLLHAARPENVLTQSPAIMSASPGEKVTMTCRASSSVSSSYLHWYQQKSGASPKVWIYSTSNLASGVPGRFSGSGSGTSYSLTISSVEAEDAATYYCQQYSGYPITFGAGTKVEVKRLEDLKNVFPPEVAVFEPSEAEISHTQKATLVCLATGFYPDHVELSWWVNGKEVHSGVCTDPQPLKEQPALNDSRYCLSSRLRVSATFWQNPRNHFRCQVQFYGLSENDEWTQDRAKPVTQIVSAEAWGRADCGFTSESYQQGVLSATILYEILLGKATLYAVLVSALVLMAMVKRKDSRGRAKRSGSGATNFSLLKQAGDVEENPGPTSTMDWIWRILFLVGAATGAHSGPQVQLVESGGGSVQAGGSLRLSCGASGNISSRNCMGWFRQAPGKEREGVAAIGQVTGRSYYVDSVKGRFTISLDNAKNTLYLQMNTLKPEDTAMYYCAAAPGCLLSALRSADYRNWGQGTQVTVSSGSGGGGSGGGGSGGGGSFEQVQLKESGPVLVAPSQTLSITCTVSGFSLASYNIHWVRQPPGKGLEWLGVIWAGGSTNYNSALMSRLSISKDNSKSQVFLQMNSLQTDDTAMYYCAKRSDDYSWFAYWGQGTLVTVSASTRIQNPDPAVYQLRDSKSSDKSVCLFTDFDSQTNVSQSKDSDVYITDKCVLDMRSMDFKSNSAVAWSNKSDFACANAFNNSIIPEDTFFPSPESSCDVKLVEKSFETDTNLNFQNLSVIGFRILLLKVAGFNLLMTLRLWSS

SEQ ID NO: 45749 - protein, 907 aa, synthetic construct
MALPVTALLLPLALLLHAARPEVQLVESGGGLVQAGGSLRLSCAASGRTFSMGWFRQAPGKEREFVAAITYSGGSPYYADSVKGRFTISRDNAKNTVYLQMNSLKPEDTAVYYCAANPTYGSDWNAENWGQGTQVTVSSGTGGGGSGGGGSGGGGSEFENVLTQSPAIMSASPGEKVTMTCRASSSVSSSYLHWYQQKSGASPKVWIYSTSNLASGVPGRFSGSGSGTSYSLTISSVEAEDAATYYCQQYSGYPITFGAGTKVEVKRLEIQNPDPAVYQLRDSKSSDKSVCLFTDFDSQTNVSQSKDSDVYITDKCVLDMRSMDFKSNSAVAWSNKSDFACANAFNNSIIPEDTFFPSSDVPCDVKLVEKSFETDTNLNFQNLSVIGFRILLLKVAGFNLLMTLRLWSSRAKRSGSGVKQTLNFDLLKLAGDVESNPGPTSTMDWIWRILFLVGAATGAHSGPQVQLVESGGGSVQAGGSLRLSCGASGNISSRNCMGWFRQAPGKEREGVAAIGQVTGRSYYVDSVKGRFTISLDNAKNTLYLQMNTLKPEDTAMYYCAAAPGCLLSALRSADYRNWGQGTQVTVSSGSGGGGSGGGGSGGGGSFEQVQLKESGPVLVAPSQTLSITCTVSGFSLASYNIHWVRQPPGKGLEWLGVIWAGGSTNYNSALMSRLSISKDNSKSQVFLQMNSLQTDDTAMYYCAKRSDDYSWFAYWGQGTLVTVSASTREDLKNVFPPEVAVFEPSKAEIAHTQKATLVCLATGFYPDHVELSWWVNGKEVHSGVCTDPQPLKEQPALNDSRYCLSSRLRVSATFWQNPRNHFRCQVQFYGLSENDEWTQDRAKPVTQIVSAEAWGRADCGITSASYHQGVLSATILYEILLGKATLYAVLVSALVLMAMVKRKDSRG

SEQ ID NO: 45750 - protein, 904 aa, synthetic construct
MALPVTALLLPLALLLHAARPQVQLVESGGGSVQAGGSLRLSCGASGNISSRNCMGWFRQAPGKEREGVAAIGQVTGRSYYVDSVKGRFTISLDNAKNTLYLQMNTLKPEDTAMYYCAAAPGCLLSALRSADYRNWGQGTQVTVSSGTGGGGSGGGGSGGGGSEFENVLTQSPAIMSASPGEKVTMTCRASSSVSSSYLHWYQQKSGASPKVWIYSTSNLASGVPGRFSGSGSGTSYSLTISSVEAEDAATYYCQQYSGYPITFGAGTKVEVKRLEDLKNVFPPEVAVFEPSEAEISHTQKATLVCLATGFYPDHVELSWWVNGKEVHSGVCTDPQPLKEQPALNDSRYCLSSRLRVSATFWQNPRNHFRCQVQFYGLSENDEWTQDRAKPVTQIVSAEAWGRADCGFTSESYQQGVLSATILYEILLGKATLYAVLVSALVLMAMVKRKDSRGRAKRSGSGATNFSLLKQAGDVEENPGPTSATMDWIWRILFLVGAATGAHSGPEVQLVESGGGLVQAGGSLRLSCAASGRTFTMGWFRQAPGKEREFVAAISLSPTLAYYADSVKGRFTISRDNAKNTVVLQMNSLKPEDTALYYCAADRKSVMSIRPDYWGQGTQVTVSSGSGGGGSGGGGSGGGGSFEQVQLKESGPVLVAPSQTLSITCTVSGFSLASYNIHWVRQPPGKGLEWLGVIWAGGSTNYNSALMSRLSISKDNSKSQVFLQMNSLQTDDTAMYYCAKRSDDYSWFAYWGQGTLVTVSASTRIQNPDPAVYQLRDSKSSDKSVCLFTDFDSQTNVSQSKDSDVYITDKCVLDMRSMDFKSNSAVAWSNKSDFACANAFNNSIIPEDTFFPSPESSCDVKLVEKSFETDTNLNFQNLSVIGFRILLLKVAGFNLLMTLRLWSS

SEQ ID NO: 45751 - protein, 767 aa, synthetic construct
MALPVTALLLPLALLLHAARPQVQLVESGGGSVQAGGSLRLSCGASGNISSRNCMGWFRQAPGKEREGVAAIGQVTGRSYYVDSVKGRFTISLDNAKNTLYLQMNTLKPEDTAMYYCAAAPGCLLSALRSADYRNWGQGTQVTVSSGTGGGGSGGGGSGGGGSEFENVLTQSPAIMSASPGEKVTMTCRASSSVSSSYLHWYQQKSGASPKVWIYSTSNLASGVPGRFSGSGSGTSYSLTISSVEAEDAATYYCQQYSGYPITFGAGTKVEVKRLEDLKNVFPPEVAVFEPSEAEISHTQKATLVCLATGFYPDHVELSWWVNGKEVHSGVCTDPQPLKEQPALNDSRYCLSSRLRVSATFWQNPRNHFRCQVQFYGLSENDEWTQDRAKPVTQIVSAEAWGRADCGFTSESYQQGVLSATILYEILLGKATLYAVLVSALVLMAMVKRKDSRGRAKRSGSGATNFSLLKQAGDVEENPGPTSATMDWIWRILFLVGAATGAHSFEQVQLKESGPVLVAPSQTLSITCTVSGFSLASYNIHWVRQPPGKGLEWLGVIWAGGSTNYNSALMSRLSISKDNSKSQVFLQMNSLQTDDTAMYYCAKRSDDYSWFAYWGQGTLVTVSASTRIQNPDPAVYQLRDSKSSDKSVCLFTDFDSQTNVSQSKDSDVYITDKCVLDMRSMDFKSNSAVAWSNKSDFACANAFNNSIIPEDTFFPSPESSCDVKLVEKSFETDTNLNFQNLSVIGFRILLLKVAGFNLLMTLRLWSS

SEQ ID NO: 45752 - protein, 767 aa, synthetic construct
MALPVTALLLPLALLLHAARPQVQLVESGGGVVQPGGSLRLSCAASGLSFSTYTVAWFRQAPGKGLEGVAAIPYTSQHMVYTDSVRGRFTISRDNSKNTLYLQMNSLRAEDTAVYYCATDRRPGTSMLAINGYNRWGQGTTVTVSSGTGGGGSGGGGSGGGGSEFENVLTQSPAIMSASPGEKVTMTCRASSSVSSSYLHWYQQKSGASPKVWIYSTSNLASGVPGRFSGSGSGTSYSLTISSVEAEDAATYYCQQYSGYPITFGAGTKVEVKRLEDLKNVFPPEVAVFEPSEAEISHTQKATLVCLATGFYPDHVELSWWVNGKEVHSGVCTDPQPLKEQPALNDSRYCLSSRLRVSATFWQNPRNHFRCQVQFYGLSENDEWTQDRAKPVTQIVSAEAWGRADCGFTSESYQQGVLSATILYEILLGKATLYAVLVSALVLMAMVKRKDSRGRAKRSGSGATNFSLLKQAGDVEENPGPTSATMDWIWRILFLVGAATGAHSFEQVQLKESGPVLVAPSQTLSITCTVSGFSLASYNIHWVRQPPGKGLEWLGVIWAGGSTNYNSALMSRLSISKDNSKSQVFLQMNSLQTDDTAMYYCAKRSDDYSWFAYWGQGTLVTVSASTRIQNPDPAVYQLRDSKSSDKSVCLFTDFDSQTNVSQSKDSDVYITDKCVLDMRSMDFKSNSAVAWSNKSDFACANAFNNSIIPEDTFFPSPESSCDVKLVEKSFETDTNLNFQNLSVIGFRILLLKVAGFNLLMTLRLWSS

SEQ ID NO: 45753 - protein, 766 aa, synthetic construct
MALPVTALLLPLALLLHAARPENVLTQSPAIMSASPGEKVTMTCRASSSVSSSYLHWYQQKSGASPKVWIYSTSNLASGVPGRFSGSGSGTSYSLTISSVEAEDAATYYCQQYSGYPITFGAGTKVEVKRLEDLKNVFPPEVAVFEPSEAEISHTQKATLVCLATGFYPDHVELSWWVNGKEVHSGVCTDPQPLKEQPALNDSRYCLSSRLRVSATFWQNPRNHFRCQVQFYGLSENDEWTQDRAKPVTQIVSAEAWGRADCGFTSESYQQGVLSATILYEILLGKATLYAVLVSALVLMAMVKRKDSRGRAKRSGSGATNFSLLKQAGDVEENPGPTSTMDWIWRILFLVGAATGAHSGPQVQLVESGGGVVQPGGSLRLSCAASGLSFSTYTVAWFRQAPGKGLEGVAAIPYTSQHMVYTDSVRGRFTISRDNSKNTLYLQMNSLRAEDTAVYYCATDRRPGTSMLAINGYNRWGQGTTVTVSSGSGGGGSGGGGSGGGGSFEQVQLKESGPVLVAPSQTLSITCTVSGFSLASYNIHWVRQPPGKGLEWLGVIWAGGSTNYNSALMSRLSISKDNSKSQVFLQMNSLQTDDTAMYYCAKRSDDYSWFAYWGQGTLVTVSASTRIQNPDPAVYQLRDSKSSDKSVCLFTDFDSQTNVSQSKDSDVYITDKCVLDMRSMDFKSNSAVAWSNKSDFACANAFNNSIIPEDTFFPSPESSCDVKLVEKSFETDTNLNFQNLSVIGFRILLLKVAGFNLLMTLRLWSS

SEQ ID NO: 45754 - protein, 768 aa, synthetic construct
MALPVTALLLPLALLLHAARPENVLTQSPAIMSASPGEKVTMTCRASSSVSSSYLHWYQQKSGASPKVWIYSTSNLASGVPGRFSGSGSGTSYSLTISSVEAEDAATYYCQQYSGYPITFGAGTKVEVKRLEDLKNVFPPEVAVFEPSEAEISHTQKATLVCLATGFYPDHVELSWWVNGKEVHSGVCTDPQPLKEQPALNDSRYCLSSRLRVSATFWQNPRNHFRCQVQFYGLSENDEWTQDRAKPVTQIVSAEAWGRADCGFTSESYQQGVLSATILYEILLGKATLYAVLVSALVLMAMVKRKDSRGRAKRSGSGATNFSLLKQAGDVEENPGPTSTMDWIWRILFLVGAATGAHSGPEVQLVESGGGSVQAGGSLRLSCAASGYTYSINCMGWFRQAPGKEREGVAAISTGGGRTDYRDSVKGRFTISQDNAKNTVYLQMNSLKPEDTAMYYCAGKTTYPGYGCGLGRSAYNYWGQGTQVTVSSGSGGGGSGGGGSGGGGSFEQVQLKESGPVLVAPSQTLSITCTVSGFSLASYNIHWVRQPPGKGLEWLGVIWAGGSTNYNSALMSRLSISKDNSKSQVFLQMNSLQTDDTAMYYCAKRSDDYSWFAYWGQGTLVTVSASTRIQNPDPAVYQLRDSKSSDKSVCLFTDFDSQTNVSQSKDSDVYITDKCVLDMRSMDFKSNSAVAWSNKSDFACANAFNNSIIPEDTFFPSPESSCDVKLVEKSFETDTNLNFQNLSVIGFRILLLKVAGFNLLMTLRLWSS

SEQ ID NO: 45755 - protein, 621 aa, synthetic construct
MALPVTALLLPLALLLHAARPENVLTQSPAIMSASPGEKVTMTCRASSSVSSSYLHWYQQKSGASPKVWIYSTSNLASGVPGRFSGSGSGTSYSLTISSVEAEDAATYYCQQYSGYPITFGAGTKVEVKRLEDLKHVFPPEVAVFEPSDAEIWHTQKATLVCLATGFYPDHVELSWWVNGKEVHSGVSTDPQPLKEQPALNDSRYCLSSRLRVSATFWQNPRNHFRCQVQFYGLSENDEWTQDRAKPVTQIVSAEAWGRADCGFTSESYQQGVLSATILYEILLGKATLYAVLVSALVLMAMVKRKDSRGRAKRSGSGATNFSLLKQAGDVEENPGPTSMDWIWRILFLVGAATGAHSFEQVQLKESGPVLVAPSQTLSITCTVSGFSLASYNIHWVRQPPGKGLEWLGVIWAGGSTNYNSALMSRLSISKDNSKSQVFLQMNSLQTDDTAMYYCAKRSDDYSWFAYWGQGTLVTVSASTRIQNPDPAVYQLRDSKSSDKSVCLFTDFDSQTNVSQSKDSDVYITDKTVLDMRSMDFKSNSAVAWSSKSDFACANAFNNSIIPEDTFFPSPEMACDVKLVEKSFETDTNLNFQNLLVIWLRILLLKVAGFNLLMTLRLWSS

SEQ ID NO: 45756 - protein, 621 aa, synthetic construct
MALPVTALLLPLALLLHAARPENVLTQSPAIMSASPGEKVTMTCRASSSVSSSYLHWYQQKSGASPKVWIYSTSNLASGVPGRFSGSGSGTSYSLTISSVEAEDAATYYCQQYSGYPITFGAGTKVEVKRLEDLKHVFPPEVAVFEPSDAEIWHTQKATLVCLATGFYPDHVELSWWVNGKEVHSGVSTDPQPLKEQPALNDSRYCLSSRLRVSATFWQNPRNHFRCQVQFYGLSENDEWTQDRAKPVTQIVSAEAWGRADCGFTSESYQQGVLSATILYEILLGKATLYAVLVSALVLMAMVKRKDSRGRAKRSGSGATNFSLLKQAGDVEENPGPTSMDWIWRILFLVGAATGAHSFEQVQLKESGPVLVAPSQTLSITCTVSGFSLASYNIHWVRQPPGKGLEWLGVIWAGGSTNYNSALMSRLSISKDNSKSQVFLQMNSLQTDDTAMYYCAKRSDDYSWFAYWGQGTLVTVSASTRIQNPDPAVYQLRDSKSSDKSVCLFTDFDSQTNVSQSKDSDVYITDKTVLDMRSMDFKSNSAVAWSTKSDFACANAFNNSIIPEDTFFPSPEVVCDVKLVEKSFETDTNLNFQNLVVIGARILLLKVAGFNLLMTLRLWSS

SEQ ID NO: 45757 - protein, 621 aa, synthetic construct
MALPVTALLLPLALLLHAARPENVLTQSPAIMSASPGEKVTMTCRASSSVSSSYLHWYQQKSGASPKVWIYSTSNLASGVPGRFSGSGSGTSYSLTISSVEAEDAATYYCQQYSGYPITFGAGTKVEVKRLEDLKNVFPPEVAVFEPSKAEISRTQKATLVCLATGFYPPHVELSWWVNGKEVHDGVCTDPQPLKEQPALNDSRYCLSSRLRVSATFWQNPRNHFRCQVQFYGLSENDEWTQDRAKPVTQIVSAEAWGRADCGFTSESYQQGVLSATILYEILLGKATLYAVLVSALVLMAMVKRKDSRGRAKRSGSGATNFSLLKQAGDVEENPGPTSMDWIWRILFLVGAATGAHSFEQVQLKESGPVLVAPSQTLSITCTVSGFSLASYNIHWVRQPPGKGLEWLGVIWAGGSTNYNSALMSRLSISKDNSKSQVFLQMNSLQTDDTAMYYCAKRSDDYSWFAYWGQGTLVTVSASTRIQNPDPAVYQLRDSKSSDKFVCLFTDFDSQINVSQSKDSDVYITDKCVLDMRSMDFKSNSAVAWSNKSDFTCANAFNNSIIPEDTFFPSPESSCDVKLVEKSFETDTNLNFQNLSVIGFRILLLKVAGFNLLMTLRLWSS

SEQ ID NO: 45758 - protein, 763 aa, synthetic construct
MALPVTALLLPLALLLHAARPENVLTQSPAIMSASPGEKVTMTCRASSSVSSSYLHWYQQKSGASPKVWIYSTSNLASGVPGRFSGSGSGTSYSLTISSVEAEDAATYYCQQYSGYPITFGAGTKVEVKRLEDLKNVFPPEVAVFEPSEAEISHTQKATLVCLATGFYPDHVELSWWVNGKEVHSGVCTDPQPLKEQPALNDSRYCLSSRLRVSATFWQNPRNHFRCQVQFYGLSENDEWTQDRAKPVTQIVSAEAWGRADCGFTSESYQQGVLSATILYEILLGKATLYAVLVSALVLMAMVKRKDSRGRAKRSGSGATNFSLLKQAGDVEENPGPTSTMDWIWRILFLVGAATGAHSGPQVQLQESGPGLVKPSQTLSLTCTVSGASITTGEYYWNWFRQPPGKGLEWMGAIAASGSTTYSPSFESRTSISRDTSKNQFSLKLSSVTAADTAVYYCGRSFGVAAVTTGQNRGQGTLVTVSSGSGGGGSGGGGSGGGGSFEQVQLKESGPVLVAPSQTLSITCTVSGFSLASYNIHWVRQPPGKGLEWLGVIWAGGSTNYNSALMSRLSISKDNSKSQVFLQMNSLQTDDTAMYYCAKRSDDYSWFAYWGQGTLVTVSASTRIQNPDPAVYQLRDSKSSDKSVCLFTDFDSQTNVSQSKDSDVYITDKCVLDMRSMDFKSNSAVAWSNKSDFACANAFNNSIIPEDTFFPSPESSCDVKLVEKSFETDTNLNFQNLSVIGFRILLLKVAGFNLLMTLRLWSS

SEQ ID NO: 45759 - protein, 904 aa, synthetic construct
MALPVTALLLPLALLLHAARPQVQLQESGPGLVKPSQTLSLTCTVSGGSITTGEFYWNWFRQPPGKGLEWMGAIAASGSTTYSPSFESRTSISRDTSKNQFSLKLSSVTAADTAVYYCGRSFGVAAVTTGQNRGQGTLVTVSSGTGGGGSGGGGSGGGGSEFENVLTQSPAIMSASPGEKVTMTCRASSSVSSSYLHWYQQKSGASPKVWIYSTSNLASGVPGRFSGSGSGTSYSLTISSVEAEDAATYYCQQYSGYPITFGAGTKVEVKRLEIQNPDPAVYQLRDSKSSDKSVCLFTDFDSQTNVSQSKDSDVYITDKCVLDMRSMDFKSNSAVAWSNKSDFACANAFNNSIIPEDTFFPSSDVPCDVKLVEKSFETDTNLNFQNLSVIGFRILLLKVAGFNLLMTLRLWSSRAKRSGSGVKQTLNFDLLKLAGDVESNPGPTSTMDWIWRILFLVGAATGAHSGPEVQLVESGGGLVQPGGSLRLSCAASGRTFTMGWYRQAPGKEREFVAAISLSPTLAYYADSVKGRFTISRDNSKNTVVLQMNSLRAEDTALYYCAADRKSVMSIRPDYWGQGTLVTVSSGSGGGGSGGGGSGGGGSFEQVQLKESGPVLVAPSQTLSITCTVSGFSLASYNIHWVRQPPGKGLEWLGVIWAGGSTNYNSALMSRLSISKDNSKSQVFLQMNSLQTDDTAMYYCAKRSDDYSWFAYWGQGTLVTVSASTREDLKNVFPPEVAVFEPSKAEIAHTQKATLVCLATGFYPDHVELSWWVNGKEVHSGVCTDPQPLKEQPALNDSRYCLSSRLRVSATFWQNPRNHFRCQVQFYGLSENDEWTQDRAKPVTQIVSAEAWGRADCGITSASYHQGVLSATILYEILLGKATLYAVLVSALVLMAMVKRKDSRG

SEQ ID NO: 45760 - protein, 767 aa, synthetic construct
MALPVTALLLPLALLLHAARPQVQLQESGPGLVKPSQTLSLTCTVSGGSITTGEFYWNWFRQPPGKGLEWMGAIAASGSTTYSPSFESRTSISRDTSKNQFSLKLSSVTAADTAVYYCGRSFGVAAVTTGQNRGQGTLVTVSSGTGGGGSGGGGSGGGGSEFENVLTQSPAIMSASPGEKVTMTCRASSSVSSSYLHWYQQKSGASPKVWIYSTSNLASGVPGRFSGSGSGTSYSLTISSVEAEDAATYYCQQYSGYPITFGAGTKVEVKRLEIQNPDPAVYQLRDSKSSDKSVCLFTDFDSQTNVSQSKDSDVYITDKCVLDMRSMDFKSNSAVAWSNKSDFACANAFNNSIIPEDTFFPSSDVPCDVKLVEKSFETDTNLNFQNLSVIGFRILLLKVAGFNLLMTLRLWSSRAKRSGSGVKQTLNFDLLKLAGDVESNPGPTSTMDWIWRILFLVGAATGAHSFEQVQLKESGPVLVAPSQTLSITCTVSGFSLASYNIHWVRQPPGKGLEWLGVIWAGGSTNYNSALMSRLSISKDNSKSQVFLQMNSLQTDDTAMYYCAKRSDDYSWFAYWGQGTLVTVSASTREDLKNVFPPEVAVFEPSKAEIAHTQKATLVCLATGFYPDHVELSWWVNGKEVHSGVCTDPQPLKEQPALNDSRYCLSSRLRVSATFWQNPRNHFRCQVQFYGLSENDEWTQDRAKPVTQIVSAEAWGRADCGITSASYHQGVLSATILYEILLGKATLYAVLVSALVLMAMVKRKDSRG

SEQ ID NO: 45761 - protein, 900 aa, synthetic construct
MALPVTALLLPLALLLHAARPEVQLVESGGGLVQAGGSLRLSCAASGRTFSMGWFRQAPGKEREFVAAITYSGGSPYYADSVKGRFTISRDNAKNTVYLQMNSLKPEDTAVYYCAANPTYGSDWNAENWGQGTQVTVSSGTGGGGSGGGGSGGGGSEFENVLTQSPAIMSASPGEKVTMTCRASSSVSSSYLHWYQQKSGASPKVWIYSTSNLASGVPGRFSGSGSGTSYSLTISSVEAEDAATYYCQQYSGYPITFGAGTKVEVKRLEDLKNVFPPEVAVFEPSEAEISHTQKATLVCLATGFYPDHVELSWWVNGKEVHSGVCTDPQPLKEQPALNDSRYCLSSRLRVSATFWQNPRNHFRCQVQFYGLSENDEWTQDRAKPVTQIVSAEAWGRADCGFTSESYQQGVLSATILYEILLGKATLYAVLVSALVLMAMVKRKDSRGRAKRSGSGATNFSLLKQAGDVEENPGPTSTMDWIWRILFLVGAATGAHSGPQVQLQESGPGLVKPSQTLSLTCTVSGASITTGEYYWNWFRQPPGKGLEWMGAIAASGSTTYSPSFESRTSISRDTSKNQFSLKLSSVTAADTAVYYCGRSFGVAAVTTGQNRGQGTLVTVSSGSGGGGSGGGGSGGGGSFEQVQLKESGPVLVAPSQTLSITCTVSGFSLASYNIHWVRQPPGKGLEWLGVIWAGGSTNYNSALMSRLSISKDNSKSQVFLQMNSLQTDDTAMYYCAKRSDDYSWFAYWGQGTLVTVSASTRIQNPDPAVYQLRDSKSSDKSVCLFTDFDSQTNVSQSKDSDVYITDKCVLDMRSMDFKSNSAVAWSNKSDFACANAFNNSIIPEDTFFPSPESSCDVKLVEKSFETDTNLNFQNLSVIGFRILLLKVAGFNLLMTLRLWSS

SEQ ID NO: 45762 - protein, 907 aa, synthetic construct
MALPVTALLLPLALLLHAARPEVQLVESGGGLVQAGGSLRLSCAASGRTFSMGWFRQAPGKEREFVAAITYSGGSPYYADSVKGRFTISRDNAKNTVYLQMNSLKPEDTAVYYCAANPTYGSDWNAENWGQGTQVTVSSGTGGGGSGGGGSGGGGSEFENVLTQSPAIMSASPGEKVTMTCRASSSVSSSYLHWYQQKSGASPKVWIYSTSNLASGVPGRFSGSGSGTSYSLTISSVEAEDAATYYCQQYSGYPITFGAGTKVEVKRLEIQNPDPAVYQLRDSKSSDKSVCLFTDFDSQTNVSQSKDSDVYITDKCVLDMRSMDFKSNSAVAWSNKSDFACANAFNNSIIPEDTFFPSSDVPCDVKLVEKSFETDTNLNFQNLSVIGFRILLLKVAGFNLLMTLRLWSSRAKRSGSGVKQTLNFDLLKLAGDVESNPGPTSTMDWIWRILFLVGAATGAHSGPQVQLVESGGGLVQPGGSLRLSCAASGNINSRNCMGWFRQAPGKGREGVAAIGQVTGRTYYVDSVKGRFTISLDNSKNTLYLQMNSLRAEDTAVYYCAAAPGCLLSALRSADYRNWGQGTLVTVSSGSGGGGSGGGGSGGGGSFEQVQLKESGPVLVAPSQTLSITCTVSGFSLASYNIHWVRQPPGKGLEWLGVIWAGGSTNYNSALMSRLSISKDNSKSQVFLQMNSLQTDDTAMYYCAKRSDDYSWFAYWGQGTLVTVSASTREDLKNVFPPEVAVFEPSKAEIAHTQKATLVCLATGFYPDHVELSWWVNGKEVHSGVCTDPQPLKEQPALNDSRYCLSSRLRVSATFWQNPRNHFRCQVQFYGLSENDEWTQDRAKPVTQIVSAEAWGRADCGITSASYHQGVLSATILYEILLGKATLYAVLVSALVLMAMVKRKDSRG

SEQ ID NO: 45763 - protein, 903 aa, synthetic construct
MALPVTALLLPLALLLHAARPEVQLVESGGGLVQAGGSLRLSCAASGRTFSMGWFRQAPGKEREFVAAITYSGGSPYYADSVKGRFTISRDNAKNTVYLQMNSLKPEDTAVYYCAANPTYGSDWNAENWGQGTQVTVSSGTGGGGSGGGGSGGGGSEFENVLTQSPAIMSASPGEKVTMTCRASSSVSSSYLHWYQQKSGASPKVWIYSTSNLASGVPGRFSGSGSGTSYSLTISSVEAEDAATYYCQQYSGYPITFGAGTKVEVKRLEDLKNVFPPEVAVFEPSEAEISHTQKATLVCLATGFYPDHVELSWWVNGKEVHSGVCTDPQPLKEQPALNDSRYCLSSRLRVSATFWQNPRNHFRCQVQFYGLSENDEWTQDRAKPVTQIVSAEAWGRADCGFTSESYQQGVLSATILYEILLGKATLYAVLVSALVLMAMVKRKDSRGRAKRSGSGATNFSLLKQAGDVEENPGPTSTMDWIWRILFLVGAATGAHSGPQVQLVESGGGLVQPGGSLRLSCAASGNINSRNCMGWFRQAPGKGREGVAAIGQVTGRTYYVDSVKGRFTISLDNSKNTLYLQMNSLRAEDTAVYYCAAAPGCLLSALRSADYRNWGQGTLVTVSSGSGGGGSGGGGSGGGGSFEQVQLKESGPVLVAPSQTLSITCTVSGFSLASYNIHWVRQPPGKGLEWLGVIWAGGSTNYNSALMSRLSISKDNSKSQVFLQMNSLQTDDTAMYYCAKRSDDYSWFAYWGQGTLVTVSASTRIQNPDPAVYQLRDSKSSDKSVCLFTDFDSQTNVSQSKDSDVYITDKCVLDMRSMDFKSNSAVAWSNKSDFACANAFNNSIIPEDTFFPSPESSCDVKLVEKSFETDTNLNFQNLSVIGFRILLLKVAGFNLLMTLRLWSS

SEQ ID NO: 45764 - protein, 903 aa, synthetic construct
MALPVTALLLPLALLLHAARPEVQLVESGGGLVQAGGSLRLSCAASGRTFTMGWFRQAPGKEREFVAAISLSPTLAYYADSVKGRFTISRDNAKNTVVLQMNSLKPEDTALYYCAADRKSVMSIRPDYWGQGTQVTVSSGTGGGGSGGGGSGGGGSEFENVLTQSPAIMSASPGEKVTMTCRASSSVSSSYLHWYQQKSGASPKVWIYSTSNLASGVPGRFSGSGSGTSYSLTISSVEAEDAATYYCQQYSGYPITFGAGTKVEVKRLEDLKNVFPPEVAVFEPSEAEISHTQKATLVCLATGFYPDHVELSWWVNGKEVHSGVCTDPQPLKEQPALNDSRYCLSSRLRVSATFWQNPRNHFRCQVQFYGLSENDEWTQDRAKPVTQIVSAEAWGRADCGFTSESYQQGVLSATILYEILLGKATLYAVLVSALVLMAMVKRKDSRGRAKRSGSGATNFSLLKQAGDVEENPGPTSTMDWIWRILFLVGAATGAHSGPQVQLVESGGGLVQPGGSLRLSCAASGNINSRNCMGWFRQAPGKGREGVAAIGQVTGRTYYVDSVKGRFTISLDNSKNTLYLQMNSLRAEDTAVYYCAAAPGCLLSALRSADYRNWGQGTLVTVSSGSGGGGSGGGGSGGGGSFEQVQLKESGPVLVAPSQTLSITCTVSGFSLASYNIHWVRQPPGKGLEWLGVIWAGGSTNYNSALMSRLSISKDNSKSQVFLQMNSLQTDDTAMYYCAKRSDDYSWFAYWGQGTLVTVSASTRIQNPDPAVYQLRDSKSSDKSVCLFTDFDSQTNVSQSKDSDVYITDKCVLDMRSMDFKSNSAVAWSNKSDFACANAFNNSIIPEDTFFPSPESSCDVKLVEKSFETDTNLNFQNLSVIGFRILLLKVAGFNLLMTLRLWSS

SEQ ID NO: 45765 - protein, 907 aa, synthetic construct
MALPVTALLLPLALLLHAARPQVQLQESGPGLVKPSQTLSLTCTVSGGSITTGEFYWNWFRQPPGKGLEWMGAIAASGSTTYSPSFESRTSISRDTSKNQFSLKLSSVTAADTAVYYCGRSFGVAAVTTGQNRGQGTLVTVSSGTGGGGSGGGGSGGGGSEFENVLTQSPAIMSASPGEKVTMTCRASSSVSSSYLHWYQQKSGASPKVWIYSTSNLASGVPGRFSGSGSGTSYSLTISSVEAEDAATYYCQQYSGYPITFGAGTKVEVKRLEDLKNVFPPEVAVFEPSEAEISHTQKATLVCLATGFYPDHVELSWWVNGKEVHSGVCTDPQPLKEQPALNDSRYCLSSRLRVSATFWQNPRNHFRCQVQFYGLSENDEWTQDRAKPVTQIVSAEAWGRADCGFTSESYQQGVLSATILYEILLGKATLYAVLVSALVLMAMVKRKDSRGRAKRSGSGATNFSLLKQAGDVEENPGPTSTMDWIWRILFLVGAATGAHSGPQVQLVESGGGLVQPGGSLRLSCAASGNINSRNCMGWFRQAPGKGREGVAAIGQVTGRTYYVDSVKGRFTISLDNSKNTLYLQMNSLRAEDTAVYYCAAAPGCLLSALRSADYRNWGQGTLVTVSSGSGGGGSGGGGSGGGGSFEQVQLKESGPVLVAPSQTLSITCTVSGFSLASYNIHWVRQPPGKGLEWLGVIWAGGSTNYNSALMSRLSISKDNSKSQVFLQMNSLQTDDTAMYYCAKRSDDYSWFAYWGQGTLVTVSASTRIQNPDPAVYQLRDSKSSDKSVCLFTDFDSQTNVSQSKDSDVYITDKCVLDMRSMDFKSNSAVAWSNKSDFACANAFNNSIIPEDTFFPSPESSCDVKLVEKSFETDTNLNFQNLSVIGFRILLLKVAGFNLLMTLRLWSS

SEQ ID NO: 45766 - protein, 490 aa, synthetic construct
MALPVTALLLPLALLLHAARPEIVLTQSPATLSLSPGERATLSCRASQSVSSYLAWYQQKPGQAPRLLIYDASNRATGIPARFSGSGSGTDFTLTISSLEPEDFAVYYCQQRSNWPPTFGQGTKVEIKGGGGSGGGGSGGGGSQLQLQESGPGLVKPSETLSLTCTVSGGSISSSSYWWGWTRQPPGRGLEWIGTMYYSGNIYYNPSLQSRATISVDTSKNQFSLKLSSVTAADTAVYYCARHVGYSYGRRFWYFDLWGRGTLVTVSSTRKIEVMYPPPYLDNEKSNGTIIHVKGKHLCPSPLFPGPSKPFWVLVVVGGVLACYSLLVTVAFIIFWVRSKRSRLLHSDYMNMTPRRPGPTRKHYQPYAPPRDFAAYRSRVKFSRSADAPAYQQGQNQLYNELNLGRREEYDVLDKRRGRDPEMGGKPRRKNPQEGLYNELQKDKMAEAYSEIGMKGERRRGKGHDGLYQGLSTATKDTYDALHMQALPPR

SEQ ID NO: 45767 - protein, 496 aa, synthetic construct
MALPVTALLLPLALLLHAARPEIVLTQSPATLSLSPGERATLSCRASQSVSSYLAWYQQKPGQAPRLLIYDASNRATGIPARFSGSGSGTDFTLTISSLEPEDFAVYYCQQRSNWPPTFGQGTKVEIKGGGGSGGGGSGGGGSQLQLQESGPGLVKPSETLSLTCTVSGGSISSSSYWWGWTRQPPGRGLEWIGTMYYSGNIYYNPSLQSRATISVDTSKNQFSLKLSSVTAADTAVYYCARHVGYSYGRRFWYFDLWGRGTLVTVSSTRAKPTTTPAPRPPTPAPTIASQPLSLRPEACRPAAGGAVHTRGLDFACDIYIWAPLAGTCGVLLLSLVITLYCKRGRKKLLYIFKQPFMRPVQTTQEEDGCSCRFPEEEEGGCELRVKFSRSADAPAYQQGQNQLYNELNLGRREEYDVLDKRRGRDPEMGGKPRRKNPQEGLYNELQKDKMAEAYSEIGMKGERRRGKGHDGLYQGLSTATKDTYDALHMQALPPR

SEQ ID NO: 45768 - protein, 496 aa, synthetic construct
MALPVTALLLPLALLLHAARPQLQLQESGPGLVKPSETLSLTCTVSGGSISSSSYWWGWTRQPPGRGLEWIGTMYYSGNIYYNPSLQSRATISVDTSKNQFSLKLSSVTAADTAVYYCARHVGYSYGRRFWYFDLWGRGTLVTVSSGGGGSGGGGSGGGGSEIVLTQSPATLSLSPGERATLSCRASQSVSSYLAWYQQKPGQAPRLLIYDASNRATGIPARFSGSGSGTDFTLTISSLEPEDFAVYYCQQRSNWPPTFGQGTKVEIKTRAKPTTTPAPRPPTPAPTIASQPLSLRPEACRPAAGGAVHTRGLDFACDIYIWAPLAGTCGVLLLSLVITLYCKRGRKKLLYIFKQPFMRPVQTTQEEDGCSCRFPEEEEGGCELRVKFSRSADAPAYQQGQNQLYNELNLGRREEYDVLDKRRGRDPEMGGKPRRKNPQEGLYNELQKDKMAEAYSEIGMKGERRRGKGHDGLYQGLSTATKDTYDALHMQALPPR

SEQ ID NO: 45769 - protein, 629 aa, synthetic construct
MALPVTALLLPLALLLHAARPEIVLTQSPATLSLSPGERATLSCRASQSVSSYLAWYQQKPGQAPRLLIYDASNRATGIPARFSGSGSGTDFTLTISSLEPEDFAVYYCQQRSNWPPTFGQGTKVEIKLEIQNPDPAVYQLRDSKSSDKSVCLFTDFDSQTNVSQSKDSDVYITDKCVLDMRSMDFKSNSAVAWSNKSDFACANAFNNSIIPEDTFFPSSDVPCDVKLVEKSFETDTNLNFQNLSVIGFRILLLKVAGFNLLMTLRLWSSRAKRSGSGVKQTLNFDLLKLAGDVESNPGPTSMDWIWRILFLVGAATGAHSFEQLQLQESGPGLVKPSETLSLTCTVSGGSISSSSYWWGWTRQPPGRGLEWIGTMYYSGNIYYNPSLQSRATISVDTSKNQFSLKLSSVTAADTAVYYCARHVGYSYGRRFWYFDLWGRGTLVTVSSTREDLKNVFPPEVAVFEPSKAEIAHTQKATLVCLATGFYPDHVELSWWVNGKEVHSGVCTDPQPLKEQPALNDSRYCLSSRLRVSATFWQNPRNHFRCQVQFYGLSENDEWTQDRAKPVTQIVSAEAWGRADCGITSASYHQGVLSATILYEILLGKATLYAVLVSALVLMAMVKRKDSRG

SEQ ID NO: 45770 - protein, 625 aa, synthetic construct
MALPVTALLLPLALLLHAARPEIVLTQSPATLSLSPGERATLSCRASQSVSSYLAWYQQKPGQAPRLLIYDASNRATGIPARFSGSGSGTDFTLTISSLEPEDFAVYYCQQRSNWPPTFGQGTKVEIKLEDLKNVFPPEVAVFEPSKAEIAHTQKATLVCLATGFYPDHVELSWWVNGKEVHSGVCTDPQPLKEQPALNDSRYCLSSRLRVSATFWQNPRNHFRCQVQFYGLSENDEWTQDRAKPVTQIVSAEAWGRADCGITSASYHQGVLSATILYEILLGKATLYAVLVSALVLMAMVKRKDSRGRAKRSGSGATNFSLLKQAGDVEENPGPTSMDWIWRILFLVGAATGAHSFEQLQLQESGPGLVKPSETLSLTCTVSGGSISSSSYWWGWTRQPPGRGLEWIGTMYYSGNIYYNPSLQSRATISVDTSKNQFSLKLSSVTAADTAVYYCARHVGYSYGRRFWYFDLWGRGTLVTVSSTRIQNPDPAVYQLRDSKSSDKSVCLFTDFDSQTNVSQSKDSDVYITDKCVLDMRSMDFKSNSAVAWSNKSDFACANAFNNSIIPEDTFFPSSDVPCDVKLVEKSFETDTNLNFQNLSVIGFRILLLKVAGFNLLMTLRLWSS

SEQ ID NO: 45771 - protein, 625 aa, synthetic construct
MALPVTALLLPLALLLHAARPEIVLTQSPATLSLSPGERATLSCRASQSVSSYLAWYQQKPGQAPRLLIYDASNRATGIPARFSGSGSGTDFTLTISSLEPEDFAVYYCQQRSNWPPTFGQGTKVEIKLEDLKNVFPPEVAVFEPSEAEISHTQKATLVCLATGFYPDHVELSWWVNGKEVHSGVCTDPQPLKEQPALNDSRYCLSSRLRVSATFWQNPRNHFRCQVQFYGLSENDEWTQDRAKPVTQIVSAEAWGRADCGFTSESYQQGVLSATILYEILLGKATLYAVLVSALVLMAMVKRKDSRGRAKRSGSGATNFSLLKQAGDVEENPGPTSMDWIWRILFLVGAATGAHSFEQLQLQESGPGLVKPSETLSLTCTVSGGSISSSSYWWGWTRQPPGRGLEWIGTMYYSGNIYYNPSLQSRATISVDTSKNQFSLKLSSVTAADTAVYYCARHVGYSYGRRFWYFDLWGRGTLVTVSSTRIQNPDPAVYQLRDSKSSDKSVCLFTDFDSQTNVSQSKDSDVYITDKCVLDMRSMDFKSNSAVAWSNKSDFACANAFNNSIIPEDTFFPSPESSCDVKLVEKSFETDTNLNFQNLSVIGFRILLLKVAGFNLLMTLRLWSS

SEQ ID NO: 45772 - protein, 629 aa, synthetic construct
MALPVTALLLPLALLLHAARPEIVLTQSPATLSLSPGERATLSCRASQSVSSYLAWYQQKPGQAPRLLIYDASNRATGIPARFSGSGSGTDFTLTISSLEPEDFAVYYCQQRSNWPPTFGQGTKVEIKLEIQNPDPAVYQLRDSKSSDKSVCLFTDFDSQTNVSQSKDSDVYITDKCVLDMRSMDFKSNSAVAWSNKSDFACANAFNNSIIPEDTFFPSPESSCDVKLVEKSFETDTNLNFQNLSVIGFRILLLKVAGFNLLMTLRLWSSRAKRSGSGVKQTLNFDLLKLAGDVESNPGPTSMDWIWRILFLVGAATGAHSFEQLQLQESGPGLVKPSETLSLTCTVSGGSISSSSYWWGWTRQPPGRGLEWIGTMYYSGNIYYNPSLQSRATISVDTSKNQFSLKLSSVTAADTAVYYCARHVGYSYGRRFWYFDLWGRGTLVTVSSTREDLKNVFPPEVAVFEPSEAEISHTQKATLVCLATGFYPDHVELSWWVNGKEVHSGVCTDPQPLKEQPALNDSRYCLSSRLRVSATFWQNPRNHFRCQVQFYGLSENDEWTQDRAKPVTQIVSAEAWGRADCGFTSESYQQGVLSATILYEILLGKATLYAVLVSALVLMAMVKRKDSRG

SEQ ID NO: 45773 - protein, 641 aa, synthetic construct
MALPVTALLLPLALLLHAARPLEEDLKNVFPPEVAVFEPSKAEIAHTQKATLVCLATGFYPDHVELSWWVNGKEVHSGVCTDPQPLKEQPALNDSRYCLSSRLRVSATFWQNPRNHFRCQVQFYGLSENDEWTQDRAKPVTQIVSAEAWGRADCGITSASYHQGVLSATILYEILLGKATLYAVLVSALVLMAMVKRKDSRGRAKRSGSGATNFSLLKQAGDVEENPGPTSMALPVTALLLPLALLLHAARPEIVLTQSPATLSLSPGERATLSCRASQSVSSYLAWYQQKPGQAPRLLIYDASNRATGIPARFSGSGSGTDFTLTISSLEPEDFAVYYCQQRSNWPPTFGQGTKVEIKGGGGSGGGGSGGGGSQLQLQESGPGLVKPSETLSLTCTVSGGSISSSSYWWGWTRQPPGRGLEWIGTMYYSGNIYYNPSLQSRATISVDTSKNQFSLKLSSVTAADTAVYYCARHVGYSYGRRFWYFDLWGRGTLVTVSSTRIQNPDPAVYQLRDSKSSDKSVCLFTDFDSQTNVSQSKDSDVYITDKCVLDMRSMDFKSNSAVAWSNKSDFACANAFNNSIIPEDTFFPSSDVPCDVKLVEKSFETDTNLNFQNLSVIGFRILLLKVAGFNLLMTLRLWSS

SEQ ID NO: 45774 - protein, 648 aa, synthetic construct
MALPVTALLLPLALLLHAARPLEGSGDRPDPAVYQLRDSKSSDKSVCLFTDFDSQTNVSQSKDSDVYITDKCVLDMRSMDFKSNSAVAWSNKSDFACANAFNNSIIPEDTFFPSPESSCDVKLVEKSFETDTNLNFQNLSVIGFRILLLKVAGFNLLMTLRLWSSSSRAKRSGSGVKQTLNFDLLKLAGDVESNPGPTSMALPVTALLLPLALLLHAARPEIVLTQSPATLSLSPGERATLSCRASQSVSSYLAWYQQKPGQAPRLLIYDASNRATGIPARFSGSGSGTDFTLTISSLEPEDFAVYYCQQRSNWPPTFGQGTKVEIKGGGGSGGGGSGGGGSQLQLQESGPGLVKPSETLSLTCTVSGGSISSSSYWWGWTRQPPGRGLEWIGTMYYSGNIYYNPSLQSRATISVDTSKNQFSLKLSSVTAADTAVYYCARHVGYSYGRRFWYFDLWGRGTLVTVSSTREDLKNVFPPEVAVFEPSEAEISHTQKATLVCLATGFYPDHVELSWWVNGKEVHSGVCTDPQPLKEQPALNDSRYCLSSRLRVSATFWQNPRNHFRCQVQFYGLSENDEWTQDRAKPVTQIVSAEAWGRADCGFTSESYQQGVLSATILYEILLGKATLYAVLVSALVLMAMVKRKDSRG

SEQ ID NO: 45775 - protein, 625 aa, synthetic construct
MALPVTALLLPLALLLHAARPEIVLTQSPATLSLSPGERATLSCRASQSVSSYLAWYQQKPGQAPRLLIYDASNRATGIPARFSGSGSGTDFTLTISSLEPEDFAVYYCQQRSNWPPTFGQGTKVEIKLEDLKNVFPPEVAVFEPSEAEISHTQKATLVCLATGFYPDHVELSWWVNGKEVHSGVSTDPQPLKEQPALNDSRYCLSSRLRVSATFWQNPRNHFRCQVQFYGLSENDEWTQDRAKPVTQIVSAEAWGRADCGFTSESYQQGVLSATILYEILLGKATLYAVLVSALVLMAMVKRKDSRGRAKRSGSGATNFSLLKQAGDVEENPGPTSMDWIWRILFLVGAATGAHSFEQLQLQESGPGLVKPSETLSLTCTVSGGSISSSSYWWGWTRQPPGRGLEWIGTMYYSGNIYYNPSLQSRATISVDTSKNQFSLKLSSVTAADTAVYYCARHVGYSYGRRFWYFDLWGRGTLVTVSSTRIQNPDPAVYQLRDSKSSDKSVCLFTDFDSQTNVSQSKDSDVYITDKTVLDMRSMDFKSNSAVAWSNKSDFACANAFNNSIIPEDTFFPSPESSCDVKLVEKSFETDTNLNFQNLSVIGFRILLLKVAGFNLLMTLRLWSS

SEQ ID NO: 45776 - protein, 633 aa, synthetic construct
MALPVTALLLPLALLLHAARPEIVLTQSPATLSLSPGERATLSCRASQSVSSYLAWYQQKPGQAPRLLIYDASNRATGIPARFSGSGSGTDFTLTISSLEPEDFAVYYCQQRSNWPPTFGQGTKVEIKLEDKQLDADVSPKPTIFLPSIAETKLQKAGTYLCLLEKFFPDVIKIHWQEKKSNTILGSQEGNTMKTNDTYMKFSWLTVPEKSLDKEHRCIVRHENNKNGVDQEIIFPPIKTDVITMDPKDNCSKDANDTLLLQLTNTSAYYMYLLLLLKSVVYFAIITCCLLRRTAFCCNGEKSRAKRSGSGATNFSLLKQAGDVEENPGPTSMDWIWRILFLVGAATGAHSFEQLQLQESGPGLVKPSETLSLTCTVSGGSISSSSYWWGWTRQPPGRGLEWIGTMYYSGNIYYNPSLQSRATISVDTSKNQFSLKLSSVTAADTAVYYCARHVGYSYGRRFWYFDLWGRGTLVTVSSTRSQPHTKPSVFVMKNGTNVACLVKEFYPKDIRINLVSSKKITEFDPAIVISPSGKYNAVKLGKYEDSNSVTCSVQHDNKTVHSTDFEVKTDSTDHVKPKETENTKQPSKSCHKPKAIVHTEKVNMMSLTVLGLRMLFAKTVAVNFLLTAKLFFL

SEQ ID NO: 45777 - protein, 633 aa, synthetic construct
MALPVTALLLPLALLLHAARPEIVLTQSPATLSLSPGERATLSCRASQSVSSYLAWYQQKPGQAPRLLIYDASNRATGIPARFSGSGSGTDFTLTISSLEPEDFAVYYCQQRSNWPPTFGQGTKVEIKLESQPHTKPSVFVMKNGTNVACLVKEFYPKDIRINLVSSKKITEFDPAIVISPSGKYNAVKLGKYEDSNSVTCSVQHDNKTVHSTDFEVKTDSTDHVKPKETENTKQPSKSCHKPKAIVHTEKVNMMSLTVLGLRMLFAKTVAVNFLLTAKLFFLRAKRSGSGATNFSLLKQAGDVEENPGPTSMDWIWRILFLVGAATGAHSFEQLQLQESGPGLVKPSETLSLTCTVSGGSISSSSYWWGWTRQPPGRGLEWIGTMYYSGNIYYNPSLQSRATISVDTSKNQFSLKLSSVTAADTAVYYCARHVGYSYGRRFWYFDLWGRGTLVTVSSTRDKQLDADVSPKPTIFLPSIAETKLQKAGTYLCLLEKFFPDVIKIHWQEKKSNTILGSQEGNTMKTNDTYMKFSWLTVPEKSLDKEHRCIVRHENNKNGVDQEIIFPPIKTDVITMDPKDNCSKDANDTLLLQLTNTSAYYMYLLLLLKSVVYFAIITCCLLRRTAFCCNGEKS

SEQ ID NO: 45778 - protein, 648 aa, synthetic construct
MALPVTALLLPLALLLHAARPLEDKQLDADVSPKPTIFLPSIAETKLQKAGTYLCLLEKFFPDVIKIHWQEKKSNTILGSQEGNTMKTNDTYMKFSWLTVPEKSLDKEHRCIVRHENNKNGVDQEIIFPPIKTDVITMDPKDNCSKDANDTLLLQLTNTSAYYMYLLLLLKSVVYFAIITCCLLRRTAFCCNGEKSRAKRSGSGATNFSLLKQAGDVEENPGPTSMALPVTALLLPLALLLHAARPEIVLTQSPATLSLSPGERATLSCRASQSVSSYLAWYQQKPGQAPRLLIYDASNRATGIPARFSGSGSGTDFTLTISSLEPEDFAVYYCQQRSNWPPTFGQGTKVEIKGGGGSGGGGSGGGGSQLQLQESGPGLVKPSETLSLTCTVSGGSISSSSYWWGWTRQPPGRGLEWIGTMYYSGNIYYNPSLQSRATISVDTSKNQFSLKLSSVTAADTAVYYCARHVGYSYGRRFWYFDLWGRGTLVTVSSTRSQPHTKPSVFVMKNGTNVACLVKEFYPKDIRINLVSSKKITEFDPAIVISPSGKYNAVKLGKYEDSNSVTCSVQHDNKTVHSTDFEVKTDSTDHVKPKETENTKQPSKSCHKPKAIVHTEKVNMMSLTVLGLRMLFAKTVAVNFLLTAKLFFL

SEQ ID NO: 45779 - protein, 802 aa, synthetic construct
MALPVTALLLPLALLLHAARPEIVLTQSPATLSLSPGERATLSCRASQSVSSYLAWYQQKPGQAPRLLIYDASNRATGIPARFSGSGSGTDFTLTISSLEPEDFAVYYCQQRSNWPPTFGQGTKVEIKGQPKANPTVTLFPPSSEELQANKATLVCLISDFYPGAVTVAWKADGSPVKAGVETTKPSKQSNNKYAASSYLSLTPEQWKSHRSYSCQVTHEGSTVEKTVAPTECSGSQSFGLLDPKLCYLLDGILFIYGVILTALFLRVKFSRSADAPAYQQGQNQLYNELNLGRREEYDVLDKRRGRDPEMGGKPQRRKNPQEGLYNELQKDKMAEAYSEIGMKGERRRGKGHDGLYQGLSTATKDTYDALHMQALPPRRAKRSGSGATNFSLLKQAGDVEENPGPTSMDWIWRILFLVGAATGAHSFEQLQLQESGPGLVKPSETLSLTCTVSGGSISSSSYWWGWTRQPPGRGLEWIGTMYYSGNIYYNPSLQSRATISVDTSKNQFSLKLSSVTAADTAVYYCARHVGYSYGRRFWYFDLWGRGTLVTVSSASTKGPSVFPLAPSSKSTSGGTAALGCLVKDYFPEPVTVSWNSGALTSGVHTFPAVLQSSGLYSLSSVVTVPSSSLGTQTYICNVNHKPSNTKVDKRVEPKSCGTQSFGLLDPKLCYLLDGILFIYGVILTALFLRVKFSRSADAPAYQQGQNQLYNELNLGRREEYDVLDKRRGRDPEMGGKPQRRKNPQEGLYNELQKDKMAEAYSEIGMKGERRRGKGHDGLYQGLSTATKDTYDALHMQALPPR

SEQ ID NO: 45780 - protein, 821 aa, synthetic construct
MALPVTALLLPLALLLHAARPEIVLTQSPATLSLSPGERATLSCRASQSVSSYLAWYQQKPGQAPRLLIYDASNRATGIPARFSGSGSGTDFTLTISSLEPEDFAVYYCQQRSNWPPTFGQGTKVEIKLEDLKNVFPPEVAVFEPSEAEISHTQKATLVCLATGFYPDHVELSWWVNGKEVHSGVSTDPQPLKEQPALNDSRYCLSSRLRVSATFWQNPRNHFRCQVQFYGLSENDEWTQDRAKPVTQIVSAEAWGRADCGSQSFGLLDPKLCYLLDGILFIYGVILTALFLRVKFSRSADAPAYQQGQNQLYNELNLGRREEYDVLDKRRGRDPEMGGKPQRRKNPQEGLYNELQKDKMAEAYSEIGMKGERRRGKGHDGLYQGLSTATKDTYDALHMQALPPRRAKRSGSGATNFSLLKQAGDVEENPGPTSMDWIWRILFLVGAATGAHSFEQLQLQESGPGLVKPSETLSLTCTVSGGSISSSSYWWGWTRQPPGRGLEWIGTMYYSGNIYYNPSLQSRATISVDTSKNQFSLKLSSVTAADTAVYYCARHVGYSYGRRFWYFDLWGRGTLVTVSSTRIQNPDPAVYQLRDSKSSDKSVCLFTDFDSQTNVSQSKDSDVYITDKTVLDMRSMDFKSNSAVAWSNKSDFACANAFNNSIIPEDTFFPSPESSCGTQSFGLLDPKLCYLLDGILFIYGVILTALFLRVKFSRSADAPAYQQGQNQLYNELNLGRREEYDVLDKRRGRDPEMGGKPQRRKNPQEGLYNELQKDKMAEAYSEIGMKGERRRGKGHDGLYQGLSTATKDTYDALHMQALPPR

SEQ ID NO: 45781 - protein, 863 aa, synthetic construct
MALPVTALLLPLALLLHAARPEIVLTQSPATLSLSPGERATLSCRASQSVSSYLAWYQQKPGQAPRLLIYDASNRATGIPARFSGSGSGTDFTLTISSLEPEDFAVYYCQQRSNWPPTFGQGTKVEIKLEEDLKNVFPPEVAVFEPSEAEISHTQKATLVCLATGFYPDHVELSWWVNGKEVHSGVSTDPQPLKEQPALNDSRYCLSSRLRVSATFWQNPRNHFRCQVQFYGLSENDEWTQDRAKPVTQIVSAEAWGRADCGSQSFGLLDPKLCYLLDGILFIYGVILTALFLRVKFSRSADAPAYQQGQNQLYNELNLGRREEYDVLDKRRGRDPEMGGKPQRRKNPQEGLYNELQKDKMAEAYSEIGMKGERRRGKGHDGLYQGLSTATKDTYDALHMQALPPRRAKRSGSGATNFSLLKQAGDVEENPGPTSMDWIWRILFLVGAATGAHSFEQLQLQESGPGLVKPSETLSLTCTVSGGSISSSSYWWGWTRQPPGRGLEWIGTMYYSGNIYYNPSLQSRATISVDTSKNQFSLKLSSVTAADTAVYYCARHVGYSYGRRFWYFDLWGRGTLVTVSSTRIQNPDPAVYQLRDSKSSDKSVCLFTDFDSQTNVSQSKDSDVYITDKTVLDMRSMDFKSNSAVAWSNKSDFACANAFNNSIIPEDTFFPSPESSCGTQSFGLLDPKLCYLLDGILFIYGVILTALFLRSKRSRLLHSDYMNMTPRRPGPTRKHYQPYAPPRDFAAYRSRVKFSRSADAPAYQQGQNQLYNELNLGRREEYDVLDKRRGRDPEMGGKPQRRKNPQEGLYNELQKDKMAEAYSEIGMKGERRRGKGHDGLYQGLSTATKDTYDALHMQALPPR

SEQ ID NO: 45782 - protein, 906 aa, synthetic construct
MALPVTALLLPLALLLHAARPEIVLTQSPATLSLSPGERATLSCRASQSVSSYLAWYQQKPGQAPRLLIYDASNRATGIPARFSGSGSGTDFTLTISSLEPEDFAVYYCQQRSNWPPTFGQGTKVEIKLEEDLKNVFPPEVAVFEPSEAEISHTQKATLVCLATGFYPDHVELSWWVNGKEVHSGVSTDPQPLKEQPALNDSRYCLSSRLRVSATFWQNPRNHFRCQVQFYGLSENDEWTQDRAKPVTQIVSAEAWGRADCGSQSFGLLDPKLCYLLDGILFIYGVILTALFLKRGRKKLLYIFKQPFMRPVQTTQEEDGCSCRFPEEEEGGCELRVKFSRSADAPAYQQGQNQLYNELNLGRREEYDVLDKRRGRDPEMGGKPQRRKNPQEGLYNELQKDKMAEAYSEIGMKGERRRGKGHDGLYQGLSTATKDTYDALHMQALPPRRAKRSGSGATNFSLLKQAGDVEENPGPTSMDWIWRILFLVGAATGAHSFEQLQLQESGPGLVKPSETLSLTCTVSGGSISSSSYWWGWTRQPPGRGLEWIGTMYYSGNIYYNPSLQSRATISVDTSKNQFSLKLSSVTAADTAVYYCARHVGYSYGRRFWYFDLWGRGTLVTVSSTRIQNPDPAVYQLRDSKSSDKSVCLFTDFDSQTNVSQSKDSDVYITDKTVLDMRSMDFKSNSAVAWSNKSDFACANAFNNSIIPEDTFFPSPESSCGTQSFGLLDPKLCYLLDGILFIYGVILTALFLKRGRKKLLYIFKQPFMRPVQTTQEEDGCSCRFPEEEEGGCELRVKFSRSADAPAYQQGQNQLYNELNLGRREEYDVLDKRRGRDPEMGGKPQRRKNPQEGLYNELQKDKMAEAYSEIGMKGERRRGKGHDGLYQGLSTATKDTYDALHMQALPPR

SEQ ID NO: 45783 - protein, 593 aa, synthetic construct
MALPVTALLLPLALLLHAARPEIVLTQSPATLSLSPGERATLSCRASQSVSSYLAWYQQKPGQAPRLLIYDASNRATGIPARFSGSGSGTDFTLTISSLEPEDFAVYYCQQRSNWPPTFGQGTKVEIKLEQSFGLLDPKLCYLLDGILFIYGVILTALFLRVKFSRSADAPAYQQGQNQLYNELNLGRREEYDVLDKRRGRDPEMGGKPQRRKNPQEGLYNELQKDKMAEAYSEIGMKGERRRGKGHDGLYQGLSTATKDTYDALHMQALPPRRAKRSGSGATNFSLLKQAGDVEENPGPTSMDWIWRILFLVGAATGAHSFEQLQLQESGPGLVKPSETLSLTCTVSGGSISSSSYWWGWTRQPPGRGLEWIGTMYYSGNIYYNPSLQSRATISVDTSKNQFSLKLSSVTAADTAVYYCARHVGYSYGRRFWYFDLWGRGTLVTVSSTRQSFGLLDPKLCYLLDGILFIYGVILTALFLRVKFSRSADAPAYQQGQNQLYNELNLGRREEYDVLDKRRGRDPEMGGKPQRRKNPQEGLYNELQKDKMAEAYSEIGMKGERRRGKGHDGLYQGLSTATKDTYDALHMQALPPR

SEQ ID NO: 45784 - protein, 651 aa, synthetic construct
MALPVTALLLPLALLLHAARPEIVLTQSPATLSLSPGERATLSCRASQSVSSYLAWYQQKPGQAPRLLIYDASNRATGIPARFSGSGSGTDFTLTISSLEPEDFAVYYCQQRSNWPPTFGQGTKVEIKLEGQPKANPTVTLFPPSSEELQANKATLVCLISDFYPGAVTVAWKADGSPVKAGVETTKPSKQSNNKYAASSYLSLTPEQWKSHRSYSCQVTHEGSTVEKTVAPTECSPIKTDVITMDPKDNCSKDANDTLLLQLTNTSAYYMYLLLLLKSVVYFAIITCCLLRRTAFCCNGEKSRAKRSGSGATNFSLLKQAGDVEENPGPTSMDWIWRILFLVGAATGAHSFEQLQLQESGPGLVKPSETLSLTCTVSGGSISSSSYWWGWTRQPPGRGLEWIGTMYYSGNIYYNPSLQSRATISVDTSKNQFSLKLSSVTAADTAVYYCARHVGYSYGRRFWYFDLWGRGTLVTVSSTRASTKGPSVFPLAPSSKSTSGGTAALGCLVKDYFPEPVTVSWNSGALTSGVHTFPAVLQSSGLYSLSSVVTVPSSSLGTQTYICNVNHKPSNTKVDKRVEPKSCEVKTDSTDHVKPKETENTKQPSKSCHKPKAIVHTEKVNMMSLTVLGLRMLFAKTVAVNFLLTAKLFFL

SEQ ID NO: 45785 - protein, 629 aa, synthetic construct
MALPVTALLLPLALLLHAARPEIVLTQSPATLSLSPGERATLSCRASQSVSSYLAWYQQKPGQAPRLLIYDASNRATGIPARFSGSGSGTDFTLTISSLEPEDFAVYYCQQRSNWPPTFGQGTKVEIKLEGQPKANPTVTLFPPSSEELQANKATLVCLISDFYPGAVTVAWKADGSPVKAGVETTKPSKQSNNKYAASSYLSLTPEQWKSHRSYSCQVTHEGSTVEKTVAPTECSGRADCGITSASYHQGVLSATILYEILLGKATLYAVLVSALVLMAMVKRKDSRGRAKRSGSGATNFSLLKQAGDVEENPGPTSMDWIWRILFLVGAATGAHSFEQLQLQESGPGLVKPSETLSLTCTVSGGSISSSSYWWGWTRQPPGRGLEWIGTMYYSGNIYYNPSLQSRATISVDTSKNQFSLKLSSVTAADTAVYYCARHVGYSYGRRFWYFDLWGRGTLVTVSSTRASTKGPSVFPLAPSSKSTSGGTAALGCLVKDYFPEPVTVSWNSGALTSGVHTFPAVLQSSGLYSLSSVVTVPSSSLGTQTYICNVNHKPSNTKVDKRVEPKSCIPEDTFFPSSDVPCDVKLVEKSFETDTNLNFQNLSVIGFRILLLKVAGFNLLMTLRLWSS

SEQ ID NO: 45786 - protein, 629 aa, synthetic construct
MALPVTALLLPLALLLHAARPEIVLTQSPATLSLSPGERATLSCRASQSVSSYLAWYQQKPGQAPRLLIYDASNRATGIPARFSGSGSGTDFTLTISSLEPEDFAVYYCQQRSNWPPTFGQGTKVEIKLEGQPKANPTVTLFPPSSEELQANKATLVCLISDFYPGAVTVAWKADGSPVKAGVETTKPSKQSNNKYAASSYLSLTPEQWKSHRSYSCQVTHEGSTVEKTVAPTECSGRADCGFTSESYQQGVLSATILYEILLGKATLYAVLVSALVLMAMVKRKDSRGRAKRSGSGATNFSLLKQAGDVEENPGPTSMDWIWRILFLVGAATGAHSFEQLQLQESGPGLVKPSETLSLTCTVSGGSISSSSYWWGWTRQPPGRGLEWIGTMYYSGNIYYNPSLQSRATISVDTSKNQFSLKLSSVTAADTAVYYCARHVGYSYGRRFWYFDLWGRGTLVTVSSTRASTKGPSVFPLAPSSKSTSGGTAALGCLVKDYFPEPVTVSWNSGALTSGVHTFPAVLQSSGLYSLSSVVTVPSSSLGTQTYICNVNHKPSNTKVDKRVEPKSCIPEDTFFPSPESSCDVKLVEKSFETDTNLNFQNLSVIGFRILLLKVAGFNLLMTLRLWSS

SEQ ID NO: 45787 - protein, 455 aa, synthetic construct
MALPVTALLLPLALLLHAARPEIVLTQSPATLSLSPGERATLSCRASQSVSSYLAWYQQKPGQAPRLLIYDASNRATGIPARFSGSGSGTDFTLTISSLEPEDFAVYYCQQRSNWPPTFGQGTKVEIKGGGGSGGGGSGGGGSQLQLQESGPGLVKPSETLSLTCTVSGGSISSSSYWWGWTRQPPGRGLEWIGTMYYSGNIYYNPSLQSRATISVDTSKNQFSLKLSSVTAADTAVYYCARHVGYSYGRRFWYFDLWGRGTLVTVSSTRDGNEEMGGITQTPYKVSISGTTVILTCPQYPGSEILWQHNDKNIGGDEDDKNIGSDEDHLSLKEFSELEQSGYYVCYPRGSKPEDANFYLYLRARVCENCMEMDVMSVATIVIVDICITGGLLLLVYYWSKNRKAKAKPVTRGAGAGGRQRGQNKERPPPVPNPDYEPIRKGQRDLYSGLNQRRI

SEQ ID NO: 45788 - protein, 420 aa, synthetic construct
MALPVTALLLPLALLLHAARPEIVLTQSPATLSLSPGERATLSCRASQSVSSYLAWYQQKPGQAPRLLIYDASNRATGIPARFSGSGSGTDFTLTISSLEPEDFAVYYCQQRSNWPPTFGQGTKVEIKGGGGSGGGGSGGGGSQLQLQESGPGLVKPSETLSLTCTVSGGSISSSSYWWGWTRQPPGRGLEWIGTMYYSGNIYYNPSLQSRATISVDTSKNQFSLKLSSVTAADTAVYYCARHVGYSYGRRFWYFDLWGRGTLVTVSSTRFKIPIEELEDRVFVNCNTSITWVEGTVGTLLSDITRLDLGKRILDPRGIYRCNGTDIYKDKESTVQVHYRMCQSCVELDPATVAGIIVTDVIATLLLALGVFCFAGHETGRLSGAADTQALLRNDQVYQPLRDRDDAQYSHLGGNWARNK

SEQ ID NO: 45789 - protein, 430 aa, synthetic construct
MALPVTALLLPLALLLHAARPEIVLTQSPATLSLSPGERATLSCRASQSVSSYLAWYQQKPGQAPRLLIYDASNRATGIPARFSGSGSGTDFTLTISSLEPEDFAVYYCQQRSNWPPTFGQGTKVEIKGGGGSGGGGSGGGGSQLQLQESGPGLVKPSETLSLTCTVSGGSISSSSYWWGWTRQPPGRGLEWIGTMYYSGNIYYNPSLQSRATISVDTSKNQFSLKLSSVTAADTAVYYCARHVGYSYGRRFWYFDLWGRGTLVTVSSTRQSIKGNHLVKVYDYQEDGSVLLTCDAEAKNITWFKDGKMIGFLTEDKKKWNLGSNAKDPRGMYQCKGSQNKSKPLQVYYRMCQNCIELNAATISGFLFAEIVSIFVLAVGVYFIAGQDGVRQSRASDKQTLLPNDQLYQPLKDREDDQYSHLQGNQLRRN

SEQ ID NO: 45790 - protein, 413 aa, synthetic construct
MALPVTALLLPLALLLHAARPEIVLTQSPATLSLSPGERATLSCRASQSVSSYLAWYQQKPGQAPRLLIYDASNRATGIPARFSGSGSGTDFTLTISSLEPEDFAVYYCQQRSNWPPTFGQGTKVEIKGGGGSGGGGSGGGGSQLQLQESGPGLVKPSETLSLTCTVSGGSISSSSYWWGWTRQPPGRGLEWIGTMYYSGNIYYNPSLQSRATISVDTSKNQFSLKLSSVTAADTAVYYCARHVGYSYGRRFWYFDLWGRGTLVTVSSTRQSFGLLDPKLCYLLDGILFIYGVILTALFLRVKFSRSADAPAYQQGQNQLYNELNLGRREEYDVLDKRRGRDPEMGGKPQRRKNPQEGLYNELQKDKMAEAYSEIGMKGERRRGKGHDGLYQGLSTATKDTYDALHMQALPPR

SEQ ID NO: 45791 - protein, 508 aa, synthetic construct
MALPVTALLLPLALLLHAARPEIVLTQSPATLSLSPGERATLSCRASQSVSSYLAWYQQKPGQAPRLLIYDASNRATGIPARFSGSGSGTDFTLTISSLEPEDFAVYYCQQRSNWPPTFGQGTKVEIKGGGGSGGGGSGGGGSQLQLQESGPGLVKPSETLSLTCTVSGGSISSSSYWWGWTRQPPGRGLEWIGTMYYSGNIYYNPSLQSRATISVDTSKNQFSLKLSSVTAADTAVYYCARHVGYSYGRRFWYFDLWGRGTLVTVSSTRGMRTEDLPKAVVFLEPQWYRVLEKDSVTLKCQGAYSPEDNSTQWFHNESLISSQASSYFIDAATVDDSGEYRCQTNLSTLSDPVQLEVHIGWLLLQAPRWVFKEEDPIHLRCHSWKNTALHKVTYLQNGKGRKYFHHNSDFYIPKATLKDSGSYFCRGLVGSKNVSSETVNITITQGLAVPTISSFFPPGYQVSFCLVMVLLFAVDTGLYFSVKTNIRSSTRDWKDHKFKWRKDPQDK

SEQ ID NO: 45792 - protein, 483 aa, synthetic construct
MALPVTALLLPLALLLHAARPEIVLTQSPATLSLSPGERATLSCRASQSVSSYLAWYQQKPGQAPRLLIYDASNRATGIPARFSGSGSGTDFTLTISSLEPEDFAVYYCQQRSNWPPTFGQGTKVEIKGGGGSGGGGSGGGGSQLQLQESGPGLVKPSETLSLTCTVSGGSISSSSYWWGWTRQPPGRGLEWIGTMYYSGNIYYNPSLQSRATISVDTSKNQFSLKLSSVTAADTAVYYCARHVGYSYGRRFWYFDLWGRGTLVTVSSTRGMRTEDLPKAVVFLEPQWYRVLEKDSVTLKCQGAYSPEDNSTQWFHNESLISSQASSYFIDAATVDDSGEYRCQTNLSTLSDPVQLEVHIGWLLLQAPRWVFKEEDPIHLRCHSWKNTALHKVTYLQNGKGRKYFHHNSDFYIPKATLKDSGSYFCRGLVGSKNVSSETVNITITQGLAVPTISSFFPPGYQVSFCLVMVLLFAVDTGLYFSV

SEQ ID NO: 45793 - protein, 484 aa, synthetic construct
MALPVTALLLPLALLLHAARPEIVLTQSPATLSLSPGERATLSCRASQSVSSYLAWYQQKPGQAPRLLIYDASNRATGIPARFSGSGSGTDFTLTISSLEPEDFAVYYCQQRSNWPPTFGQGTKVEIKGGGGSGGGGSGGGGSQLQLQESGPGLVKPSETLSLTCTVSGGSISSSSYWWGWTRQPPGRGLEWIGTMYYSGNIYYNPSLQSRATISVDTSKNQFSLKLSSVTAADTAVYYCARHVGYSYGRRFWYFDLWGRGTLVTVSSTRGMRTEDLPKAVVFLEPQWYRVLEKDSVTLKCQGAYSPEDNSTQWFHNESLISSQASSYFIDAATVDDSGEYRCQTNLSTLSDPVQLEVHIGWLLLQAPRWVFKEEDPIHLRCHSWKNTALHKVTYLQNGKGRKYFHHNSDFYIPKATLKDSGSYFCRGLVGSKNVSSETVNITITQGLAVPTISSFFPPGYQVSFCLVMVLLFAVDTGLYFSVK

SEQ ID NO: 45794 - protein, 728 aa, synthetic construct
MALPVTALLLPLALLLHAARPEIVLTQSPATLSLSPGERATLSCRASQSVSSYLAWYQQKPGQAPRLLIYDASNRATGIPARFSGSGSGTDFTLTISSLEPEDFAVYYCQQRSNWPPTFGQGTKVEIKLEGQPKANPTVTLFPPSSEELQANKATLVCLISDFYPGAVTVAWKADGSPVKAGVETTKPSKQSNNKYAASSYLSLTPEQWKSHRSYSCQVTHEGSTVEKTVAPTECSGSQSFGLLDPKLCYLLDGILFIYGVILTALFLRVKFSRSADAPAYQQGQNQLYNELNLGRREEYDVLDKRRGRDPEMGGKPQRRKNPQEGLYNELQKDKMAEAYSEIGMKGERRRGKGHDGLYQGLSTATKDTYDALHMQALPPRRAKRSGSGATNFSLLKQAGDVEENPGPTSMDWIWRILFLVGAATGAHSFEQLQLQESGPGLVKPSETLSLTCTVSGGSISSSSYWWGWTRQPPGRGLEWIGTMYYSGNIYYNPSLQSRATISVDTSKNQFSLKLSSVTAADTAVYYCARHVGYSYGRRFWYFDLWGRGTLVTVSSTRASTKGPSVFPLAPSSKSTSGGTAALGCLVKDYFPEPVTVSWNSGALTSGVHTFPAVLQSSGLYSLSSVVTVPSSSLGTQTYICNVNHKPSNTKVDKRVEPKSCGTITQGLAVSTISSFFPPGYQVSFCLVMVLLFAVDTGLYFSVKTNIRSSTRDWKDHKFKWRKDPQDK

SEQ ID NO: 45795 - protein, 743 aa, synthetic construct
MALPVTALLLPLALLLHAARPEIVLTQSPATLSLSPGERATLSCRASQSVSSYLAWYQQKPGQAPRLLIYDASNRATGIPARFSGSGSGTDFTLTISSLEPEDFAVYYCQQRSNWPPTFGQGTKVEIKLEDLKNVFPPEVAVFEPSEAEISHTQKATLVCLATGFYPDHVELSWWVNGKEVHSGVSTDPQPLKEQPALNDSRYCLSSRLRVSATFWQNPRNHFRCQVQFYGLSENDEWTQDRAKPVTQIVSAEAWGRADCGSQSFGLLDPKLCYLLDGILFIYGVILTALFLRVKFSRSADAPAYQQGQNQLYNELNLGRREEYDVLDKRRGRDPEMGGKPQRRKNPQEGLYNELQKDKMAEAYSEIGMKGERRRGKGHDGLYQGLSTATKDTYDALHMQALPPRRAKRSGSGATNFSLLKQAGDVEENPGPTSMDWIWRILFLVGAATGAHSFEQLQLQESGPGLVKPSETLSLTCTVSGGSISSSSYWWGWTRQPPGRGLEWIGTMYYSGNIYYNPSLQSRATISVDTSKNQFSLKLSSVTAADTAVYYCARHVGYSYGRRFWYFDLWGRGTLVTVSSTRIQNPDPAVYQLRDSKSSDKSVCLFTDFDSQTNVSQSKDSDVYITDKTVLDMRSMDFKSNSAVAWSNKSDFACANAFNNSIIPEDTFFPSPESSCGTITQGLAVSTISSFFPPGYQVSFCLVMVLLFAVDTGLYFSVKTNIRSSTRDWKDHKFKWRKDPQDK

SEQ ID NO: 45796 - protein, 718 aa, synthetic construct
MALPVTALLLPLALLLHAARPEIVLTQSPATLSLSPGERATLSCRASQSVSSYLAWYQQKPGQAPRLLIYDASNRATGIPARFSGSGSGTDFTLTISSLEPEDFAVYYCQQRSNWPPTFGQGTKVEIKLEDLKNVFPPEVAVFEPSEAEISHTQKATLVCLATGFYPDHVELSWWVNGKEVHSGVSTDPQPLKEQPALNDSRYCLSSRLRVSATFWQNPRNHFRCQVQFYGLSENDEWTQDRAKPVTQIVSAEAWGRADCGSQSFGLLDPKLCYLLDGILFIYGVILTALFLRVKFSRSADAPAYQQGQNQLYNELNLGRREEYDVLDKRRGRDPEMGGKPQRRKNPQEGLYNELQKDKMAEAYSEIGMKGERRRGKGHDGLYQGLSTATKDTYDALHMQALPPRRAKRSGSGATNFSLLKQAGDVEENPGPTSMDWIWRILFLVGAATGAHSFEQLQLQESGPGLVKPSETLSLTCTVSGGSISSSSYWWGWTRQPPGRGLEWIGTMYYSGNIYYNPSLQSRATISVDTSKNQFSLKLSSVTAADTAVYYCARHVGYSYGRRFWYFDLWGRGTLVTVSSTRIQNPDPAVYQLRDSKSSDKSVCLFTDFDSQTNVSQSKDSDVYITDKTVLDMRSMDFKSNSAVAWSNKSDFACANAFNNSIIPEDTFFPSPESSCGTITQGLAVSTISSFFPPGYQVSFCLVMVLLFAVDTGLYFSV

SEQ ID NO: 45797 - protein, 719 aa, synthetic construct
MALPVTALLLPLALLLHAARPEIVLTQSPATLSLSPGERATLSCRASQSVSSYLAWYQQKPGQAPRLLIYDASNRATGIPARFSGSGSGTDFTLTISSLEPEDFAVYYCQQRSNWPPTFGQGTKVEIKLEDLKNVFPPEVAVFEPSEAEISHTQKATLVCLATGFYPDHVELSWWVNGKEVHSGVSTDPQPLKEQPALNDSRYCLSSRLRVSATFWQNPRNHFRCQVQFYGLSENDEWTQDRAKPVTQIVSAEAWGRADCGSQSFGLLDPKLCYLLDGILFIYGVILTALFLRVKFSRSADAPAYQQGQNQLYNELNLGRREEYDVLDKRRGRDPEMGGKPQRRKNPQEGLYNELQKDKMAEAYSEIGMKGERRRGKGHDGLYQGLSTATKDTYDALHMQALPPRRAKRSGSGATNFSLLKQAGDVEENPGPTSMDWIWRILFLVGAATGAHSFEQLQLQESGPGLVKPSETLSLTCTVSGGSISSSSYWWGWTRQPPGRGLEWIGTMYYSGNIYYNPSLQSRATISVDTSKNQFSLKLSSVTAADTAVYYCARHVGYSYGRRFWYFDLWGRGTLVTVSSTRIQNPDPAVYQLRDSKSSDKSVCLFTDFDSQTNVSQSKDSDVYITDKTVLDMRSMDFKSNSAVAWSNKSDFACANAFNNSIIPEDTFFPSPESSCGTITQGLAVSTISSFFPPGYQVSFCLVMVLLFAVDTGLYFSVK

SEQ ID NO: 45798 - protein, 720 aa, synthetic construct
MALPVTALLLPLALLLHAARPEIVLTQSPATLSLSPGERATLSCRASQSVSSYLAWYQQKPGQAPRLLIYDASNRATGIPARFSGSGSGTDFTLTISSLEPEDFAVYYCQQRSNWPPTFGQGTKVEIKLEDLKNVFPPEVAVFEPSEAEISHTQKATLVCLATGFYPDHVELSWWVNGKEVHSGVSTDPQPLKEQPALNDSRYCLSSRLRVSATFWQNPRNHFRCQVQFYGLSENDEWTQDRAKPVTQIVSAEAWGRADCGSQSFGLLDPKLCYLLDGILFIYGVILTALFLRVKFSRSADAPAYQQGQNQLYNELNLGRREEYDVLDKRRGRDPEMGGKPQRRKNPQEGLYNELQKDKMAEAYSEIGMKGERRRGKGHDGLYQGLSTATKDTYDALHMQALPPRRAKRSGSGATNFSLLKQAGDVEENPGPTSMDWIWRILFLVGAATGAHSFEQLQLQESGPGLVKPSETLSLTCTVSGGSISSSSYWWGWTRQPPGRGLEWIGTMYYSGNIYYNPSLQSRATISVDTSKNQFSLKLSSVTAADTAVYYCARHVGYSYGRRFWYFDLWGRGTLVTVSSTRIQNPDPAVYQLRDSKSSDKSVCLFTDFDSQTNVSQSKDSDVYITDKTVLDMRSMDFKSNSAVAWSNKSDFACANAFNNSIIPEDTFFPSPESSCGTITQGLAVSTISSFFPPGYQVSFCLVMVLLFAVDTGLYFSVKT

SEQ ID NO: 45799 - protein, 656 aa, synthetic construct
MALPVTALLLPLALLLHAARPEIVLTQSPATLSLSPGERATLSCRASQSVSSYLAWYQQKPGQAPRLLIYDASNRATGIPARFSGSGSGTDFTLTISSLEPEDFAVYYCQQRSNWPPTFGQGTKVEIKLEGQPKANPTVTLFPPSSEELQANKATLVCLISDFYPGAVTVAWKADGSPVKAGVETTKPSKQSNNKYAASSYLSLTPEQWKSHRSYSCQVTHEGSTVEKTVAPTECSGSLGEPQLCYILDAILFLYGIVLTLLYCRLKIQVRKAAITSYEKSDGVYTGLSTRNQETYETLKHEKPPQRAKRSGSGATNFSLLKQAGDVEENPGPTSMDWIWRILFLVGAATGAHSFEQLQLQESGPGLVKPSETLSLTCTVSGGSISSSSYWWGWTRQPPGRGLEWIGTMYYSGNIYYNPSLQSRATISVDTSKNQFSLKLSSVTAADTAVYYCARHVGYSYGRRFWYFDLWGRGTLVTVSSTRASTKGPSVFPLAPSSKSTSGGTAALGCLVKDYFPEPVTVSWNSGALTSGVHTFPAVLQSSGLYSLSSVVTVPSSSLGTQTYICNVNHKPSNTKVDKRVEPKSCGTLGEPQLCYILDAILFLYGIVLTLLYCRLKIQVRKAAITSYEKSDGVYTGLSTRNQETYETLKHEKPPQ

SEQ ID NO: 45800 - protein, 626 aa, synthetic construct
MALPVTALLLPLALLLHAARPEIVLTQSPATLSLSPGERATLSCRASQSVSSYLAWYQQKPGQAPRLLIYDASNRATGIPARFSGSGSGTDFTLTISSLEPEDFAVYYCQQRSNWPPTFGQGTKVEIKLEDLKNVFPPEVAVFEPSEAEISHTQKATLVCLATGFYPDHVELSWWVNGKEVHSGVCTDPQPLKEQPALNDSRYCLSSRLRVSATFWQNPRNHFRCQVQFYGLSENDEWTQDRAKPVTQIVSAEAWGRADCGFTSESYQQGVLSAYYMYLLLLLKSVVYFAIITCCLLRRTAFCCNGEKSRAKRSGSGATNFSLLKQAGDVEENPGPTSMDWIWRILFLVGAATGAHSFEQLQLQESGPGLVKPSETLSLTCTVSGGSISSSSYWWGWTRQPPGRGLEWIGTMYYSGNIYYNPSLQSRATISVDTSKNQFSLKLSSVTAADTAVYYCARHVGYSYGRRFWYFDLWGRGTLVTVSSTRIQNPDPAVYQLRDSKSSDKSVCLFTDFDSQTNVSQSKDSDVYITDKCVLDMRSMDFKSNSAVAWSNKSDFACANAFNNSIIPEDTFFPSPESSCDVKLVEKSFETDTNLNFQNLSVIGFRILLLKVAGFNLLMTLRLWSS

SEQ ID NO: 45801 - protein, 632 aa, synthetic construct
MALPVTALLLPLALLLHAARPEIVLTQSPATLSLSPGERATLSCRASQSVSSYLAWYQQKPGQAPRLLIYDASNRATGIPARFSGSGSGTDFTLTISSLEPEDFAVYYCQQRSNWPPTFGQGTKVEIKLEDKQLDADVSPKPTIFLPSIAETKLQKAGTYLCLLEKFFPDVIKIHWQEKKSNTILGSQEGNTMKTNDTYMKFSWLTVPEKSLDKEHRCIVRHENNKNGVDQEIIFPPIKTDVITMDPKDNCSKDANDTLLLQLTNTSAYYMYEILLGKATLYAVLVSALVLMAMVKRKDSRGRAKRSGSGATNFSLLKQAGDVEENPGPTSMDWIWRILFLVGAATGAHSFEQLQLQESGPGLVKPSETLSLTCTVSGGSISSSSYWWGWTRQPPGRGLEWIGTMYYSGNIYYNPSLQSRATISVDTSKNQFSLKLSSVTAADTAVYYCARHVGYSYGRRFWYFDLWGRGTLVTVSSTRSQPHTKPSVFVMKNGTNVACLVKEFYPKDIRINLVSSKKITEFDPAIVISPSGKYNAVKLGKYEDSNSVTCSVQHDNKTVHSTDFEVKTDSTDHVKPKETENTKQPSKSCHKPKAIVHTEKVNMMSLTVIGFRILLLKVAGFNLLMTLRLWSS

SEQ ID NO: 45802 - protein, 632 aa, synthetic construct
MALPVTALLLPLALLLHAARPEIVLTQSPATLSLSPGERATLSCRASQSVSSYLAWYQQKPGQAPRLLIYDASNRATGIPARFSGSGSGTDFTLTISSLEPEDFAVYYCQQRSNWPPTFGQGTKVEIKLEDKQLDADVSPKPTIFLPSIAETKLQKAGTYLCLLEKFFPDVIKIHWQEKKSNTILGSQEGNTMKTNDTYMKFSWLTVPEKSLDKEHRCIVRHENNKNGVDQEIIFPPIKTDVITMDPKDNCSKDANDTLLLQLTNTSATILYEILLGKATLYAVLVSALVLMAMVKRKDSRGRAKRSGSGATNFSLLKQAGDVEENPGPTSMDWIWRILFLVGAATGAHSFEQLQLQESGPGLVKPSETLSLTCTVSGGSISSSSYWWGWTRQPPGRGLEWIGTMYYSGNIYYNPSLQSRATISVDTSKNQFSLKLSSVTAADTAVYYCARHVGYSYGRRFWYFDLWGRGTLVTVSSTRSQPHTKPSVFVMKNGTNVACLVKEFYPKDIRINLVSSKKITEFDPAIVISPSGKYNAVKLGKYEDSNSVTCSVQHDNKTVHSTDFEVKTDSTDHVKPKETENTKQPSKSCHKPKAIVHTEKVNMMSLTVIGFRILLLKVAGFNLLMTLRLWSS

SEQ ID NO: 45803 - protein, 632 aa, synthetic construct
MALPVTALLLPLALLLHAARPEIVLTQSPATLSLSPGERATLSCRASQSVSSYLAWYQQKPGQAPRLLIYDASNRATGIPARFSGSGSGTDFTLTISSLEPEDFAVYYCQQRSNWPPTFGQGTKVEIKLEDKQLDADVSPKPTIFLPSIAETKLQKAGTYLCLLEKFFPDVIKIHWQEKKSNTILGSQEGNTMKTNDTYMKFSWLTVPEKSLDKEHRCIVRHENNKNGVDQEIIFPPIKTDVITMDPKDNCSKDANDTLLLQLTNTSAYYMYEILLGKATLYAVLVSALVLMAMVKRKDSRGRAKRSGSGATNFSLLKQAGDVEENPGPTSMDWIWRILFLVGAATGAHSFEQLQLQESGPGLVKPSETLSLTCTVSGGSISSSSYWWGWTRQPPGRGLEWIGTMYYSGNIYYNPSLQSRATISVDTSKNQFSLKLSSVTAADTAVYYCARHVGYSYGRRFWYFDLWGRGTLVTVSSTRSQPHTKPSVFVMKNGTNVACLVKEFYPKDIRINLVSSKKITEFDPAIVISPSGKYNAVKLGKYEDSNSVTCSVQHDNKTVHSTDFEVKTDSTDHVKPKETENTKQPSKSCHKPKAIVHTEKVNMMSLTVLGFRILLLKVAGFNLLMTLRLWSS

SEQ ID NO: 45804 - protein, 632 aa, synthetic construct
MALPVTALLLPLALLLHAARPEIVLTQSPATLSLSPGERATLSCRASQSVSSYLAWYQQKPGQAPRLLIYDASNRATGIPARFSGSGSGTDFTLTISSLEPEDFAVYYCQQRSNWPPTFGQGTKVEIKLEDKQLDADVSPKPTIFLPSIAETKLQKAGTYLCLLEKFFPDVIKIHWQEKKSNTILGSQEGNTMKTNDTYMKFSWLTVPEKSLDKEHRCIVRHENNKNGVDQEIIFPPIKTDVITMDPKDNCSKDANDTLLLQLTNTSATILYEILLGKATLYAVLVSALVLMAMVKRKDSRGRAKRSGSGATNFSLLKQAGDVEENPGPTSMDWIWRILFLVGAATGAHSFEQLQLQESGPGLVKPSETLSLTCTVSGGSISSSSYWWGWTRQPPGRGLEWIGTMYYSGNIYYNPSLQSRATISVDTSKNQFSLKLSSVTAADTAVYYCARHVGYSYGRRFWYFDLWGRGTLVTVSSTRSQPHTKPSVFVMKNGTNVACLVKEFYPKDIRINLVSSKKITEFDPAIVISPSGKYNAVKLGKYEDSNSVTCSVQHDNKTVHSTDFEVKTDSTDHVKPKETENTKQPSKSCHKPKAIVHTEKVNMMSLTVLGFRILLLKVAGFNLLMTLRLWSS

SEQ ID NO: 45805 - protein, 626 aa, synthetic construct
MALPVTALLLPLALLLHAARPEIVLTQSPATLSLSPGERATLSCRASQSVSSYLAWYQQKPGQAPRLLIYDASNRATGIPARFSGSGSGTDFTLTISSLEPEDFAVYYCQQRSNWPPTFGQGTKVEIKLEDLKNVFPPEVAVFEPSEAEISHTQKATLVCLATGFYPDHVELSWWVNGKEVHSGVCTDPQPLKEQPALNDSRYCLSSRLRVSATFWQNPRNHFRCQVQFYGLSENDEWTQDRAKPVTQIVSAEAWGRADCGFTSESYQQGVLSATILYLLLLLKSVVYFAIITCCLLRRTAFCCNGEKSRAKRSGSGATNFSLLKQAGDVEENPGPTSMDWIWRILFLVGAATGAHSFEQLQLQESGPGLVKPSETLSLTCTVSGGSISSSSYWWGWTRQPPGRGLEWIGTMYYSGNIYYNPSLQSRATISVDTSKNQFSLKLSSVTAADTAVYYCARHVGYSYGRRFWYFDLWGRGTLVTVSSTRIQNPDPAVYQLRDSKSSDKSVCLFTDFDSQTNVSQSKDSDVYITDKCVLDMRSMDFKSNSAVAWSNKSDFACANAFNNSIIPEDTFFPSPESSCDVKLVEKSFETDTNLNFQNLSVIGLRMLFAKTVAVNFLLTAKLFFL

SEQ ID NO: 45806 - protein, 655 aa, synthetic construct
MALPVTALLLPLALLLHAARPEIVLTQSPATLSLSPGERATLSCRASQSVSSYLAWYQQKPGQAPRLLIYDASNRATGIPARFSGSGSGTDFTLTISSLEPEDFAVYYCQQRSNWPPTFGQGTKVEIKLEDLKNVFPPEVAVFEPSEAEISHTQKATLVCLATGFYPDHVELSWWVNGKEVHSGVSTDPQPLKEQPALNDSRYCLSSRLRVSATFWQNPRNHFRCQVQFYGLSENDEWTQDRAKPVTQIVSAEAWGRADCGSSKDANDTLLLQLTNTSAYYMYLLLLLKSVVYFAIITCCLLRRTAFCCNGEKSRAKRSGSGATNFSLLKQAGDVEENPGPTSMDWIWRILFLVGAATGAHSFEQLQLQESGPGLVKPSETLSLTCTVSGGSISSSSYWWGWTRQPPGRGLEWIGTMYYSGNIYYNPSLQSRATISVDTSKNQFSLKLSSVTAADTAVYYCARHVGYSYGRRFWYFDLWGRGTLVTVSSTRIQNPDPAVYQLRDSKSSDKSVCLFTDFDSQTNVSQSKDSDVYITDKTVLDMRSMDFKSNSAVAWSNKSDFACANAFNNSIIPEDTFFPSPESSCGTEVKTDSTDHVKPKETENTKQPSKSCHKPKAIVHTEKVNMMSLTVLGLRMLFAKTVAVNFLLTAKLFFL

SEQ ID NO: 45807 - protein, 625 aa, synthetic construct
MALPVTALLLPLALLLHAARPEIVLTQSPATLSLSPGERATLSCRASQSVSSYLAWYQQKPGQAPRLLIYDASNRATGIPARFSGSGSGTDFTLTISSLEPEDFAVYYCQQRSNWPPTFGQGTKVEIKLEDLKNVFPPEVAVFEPSEAEISHTQKATLVCLATGFYPDHVELSWWVNGKEVHSGVCTDPQPLKEQPALNDSRYCLSSRLRVSATFWQNPRNHFRCQVQFYGLSENDEWTQDRAKPVTQIVSAEAWGRADCDVKLVEKSFETDTNLNFQNLSVIGFRILLLKVAGFNLLMTLRLWSSRAKRSGSGATNFSLLKQAGDVEENPGPTSMDWIWRILFLVGAATGAHSFEQLQLQESGPGLVKPSETLSLTCTVSGGSISSSSYWWGWTRQPPGRGLEWIGTMYYSGNIYYNPSLQSRATISVDTSKNQFSLKLSSVTAADTAVYYCARHVGYSYGRRFWYFDLWGRGTLVTVSSTRIQNPDPAVYQLRDSKSSDKSVCLFTDFDSQTNVSQSKDSDVYITDKCVLDMRSMDFKSNSAVAWSNKSDFACANAFNNSIIPEDTFFPSPESSCGFTSESYQQGVLSATILYEILLGKATLYAVLVSALVLMAMVKRKDSRG

SEQ ID NO: 45808 - protein, 625 aa, synthetic construct
MALPVTALLLPLALLLHAARPEIVLTQSPATLSLSPGERATLSCRASQSVSSYLAWYQQKPGQAPRLLIYDASNRATGIPARFSGSGSGTDFTLTISSLEPEDFAVYYCQQRSNWPPTFGQGTKVEIKLEDLKNVFPPEVAVFEPSEAEISHTQKATLVCLATGFYPDHVELSWWVNGKEVHSGVCTDPQPLKEQPALNDSRYCLSSRLRVSATFWQNPRNHFRCQVQFYGLSENDEWTQDRAKPVTQIVSAEAWGRADCGFTSESYQQGVLSATNLSVIGFRILLLKVAGFNLLMTLRLWSSRAKRSGSGATNFSLLKQAGDVEENPGPTSMDWIWRILFLVGAATGAHSFEQLQLQESGPGLVKPSETLSLTCTVSGGSISSSSYWWGWTRQPPGRGLEWIGTMYYSGNIYYNPSLQSRATISVDTSKNQFSLKLSSVTAADTAVYYCARHVGYSYGRRFWYFDLWGRGTLVTVSSTRIQNPDPAVYQLRDSKSSDKSVCLFTDFDSQTNVSQSKDSDVYITDKCVLDMRSMDFKSNSAVAWSNKSDFACANAFNNSIIPEDTFFPSPESSCDVKLVEKSFETDTNLNFQILYEILLGKATLYAVLVSALVLMAMVKRKDSRG

SEQ ID NO: 45809 - protein, 625 aa, synthetic construct; identical to SEQ ID NO: 45807

SEQ ID NO: 45810 - protein, 625 aa, synthetic construct; identical to SEQ ID NO: 45808

SEQ ID NO: 45811 - protein, 625 aa, synthetic construct; identical to SEQ ID NO: 45807

SEQ ID NO: 45812 - protein, 628 aa, synthetic construct
MALPVTALLLPLALLLHAARPEIVLTQSPATLSLSPGERATLSCRASQSVSSYLAWYQQKPGQAPRLLIYDASNRATGIPARFSGSGSGTDFTLTISSLEPEDFAVYYCQQRSNWPPTFGQGTKVEIKLEADVSPKPTIFLPSIAETKLQKAGTYLCLLEKFFPDVIKIHWQEKKSNTILGSQEGNTMKTNDTYMKFSWLTVPEKSLDKEHRCIVRHENNKNGVDQEIIFPPIKTDVITMDPKDNCSKDANDTLLLQLTNTSAYYMYLLLLLKSVVYFAIITCCLLRRTAFCCNGEKSRAKRSGSGATNFSLLKQAGDVEENPGPTSMDWIWRILFLVGAATGAHSFEQLQLQESGPGLVKPSETLSLTCTVSGGSISSSSYWWGWTRQPPGRGLEWIGTMYYSGNIYYNPSLQSRATISVDTSKNQFSLKLSSVTAADTAVYYCARHVGYSYGRRFWYFDLWGRGTLVTVSSTRSQPHTKPSVFVMKNGTNVACLVKEFYPKDIRINLVSSKKITEFDPAIVISPSGKYNAVKLGKYEDSNSVTCSVQHDNKTVHSTDFEVKTDSTDHVKPKETENTKQPSKSCHKPKAIVHTEKVNMMSLTVIGFRILLLKVAGFNLLMTLRLWSS

SEQ ID NO: 45813 - protein, 628 aa, synthetic construct
MALPVTALLLPLALLLHAARPEIVLTQSPATLSLSPGERATLSCRASQSVSSYLAWYQQKPGQAPRLLIYDASNRATGIPARFSGSGSGTDFTLTISSLEPEDFAVYYCQQRSNWPPTFGQGTKVEIKLEADVSPKPTIFLPSIAETKLQKAGTYLCLLEKFFPDVIKIHWQEKKSNTILGSQEGNTMKTNDTYMKFSWLTVPEKSLDKEHRCIVRHENNKNGVDQEIIFPPIKTDVITMDPKDNCSKDANDTLLLQLTNTSAYYMYLLLLLKSVVYFAIITCCLLRRTAFCCNGEKSRAKRSGSGATNFSLLKQAGDVEENPGPTSMDWIWRILFLVGAATGAHSFEQLQLQESGPGLVKPSETLSLTCTVSGGSISSSSYWWGWTRQPPGRGLEWIGTMYYSGNIYYNPSLQSRATISVDTSKNQFSLKLSSVTAADTAVYYCARHVGYSYGRRFWYFDLWGRGTLVTVSSTRSQPHTKPSVFVMKNGTNVACLVKEFYPKDIRINLVSSKKITEFDPAIVISPSGKYNAVKLGKYEDSNSVTCSVQHDNKTVHSTDFEVKTDSTDHVKPKETENTKQPSKSCHKPKAIVHTEKVNMMSLTVLGFRILLLKVAGFNLLMTLRLWSS

SEQ ID NO: 45814 - protein, 625 aa, synthetic construct; identical to SEQ ID NO: 45807

SEQ ID NO: 45815 - protein, 629 aa, synthetic construct
MALPVTALLLPLALLLHAARPEIVLTQSPATLSLSPGERATLSCRASQSVSSYLAWYQQKPGQAPRLLIYDASNRATGIPARFSGSGSGTDFTLTISSLEPEDFAVYYCQQRSNWPPTFGQGTKVEIKLEIQNPDPAVYQLRDSKSSDKSVCLFTDFDSQTNVSQSKDSDVYITDKCVLDMRSMDFKSNSAVAWSNKSDFACANAFNNSIIPEDTFFPSPESSCGFTSESYQQGVLSATILYEILLGKATLYAVLVSALVLMAMVKRKDSRGRAKRSGSGVKQTLNFDLLKLAGDVESNPGPTSMDWIWRILFLVGAATGAHSFEQLQLQESGPGLVKPSETLSLTCTVSGGSISSSSYWWGWTRQPPGRGLEWIGTMYYSGNIYYNPSLQSRATISVDTSKNQFSLKLSSVTAADTAVYYCARHVGYSYGRRFWYFDLWGRGTLVTVSSTREDLKNVFPPEVAVFEPSEAEISHTQKATLVCLATGFYPDHVELSWWVNGKEVHSGVCTDPQPLKEQPALNDSRYCLSSRLRVSATFWQNPRNHFRCQVQFYGLSENDEWTQDRAKPVTQIVSAEAWGRADCDVKLVEKSFETDTNLNFQNLSVIGFRILLLKVAGFNLLMTLRLWSS

SEQ ID NO: 45816 - protein, 760 aa, synthetic construct
MALPVTALLLPLALLLHAARPEVQLVESGGGLVQPGGSLRLSCAASGFSFSDFWMSWVRQAPGKGLEWVATISQAGSEKDYVDSVKGRFTISRDNAKKSLYLQMNSLRAEDTAVYYCASGVYSFDYRGQGTLVTVSSGTGGGGSGGGGSGGGGSEFEIVLTQSPATLSLSPGERATLSCRASQSVSSYLAWYQQKPGQAPRLLIYDASNRATGIPARFSGSGSGTDFTLTISSLEPEDFAVYYCQQRSNWPPTFGQGTKVEIKLEDLKNVFPPEVAVFEPSEAEISHTQKATLVCLATGFYPDHVELSWWVNGKEVHSGVCTDPQPLKEQPALNDSRYCLSSRLRVSATFWQNPRNHFRCQVQFYGLSENDEWTQDRAKPVTQIVSAEAWGRADCDVKLVEKSFETDTNLNFQNLSVIGFRILLLKVAGFNLLMTLRLWSSRAKRSGSGATNFSLLKQAGDVEENPGPTSMDWIWRILFLVGAATGAHSFEQLQLQESGPGLVKPSETLSLTCTVSGGSISSSSYWWGWTRQPPGRGLEWIGTMYYSGNIYYNPSLQSRATISVDTSKNQFSLKLSSVTAADTAVYYCARHVGYSYGRRFWYFDLWGRGTLVTVSSTRIQNPDPAVYQLRDSKSSDKSVCLFTDFDSQTNVSQSKDSDVYITDKCVLDMRSMDFKSNSAVAWSNKSDFACANAFNNSIIPEDTFFPSPESSCGFTSESYQQGVLSATILYEILLGKATLYAVLVSALVLMAMVKRKDSRG

SEQ ID NO: 45817 - protein, 764 aa, synthetic construct
MALPVTALLLPLALLLHAARPEVQLVESGGGLVQPGGSLRLSCAASGFSFSDFWMSWVRQAPGKGLEWVATISQAGSEKDYVDSVKGRFTISRDNAKKSLYLQMNSLRAEDTAVYYCASGVYSFDYRGQGTLVTVSSGTGGGGSGGGGSGGGGSEFEIVLTQSPATLSLSPGERATLSCRASQSVSSYLAWYQQKPGQAPRLLIYDASNRATGIPARFSGSGSGTDFTLTISSLEPEDFAVYYCQQRSNWPPTFGQGTKVEIKLEIQNPDPAVYQLRDSKSSDKSVCLFTDFDSQTNVSQSKDSDVYITDKCVLDMRSMDFKSNSAVAWSNKSDFACANAFNNSIIPEDTFFPSPESSCGFTSESYQQGVLSATILYEILLGKATLYAVLVSALVLMAMVKRKDSRGRAKRSGSGVKQTLNFDLLKLAGDVESNPGPTSMDWIWRILFLVGAATGAHSFEQLQLQESGPGLVKPSETLSLTCTVSGGSISSSSYWWGWTRQPPGRGLEWIGTMYYSGNIYYNPSLQSRATISVDTSKNQFSLKLSSVTAADTAVYYCARHVGYSYGRRFWYFDLWGRGTLVTVSSTREDLKNVFPPEVAVFEPSEAEISHTQKATLVCLATGFYPDHVELSWWVNGKEVHSGVCTDPQPLKEQPALNDSRYCLSSRLRVSATFWQNPRNHFRCQVQFYGLSENDEWTQDRAKPVTQIVSAEAWGRADCDVKLVEKSFETDTNLNFQNLSVIGFRILLLKVAGFNLLMTLRLWSS

SEQ ID NO: 45818 - protein, 897 aa, synthetic construct
MALPVTALLLPLALLLHAARPEVQLVESGGGLVQPGGSLRLSCAASGFSFSDFWMSWVRQAPGKGLEWVATISQAGSEKDYVDSVKGRFTISRDNAKKSLYLQMNSLRAEDTAVYYCASGVYSFDYRGQGTLVTVSSGTGGGGSGGGGSGGGGSEFEIVLTQSPATLSLSPGERATLSCRASQSVSSYLAWYQQKPGQAPRLLIYDASNRATGIPARFSGSGSGTDFTLTISSLEPEDFAVYYCQQRSNWPPTFGQGTKVEIKLEDLKNVFPPEVAVFEPSEAEISHTQKATLVCLATGFYPDHVELSWWVNGKEVHSGVCTDPQPLKEQPALNDSRYCLSSRLRVSATFWQNPRNHFRCQVQFYGLSENDEWTQDRAKPVTQIVSAEAWGRADCDVKLVEKSFETDTNLNFQNLSVIGFRILLLKVAGFNLLMTLRLWSSRAKRSGSGATNFSLLKQAGDVEENPGPTSMDWIWRILFLVGAATGAHSGPQLQLQESGPGLVKPSETLSLTCTVSGDSISSGDYYWGWIRQPPGKGLEWIGHIYYSGVTYYNPSLKSRVTISVDTSRNQFSLKLSSVTAADTAVYYCTREDSSNWRSRGQGTLVTVSSGSGGGGSGGGGSGGGGSFEQLQLQESGPGLVKPSETLSLTCTVSGGSISSSSYWWGWTRQPPGRGLEWIGTMYYSGNIYYNPSLQSRATISVDTSKNQFSLKLSSVTAADTAVYYCARHVGYSYGRRFWYFDLWGRGTLVTVSSTRIQNPDPAVYQLRDSKSSDKSVCLFTDFDSQTNVSQSKDSDVYITDKCVLDMRSMDFKSNSAVAWSNKSDFACANAFNNSIIPEDTFFPSPESSCGFTSESYQQGVLSATILYEILLGKATLYAVLVSALVLMAMVKRKDSRG

SEQ ID NO: 45819 - protein, 901 aa, synthetic construct
MALPVTALLLPLALLLHAARPEVQLVESGGGLVQPGGSLRLSCAASGFSFSDFWMSWVRQAPGKGLEWVATISQAGSEKDYVDSVKGRFTISRDNAKKSLYLQMNSLRAEDTAVYYCASGVYSFDYRGQGTLVTVSSGTGGGGSGGGGSGGGGSEFEIVLTQSPATLSLSPGERATLSCRASQSVSSYLAWYQQKPGQAPRLLIYDASNRATGIPARFSGSGSGTDFTLTISSLEPEDFAVYYCQQRSNWPPTFGQGTKVEIKLEIQNPDPAVYQLRDSKSSDKSVCLFTDFDSQTNVSQSKDSDVYITDKCVLDMRSMDFKSNSAVAWSNKSDFACANAFNNSIIPEDTFFPSPESSCGFTSESYQQGVLSATILYEILLGKATLYAVLVSALVLMAMVKRKDSRGRAKRSGSGVKQTLNFDLLKLAGDVESNPGPTSMDWIWRILFLVGAATGAHSGPQLQLQESGPGLVKPSETLSLTCTVSGDSISSGDYYWGWIRQPPGKGLEWIGHIYYSGVTYYNPSLKSRVTISVDTSRNQFSLKLSSVTAADTAVYYCTREDSSNWRSRGQGTLVTVSSGSGGGGSGGGGSGGGGSFEQLQLQESGPGLVKPSETLSLTCTVSGGSISSSSYWWGWTRQPPGRGLEWIGTMYYSGNIYYNPSLQSRATISVDTSKNQFSLKLSSVTAADTAVYYCARHVGYSYGRRFWYFDLWGRGTLVTVSSTREDLKNVFPPEVAVFEPSEAEISHTQKATLVCLATGFYPDHVELSWWVNGKEVHSGVCTDPQPLKEQPALNDSRYCLSSRLRVSATFWQNPRNHFRCQVQFYGLSENDEWTQDRAKPVTQIVSAEAWGRADCDVKLVEKSFETDTNLNFQNLSVIGFRILLLKVAGFNLLMTLRLWSS

SEQ ID NO: 45820 - protein, 695 aa, synthetic construct
MALPVTALLLPLALLLHAARPEIVLTQSPATLSLSPGERATLSCRASQSVSSYLAWYQQKPGQAPRLLIYDASNRATGIPARFSGSGSGTDFTLTISSLEPEDFAVYYCQQRSNWPPTFGQGTKVEIKLEDLKNVFPPEVAVFEPSEAEISHTQKATLVCLATGFYPDHVELSWWVNGKEVHSGVCTDPQPLKEQPALNDSRYCLSSRLRVSATFWQNPRNHFRCQVQFYGLSENDEWTQDRAKPVTQIVSAEAWGRADCDVKLVEKSFETDTNLNFQNLSVIGFRILLLKVAGFNLLMTLRLWSSRAKRSGSGATNFSLLKQAGDVEENPGPTSMDWIWRILFLVGAATGAHSGPMDPDLEIRAAFLRQRNTALRTEVAELEQEVQRLENEVSQYETRYGPLGGGKGSGGGGSGGGGSGGGGSFEQLQLQESGPGLVKPSETLSLTCTVSGGSISSSSYWWGWTRQPPGRGLEWIGTMYYSGNIYYNPSLQSRATISVDTSKNQFSLKLSSVTAADTAVYYCARHVGYSYGRRFWYFDLWGRGTLVTVSSTRIQNPDPAVYQLRDSKSSDKSVCLFTDFDSQTNVSQSKDSDVYITDKCVLDMRSMDFKSNSAVAWSNKSDFACANAFNNSIIPEDTFFPSPESSCGFTSESYQQGVLSATILYEILLGKATLYAVLVSALVLMAMVKRKDSRG

SEQ ID NO: 45821 - protein, 699 aa, synthetic construct
MALPVTALLLPLALLLHAARPEIVLTQSPATLSLSPGERATLSCRASQSVSSYLAWYQQKPGQAPRLLIYDASNRATGIPARFSGSGSGTDFTLTISSLEPEDFAVYYCQQRSNWPPTFGQGTKVEIKLEIQNPDPAVYQLRDSKSSDKSVCLFTDFDSQTNVSQSKDSDVYITDKCVLDMRSMDFKSNSAVAWSNKSDFACANAFNNSIIPEDTFFPSPESSCGFTSESYQQGVLSATILYEILLGKATLYAVLVSALVLMAMVKRKDSRGRAKRSGSGVKQTLNFDLLKLAGDVESNPGPTSMDWIWRILFLVGAATGAHSGPMDPDLEIRAAFLRQRNTALRTEVAELEQEVQRLENEVSQYETRYGPLGGGKGSGGGGSGGGGSGGGGSFEQLQLQESGPGLVKPSETLSLTCTVSGGSISSSSYWWGWTRQPPGRGLEWIGTMYYSGNIYYNPSLQSRATISVDTSKNQFSLKLSSVTAADTAVYYCARHVGYSYGRRFWYFDLWGRGTLVTVSSTREDLKNVFPPEVAVFEPSEAEISHTQKATLVCLATGFYPDHVELSWWVNGKEVHSGVCTDPQPLKEQPALNDSRYCLSSRLRVSATFWQNPRNHFRCQVQFYGLSENDEWTQDRAKPVTQIVSAEAWGRADCDVKLVEKSFETDTNLNFQNLSVIGFRILLLKVAGFNLLMTLRLWSS

SEQ ID NO: 45822 - protein, 672 aa, synthetic construct
MALPVTALLLPLALLLHAARPEIVLTQSPATLSLSPGERATLSCRASQSVSSYLAWYQQKPGQAPRLLIYDASNRATGIPARFSGSGSGTDFTLTISSLEPEDFAVYYCQQRSNWPPTFGQGTKVEIKLEDLKNVFPPEVAVFEPSEAEISHTQKATLVCLATGFYPDHVELSWWVNGKEVHSGVCTDPQPLKEQPALNDSRYCLSSRLRVSATFWQNPRNHFRCQVQFYGLSENDEWTQDRAKPVTQIVSAEAWGRADCDVKLVEKSFETDTNLNFQNLSVIGFRILLLKVAGFNLLMTLRLWSSRAKRSGSGATNFSLLKQAGDVEENPGPTSMDWIWRILFLVGAATGAHSGPEVAALEKEVAALEKEVAALEKEVAALEKGSGGGGSGGGGSGGGGSFEQLQLQESGPGLVKPSETLSLTCTVSGGSISSSSYWWGWTRQPPGRGLEWIGTMYYSGNIYYNPSLQSRATISVDTSKNQFSLKLSSVTAADTAVYYCARHVGYSYGRRFWYFDLWGRGTLVTVSSTRIQNPDPAVYQLRDSKSSDKSVCLFTDFDSQTNVSQSKDSDVYITDKCVLDMRSMDFKSNSAVAWSNKSDFACANAFNNSIIPEDTFFPSPESSCGFTSESYQQGVLSATILYEILLGKATLYAVLVSALVLMAMVKRKDSRG

SEQ ID NO: 45823 - protein, 676 aa, synthetic construct
MALPVTALLLPLALLLHAARPEIVLTQSPATLSLSPGERATLSCRASQSVSSYLAWYQQKPGQAPRLLIYDASNRATGIPARFSGSGSGTDFTLTISSLEPEDFAVYYCQQRSNWPPTFGQGTKVEIKLEIQNPDPAVYQLRDSKSSDKSVCLFTDFDSQTNVSQSKDSDVYITDKCVLDMRSMDFKSNSAVAWSNKSDFACANAFNNSIIPEDTFFPSPESSCGFTSESYQQGVLSATILYEILLGKATLYAVLVSALVLMAMVKRKDSRGRAKRSGSGVKQTLNFDLLKLAGDVESNPGPTSMDWIWRILFLVGAATGAHSGPEVAALEKEVAALEKEVAALEKEVAALEKGSGGGGSGGGGSGGGGSFEQLQLQESGPGLVKPSETLSLTCTVSGGSISSSSYWWGWTRQPPGRGLEWIGTMYYSGNIYYNPSLQSRATISVDTSKNQFSLKLSSVTAADTAVYYCARHVGYSYGRRFWYFDLWGRGTLVTVSSTREDLKNVFPPEVAVFEPSEAEISHTQKATLVCLATGFYPDHVELSWWVNGKEVHSGVCTDPQPLKEQPALNDSRYCLSSRLRVSATFWQNPRNHFRCQVQFYGLSENDEWTQDRAKPVTQIVSAEAWGRADCDVKLVEKSFETDTNLNFQNLSVIGFRILLLKVAGFNLLMTLRLWSS

SEQ ID NO: 45824 - protein, 762 aa, synthetic construct
MALPVTALLLPLALLLHAARPEIVLTQSPATLSLSPGERATLSCRASQSVSSYLAWYQQKPGQAPRLLIYDASNRATGIPARFSGSGSGTDFTLTISSLEPEDFAVYYCQQRSNWPPTFGQGTKVEIKLEDLKNVFPPEVAVFEPSEAEISHTQKATLVCLATGFYPDHVELSWWVNGKEVHSGVCTDPQPLKEQPALNDSRYCLSSRLRVSATFWQNPRNHFRCQVQFYGLSENDEWTQDRAKPVTQIVSAEAWGRADCDVKLVEKSFETDTNLNFQNLSVIGFRILLLKVAGFNLLMTLRLWSSRAKRSGSGATNFSLLKQAGDVEENPGPTSMDWIWRILFLVGAATGAHSGPQVQLQESGGGLAQAGGSLRLSCAASGRTFSMGWFRQAPGKEREFVAAITYSGGSPYYASSVRGRFTISRDNAKNTVYLQMNSLKPEDTAVYYCAANPTYGSDWNAENWGQGTQVTVSSGSGGGGSGGGGSGGGGSFEQLQLQESGPGLVKPSETLSLTCTVSGGSISSSSYWWGWTRQPPGRGLEWIGTMYYSGNIYYNPSLQSRATISVDTSKNQFSLKLSSVTAADTAVYYCARHVGYSYGRRFWYFDLWGRGTLVTVSSTRIQNPDPAVYQLRDSKSSDKSVCLFTDFDSQTNVSQSKDSDVYITDKCVLDMRSMDFKSNSAVAWSNKSDFACANAFNNSIIPEDTFFPSPESSCGFTSESYQQGVLSATILYEILLGKATLYAVLVSALVLMAMVKRKDSRG

SEQ ID NO: 45825 - protein, 766 aa, synthetic construct
MALPVTALLLPLALLLHAARPEIVLTQSPATLSLSPGERATLSCRASQSVSSYLAWYQQKPGQAPRLLIYDASNRATGIPARFSGSGSGTDFTLTISSLEPEDFAVYYCQQRSNWPPTFGQGTKVEIKLEIQNPDPAVYQLRDSKSSDKSVCLFTDFDSQTNVSQSKDSDVYITDKCVLDMRSMDFKSNSAVAWSNKSDFACANAFNNSIIPEDTFFPSPESSCGFTSESYQQGVLSATILYEILLGKATLYAVLVSALVLMAMVKRKDSRGRAKRSGSGVKQTLNFDLLKLAGDVESNPGPTSMDWIWRILFLVGAATGAHSGPQVQLQESGGGLAQAGGSLRLSCAASGRTFSMGWFRQAPGKEREFVAAITYSGGSPYYASSVRGRFTISRDNAKNTVYLQMNSLKPEDTAVYYCAANPTYGSDWNAENWGQGTQVTVSSGSGGGGSGGGGSGGGGSFEQLQLQESGPGLVKPSETLSLTCTVSGGSISSSSYWWGWTRQPPGRGLEWIGTMYYSGNIYYNPSLQSRATISVDTSKNQFSLKLSSVTAADTAVYYCARHVGYSYGRRFWYFDLWGRGTLVTVSSTREDLKNVFPPEVAVFEPSEAEISHTQKATLVCLATGFYPDHVELSWWVNGKEVHSGVCTDPQPLKEQPALNDSRYCLSSRLRVSATFWQNPRNHFRCQVQFYGLSENDEWTQDRAKPVTQIVSAEAWGRADCDVKLVEKSFETDTNLNFQNLSVIGFRILLLKVAGFNLLMTLRLWSS

SEQ ID NO: 45826 - protein, 768 aa, synthetic construct
MALPVTALLLPLALLLHAARPEVQLVESGGSLVQPGGSLRLSCAASGFTFDDYAMSWVRQVPGKGLEWVSSINWSGTHTDYADSVKGRFTISRNNANNTLYLQMNSLKSEDTAVYYCAKNWRDAGTTWFEKSGSAGQGTQVTVSSGTGGGGSGGGGSGGGGSEFEIVLTQSPATLSLSPGERATLSCRASQSVSSYLAWYQQKPGQAPRLLIYDASNRATGIPARFSGSGSGTDFTLTISSLEPEDFAVYYCQQRSNWPPTFGQGTKVEIKLEDLKNVFPPEVAVFEPSEAEISHTQKATLVCLATGFYPDHVELSWWVNGKEVHSGVCTDPQPLKEQPALNDSRYCLSSRLRVSATFWQNPRNHFRCQVQFYGLSENDEWTQDRAKPVTQIVSAEAWGRADCDVKLVEKSFETDTNLNFQNLSVIGFRILLLKVAGFNLLMTLRLWSSRAKRSGSGATNFSLLKQAGDVEENPGPTSMDWIWRILFLVGAATGAHSFEQLQLQESGPGLVKPSETLSLTCTVSGGSISSSSYWWGWTRQPPGRGLEWIGTMYYSGNIYYNPSLQSRATISVDTSKNQFSLKLSSVTAADTAVYYCARHVGYSYGRRFWYFDLWGRGTLVTVSSTRIQNPDPAVYQLRDSKSSDKSVCLFTDFDSQTNVSQSKDSDVYITDKCVLDMRSMDFKSNSAVAWSNKSDFACANAFNNSIIPEDTFFPSPESSCGFTSESYQQGVLSATILYEILLGKATLYAVLVSALVLMAMVKRKDSRG

SEQ ID NO: 45827 - protein, 772 aa, synthetic construct
MALPVTALLLPLALLLHAARPEVQLVESGGSLVQPGGSLRLSCAASGFTFDDYAMSWVRQVPGKGLEWVSSINWSGTHTDYADSVKGRFTISRNNANNTLYLQMNSLKSEDTAVYYCAKNWRDAGTTWFEKSGSAGQGTQVTVSSGTGGGGSGGGGSGGGGSEFEIVLTQSPATLSLSPGERATLSCRASQSVSSYLAWYQQKPGQAPRLLIYDASNRATGIPARFSGSGSGTDFTLTISSLEPEDFAVYYCQQRSNWPPTFGQGTKVEIKLEIQNPDPAVYQLRDSKSSDKSVCLFTDFDSQTNVSQSKDSDVYITDKCVLDMRSMDFKSNSAVAWSNKSDFACANAFNNSIIPEDTFFPSPESSCGFTSESYQQGVLSATILYEILLGKATLYAVLVSALVLMAMVKRKDSRGRAKRSGSGVKQTLNFDLLKLAGDVESNPGPTSMDWIWRILFLVGAATGAHSFEQLQLQESGPGLVKPSETLSLTCTVSGGSISSSSYWWGWTRQPPGRGLEWIGTMYYSGNIYYNPSLQSRATISVDTSKNQFSLKLSSVTAADTAVYYCARHVGYSYGRRFWYFDLWGRGTLVTVSSTREDLKNVFPPEVAVFEPSEAEISHTQKATLVCLATGFYPDHVELSWWVNGKEVHSGVCTDPQPLKEQPALNDSRYCLSSRLRVSATFWQNPRNHFRCQVQFYGLSENDEWTQDRAKPVTQIVSAEAWGRADCDVKLVEKSFETDTNLNFQNLSVIGFRILLLKVAGFNLLMTLRLWSS

SEQ ID NO: 45828 - protein, 766 aa, synthetic construct
MALPVTALLLPLALLLHAARPEVQLLESGGGLVQPGGSLRLSCAASGFIFSSYAMSWVRQAPGKGQEWVSGVSGTGVNTYYADSVKGRFTISRDNSKNTLYLQMNSLRAEDTAVYYCASGKGWDSGSWYEDYRGQGTLVTVSSGTGGGGSGGGGSGGGGSEFEIVLTQSPATLSLSPGERATLSCRASQSVSSYLAWYQQKPGQAPRLLIYDASNRATGIPARFSGSGSGTDFTLTISSLEPEDFAVYYCQQRSNWPPTFGQGTKVEIKLEDLKNVFPPEVAVFEPSEAEISHTQKATLVCLATGFYPDHVELSWWVNGKEVHSGVCTDPQPLKEQPALNDSRYCLSSRLRVSATFWQNPRNHFRCQVQFYGLSENDEWTQDRAKPVTQIVSAEAWGRADCDVKLVEKSFETDTNLNFQNLSVIGFRILLLKVAGFNLLMTLRLWSSRAKRSGSGATNFSLLKQAGDVEENPGPTSMDWIWRILFLVGAATGAHSFEQLQLQESGPGLVKPSETLSLTCTVSGGSISSSSYWWGWTRQPPGRGLEWIGTMYYSGNIYYNPSLQSRATISVDTSKNQFSLKLSSVTAADTAVYYCARHVGYSYGRRFWYFDLWGRGTLVTVSSTRIQNPDPAVYQLRDSKSSDKSVCLFTDFDSQTNVSQSKDSDVYITDKCVLDMRSMDFKSNSAVAWSNKSDFACANAFNNSIIPEDTFFPSPESSCGFTSESYQQGVLSATILYEILLGKATLYAVLVSALVLMAMVKRKDSRG

SEQ ID NO: 45829 - protein, 770 aa, synthetic construct
MALPVTALLLPLALLLHAARPEVQLLESGGGLVQPGGSLRLSCAASGFIFSSYAMSWVRQAPGKGQEWVSGVSGTGVNTYYADSVKGRFTISRDNSKNTLYLQMNSLRAEDTAVYYCASGKGWDSGSWYEDYRGQGTLVTVSSGTGGGGSGGGGSGGGGSEFEIVLTQSPATLSLSPGERATLSCRASQSVSSYLAWYQQKPGQAPRLLIYDASNRATGIPARFSGSGSGTDFTLTISSLEPEDFAVYYCQQRSNWPPTFGQGTKVEIKLEIQNPDPAVYQLRDSKSSDKSVCLFTDFDSQTNVSQSKDSDVYITDKCVLDMRSMDFKSNSAVAWSNKSDFACANAFNNSIIPEDTFFPSPESSCGFTSESYQQGVLSATILYEILLGKATLYAVLVSALVLMAMVKRKDSRGRAKRSGSGVKQTLNFDLLKLAGDVESNPGPTSMDWIWRILFLVGAATGAHSFEQLQLQESGPGLVKPSETLSLTCTVSGGSISSSSYWWGWTRQPPGRGLEWIGTMYYSGNIYYNPSLQSRATISVDTSKNQFSLKLSSVTAADTAVYYCARHVGYSYGRRFWYFDLWGRGTLVTVSSTREDLKNVFPPEVAVFEPSEAEISHTQKATLVCLATGFYPDHVELSWWVNGKEVHSGVCTDPQPLKEQPALNDSRYCLSSRLRVSATFWQNPRNHFRCQVQFYGLSENDEWTQDRAKPVTQIVSAEAWGRADCDVKLVEKSFETDTNLNFQNLSVIGFRILLLKVAGFNLLMTLRLWSS

SEQ ID NO: 45830 - protein, 734 aa, synthetic construct
MALPVTALLLPLALLLHAARPMLPAPKNLVVSRITEDSARLSWTAPDAAFDSFPIRYIETLIWGEAIWLDVPGSERSYDLTGLKPGTEYAVVITGVKGGRFSSPLVASFTTGTGGGGSGGGGSGGGGSEFEIVLTQSPATLSLSPGERATLSCRASQSVSSYLAWYQQKPGQAPRLLIYDASNRATGIPARFSGSGSGTDFTLTISSLEPEDFAVYYCQQRSNWPPTFGQGTKVEIKLEDLKNVFPPEVAVFEPSEAEISHTQKATLVCLATGFYPDHVELSWWVNGKEVHSGVCTDPQPLKEQPALNDSRYCLSSRLRVSATFWQNPRNHFRCQVQFYGLSENDEWTQDRAKPVTQIVSAEAWGRADCDVKLVEKSFETDTNLNFQNLSVIGFRILLLKVAGFNLLMTLRLWSSRAKRSGSGATNFSLLKQAGDVEENPGPTSMDWIWRILFLVGAATGAHSFEQLQLQESGPGLVKPSETLSLTCTVSGGSISSSSYWWGWTRQPPGRGLEWIGTMYYSGNIYYNPSLQSRATISVDTSKNQFSLKLSSVTAADTAVYYCARHVGYSYGRRFWYFDLWGRGTLVTVSSTRIQNPDPAVYQLRDSKSSDKSVCLFTDFDSQTNVSQSKDSDVYITDKCVLDMRSMDFKSNSAVAWSNKSDFACANAFNNSIIPEDTFFPSPESSCGFTSESYQQGVLSATILYEILLGKATLYAVLVSALVLMAMVKRKDSRG

SEQ ID NO: 45831 - protein, 738 aa, synthetic construct
MALPVTALLLPLALLLHAARPMLPAPKNLVVSRITEDSARLSWTAPDAAFDSFPIRYIETLIWGEAIWLDVPGSERSYDLTGLKPGTEYAVVITGVKGGRFSSPLVASFTTGTGGGGSGGGGSGGGGSEFEIVLTQSPATLSLSPGERATLSCRASQSVSSYLAWYQQKPGQAPRLLIYDASNRATGIPARFSGSGSGTDFTLTISSLEPEDFAVYYCQQRSNWPPTFGQGTKVEIKLEIQNPDPAVYQLRDSKSSDKSVCLFTDFDSQTNVSQSKDSDVYITDKCVLDMRSMDFKSNSAVAWSNKSDFACANAFNNSIIPEDTFFPSPESSCGFTSESYQQGVLSATILYEILLGKATLYAVLVSALVLMAMVKRKDSRGRAKRSGSGVKQTLNFDLLKLAGDVESNPGPTSMDWIWRILFLVGAATGAHSFEQLQLQESGPGLVKPSETLSLTCTVSGGSISSSSYWWGWTRQPPGRGLEWIGTMYYSGNIYYNPSLQSRATISVDTSKNQFSLKLSSVTAADTAVYYCARHVGYSYGRRFWYFDLWGRGTLVTVSSTREDLKNVFPPEVAVFEPSEAEISHTQKATLVCLATGFYPDHVELSWWVNGKEVHSGVCTDPQPLKEQPALNDSRYCLSSRLRVSATFWQNPRNHFRCQVQFYGLSENDEWTQDRAKPVTQIVSAEAWGRADCDVKLVEKSFETDTNLNFQNLSVIGFRILLLKVAGFNLLMTLRLWSS

SEQ ID NO: 45832 - protein, 763 aa, synthetic construct
MALPVTALLLPLALLLHAARPEVQLVESGGGLVQPGGSLRLSCAASGFNIKDTCIGWVRRAPGKEEELVAKICKYSGHTRYADSVKGRFTISADTSKNTAYLQMNSLRAEDTAVYYCAAVSVRDGHYNYWGQGTTVTVSSGTGGGGSGGGGSGGGGSEFEIVLTQSPATLSLSPGERATLSCRASQSVSSYLAWYQQKPGQAPRLLIYDASNRATGIPARFSGSGSGTDFTLTISSLEPEDFAVYYCQQRSNWPPTFGQGTKVEIKLEDLKNVFPPEVAVFEPSEAEISHTQKATLVCLATGFYPDHVELSWWVNGKEVHSGVCTDPQPLKEQPALNDSRYCLSSRLRVSATFWQNPRNHFRCQVQFYGLSENDEWTQDRAKPVTQIVSAEAWGRADCDVKLVEKSFETDTNLNFQNLSVIGFRILLLKVAGFNLLMTLRLWSSRAKRSGSGATNFSLLKQAGDVEENPGPTSMDWIWRILFLVGAATGAHSFEQLQLQESGPGLVKPSETLSLTCTVSGGSISSSSYWWGWTRQPPGRGLEWIGTMYYSGNIYYNPSLQSRATISVDTSKNQFSLKLSSVTAADTAVYYCARHVGYSYGRRFWYFDLWGRGTLVTVSSTRIQNPDPAVYQLRDSKSSDKSVCLFTDFDSQTNVSQSKDSDVYITDKCVLDMRSMDFKSNSAVAWSNKSDFACANAFNNSIIPEDTFFPSPESSCGFTSESYQQGVLSATILYEILLGKATLYAVLVSALVLMAMVKRKDSRG

SEQ ID NO: 45833 - protein, 767 aa, synthetic construct
MALPVTALLLPLALLLHAARPEVQLVESGGGLVQPGGSLRLSCAASGFNIKDTCIGWVRRAPGKEEELVAKICKYSGHTRYADSVKGRFTISADTSKNTAYLQMNSLRAEDTAVYYCAAVSVRDGHYNYWGQGTTVTVSSGTGGGGSGGGGSGGGGSEFEIVLTQSPATLSLSPGERATLSCRASQSVSSYLAWYQQKPGQAPRLLIYDASNRATGIPARFSGSGSGTDFTLTISSLEPEDFAVYYCQQRSNWPPTFGQGTKVEIKLEIQNPDPAVYQLRDSKSSDKSVCLFTDFDSQTNVSQSKDSDVYITDKCVLDMRSMDFKSNSAVAWSNKSDFACANAFNNSIIPEDTFFPSPESSCGFTSESYQQGVLSATILYEILLGKATLYAVLVSALVLMAMVKRKDSRGRAKRSGSGVKQTLNFDLLKLAGDVESNPGPTSMDWIWRILFLVGAATGAHSFEQLQLQESGPGLVKPSETLSLTCTVSGGSISSSSYWWGWTRQPPGRGLEWIGTMYYSGNIYYNPSLQSRATISVDTSKNQFSLKLSSVTAADTAVYYCARHVGYSYGRRFWYFDLWGRGTLVTVSSTREDLKNVFPPEVAVFEPSEAEISHTQKATLVCLATGFYPDHVELSWWVNGKEVHSGVCTDPQPLKEQPALNDSRYCLSSRLRVSATFWQNPRNHFRCQVQFYGLSENDEWTQDRAKPVTQIVSAEAWGRADCDVKLVEKSFETDTNLNFQNLSVIGFRILLLKVAGFNLLMTLRLWSS

SEQ ID NO: 45834 - protein, 1134 aa, synthetic construct
MALPVTALLLPLALLLHAARPEVQLVESGGGLVQAGGSLRLSCAASGRTFSMGWFRQAPGKEREFVAAITYSGGSPYYADSVKGRFTISRDNAKNTVYLQMNSLKPEDTAVYYCAANPTYGSDWNAENWGQGTQVTVSSGTGGGGSGGGGSGGGGSEFEIVLTQSPATLSLSPGERATLSCRASQSVSSYLAWYQQKPGQAPRLLIYDASNRATGIPARFSGSGSGTDFTLTISSLEPEDFAVYYCQQRSNWPPTFGQGTKVEIKLEDLKNVFPPEVAVFEPSEAEISHTQKATLVCLATGFYPDHVELSWWVNGKEVHSGVCTDPQPLKEQPALNDSRYCLSSRLRVSATFWQNPRNHFRCQVQFYGLSENDEWTQDRAKPVTQIVSAEAWGRADCDVKLVEKSFETDTNLNFQNLSVIGFRILLLKVAGFNLLMTLRLWSSRAKRSGSGATNFSLLKQAGDVEENPGPTSATMDWIWRILFLVGAATGAHSGPEVQLVESGGGLVQAGGSLRLSCAASGRTFTMGWFRQAPGKEREFVAAISLSPTLAYYADSVKGRFTISRDNAKNTVVLQMNSLKPEDTALYYCAADRKSVMSIRPDYWGQGTQVTVSSGSGGGGSGGGGSGGGGSFEQLQLQESGPGLVKPSETLSLTCTVSGGSISSSSYWWGWTRQPPGRGLEWIGTMYYSGNIYYNPSLQSRATISVDTSKNQFSLKLSSVTAADTAVYYCARHVGYSYGRRFWYFDLWGRGTLVTVSSTRIQNPDPAVYQLRDSKSSDKSVCLFTDFDSQTNVSQSKDSDVYITDKCVLDMRSMDFKSNSAVAWSNKSDFACANAFNNSIIPEDTFFPSPESSCGFTSESYQQGVLSATILYEILLGKATLYAVLVSALVLMAMVKRKDSRGRAKRSGSGVKQTLNFDLLKLAGDVESNPGPSRGHMTEYKPTVRLATRDDVPRAVRTLAAAFADYPATRHTVDPDRHIERVTELQELFLTRVGLDIGKVWVADDGAAVAVWTTPESVEAGAVFAEIGPRMAELSGSRLAAQQQMEGLLAPHRPKEPAWFLATVGVSPDHQGKGLGSAVVLPGVEAAERAGVPAFLETSAPRNLPFYERLGFTVTADVEVPEGPRTWCMTRKPGA

SEQ ID NO: 45835 - protein, 772 aa, synthetic construct
MALPVTALLLPLALLLHAARPEVQLVESGGGLVQPGGSLRLSCAASGFASDYYIIGWFRQAPGKEREGVSCISSRYANTNYADSVKGRFTISRDNAKNTVYLQMNSLKPEDTAVYYCAADTRRYTCPDIATMHRNFDSWGQGTLVTVSSGTGGGGSGGGGSGGGGSEFEIVLTQSPATLSLSPGERATLSCRASQSVSSYLAWYQQKPGQAPRLLIYDASNRATGIPARFSGSGSGTDFTLTISSLEPEDFAVYYCQQRSNWPPTFGQGTKVEIKLEDLKNVFPPEVAVFEPSEAEISHTQKATLVCLATGFYPDHVELSWWVNGKEVHSGVCTDPQPLKEQPALNDSRYCLSSRLRVSATFWQNPRNHFRCQVQFYGLSENDEWTQDRAKPVTQIVSAEAWGRADCDVKLVEKSFETDTNLNFQNLSVIGFRILLLKVAGFNLLMTLRLWSSRAKRSGSGATNFSLLKQAGDVEENPGPTSMDWIWRILFLVGAATGAHSFEQLQLQESGPGLVKPSETLSLTCTVSGGSISSSSYWWGWTRQPPGRGLEWIGTMYYSGNIYYNPSLQSRATISVDTSKNQFSLKLSSVTAADTAVYYCARHVGYSYGRRFWYFDLWGRGTLVTVSSTRIQNPDPAVYQLRDSKSSDKSVCLFTDFDSQTNVSQSKDSDVYITDKCVLDMRSMDFKSNSAVAWSNKSDFACANAFNNSIIPEDTFFPSPESSCGFTSESYQQGVLSATILYEILLGKATLYAVLVSALVLMAMVKRKDSRG

SEQ ID NO: 45836 - protein, 772 aa, synthetic construct
MALPVTALLLPLALLLHAARPEVQLVESGGGLVQPGGSLRLSCEASGFASDDYIIGWFRQAPGKEREGVSCISSKYANTVYTDSVKGRFRLSRGTAKNTVYLQMSALKPEDTAVYYCAMDSRRVTCPEISTMHRNFDSWGQGTLVTVSSGTGGGGSGGGGSGGGGSEFEIVLTQSPATLSLSPGERATLSCRASQSVSSYLAWYQQKPGQAPRLLIYDASNRATGIPARFSGSGSGTDFTLTISSLEPEDFAVYYCQQRSNWPPTFGQGTKVEIKLEDLKNVFPPEVAVFEPSEAEISHTQKATLVCLATGFYPDHVELSWWVNGKEVHSGVCTDPQPLKEQPALNDSRYCLSSRLRVSATFWQNPRNHFRCQVQFYGLSENDEWTQDRAKPVTQIVSAEAWGRADCDVKLVEKSFETDTNLNFQNLSVIGFRILLLKVAGFNLLMTLRLWSSRAKRSGSGATNFSLLKQAGDVEENPGPTSMDWIWRILFLVGAATGAHSFEQLQLQESGPGLVKPSETLSLTCTVSGGSISSSSYWWGWTRQPPGRGLEWIGTMYYSGNIYYNPSLQSRATISVDTSKNQFSLKLSSVTAADTAVYYCARHVGYSYGRRFWYFDLWGRGTLVTVSSTRIQNPDPAVYQLRDSKSSDKSVCLFTDFDSQTNVSQSKDSDVYITDKCVLDMRSMDFKSNSAVAWSNKSDFACANAFNNSIIPEDTFFPSPESSCGFTSESYQQGVLSATILYEILLGKATLYAVLVSALVLMAMVKRKDSRG

SEQ ID NO: 45837 - protein, 772 aa, synthetic construct
MALPVTALLLPLALLLHAARPEVQLVESGGGLVQPGGSLRLSCAASGFASDYYIIGWFRQAPGKEREGVSCISSRYANTNYADSVKGRFTISRDNAKNTVYLQMNSLKPEDTAVYYCAADTRRYTCPDIATMHRNFDSWGQGTLVTVSSGTGGGGSGGGGSGGGGSEFEIVLTQSPATLSLSPGERATLSCRASQSVSSYLAWYQQKPGQAPRLLIYDASNRATGIPARFSGSGSGTDFTLTISSLEPEDFAVYYCQQRSNWPPTFGQGTKVEIKLEIQNPDPAVYQLRDSKSSDKSVCLFTDFDSQTNVSQSKDSDVYITDKCVLDMRSMDFKSNSAVAWSNKSDFACANAFNNSIIPEDTFFPSPESSCGFTSESYQQGVLSATILYEILLGKATLYAVLVSALVLMAMVKRKDSRGRAKRSGSGATNFSLLKQAGDVEENPGPTSMDWIWRILFLVGAATGAHSFEQLQLQESGPGLVKPSETLSLTCTVSGGSISSSSYWWGWTRQPPGRGLEWIGTMYYSGNIYYNPSLQSRATISVDTSKNQFSLKLSSVTAADTAVYYCARHVGYSYGRRFWYFDLWGRGTLVTVSSTRDLKNVFPPEVAVFEPSEAEISHTQKATLVCLATGFYPDHVELSWWVNGKEVHSGVCTDPQPLKEQPALNDSRYCLSSRLRVSATFWQNPRNHFRCQVQFYGLSENDEWTQDRAKPVTQIVSAEAWGRADCDVKLVEKSFETDTNLNFQNLSVIGFRILLLKVAGFNLLMTLRLWSS

SEQ ID NO: 45838 - protein, 772 aa, synthetic construct
MALPVTALLLPLALLLHAARPEVQLVESGGGLVQPGGSLRLSCEASGFASDDYIIGWFRQAPGKEREGVSCISSKYANTVYTDSVKGRFRLSRGTAKNTVYLQMSALKPEDTAVYYCAMDSRRVTCPEISTMHRNFDSWGQGTLVTVSSGTGGGGSGGGGSGGGGSEFEIVLTQSPATLSLSPGERATLSCRASQSVSSYLAWYQQKPGQAPRLLIYDASNRATGIPARFSGSGSGTDFTLTISSLEPEDFAVYYCQQRSNWPPTFGQGTKVEIKLEIQNPDPAVYQLRDSKSSDKSVCLFTDFDSQTNVSQSKDSDVYITDKCVLDMRSMDFKSNSAVAWSNKSDFACANAFNNSIIPEDTFFPSPESSCGFTSESYQQGVLSATILYEILLGKATLYAVLVSALVLMAMVKRKDSRGRAKRSGSGATNFSLLKQAGDVEENPGPTSMDWIWRILFLVGAATGAHSFEQLQLQESGPGLVKPSETLSLTCTVSGGSISSSSYWWGWTRQPPGRGLEWIGTMYYSGNIYYNPSLQSRATISVDTSKNQFSLKLSSVTAADTAVYYCARHVGYSYGRRFWYFDLWGRGTLVTVSSTRDLKNVFPPEVAVFEPSEAEISHTQKATLVCLATGFYPDHVELSWWVNGKEVHSGVCTDPQPLKEQPALNDSRYCLSSRLRVSATFWQNPRNHFRCQVQFYGLSENDEWTQDRAKPVTQIVSAEAWGRADCDVKLVEKSFETDTNLNFQNLSVIGFRILLLKVAGFNLLMTLRLWSS

SEQ ID NO: 45839 - protein, 763 aa, synthetic construct
MALPVTALLLPLALLLHAARPQVKLEESGGGLVQPGESLRLSCSASGSIFKVFRVFAMSWYRQGPGKQRELVASISSGETTTYAESVKGRFTISRDNAKNTAYLQMDSLKPEDTAVYYCNADHTFTGDFWGQGTQVTVSSGTGGGGSGGGGSGGGGSEFEIVLTQSPATLSLSPGERATLSCRASQSVSSYLAWYQQKPGQAPRLLIYDASNRATGIPARFSGSGSGTDFTLTISSLEPEDFAVYYCQQRSNWPPTFGQGTKVEIKLEIQNPDPAVYQLRDSKSSDKSVCLFTDFDSQTNVSQSKDSDVYITDKCVLDMRSMDFKSNSAVAWSNKSDFACANAFNNSIIPEDTFFPSPESSCGFTSESYQQGVLSATILYEILLGKATLYAVLVSALVLMAMVKRKDSRGRAKRSGSGATNFSLLKQAGDVEENPGPTSMDWIWRILFLVGAATGAHSFEQLQLQESGPGLVKPSETLSLTCTVSGGSISSSSYWWGWTRQPPGRGLEWIGTMYYSGNIYYNPSLQSRATISVDTSKNQFSLKLSSVTAADTAVYYCARHVGYSYGRRFWYFDLWGRGTLVTVSSTRDLKNVFPPEVAVFEPSEAEISHTQKATLVCLATGFYPDHVELSWWVNGKEVHSGVCTDPQPLKEQPALNDSRYCLSSRLRVSATFWQNPRNHFRCQVQFYGLSENDEWTQDRAKPVTQIVSAEAWGRADCDVKLVEKSFETDTNLNFQNLSVIGFRILLLKVAGFNLLMTLRLWSS

SEQ ID NO: 45840 - protein, 764 aa, synthetic construct
MALPVTALLLPLALLLHAARPEIVLTQSPATLSLSPGERATLSCRASQSVSSYLAWYQQKPGQAPRLLIYDASNRATGIPARFSGSGSGTDFTLTISSLEPEDFAVYYCQQRSNWPPTFGQGTKVEIKLEDLKNVFPPEVAVFEPSEAEISHTQKATLVCLATGFYPDHVELSWWVNGKEVHSGVCTDPQPLKEQPALNDSRYCLSSRLRVSATFWQNPRNHFRCQVQFYGLSENDEWTQDRAKPVTQIVSAEAWGRADCDVKLVEKSFETDTNLNFQNLSVIGFRILLLKVAGFNLLMTLRLWSSRAKRSGSGATNFSLLKQAGDVEENPGPTSATMDWIWRILFLVGAATGAHSGPEVQLVESGGGLVQAGGSLRLSCAASGRTFSMGWFRQAPGKEREFVAAITYSGGSPYYADSVKGRFTISRDNAKNTVYLQMNSLKPEDTAVYYCAANPTYGSDWNAENWGQGTQVTVSSGSGGGGSGGGGSGGGGSFEQLQLQESGPGLVKPSETLSLTCTVSGGSISSSSYWWGWTRQPPGRGLEWIGTMYYSGNIYYNPSLQSRATISVDTSKNQFSLKLSSVTAADTAVYYCARHVGYSYGRRFWYFDLWGRGTLVTVSSTRIQNPDPAVYQLRDSKSSDKSVCLFTDFDSQTNVSQSKDSDVYITDKCVLDMRSMDFKSNSAVAWSNKSDFACANAFNNSIIPEDTFFPSPESSCGFTSESYQQGVLSATILYEILLGKATLYAVLVSALVLMAMVKRKDSRG

SEQ ID NO: 45841 - protein, 765 aa, synthetic construct
MALPVTALLLPLALLLHAARPEIVLTQSPATLSLSPGERATLSCRASQSVSSYLAWYQQKPGQAPRLLIYDASNRATGIPARFSGSGSGTDFTLTISSLEPEDFAVYYCQQRSNWPPTFGQGTKVEIKLEDLKNVFPPEVAVFEPSEAEISHTQKATLVCLATGFYPDHVELSWWVNGKEVHSGVCTDPQPLKEQPALNDSRYCLSSRLRVSATFWQNPRNHFRCQVQFYGLSENDEWTQDRAKPVTQIVSAEAWGRADCDVKLVEKSFETDTNLNFQNLSVIGFRILLLKVAGFNLLMTLRLWSSRAKRSGSGATNFSLLKQAGDVEENPGPTSATMDWIWRILFLVGAATGAHSGPEVQLVESGGGLVQPGGSLRLSCAASGSIFGFNDMAWYRQAPGKQRELVALISRVGVTSSADSVKGRFTISRVNAKDTVYLQMNSLKPEDTAVYYCYMDQRLDGSTLAYWGQGTQVTVSSGSGGGGSGGGGSGGGGSFEQLQLQESGPGLVKPSETLSLTCTVSGGSISSSSYWWGWTRQPPGRGLEWIGTMYYSGNIYYNPSLQSRATISVDTSKNQFSLKLSSVTAADTAVYYCARHVGYSYGRRFWYFDLWGRGTLVTVSSTRIQNPDPAVYQLRDSKSSDKSVCLFTDFDSQTNVSQSKDSDVYITDKCVLDMRSMDFKSNSAVAWSNKSDFACANAFNNSIIPEDTFFPSPESSCGFTSESYQQGVLSATILYEILLGKATLYAVLVSALVLMAMVKRKDSRG

SEQ ID NO: 45842 - protein, 761 aa, synthetic construct
MALPVTALLLPLALLLHAARPEIVLTQSPATLSLSPGERATLSCRASQSVSSYLAWYQQKPGQAPRLLIYDASNRATGIPARFSGSGSGTDFTLTISSLEPEDFAVYYCQQRSNWPPTFGQGTKVEIKLEDLKNVFPPEVAVFEPSEAEISHTQKATLVCLATGFYPDHVELSWWVNGKEVHSGVCTDPQPLKEQPALNDSRYCLSSRLRVSATFWQNPRNHFRCQVQFYGLSENDEWTQDRAKPVTQIVSAEAWGRADCDVKLVEKSFETDTNLNFQNLSVIGFRILLLKVAGFNLLMTLRLWSSRAKRSGSGATNFSLLKQAGDVEENPGPTSATMDWIWRILFLVGAATGAHSGPEVQLVESGGGLVQAGGSLRLSCAASGSVFSGNVMGWYRQAPGKEREWVAAIASGGSIYYRDSVKGRFTISRDNAKNTVYLQMNSLKPEDTAVYYCNSHPPTLPYWGLGTQVTVSSGSGGGGSGGGGSGGGGSFEQLQLQESGPGLVKPSETLSLTCTVSGGSISSSSYWWGWTRQPPGRGLEWIGTMYYSGNIYYNPSLQSRATISVDTSKNQFSLKLSSVTAADTAVYYCARHVGYSYGRRFWYFDLWGRGTLVTVSSTRIQNPDPAVYQLRDSKSSDKSVCLFTDFDSQTNVSQSKDSDVYITDKCVLDMRSMDFKSNSAVAWSNKSDFACANAFNNSIIPEDTFFPSPESSCGFTSESYQQGVLSATILYEILLGKATLYAVLVSALVLMAMVKRKDSRG

SEQ ID NO: 45843 - protein, 759 aa, synthetic construct
MALPVTALLLPLALLLHAARPEIVLTQSPATLSLSPGERATLSCRASQSVSSYLAWYQQKPGQAPRLLIYDASNRATGIPARFSGSGSGTDFTLTISSLEPEDFAVYYCQQRSNWPPTFGQGTKVEIKLEDLKNVFPPEVAVFEPSEAEISHTQKATLVCLATGFYPDHVELSWWVNGKEVHSGVCTDPQPLKEQPALNDSRYCLSSRLRVSATFWQNPRNHFRCQVQFYGLSENDEWTQDRAKPVTQIVSAEAWGRADCDVKLVEKSFETDTNLNFQNLSVIGFRILLLKVAGFNLLMTLRLWSSRAKRSGSGATNFSLLKQAGDVEENPGPTSATMDWIWRILFLVGAATGAHSGPEVQLLESGGGLVQPGGSLRLSCAASGFSFSSYALSWVRQAPGKGLEWVSSIGENDGTTDYADAVKGRFTISRDNSKNTLYLQMNSLRVEDTAVYYCVKDGIHWGQGTLVTVSSGSGGGGSGGGGSGGGGSFEQLQLQESGPGLVKPSETLSLTCTVSGGSISSSSYWWGWTRQPPGRGLEWIGTMYYSGNIYYNPSLQSRATISVDTSKNQFSLKLSSVTAADTAVYYCARHVGYSYGRRFWYFDLWGRGTLVTVSSTRIQNPDPAVYQLRDSKSSDKSVCLFTDFDSQTNVSQSKDSDVYITDKCVLDMRSMDFKSNSAVAWSNKSDFACANAFNNSIIPEDTFFPSPESSCGFTSESYQQGVLSATILYEILLGKATLYAVLVSALVLMAMVKRKDSRG

SEQ ID NO: 45844 - protein, 1128 aa, synthetic construct
MGPRLLFWALLCLLGTGPVEAGVTQSPTHLIKTRGQQATLRCSPISGHTSVYWYQQALGLGLQFLLWYDEGEERNRGNFPPRFSGRQFPNYSSELNVNALELEDSALYLCASSLGGPRGLAGLRGDEQFFGPGTRLTVLEGTGGGGSGGGEFEIVLTQSPATLSLSPGERATLSCRASQSVSSYLAWYQQKPGQAPRLLIYDASNRATGIPARFSGSGSGTDFTLTISSLEPEDFAVYYCQQRSNWPPTFGQGTKVEIKLEDLKNVFPPEVAVFEPSEAEISHTQKATLVCLATGFYPDHVELSWWVNGKEVHSGVCTDPQPLKEQPALNDSRYCLSSRLRVSATFWQNPRNHFRCQVQFYGLSENDEWTQDRAKPVTQIVSAEAWGRADCDVKLVEKSFETDTNLNFQNLSVIGFRILLLKVAGFNLLMTLRLWSSRAKRSGSGATNFSLLKQAGDVEENPGPTSATMDWIWRILFLVGAATGAHSGPEVQLVESGGGLVQAGGSLRLSCAASGRTFSMGWFRQAPGKEREFVAAITYSGGSPYYADSVKGRFTISRDNAKNTVYLQMNSLKPEDTAVYYCAANPTYGSDWNAENWGQGTQVTVSSGSGGGGSGGGGSGGGGSFEQLQLQESGPGLVKPSETLSLTCTVSGGSISSSSYWWGWTRQPPGRGLEWIGTMYYSGNIYYNPSLQSRATISVDTSKNQFSLKLSSVTAADTAVYYCARHVGYSYGRRFWYFDLWGRGTLVTVSSTRIQNPDPAVYQLRDSKSSDKSVCLFTDFDSQTNVSQSKDSDVYITDKCVLDMRSMDFKSNSAVAWSNKSDFACANAFNNSIIPEDTFFPSPESSCGFTSESYQQGVLSATILYEILLGKATLYAVLVSALVLMAMVKRKDSRGRAKRSGSGVKQTLNFDLLKLAGDVESNPGPSRGHMTEYKPTVRLATRDDVPRAVRTLAAAFADYPATRHTVDPDRHIERVTELQELFLTRVGLDIGKVWVADDGAAVAVWTTPESVEAGAVFAEIGPRMAELSGSRLAAQQQMEGLLAPHRPKEPAWFLATVGVSPDHQGKGLGSAVVLPGVEAAERAGVPAFLETSAPRNLPFYERLGFTVTADVEVPEGPRTWCMTRKPGA

SEQ ID NO: 45845 - protein, 1127 aa, synthetic construct
MGPRLLFWALLCLLGTGPVEAGVTQSPTHLIKTRGQQATLRCSPISGHTSVYWYQQALGLGLQFLLWYDEGEERNRGNFPPRFSGRQFPNYSSELNVNALELEDSALYLCASSLGGDELGADGNEQFFGPGTRLTVLEGTGGGGSGGGSEFEIVLTQSPATLSLSPGERATLSCRASQSVSSYLAWYQQKPGQAPRLLIYDASNRATGIPARFSGSGSGTDFTLTISSLEPEDFAVYYCQQRSNWPPTFGQGTKVEIKLEDLKNVFPPEVAVFEPSEAEISHTQKATLVCLATGFYPDHVELSWWVNGKEVHSGVCTDPQPLKEQPALNDSRYCLSSRLRVSATFWQNPRNHFRCQVQFYGLSENDEWTQDRAKPVTQIVSAEAWGRADCDVKLVEKSFETDTNLNFQNLSVIGFRILLLKVAGFNLLMTLRLWSSRAKRSGSGATNFSLLKQAGDVEENPGPTSATMDWIWRILFLVGAATGAHSGPEVQLVESGGGLVQAGGSLRLSCAASGRTFSMGWFRQAPGKEREFVAAITYSGGSPYYADSVKGRFTISRDNAKNTVYLQMNSLKPEDTAVYYCAANPTYGSDWNAENWGQGTQVTVSSGSGGGGSGGGGSGGGGSFEQLQLQESGPGLVKPSETLSLTCTVSGGSISSSSYWWGWTRQPPGRGLEWIGTMYYSGNIYYNPSLQSRATISVDTSKNQFSLKLSSVTAADTAVYYCARHVGYSYGRRFWYFDLWGRGTLVTVSSTRIQNPDPAVYQLRDSKSSDKSVCLFTDFDSQTNVSQSKDSDVYITDKCVLDMRSMDFKSNSAVAWSNKSDFACANAFNNSIIPEDTFFPSPESSCGFTSESYQQGVLSATILYEILLGKATLYAVLVSALVLMAMVKRKDSRGRAKRSGSGVKQTLNFDLLKLAGDVESNPGPSRGHMTEYKPTVRLATRDDVPRAVRTLAAAFADYPATRHTVDPDRHIERVTELQELFLTRVGLDIGKVWVADDGAAVAVWTTPESVEAGAVFAEIGPRMAELSGSRLAAQQQMEGLLAPHRPKEPAWFLATVGVSPDHQGKGLGSAVVLPGVEAAERAGVPAFLETSAPRNLPFYERLGFTVTADVEVPEGPRTWCMTRKPGA

SEQ ID NO: 45846 - protein, 952 aa, synthetic construct
MALPVTALLLPLALLLHAARPEIVLTQSPATLSLSPGERATLSCRASQSVSSYLAWYQQKPGQAPRLLIYDASNRATGIPARFSGSGSGTDFTLTISSLEPEDFAVYYCQQRSNWPPTFGQGTKVEIKLEDLKNVFPPEVAVFEPSEAEISHTQKATLVCLATGFYPDHVELSWWVNGKEVHSGVCTDPQPLKEQPALNDSRYCLSSRLRVSATFWQNPRNHFRCQVQFYGLSENDEWTQDRAKPVTQIVSAEAWGRADCDVKLVEKSFETDTNLNFQNLSVIGFRILLLKVAGFNLLMTLRLWSSRAKRSGSGATNFSLLKQAGDVEENPGPTSATMDWIWRILFLVGAATGAHSGPMGSWLEFYHRLNAIDSRLWALGGSEAELAAFEKEIAAFESELQAYKGKGNPEVESLRDHAAHIREWLQAYRHNGSGGGGSGGGGSGGGGSFEQLQLQESGPGLVKPSETLSLTCTVSGGSISSSSYWWGWTRQPPGRGLEWIGTMYYSGNIYYNPSLQSRATISVDTSKNQFSLKLSSVTAADTAVYYCARHVGYSYGRRFWYFDLWGRGTLVTVSSTRIQNPDPAVYQLRDSKSSDKSVCLFTDFDSQTNVSQSKDSDVYITDKCVLDMRSMDFKSNSAVAWSNKSDFACANAFNNSIIPEDTFFPSPESSCGFTSESYQQGVLSATILYEILLGKATLYAVLVSALVLMAMVKRKDSRGRAKRSGSGVKQTLNFDLLKLAGDVESNPGPSRGHMTEYKPTVRLATRDDVPRAVRTLAAAFADYPATRHTVDPDRHIERVTELQELFLTRVGLDIGKVWVADDGAAVAVWTTPESVEAGAVFAEIGPRMAELSGSRLAAQQQMEGLLAPHRPKEPAWFLATVGVSPDHQGKGLGSAVVLPGVEAAERAGVPAFLETSAPRNLPFYERLGFTVTADVEVPEGPRTWCMTRKPGA

SEQ ID NO: 45847 - protein, 952 aa, synthetic construct
MALPVTALLLPLALLLHAARPACMGSWFEFYDRLNAIDARLWALGGSEAELAAFEKEIAAFESELQAYKGKGNPEVENLRVHAAAIREWLQAYRHNGTGGGGSGGGGSGGGGSEFEIVLTQSPATLSLSPGERATLSCRASQSVSSYLAWYQQKPGQAPRLLIYDASNRATGIPARFSGSGSGTDFTLTISSLEPEDFAVYYCQQRSNWPPTFGQGTKVEIKLEDLKNVFPPEVAVFEPSEAEISHTQKATLVCLATGFYPDHVELSWWVNGKEVHSGVCTDPQPLKEQPALNDSRYCLSSRLRVSATFWQNPRNHFRCQVQFYGLSENDEWTQDRAKPVTQIVSAEAWGRADCDVKLVEKSFETDTNLNFQNLSVIGFRILLLKVAGFNLLMTLRLWSSRAKRSGSGATNFSLLKQAGDVEENPGPTSMDWIWRILFLVGAATGAHSFEQLQLQESGPGLVKPSETLSLTCTVSGGSISSSSYWWGWTRQPPGRGLEWIGTMYYSGNIYYNPSLQSRATISVDTSKNQFSLKLSSVTAADTAVYYCARHVGYSYGRRFWYFDLWGRGTLVTVSSTRIQNPDPAVYQLRDSKSSDKSVCLFTDFDSQTNVSQSKDSDVYITDKCVLDMRSMDFKSNSAVAWSNKSDFACANAFNNSIIPEDTFFPSPESSCGFTSESYQQGVLSATILYEILLGKATLYAVLVSALVLMAMVKRKDSRGRAKRSGSGVKQTLNFDLLKLAGDVESNPGPSRGHMTEYKPTVRLATRDDVPRAVRTLAAAFADYPATRHTVDPDRHIERVTELQELFLTRVGLDIGKVWVADDGAAVAVWTTPESVEAGAVFAEIGPRMAELSGSRLAAQQQMEGLLAPHRPKEPAWFLATVGVSPDHQGKGLGSAVVLPGVEAAERAGVPAFLETSAPRNLPFYERLGFTVTADVEVPEGPRTWCMTRKPGA

SEQ ID NO: 45848 - protein, 1069 aa, synthetic construct
MALPVTALLLPLALLLHAARPACMDPDLEIRAAFLRQRNTALRTEVAELEQEVQRLENEVSQYETRYGPLGGGKGTGGGGSGGGGSGGGGSEFEIVLTQSPATLSLSPGERATLSCRASQSVSSYLAWYQQKPGQAPRLLIYDASNRATGIPARFSGSGSGTDFTLTISSLEPEDFAVYYCQQRSNWPPTFGQGTKVEIKLEDLKNVFPPEVAVFEPSEAEISHTQKATLVCLATGFYPDHVELSWWVNGKEVHSGVCTDPQPLKEQPALNDSRYCLSSRLRVSATFWQNPRNHFRCQVQFYGLSENDEWTQDRAKPVTQIVSAEAWGRADCDVKLVEKSFETDTNLNFQNLSVIGFRILLLKVAGFNLLMTLRLWSSRAKRSGSGATNFSLLKQAGDVEENPGPTSATMDWIWRILFLVGAATGAHSGPEVQLVESGGGLVQAGGSLRLSCAASGRTFSMGWFRQAPGKEREFVAAITYSGGSPYYADSVKGRFTISRDNAKNTVYLQMNSLKPEDTAVYYCAANPTYGSDWNAENWGQGTQVTVSSGSGGGGSGGGGSGGGGSFEQLQLQESGPGLVKPSETLSLTCTVSGGSISSSSYWWGWTRQPPGRGLEWIGTMYYSGNIYYNPSLQSRATISVDTSKNQFSLKLSSVTAADTAVYYCARHVGYSYGRRFWYFDLWGRGTLVTVSSTRIQNPDPAVYQLRDSKSSDKSVCLFTDFDSQTNVSQSKDSDVYITDKCVLDMRSMDFKSNSAVAWSNKSDFACANAFNNSIIPEDTFFPSPESSCGFTSESYQQGVLSATILYEILLGKATLYAVLVSALVLMAMVKRKDSRGRAKRSGSGVKQTLNFDLLKLAGDVESNPGPSRGHMTEYKPTVRLATRDDVPRAVRTLAAAFADYPATRHTVDPDRHIERVTELQELFLTRVGLDIGKVWVADDGAAVAVWTTPESVEAGAVFAEIGPRMAELSGSRLAAQQQMEGLLAPHRPKEPAWFLATVGVSPDHQGKGLGSAVVLPGVEAAERAGVPAFLETSAPRNLPFYERLGFTVTADVEVPEGPRTWCMTRKPGA

SEQ ID NO: 45849 - protein, 952 aa, synthetic construct
MALPVTALLLPLALLLHAARPEIVLTQSPATLSLSPGERATLSCRASQSVSSYLAWYQQKPGQAPRLLIYDASNRATGIPARFSGSGSGTDFTLTISSLEPEDFAVYYCQQRSNWPPTFGQGTKVEIKLEDLKNVFPPEVAVFEPSEAEISHTQKATLVCLATGFYPDHVELSWWVNGKEVHSGVCTDPQPLKEQPALNDSRYCLSSRLRVSATFWQNPRNHFRCQVQFYGLSENDEWTQDRAKPVTQIVSAEAWGRADCDVKLVEKSFETDTNLNFQNLSVIGFRILLLKVAGFNLLMTLRLWSSRAKRSGSGATNFSLLKQAGDVEENPGPTSATMDWIWRILFLVGAATGAHSGPMGSWSEFYDRLHAIHHRLYALGGSEAELAAFEKEIAAFESELQAYKGKGNPEVEALRDTAAFIRTRLQAYRHNGSGGGGSGGGGSGGGGSFEQLQLQESGPGLVKPSETLSLTCTVSGGSISSSSYWWGWTRQPPGRGLEWIGTMYYSGNIYYNPSLQSRATISVDTSKNQFSLKLSSVTAADTAVYYCARHVGYSYGRRFWYFDLWGRGTLVTVSSTRIQNPDPAVYQLRDSKSSDKSVCLFTDFDSQTNVSQSKDSDVYITDKCVLDMRSMDFKSNSAVAWSNKSDFACANAFNNSIIPEDTFFPSPESSCGFTSESYQQGVLSATILYEILLGKATLYAVLVSALVLMAMVKRKDSRGRAKRSGSGVKQTLNFDLLKLAGDVESNPGPSRGHMTEYKPTVRLATRDDVPRAVRTLAAAFADYPATRHTVDPDRHIERVTELQELFLTRVGLDIGKVWVADDGAAVAVWTTPESVEAGAVFAEIGPRMAELSGSRLAAQQQMEGLLAPHRPKEPAWFLATVGVSPDHQGKGLGSAVVLPGVEAAERAGVPAFLETSAPRNLPFYERLGFTVTADVEVPEGPRTWCMTRKPGA

SEQ ID NO: 45850 - protein, 1162 aa, synthetic construct
MALPVTALLLPLALLLHAARPEIVLTQSPATLSLSPGERATLSCRASQSVSSYLAWYQQKPGQAPRLLIYDASNRATGIPARFSGSGSGTDFTLTISSLEPEDFAVYYCQQRSNWPPTFGQGTKVEIKLEDLKNVFPPEVAVFEPSEAEISHTQKATLVCLATGFYPDHVELSWWVNGKEVHSGVCTDPQPLKEQPALNDSRYCLSSRLRVSATFWQNPRNHFRCQVQFYGLSENDEWTQDRAKPVTQIVSAEAWGRADCDVKLVEKSFETDTNLNFQNLSVIGFRILLLKVAGFNLLMTLRLWSSRAKRSGSGATNFSLLKQAGDVEENPGPTSTMDWIWRILFLVGAATGAHSLFNQEVQIPLTESYCGPCPKNWICYKNNCYQFFDESKNWYESQASCMSQNASLLKVYSKEDQDLLKLVKSAHWMGLVHIPTNGSWQWEDGSILSPNLLTIIEMQKGDCALYASSFKGYIENCSTPNTYICMQRTVSGGGGSGGGGSGGGGDLFNQEVQIPLTESYCGPCPKNWICYKNNCYQFFDESKNWYESQASCMSQNASLLKVYSKEDQDLLKLVKSAHWMGLVHIPTNGSWQWEDGSILSPNLLTIIEMQKGDCALYASSFKGYIENCSTPNTYICMQRTVGSGGGGSGGGGSGGGGSFEQLQLQESGPGLVKPSETLSLTCTVSGGSISSSSYWWGWTRQPPGRGLEWIGTMYYSGNIYYNPSLQSRATISVDTSKNQFSLKLSSVTAADTAVYYCARHVGYSYGRRFWYFDLWGRGTLVTVSSTRIQNPDPAVYQLRDSKSSDKSVCLFTDFDSQTNVSQSKDSDVYITDKCVLDMRSMDFKSNSAVAWSNKSDFACANAFNNSIIPEDTFFPSPESSCGFTSESYQQGVLSATILYEILLGKATLYAVLVSALVLMAMVKRKDSRGRAKRSGSGVKQTLNFDLLKLAGDVESNPGPSRGHMTEYKPTVRLATRDDVPRAVRTLAAAFADYPATRHTVDPDRHIERVTELQELFLTRVGLDIGKVWVADDGAAVAVWTTPESVEAGAVFAEIGPRMAELSGSRLAAQQQMEGLLAPHRPKEPAWFLATVGVSPDHQGKGLGSAVVLPGVEAAERAGVPAFLETSAPRNLPFYERLGFTVTADVEVPEGPRTWCMTRKPGA

SEQ ID NO: 45851 - protein, 625 aa, synthetic construct; identical to SEQ ID NO: 45808

SEQ ID NO: 45852 - protein, 629 aa, synthetic construct
MALPVTALLLPLALLLHAARPEIVLTQSPATLSLSPGERATLSCRASQSVSSYLAWYQQKPGQAPRLLIYDASNRATGIPARFSGSGSGTDFTLTISSLEPEDFAVYYCQQRSNWPPTFGQGTKVEIKLEIQNPDPAVYQLRDSKSSDKSVCLFTDFDSQTNVSQSKDSDVYITDKCVLDMRSMDFKSNSAVAWSNKSDFACANAFNNSIIPEDTFFPSPESSCDVKLVEKSFETDTNLNFQILYEILLGKATLYAVLVSALVLMAMVKRKDSRGRAKRSGSGVKQTLNFDLLKLAGDVESNPGPTSMDWIWRILFLVGAATGAHSFEQLQLQESGPGLVKPSETLSLTCTVSGGSISSSSYWWGWTRQPPGRGLEWIGTMYYSGNIYYNPSLQSRATISVDTSKNQFSLKLSSVTAADTAVYYCARHVGYSYGRRFWYFDLWGRGTLVTVSSTREDLKNVFPPEVAVFEPSEAEISHTQKATLVCLATGFYPDHVELSWWVNGKEVHSGVCTDPQPLKEQPALNDSRYCLSSRLRVSATFWQNPRNHFRCQVQFYGLSENDEWTQDRAKPVTQIVSAEAWGRADCGFTSESYQQGVLSATNLSVIGFRILLLKVAGFNLLMTLRLWSS

SEQ ID NO: 45853 - protein, 760 aa, synthetic construct
MALPVTALLLPLALLLHAARPEVQLVESGGGLVQPGGSLRLSCAASGFSFSDFWMSWVRQAPGKGLEWVATISQAGSEKDYVDSVKGRFTISRDNAKKSLYLQMNSLRAEDTAVYYCASGVYSFDYRGQGTLVTVSSGTGGGGSGGGGSGGGGSEFEIVLTQSPATLSLSPGERATLSCRASQSVSSYLAWYQQKPGQAPRLLIYDASNRATGIPARFSGSGSGTDFTLTISSLEPEDFAVYYCQQRSNWPPTFGQGTKVEIKLEDLKNVFPPEVAVFEPSEAEISHTQKATLVCLATGFYPDHVELSWWVNGKEVHSGVCTDPQPLKEQPALNDSRYCLSSRLRVSATFWQNPRNHFRCQVQFYGLSENDEWTQDRAKPVTQIVSAEAWGRADCGFTSESYQQGVLSATNLSVIGFRILLLKVAGFNLLMTLRLWSSRAKRSGSGATNFSLLKQAGDVEENPGPTSMDWIWRILFLVGAATGAHSFEQLQLQESGPGLVKPSETLSLTCTVSGGSISSSSYWWGWTRQPPGRGLEWIGTMYYSGNIYYNPSLQSRATISVDTSKNQFSLKLSSVTAADTAVYYCARHVGYSYGRRFWYFDLWGRGTLVTVSSTRIQNPDPAVYQLRDSKSSDKSVCLFTDFDSQTNVSQSKDSDVYITDKCVLDMRSMDFKSNSAVAWSNKSDFACANAFNNSIIPEDTFFPSPESSCDVKLVEKSFETDTNLNFQILYEILLGKATLYAVLVSALVLMAMVKRKDSRG

SEQ ID NO: 45854 - protein, 764 aa, synthetic construct
MALPVTALLLPLALLLHAARPEVQLVESGGGLVQPGGSLRLSCAASGFSFSDFWMSWVRQAPGKGLEWVATISQAGSEKDYVDSVKGRFTISRDNAKKSLYLQMNSLRAEDTAVYYCASGVYSFDYRGQGTLVTVSSGTGGGGSGGGGSGGGGSEFEIVLTQSPATLSLSPGERATLSCRASQSVSSYLAWYQQKPGQAPRLLIYDASNRATGIPARFSGSGSGTDFTLTISSLEPEDFAVYYCQQRSNWPPTFGQGTKVEIKLEIQNPDPAVYQLRDSKSSDKSVCLFTDFDSQTNVSQSKDSDVYITDKCVLDMRSMDFKSNSAVAWSNKSDFACANAFNNSIIPEDTFFPSPESSCDVKLVEKSFETDTNLNFQILYEILLGKATLYAVLVSALVLMAMVKRKDSRGRAKRSGSGVKQTLNFDLLKLAGDVESNPGPTSMDWIWRILFLVGAATGAHSFEQLQLQESGPGLVKPSETLSLTCTVSGGSISSSSYWWGWTRQPPGRGLEWIGTMYYSGNIYYNPSLQSRATISVDTSKNQFSLKLSSVTAADTAVYYCARHVGYSYGRRFWYFDLWGRGTLVTVSSTREDLKNVFPPEVAVFEPSEAEISHTQKATLVCLATGFYPDHVELSWWVNGKEVHSGVCTDPQPLKEQPALNDSRYCLSSRLRVSATFWQNPRNHFRCQVQFYGLSENDEWTQDRAKPVTQIVSAEAWGRADCGFTSESYQQGVLSATNLSVIGFRILLLKVAGFNLLMTLRLWSS

SEQ ID NO: 45855 - protein, 897 aa, synthetic construct
MALPVTALLLPLALLLHAARPEVQLVESGGGLVQPGGSLRLSCAASGFSFSDFWMSWVRQAPGKGLEWVATISQAGSEKDYVDSVKGRFTISRDNAKKSLYLQMNSLRAEDTAVYYCASGVYSFDYRGQGTLVTVSSGTGGGGSGGGGSGGGGSEFEIVLTQSPATLSLSPGERATLSCRASQSVSSYLAWYQQKPGQAPRLLIYDASNRATGIPARFSGSGSGTDFTLTISSLEPEDFAVYYCQQRSNWPPTFGQGTKVEIKLEDLKNVFPPEVAVFEPSEAEISHTQKATLVCLATGFYPDHVELSWWVNGKEVHSGVCTDPQPLKEQPALNDSRYCLSSRLRVSATFWQNPRNHFRCQVQFYGLSENDEWTQDRAKPVTQIVSAEAWGRADCGFTSESYQQGVLSATNLSVIGFRILLLKVAGFNLLMTLRLWSSRAKRSGSGATNFSLLKQAGDVEENPGPTSMDWIWRILFLVGAATGAHSGPQLQLQESGPGLVKPSETLSLTCTVSGDSISSGDYYWGWIRQPPGKGLEWIGHIYYSGVTYYNPSLKSRVTISVDTSRNQFSLKLSSVTAADTAVYYCTREDSSNWRSRGQGTLVTVSSGSGGGGSGGGGSGGGGSFEQLQLQESGPGLVKPSETLSLTCTVSGGSISSSSYWWGWTRQPPGRGLEWIGTMYYSGNIYYNPSLQSRATISVDTSKNQFSLKLSSVTAADTAVYYCARHVGYSYGRRFWYFDLWGRGTLVTVSSTRIQNPDPAVYQLRDSKSSDKSVCLFTDFDSQTNVSQSKDSDVYITDKCVLDMRSMDFKSNSAVAWSNKSDFACANAFNNSIIPEDTFFPSPESSCDVKLVEKSFETDTNLNFQILYEILLGKATLYAVLVSALVLMAMVKRKDSRG

SEQ ID NO: 45856 - protein, 901 aa, synthetic construct
MALPVTALLLPLALLLHAARPEVQLVESGGGLVQPGGSLRLSCAASGFSFSDFWMSWVRQAPGKGLEWVATISQAGSEKDYVDSVKGRFTISRDNAKKSLYLQMNSLRAEDTAVYYCASGVYSFDYRGQGTLVTVSSGTGGGGSGGGGSGGGGSEFEIVLTQSPATLSLSPGERATLSCRASQSVSSYLAWYQQKPGQAPRLLIYDASNRATGIPARFSGSGSGTDFTLTISSLEPEDFAVYYCQQRSNWPPTFGQGTKVEIKLEIQNPDPAVYQLRDSKSSDKSVCLFTDFDSQTNVSQSKDSDVYITDKCVLDMRSMDFKSNSAVAWSNKSDFACANAFNNSIIPEDTFFPSPESSCDVKLVEKSFETDTNLNFQILYEILLGKATLYAVLVSALVLMAMVKRKDSRGRAKRSGSGVKQTLNFDLLKLAGDVESNPGPTSMDWIWRILFLVGAATGAHSGPQLQLQESGPGLVKPSETLSLTCTVSGDSISSGDYYWGWIRQPPGKGLEWIGHIYYSGVTYYNPSLKSRVTISVDTSRNQFSLKLSSVTAADTAVYYCTREDSSNWRSRGQGTLVTVSSGSGGGGSGGGGSGGGGSFEQLQLQESGPGLVKPSETLSLTCTVSGGSISSSSYWWGWTRQPPGRGLEWIGTMYYSGNIYYNPSLQSRATISVDTSKNQFSLKLSSVTAADTAVYYCARHVGYSYGRRFWYFDLWGRGTLVTVSSTREDLKNVFPPEVAVFEPSEAEISHTQKATLVCLATGFYPDHVELSWWVNGKEVHSGVCTDPQPLKEQPALNDSRYCLSSRLRVSATFWQNPRNHFRCQVQFYGLSENDEWTQDRAKPVTQIVSAEAWGRADCGFTSESYQQGVLSATNLSVIGFRILLLKVAGFNLLMTLRLWSS

SEQ ID NO: 45857 - protein, 729 aa, synthetic construct
MALPVTALLLPLALLLHAARPEIVLTQSPATLSLSPGERATLSCRASQSVSSYLAWYQQKPGQAPRLLIYDASNRATGIPARFSGSGSGTDFTLTISSLEPEDFAVYYCQQRSNWPPTFGQGTKVEIKLEDLKNVFPPEVAVFEPSEAEISHTQKATLVCLATGFYPDHVELSWWVNGKEVHSGVCTDPQPLKEQPALNDSRYCLSSRLRVSATFWQNPRNHFRCQVQFYGLSENDEWTQDRAKPVTQIVSAEAWGRADDVIKIHWQEKKSNTILGSQEGNTMKTNDTYMKFSWLTVPEKSLDKEHRCIVRHENNKNGVDQEIIFPPIKTDVITMDPKDNCSKDANDTLLLQLTNTSAYYMYLLLLLKSVVYFAIITCCLLMAMVKRKDSRGRAKRSGSGATNFSLLKQAGDVEENPGPTSMDWIWRILFLVGAATGAHSFEQLQLQESGPGLVKPSETLSLTCTVSGGSISSSSYWWGWTRQPPGRGLEWIGTMYYSGNIYYNPSLQSRATISVDTSKNQFSLKLSSVTAADTAVYYCARHVGYSYGRRFWYFDLWGRGTLVTVSSTRIQNPDPAVYQLRDSKSSDKSVCLFTDFDSQTNVSQSKDSDVYITDKCVLDMRSMDFKSNSAVAWSNKSDFACANAFNNSIIPEDTFFPSPESSDSTDHVKPKETENTKQPSKSCHKPKAIVHTEKVNMMSLTVLGLRMLFAKTVAVNFLLTAKLFFLLTA

SEQ ID NO: 45858 - protein, 733 aa, synthetic construct
MALPVTALLLPLALLLHAARPEIVLTQSPATLSLSPGERATLSCRASQSVSSYLAWYQQKPGQAPRLLIYDASNRATGIPARFSGSGSGTDFTLTISSLEPEDFAVYYCQQRSNWPPTFGQGTKVEIKLEIQNPDPAVYQLRDSKSSDKSVCLFTDFDSQTNVSQSKDSDVYITDKCVLDMRSMDFKSNSAVAWSNKSDFACANAFNNSIIPEDTFFPSPESSDSTDHVKPKETENTKQPSKSCHKPKAIVHTEKVNMMSLTVLGLRMLFAKTVAVNFLLTAKLFFLLTARAKRSGSGVKQTLNFDLLKLAGDVESNPGPTSMDWIWRILFLVGAATGAHSFEQLQLQESGPGLVKPSETLSLTCTVSGGSISSSSYWWGWTRQPPGRGLEWIGTMYYSGNIYYNPSLQSRATISVDTSKNQFSLKLSSVTAADTAVYYCARHVGYSYGRRFWYFDLWGRGTLVTVSSTREDLKNVFPPEVAVFEPSEAEISHTQKATLVCLATGFYPDHVELSWWVNGKEVHSGVCTDPQPLKEQPALNDSRYCLSSRLRVSATFWQNPRNHFRCQVQFYGLSENDEWTQDRAKPVTQIVSAEAWGRADDVIKIHWQEKKSNTILGSQEGNTMKTNDTYMKFSWLTVPEKSLDKEHRCIVRHENNKNGVDQEIIFPPIKTDVITMDPKDNCSKDANDTLLLQLTNTSAYYMYLLLLLKSVVYFAIITCCLLMAMVKRKDSRG

SEQ ID NO: 45859 - protein, 864 aa, synthetic construct
MALPVTALLLPLALLLHAARPEVQLVESGGGLVQPGGSLRLSCAASGFSFSDFWMSWVRQAPGKGLEWVATISQAGSEKDYVDSVKGRFTISRDNAKKSLYLQMNSLRAEDTAVYYCASGVYSFDYRGQGTLVTVSSGTGGGGSGGGGSGGGGSEFEIVLTQSPATLSLSPGERATLSCRASQSVSSYLAWYQQKPGQAPRLLIYDASNRATGIPARFSGSGSGTDFTLTISSLEPEDFAVYYCQQRSNWPPTFGQGTKVEIKLEDLKNVFPPEVAVFEPSEAEISHTQKATLVCLATGFYPDHVELSWWVNGKEVHSGVCTDPQPLKEQPALNDSRYCLSSRLRVSATFWQNPRNHFRCQVQFYGLSENDEWTQDRAKPVTQIVSAEAWGRADDVIKIHWQEKKSNTILGSQEGNTMKTNDTYMKFSWLTVPEKSLDKEHRCIVRHENNKNGVDQEIIFPPIKTDVITMDPKDNCSKDANDTLLLQLTNTSAYYMYLLLLLKSVVYFAIITCCLLMAMVKRKDSRGRAKRSGSGATNFSLLKQAGDVEENPGPTSMDWIWRILFLVGAATGAHSFEQLQLQESGPGLVKPSETLSLTCTVSGGSISSSSYWWGWTRQPPGRGLEWIGTMYYSGNIYYNPSLQSRATISVDTSKNQFSLKLSSVTAADTAVYYCARHVGYSYGRRFWYFDLWGRGTLVTVSSTRIQNPDPAVYQLRDSKSSDKSVCLFTDFDSQTNVSQSKDSDVYITDKCVLDMRSMDFKSNSAVAWSNKSDFACANAFNNSIIPEDTFFPSPESSDSTDHVKPKETENTKQPSKSCHKPKAIVHTEKVNMMSLTVLGLRMLFAKTVAVNFLLTAKLFFLLTA

SEQ ID NO: 45860 - protein, 868 aa, synthetic construct
MALPVTALLLPLALLLHAARPEVQLVESGGGLVQPGGSLRLSCAASGFSFSDFWMSWVRQAPGKGLEWVATISQAGSEKDYVDSVKGRFTISRDNAKKSLYLQMNSLRAEDTAVYYCASGVYSFDYRGQGTLVTVSSGTGGGGSGGGGSGGGGSEFEIVLTQSPATLSLSPGERATLSCRASQSVSSYLAWYQQKPGQAPRLLIYDASNRATGIPARFSGSGSGTDFTLTISSLEPEDFAVYYCQQRSNWPPTFGQGTKVEIKLEIQNPDPAVYQLRDSKSSDKSVCLFTDFDSQTNVSQSKDSDVYITDKCVLDMRSMDFKSNSAVAWSNKSDFACANAFNNSIIPEDTFFPSPESSDSTDHVKPKETENTKQPSKSCHKPKAIVHTEKVNMMSLTVLGLRMLFAKTVAVNFLLTAKLFFLLTARAKRSGSGVKQTLNFDLLKLAGDVESNPGPTSMDWIWRILFLVGAATGAHSFEQLQLQESGPGLVKPSETLSLTCTVSGGSISSSSYWWGWTRQPPGRGLEWIGTMYYSGNIYYNPSLQSRATISVDTSKNQFSLKLSSVTAADTAVYYCARHVGYSYGRRFWYFDLWGRGTLVTVSSTREDLKNVFPPEVAVFEPSEAEISHTQKATLVCLATGFYPDHVELSWWVNGKEVHSGVCTDPQPLKEQPALNDSRYCLSSRLRVSATFWQNPRNHFRCQVQFYGLSENDEWTQDRAKPVTQIVSAEAWGRADDVIKIHWQEKKSNTILGSQEGNTMKTNDTYMKFSWLTVPEKSLDKEHRCIVRHENNKNGVDQEIIFPPIKTDVITMDPKDNCSKDANDTLLLQLTNTSAYYMYLLLLLKSVVYFAIITCCLLMAMVKRKDSRG

SEQ ID NO: 45861 - protein, 1001 aa, synthetic construct
MALPVTALLLPLALLLHAARPEVQLVESGGGLVQPGGSLRLSCAASGFSFSDFWMSWVRQAPGKGLEWVATISQAGSEKDYVDSVKGRFTISRDNAKKSLYLQMNSLRAEDTAVYYCASGVYSFDYRGQGTLVTVSSGTGGGGSGGGGSGGGGSEFEIVLTQSPATLSLSPGERATLSCRASQSVSSYLAWYQQKPGQAPRLLIYDASNRATGIPARFSGSGSGTDFTLTISSLEPEDFAVYYCQQRSNWPPTFGQGTKVEIKLEDLKNVFPPEVAVFEPSEAEISHTQKATLVCLATGFYPDHVELSWWVNGKEVHSGVCTDPQPLKEQPALNDSRYCLSSRLRVSATFWQNPRNHFRCQVQFYGLSENDEWTQDRAKPVTQIVSAEAWGRADDVIKIHWQEKKSNTILGSQEGNTMKTNDTYMKFSWLTVPEKSLDKEHRCIVRHENNKNGVDQEIIFPPIKTDVITMDPKDNCSKDANDTLLLQLTNTSAYYMYLLLLLKSVVYFAIITCCLLMAMVKRKDSRGRAKRSGSGATNFSLLKQAGDVEENPGPTSMDWIWRILFLVGAATGAHSGPQLQLQESGPGLVKPSETLSLTCTVSGDSISSGDYYWGWIRQPPGKGLEWIGHIYYSGVTYYNPSLKSRVTISVDTSRNQFSLKLSSVTAADTAVYYCTREDSSNWRSRGQGTLVTVSSGSGGGGSGGGGSGGGGSFEQLQLQESGPGLVKPSETLSLTCTVSGGSISSSSYWWGWTRQPPGRGLEWIGTMYYSGNIYYNPSLQSRATISVDTSKNQFSLKLSSVTAADTAVYYCARHVGYSYGRRFWYFDLWGRGTLVTVSSTRIQNPDPAVYQLRDSKSSDKSVCLFTDFDSQTNVSQSKDSDVYITDKCVLDMRSMDFKSNSAVAWSNKSDFACANAFNNSIIPEDTFFPSPESSDSTDHVKPKETENTKQPSKSCHKPKAIVHTEKVNMMSLTVLGLRMLFAKTVAVNFLLTAKLFFLLTA

SEQ ID NO: 45862 - protein, 1005 aa, synthetic construct
MALPVTALLLPLALLLHAARPEVQLVESGGGLVQPGGSLRLSCAASGFSFSDFWMSWVRQAPGKGLEWVATISQAGSEKDYVDSVKGRFTISRDNAKKSLYLQMNSLRAEDTAVYYCASGVYSFDYRGQGTLVTVSSGTGGGGSGGGGSGGGGSEFEIVLTQSPATLSLSPGERATLSCRASQSVSSYLAWYQQKPGQAPRLLIYDASNRATGIPARFSGSGSGTDFTLTISSLEPEDFAVYYCQQRSNWPPTFGQGTKVEIKLEIQNPDPAVYQLRDSKSSDKSVCLFTDFDSQTNVSQSKDSDVYITDKCVLDMRSMDFKSNSAVAWSNKSDFACANAFNNSIIPEDTFFPSPESSDSTDHVKPKETENTKQPSKSCHKPKAIVHTEKVNMMSLTVLGLRMLFAKTVAVNFLLTAKLFFLLTARAKRSGSGVKQTLNFDLLKLAGDVESNPGPTSMDWIWRILFLVGAATGAHSGPQLQLQESGPGLVKPSETLSLTCTVSGDSISSGDYYWGWIRQPPGKGLEWIGHIYYSGVTYYNPSLKSRVTISVDTSRNQFSLKLSSVTAADTAVYYCTREDSSNWRSRGQGTLVTVSSGSGGGGSGGGGSGGGGSFEQLQLQESGPGLVKPSETLSLTCTVSGGSISSSSYWWGWTRQPPGRGLEWIGTMYYSGNIYYNPSLQSRATISVDTSKNQFSLKLSSVTAADTAVYYCARHVGYSYGRRFWYFDLWGRGTLVTVSSTREDLKNVFPPEVAVFEPSEAEISHTQKATLVCLATGFYPDHVELSWWVNGKEVHSGVCTDPQPLKEQPALNDSRYCLSSRLRVSATFWQNPRNHFRCQVQFYGLSENDEWTQDRAKPVTQIVSAEAWGRADDVIKIHWQEKKSNTILGSQEGNTMKTNDTYMKFSWLTVPEKSLDKEHRCIVRHENNKNGVDQEIIFPPIKTDVITMDPKDNCSKDANDTLLLQLTNTSAYYMYLLLLLKSVVYFAIITCCLLMAMVKRKDSRG

SEQ ID NO: 45863 - protein, 727 aa, synthetic construct
MALPVTALLLPLALLLHAARPEIVLTQSPATLSLSPGERATLSCRASQSVSSYLAWYQQKPGQAPRLLIYDASNRATGIPARFSGSGSGTDFTLTISSLEPEDFAVYYCQQRSNWPPTFGQGTKVEIKLEDLKNVFPPEVAVFEPSEAEISHTQKATLVCLATGFYPDHVELSWWVNGKEVHSGVCTDPQPLKEQPALNDSRYCLSSRLRVSATFWQNPRNHFRCQVQFYGLSENDEWTQDRAKPVTQIVSAEAWGRADDVIKIHWQEKKSNTILGSQEGNTMKTNDTYMKFSWLTVPEKSLDKEHRCIVRHENNKNGVDQEIIFPPIKTDVITMDPKDNCSKDANDTLLLQLTNTSAYYMYLLLLLKSVVYFAIITCCLLRRTAFCCNGEKSRAKRSGSGATNFSLLKQAGDVEENPGPTSMDWIWRILFLVGAATGAHSFEQLQLQESGPGLVKPSETLSLTCTVSGGSISSSSYWWGWTRQPPGRGLEWIGTMYYSGNIYYNPSLQSRATISVDTSKNQFSLKLSSVTAADTAVYYCARHVGYSYGRRFWYFDLWGRGTLVTVSSTRIQNPDPAVYQLRDSKSSDKSVCLFTDFDSQTNVSQSKDSDVYITDKCVLDMRSMDFKSNSAVAWSNKSDFACANAFNNSIIPEDTFFPSPESSDSTDHVKPKETENTKQPSKSCHKPKAIVHTEKVNMMSLTVLGLRMLFAKTVAVNFLLTAKLFFL

SEQ ID NO: 45864 - protein, 731 aa, synthetic construct
MALPVTALLLPLALLLHAARPEIVLTQSPATLSLSPGERATLSCRASQSVSSYLAWYQQKPGQAPRLLIYDASNRATGIPARFSGSGSGTDFTLTISSLEPEDFAVYYCQQRSNWPPTFGQGTKVEIKLEIQNPDPAVYQLRDSKSSDKSVCLFTDFDSQTNVSQSKDSDVYITDKCVLDMRSMDFKSNSAVAWSNKSDFACANAFNNSIIPEDTFFPSPESSDSTDHVKPKETENTKQPSKSCHKPKAIVHTEKVNMMSLTVLGLRMLFAKTVAVNFLLTAKLFFLRAKRSGSGVKQTLNFDLLKLAGDVESNPGPTSMDWIWRILFLVGAATGAHSFEQLQLQESGPGLVKPSETLSLTCTVSGGSISSSSYWWGWTRQPPGRGLEWIGTMYYSGNIYYNPSLQSRATISVDTSKNQFSLKLSSVTAADTAVYYCARHVGYSYGRRFWYFDLWGRGTLVTVSSTREDLKNVFPPEVAVFEPSEAEISHTQKATLVCLATGFYPDHVELSWWVNGKEVHSGVCTDPQPLKEQPALNDSRYCLSSRLRVSATFWQNPRNHFRCQVQFYGLSENDEWTQDRAKPVTQIVSAEAWGRADDVIKIHWQEKKSNTILGSQEGNTMKTNDTYMKFSWLTVPEKSLDKEHRCIVRHENNKNGVDQEIIFPPIKTDVITMDPKDNCSKDANDTLLLQLTNTSAYYMYLLLLLKSVVYFAIITCCLLRRTAFCCNGEKS

SEQ ID NO: 45865 - protein, 862 aa, synthetic construct
MALPVTALLLPLALLLHAARPEVQLVESGGGLVQPGGSLRLSCAASGFSFSDFWMSWVRQAPGKGLEWVATISQAGSEKDYVDSVKGRFTISRDNAKKSLYLQMNSLRAEDTAVYYCASGVYSFDYRGQGTLVTVSSGTGGGGSGGGGSGGGGSEFEIVLTQSPATLSLSPGERATLSCRASQSVSSYLAWYQQKPGQAPRLLIYDASNRATGIPARFSGSGSGTDFTLTISSLEPEDFAVYYCQQRSNWPPTFGQGTKVEIKLEDLKNVFPPEVAVFEPSEAEISHTQKATLVCLATGFYPDHVELSWWVNGKEVHSGVCTDPQPLKEQPALNDSRYCLSSRLRVSATFWQNPRNHFRCQVQFYGLSENDEWTQDRAKPVTQIVSAEAWGRADDVIKIHWQEKKSNTILGSQEGNTMKTNDTYMKFSWLTVPEKSLDKEHRCIVRHENNKNGVDQEIIFPPIKTDVITMDPKDNCSKDANDTLLLQLTNTSAYYMYLLLLLKSVVYFAIITCCLLRRTAFCCNGEKSRAKRSGSGATNFSLLKQAGDVEENPGPTSMDWIWRILFLVGAATGAHSFEQLQLQESGPGLVKPSETLSLTCTVSGGSISSSSYWWGWTRQPPGRGLEWIGTMYYSGNIYYNPSLQSRATISVDTSKNQFSLKLSSVTAADTAVYYCARHVGYSYGRRFWYFDLWGRGTLVTVSSTRIQNPDPAVYQLRDSKSSDKSVCLFTDFDSQTNVSQSKDSDVYITDKCVLDMRSMDFKSNSAVAWSNKSDFACANAFNNSIIPEDTFFPSPESSDSTDHVKPKETENTKQPSKSCHKPKAIVHTEKVNMMSLTVLGLRMLFAKTVAVNFLLTAKLFFL

SEQ ID NO: 45866 - protein, 999 aa, synthetic construct
MALPVTALLLPLALLLHAARPEVQLVESGGGLVQPGGSLRLSCAASGFSFSDFWMSWVRQAPGKGLEWVATISQAGSEKDYVDSVKGRFTISRDNAKKSLYLQMNSLRAEDTAVYYCASGVYSFDYRGQGTLVTVSSGTGGGGSGGGGSGGGGSEFEIVLTQSPATLSLSPGERATLSCRASQSVSSYLAWYQQKPGQAPRLLIYDASNRATGIPARFSGSGSGTDFTLTISSLEPEDFAVYYCQQRSNWPPTFGQGTKVEIKLEDLKNVFPPEVAVFEPSEAEISHTQKATLVCLATGFYPDHVELSWWVNGKEVHSGVCTDPQPLKEQPALNDSRYCLSSRLRVSATFWQNPRNHFRCQVQFYGLSENDEWTQDRAKPVTQIVSAEAWGRADDVIKIHWQEKKSNTILGSQEGNTMKTNDTYMKFSWLTVPEKSLDKEHRCIVRHENNKNGVDQEIIFPPIKTDVITMDPKDNCSKDANDTLLLQLTNTSAYYMYLLLLLKSVVYFAIITCCLLRRTAFCCNGEKSRAKRSGSGATNFSLLKQAGDVEENPGPTSMDWIWRILFLVGAATGAHSGPQLQLQESGPGLVKPSETLSLTCTVSGDSISSGDYYWGWIRQPPGKGLEWIGHIYYSGVTYYNPSLKSRVTISVDTSRNQFSLKLSSVTAADTAVYYCTREDSSNWRSRGQGTLVTVSSGSGGGGSGGGGSGGGGSFEQLQLQESGPGLVKPSETLSLTCTVSGGSISSSSYWWGWTRQPPGRGLEWIGTMYYSGNIYYNPSLQSRATISVDTSKNQFSLKLSSVTAADTAVYYCARHVGYSYGRRFWYFDLWGRGTLVTVSSTRIQNPDPAVYQLRDSKSSDKSVCLFTDFDSQTNVSQSKDSDVYITDKCVLDMRSMDFKSNSAVAWSNKSDFACANAFNNSIIPEDTFFPSPESSDSTDHVKPKETENTKQPSKSCHKPKAIVHTEKVNMMSLTVLGLRMLFAKTVAVNFLLTAKLFFL

SEQ ID NO: 45867 - protein, 625 aa, synthetic construct
MALPVTALLLPLALLLHAARPEIVLTQSPATLSLSPGERATLSCRASQSVSSYLAWYQQKPGQAPRLLIYDASNRATGIPARFSGSGSGTDFTLTISSLEPEDFAVYYCQQRSNWPPTFGQGTKVEIKLEDLKNVFPPEVAVFEPSEAEISHTQKATLVCLATGFYPDHVELSWWVNGKEVHSGVSTDPQPLKEQPALNDSRYCLSSRLRVSATFWQNPRNHFRCQVQFYGLSENDEWTQDRAKPVTQIVSAEAWGRADCDVKLVEKSFETDTNLNFQNLSVIGFRILLLKVAGFNLLMTLRLWSSRAKRSGSGATNFSLLKQAGDVEENPGPTSMDWIWRILFLVGAATGAHSFEQLQLQESGPGLVKPSETLSLTCTVSGGSISSSSYWWGWTRQPPGRGLEWIGTMYYSGNIYYNPSLQSRATISVDTSKNQFSLKLSSVTAADTAVYYCARHVGYSYGRRFWYFDLWGRGTLVTVSSTRIQNPDPAVYQLRDSKSSDKSVCLFTDFDSQTNVSQSKDSDVYITDKTVLDMRSMDFKSNSAVAWSNKSDFACANAFNNSIIPEDTFFPSPESSCGFTSESYQQGVLSATILYEILLGKATLYAVLVSALVLMAMVKRKDSRG

SEQ ID NO: 45868 - protein, 625 aa, synthetic construct
MALPVTALLLPLALLLHAARPEIVLTQSPATLSLSPGERATLSCRASQSVSSYLAWYQQKPGQAPRLLIYDASNRATGIPARFSGSGSGTDFTLTISSLEPEDFAVYYCQQRSNWPPTFGQGTKVEIKLEDLKNVFPPEVAVFEPSEAEISHTQKATLVCLATGFYPDHVELSWWVNGKEVHSGVSTDPQPLKEQPALNDSRYCLSSRLRVSATFWQNPRNHFRCQVQFYGLSENDEWTQDRAKPVTQIVSAEAWGRADCGFTSESYQQGVLSATNLSVIGFRILLLKVAGFNLLMTLRLWSSRAKRSGSGATNFSLLKQAGDVEENPGPTSMDWIWRILFLVGAATGAHSFEQLQLQESGPGLVKPSETLSLTCTVSGGSISSSSYWWGWTRQPPGRGLEWIGTMYYSGNIYYNPSLQSRATISVDTSKNQFSLKLSSVTAADTAVYYCARHVGYSYGRRFWYFDLWGRGTLVTVSSTRIQNPDPAVYQLRDSKSSDKSVCLFTDFDSQTNVSQSKDSDVYITDKTVLDMRSMDFKSNSAVAWSNKSDFACANAFNNSIIPEDTFFPSPESSCDVKLVEKSFETDTNLNFQILYEILLGKATLYAVLVSALVLMAMVKRKDSRG

SEQ ID NO: 45869 - protein, 729 aa, synthetic construct
MALPVTALLLPLALLLHAARPEIVLTQSPATLSLSPGERATLSCRASQSVSSYLAWYQQKPGQAPRLLIYDASNRATGIPARFSGSGSGTDFTLTISSLEPEDFAVYYCQQRSNWPPTFGQGTKVEIKLEDLKNVFPPEVAVFEPSEAEISHTQKATLVCLATGFYPDHVELSWWVNGKEVHSGVSTDPQPLKEQPALNDSRYCLSSRLRVSATFWQNPRNHFRCQVQFYGLSENDEWTQDRAKPVTQIVSAEAWGRADDVIKIHWQEKKSNTILGSQEGNTMKTNDTYMKFSWLTVPEKSLDKEHRCIVRHENNKNGVDQEIIFPPIKTDVITMDPKDNCSKDANDTLLLQLTNTSAYYMYLLLLLKSVVYFAIITCCLLMAMVKRKDSRGRAKRSGSGATNFSLLKQAGDVEENPGPTSMDWIWRILFLVGAATGAHSFEQLQLQESGPGLVKPSETLSLTCTVSGGSISSSSYWWGWTRQPPGRGLEWIGTMYYSGNIYYNPSLQSRATISVDTSKNQFSLKLSSVTAADTAVYYCARHVGYSYGRRFWYFDLWGRGTLVTVSSTRIQNPDPAVYQLRDSKSSDKSVCLFTDFDSQTNVSQSKDSDVYITDKTVLDMRSMDFKSNSAVAWSNKSDFACANAFNNSIIPEDTFFPSPESSDSTDHVKPKETENTKQPSKSCHKPKAIVHTEKVNMMSLTVLGLRMLFAKTVAVNFLLTAKLFFLLTA

SEQ ID NO: 45870 - protein, 727 aa, synthetic construct
MALPVTALLLPLALLLHAARPEIVLTQSPATLSLSPGERATLSCRASQSVSSYLAWYQQKPGQAPRLLIYDASNRATGIPARFSGSGSGTDFTLTISSLEPEDFAVYYCQQRSNWPPTFGQGTKVEIKLEDLKNVFPPEVAVFEPSEAEISHTQKATLVCLATGFYPDHVELSWWVNGKEVHSGVSTDPQPLKEQPALNDSRYCLSSRLRVSATFWQNPRNHFRCQVQFYGLSENDEWTQDRAKPVTQIVSAEAWGRADDVIKIHWQEKKSNTILGSQEGNTMKTNDTYMKFSWLTVPEKSLDKEHRCIVRHENNKNGVDQEIIFPPIKTDVITMDPKDNCSKDANDTLLLQLTNTSAYYMYLLLLLKSVVYFAIITCCLLRRTAFCCNGEKSRAKRSGSGATNFSLLKQAGDVEENPGPTSMDWIWRILFLVGAATGAHSFEQLQLQESGPGLVKPSETLSLTCTVSGGSISSSSYWWGWTRQPPGRGLEWIGTMYYSGNIYYNPSLQSRATISVDTSKNQFSLKLSSVTAADTAVYYCARHVGYSYGRRFWYFDLWGRGTLVTVSSTRIQNPDPAVYQLRDSKSSDKSVCLFTDFDSQTNVSQSKDSDVYITDKTVLDMRSMDFKSNSAVAWSNKSDFACANAFNNSIIPEDTFFPSPESSDSTDHVKPKETENTKQPSKSCHKPKAIVHTEKVNMMSLTVLGLRMLFAKTVAVNFLLTAKLFFL

SEQ ID NO: 45871 - protein, 870 aa, synthetic construct
MALPVTALLLPLALLLHAARPLEEDLKNVFPPEVAVFEPSEAEISHTQKATLVCLATGFYPDHVELSWWVNGKEVHSGVCTDPQPLKEQPALNDSRYCLSSRLRVSATFWQNPRNHFRCQVQFYGLSENDEWTQDRAKPVTQIVSAEAWGRADCGFTSESYQQGVLSATNLSVIGFRILLLKVAGFNLLMTLRLWSSRAKRSGSGATNFSLLKQAGDVEENPGPTSMALPVTALLLPLALLLHAARPEIVLTQSPATLSLSPGERATLSCRASQSVSSYLAWYQQKPGQAPRLLIYDASNRATGIPARFSGSGSGTDFTLTISSLEPEDFAVYYCQQRSNWPPTFGQGTKVEIKGGGGSGGGGSGGGGSQLQLQESGPGLVKPSETLSLTCTVSGGSISSSSYWWGWTRQPPGRGLEWIGTMYYSGNIYYNPSLQSRATISVDTSKNQFSLKLSSVTAADTAVYYCARHVGYSYGRRFWYFDLWGRGTLVTVSSTRIQNPDPAVYQLRDSKSSDKSVCLFTDFDSQTNVSQSKDSDVYITDKCVLDMRSMDFKSNSAVAWSNKSDFACANAFNNSIIPEDTFFPSPESSCDVKLVEKSFETDTNLNFQILYEVIGFRILLLKVAGFNLLMTLRLWSSRAKRSGSGVKQTLNFDLLKLAGDVESNPGPSRGHMTEYKPTVRLATRDDVPRAVRTLAAAFADYPATRHTVDPDRHIERVTELQELFLTRVGLDIGKVWVADDGAAVAVWTTPESVEAGAVFAEIGPRMAELSGSRLAAQQQMEGLLAPHRPKEPAWFLATVGVSPDHQGKGLGSAVVLPGVEAAERAGVPAFLETSAPRNLPFYERLGFTVTADVEVPEGPRTWCMTRKPGA

SEQ ID NO: 45872 - protein, 870 aa, synthetic construct
MALPVTALLLPLALLLHAARPLEIQNPDPAVYQLRDSKSSDKSVCLFTDFDSQTNVSQSKDSDVYITDKCVLDMRSMDFKSNSAVAWSNKSDFACANAFNNSIIPEDTFFPSPESSCDVKLVEKSFETDTNLNFQILYEVIGFRILLLKVAGFNLLMTLRLWSSRAKRSGSGATNFSLLKQAGDVEENPGPTSMALPVTALLLPLALLLHAARPEIVLTQSPATLSLSPGERATLSCRASQSVSSYLAWYQQKPGQAPRLLIYDASNRATGIPARFSGSGSGTDFTLTISSLEPEDFAVYYCQQRSNWPPTFGQGTKVEIKGGGGSGGGGSGGGGSQLQLQESGPGLVKPSETLSLTCTVSGGSISSSSYWWGWTRQPPGRGLEWIGTMYYSGNIYYNPSLQSRATISVDTSKNQFSLKLSSVTAADTAVYYCARHVGYSYGRRFWYFDLWGRGTLVTVSSTREDLKNVFPPEVAVFEPSEAEISHTQKATLVCLATGFYPDHVELSWWVNGKEVHSGVCTDPQPLKEQPALNDSRYCLSSRLRVSATFWQNPRNHFRCQVQFYGLSENDEWTQDRAKPVTQIVSAEAWGRADCGFTSESYQQGVLSATNLSVIGFRILLLKVAGFNLLMTLRLWSSRAKRSGSGVKQTLNFDLLKLAGDVESNPGPSRGHMTEYKPTVRLATRDDVPRAVRTLAAAFADYPATRHTVDPDRHIERVTELQELFLTRVGLDIGKVWVADDGAAVAVWTTPESVEAGAVFAEIGPRMAELSGSRLAAQQQMEGLLAPHRPKEPAWFLATVGVSPDHQGKGLGSAVVLPGVEAAERAGVPAFLETSAPRNLPFYERLGFTVTADVEVPEGPRTWCMTRKPGA

SEQ ID NO: 45873 - protein, 870 aa, synthetic construct; identical to SEQ ID NO: 45871

SEQ ID NO: 45874 - protein, 978 aa, synthetic construct
MALPVTALLLPLALLLHAARPLEEDLKNVFPPEVAVFEPSEAEISHTQKATLVCLATGFYPDHVELSWWVNGKEVHSGVSTDPQPLKEQPALNDSRYCLSSRLRVSATFWQNPRNHFRCQVQFYGLSENDEWTQDRAKPVTQIVSAEAWGRADDVIKIHWQEKKSNTILGSQEGNTMKTNDTYMKFSWLTVPEKSLDKEHRCIVRHENNKNGVDQEIIFPPIKTDVITMDPKDNCSKDANDTLLLQLTNTSAYYMYLLLLLKSVVYFAIITCCLLMAMVKRKDSRGRAKRSGSGATNFSLLKQAGDVEENPGPTSMALPVTALLLPLALLLHAARPEIVLTQSPATLSLSPGERATLSCRASQSVSSYLAWYQQKPGQAPRLLIYDASNRATGIPARFSGSGSGTDFTLTISSLEPEDFAVYYCQQRSNWPPTFGQGTKVEIKGGGGSGGGGSGGGGSQLQLQESGPGLVKPSETLSLTCTVSGGSISSSSYWWGWTRQPPGRGLEWIGTMYYSGNIYYNPSLQSRATISVDTSKNQFSLKLSSVTAADTAVYYCARHVGYSYGRRFWYFDLWGRGTLVTVSSTRIQNPDPAVYQLRDSKSSDKSVCLFTDFDSQTNVSQSKDSDVYITDKTVLDMRSMDFKSNSAVAWSNKSDFACANAFNNSIIPEDTFFPSPESSDSTDHVKPKETENTKQPSKSCHKPKAIVHTEKVNMMSLTVLGLRMLFAKTVAVNFLLTAKLFFLLTARAKRSGSGVKQTLNFDLLKLAGDVESNPGPSRGHMTEYKPTVRLATRDDVPRAVRTLAAAFADYPATRHTVDPDRHIERVTELQELFLTRVGLDIGKVWVADDGAAVAVWTTPESVEAGAVFAEIGPRMAELSGSRLAAQQQMEGLLAPHRPKEPAWFLATVGVSPDHQGKGLGSAVVLPGVEAAERAGVPAFLETSAPRNLPFYERLGFTVTADVEVPEGPRTWCMTRKPGA

SEQ ID NO: 45875 - protein, 978 aa, synthetic construct
MALPVTALLLPLALLLHAARPLEIQNPDPAVYQLRDSKSSDKSVCLFTDFDSQTNVSQSKDSDVYITDKTVLDMRSMDFKSNSAVAWSNKSDFACANAFNNSIIPEDTFFPSPESSDSTDHVKPKETENTKQPSKSCHKPKAIVHTEKVNMMSLTVLGLRMLFAKTVAVNFLLTAKLFFLLTARAKRSGSGATNFSLLKQAGDVEENPGPTSMALPVTALLLPLALLLHAARPEIVLTQSPATLSLSPGERATLSCRASQSVSSYLAWYQQKPGQAPRLLIYDASNRATGIPARFSGSGSGTDFTLTISSLEPEDFAVYYCQQRSNWPPTFGQGTKVEIKGGGGSGGGGSGGGGSQLQLQESGPGLVKPSETLSLTCTVSGGSISSSSYWWGWTRQPPGRGLEWIGTMYYSGNIYYNPSLQSRATISVDTSKNQFSLKLSSVTAADTAVYYCARHVGYSYGRRFWYFDLWGRGTLVTVSSTREDLKNVFPPEVAVFEPSEAEISHTQKATLVCLATGFYPDHVELSWWVNGKEVHSGVSTDPQPLKEQPALNDSRYCLSSRLRVSATFWQNPRNHFRCQVQFYGLSENDEWTQDRAKPVTQIVSAEAWGRADDVIKIHWQEKKSNTILGSQEGNTMKTNDTYMKFSWLTVPEKSLDKEHRCIVRHENNKNGVDQEIIFPPIKTDVITMDPKDNCSKDANDTLLLQLTNTSAYYMYLLLLLKSVVYFAIITCCLLMAMVKRKDSRGRAKRSGSGVKQTLNFDLLKLAGDVESNPGPSRGHMTEYKPTVRLATRDDVPRAVRTLAAAFADYPATRHTVDPDRHIERVTELQELFLTRVGLDIGKVWVADDGAAVAVWTTPESVEAGAVFAEIGPRMAELSGSRLAAQQQMEGLLAPHRPKEPAWFLATVGVSPDHQGKGLGSAVVLPGVEAAERAGVPAFLETSAPRNLPFYERLGFTVTADVEVPEGPRTWCMTRKPGA

SEQ ID NO: 45876 - protein, 976 aa, synthetic construct
MALPVTALLLPLALLLHAARPLEEDLKNVFPPEVAVFEPSEAEISHTQKATLVCLATGFYPDHVELSWWVNGKEVHSGVCTDPQPLKEQPALNDSRYCLSSRLRVSATFWQNPRNHFRCQVQFYGLSENDEWTQDRAKPVTQIVSAEAWGRADDVIKIHWQEKKSNTILGSQEGNTMKTNDTYMKFSWLTVPEKSLDKEHRCIVRHENNKNGVDQEIIFPPIKTDVITMDPKDNCSKDANDTLLLQLTNTSAYYMYLLLLLKSVVYFAIITCCLLRRTAFCCNGEKSRAKRSGSGATNFSLLKQAGDVEENPGPTSMALPVTALLLPLALLLHAARPEIVLTQSPATLSLSPGERATLSCRASQSVSSYLAWYQQKPGQAPRLLIYDASNRATGIPARFSGSGSGTDFTLTISSLEPEDFAVYYCQQRSNWPPTFGQGTKVEIKGGGGSGGGGSGGGGSQLQLQESGPGLVKPSETLSLTCTVSGGSISSSSYWWGWTRQPPGRGLEWIGTMYYSGNIYYNPSLQSRATISVDTSKNQFSLKLSSVTAADTAVYYCARHVGYSYGRRFWYFDLWGRGTLVTVSSTRIQNPDPAVYQLRDSKSSDKSVCLFTDFDSQTNVSQSKDSDVYITDKCVLDMRSMDFKSNSAVAWSNKSDFACANAFNNSIIPEDTFFPSPESSDSTDHVKPKETENTKQPSKSCHKPKAIVHTEKVNMMSLTVLGLRMLFAKTVAVNFLLTAKLFFLRAKRSGSGVKQTLNFDLLKLAGDVESNPGPSRGHMTEYKPTVRLATRDDVPRAVRTLAAAFADYPATRHTVDPDRHIERVTELQELFLTRVGLDIGKVWVADDGAAVAVWTTPESVEAGAVFAEIGPRMAELSGSRLAAQQQMEGLLAPHRPKEPAWFLATVGVSPDHQGKGLGSAVVLPGVEAAERAGVPAFLETSAPRNLPFYERLGFTVTADVEVPEGPRTWCMTRKPGA

SEQ ID NO: 45877 - protein, 976 aa, synthetic construct
MALPVTALLLPLALLLHAARPLEIQNPDPAVYQLRDSKSSDKSVCLFTDFDSQTNVSQSKDSDVYITDKCVLDMRSMDFKSNSAVAWSNKSDFACANAFNNSIIPEDTFFPSPESSDSTDHVKPKETENTKQPSKSCHKPKAIVHTEKVNMMSLTVLGLRMLFAKTVAVNFLLTAKLFFLRAKRSGSGATNFSLLKQAGDVEENPGPTSMALPVTALLLPLALLLHAARPEIVLTQSPATLSLSPGERATLSCRASQSVSSYLAWYQQKPGQAPRLLIYDASNRATGIPARFSGSGSGTDFTLTISSLEPEDFAVYYCQQRSNWPPTFGQGTKVEIKGGGGSGGGGSGGGGSQLQLQESGPGLVKPSETLSLTCTVSGGSISSSSYWWGWTRQPPGRGLEWIGTMYYSGNIYYNPSLQSRATISVDTSKNQFSLKLSSVTAADTAVYYCARHVGYSYGRRFWYFDLWGRGTLVTVSSTREDLKNVFPPEVAVFEPSEAEISHTQKATLVCLATGFYPDHVELSWWVNGKEVHSGVCTDPQPLKEQPALNDSRYCLSSRLRVSATFWQNPRNHFRCQVQFYGLSENDEWTQDRAKPVTQIVSAEAWGRADDVIKIHWQEKKSNTILGSQEGNTMKTNDTYMKFSWLTVPEKSLDKEHRCIVRHENNKNGVDQEIIFPPIKTDVITMDPKDNCSKDANDTLLLQLTNTSAYYMYLLLLLKSVVYFAIITCCLLRRTAFCCNGEKSRAKRSGSGVKQTLNFDLLKLAGDVESNPGPSRGHMTEYKPTVRLATRDDVPRAVRTLAAAFADYPATRHTVDPDRHIERVTELQELFLTRVGLDIGKVWVADDGAAVAVWTTPESVEAGAVFAEIGPRMAELSGSRLAAQQQMEGLLAPHRPKEPAWFLATVGVSPDHQGKGLGSAVVLPGVEAAERAGVPAFLETSAPRNLPFYERLGFTVTADVEVPEGPRTWCMTRKPGA

SEQ ID NO: 45878 - protein, 976 aa, synthetic construct
MALPVTALLLPLALLLHAARPLEEDLKNVFPPEVAVFEPSEAEISHTQKATLVCLATGFYPDHVELSWWVNGKEVHSGVSTDPQPLKEQPALNDSRYCLSSRLRVSATFWQNPRNHFRCQVQFYGLSENDEWTQDRAKPVTQIVSAEAWGRADDVIKIHWQEKKSNTILGSQEGNTMKTNDTYMKFSWLTVPEKSLDKEHRCIVRHENNKNGVDQEIIFPPIKTDVITMDPKDNCSKDANDTLLLQLTNTSAYYMYLLLLLKSVVYFAIITCCLLRRTAFCCNGEKSRAKRSGSGATNFSLLKQAGDVEENPGPTSMALPVTALLLPLALLLHAARPEIVLTQSPATLSLSPGERATLSCRASQSVSSYLAWYQQKPGQAPRLLIYDASNRATGIPARFSGSGSGTDFTLTISSLEPEDFAVYYCQQRSNWPPTFGQGTKVEIKGGGGSGGGGSGGGGSQLQLQESGPGLVKPSETLSLTCTVSGGSISSSSYWWGWTRQPPGRGLEWIGTMYYSGNIYYNPSLQSRATISVDTSKNQFSLKLSSVTAADTAVYYCARHVGYSYGRRFWYFDLWGRGTLVTVSSTRIQNPDPAVYQLRDSKSSDKSVCLFTDFDSQTNVSQSKDSDVYITDKTVLDMRSMDFKSNSAVAWSNKSDFACANAFNNSIIPEDTFFPSPESSDSTDHVKPKETENTKQPSKSCHKPKAIVHTEKVNMMSLTVLGLRMLFAKTVAVNFLLTAKLFFLRAKRSGSGVKQTLNFDLLKLAGDVESNPGPSRGHMTEYKPTVRLATRDDVPRAVRTLAAAFADYPATRHTVDPDRHIERVTELQELFLTRVGLDIGKVWVADDGAAVAVWTTPESVEAGAVFAEIGPRMAELSGSRLAAQQQMEGLLAPHRPKEPAWFLATVGVSPDHQGKGLGSAVVLPGVEAAERAGVPAFLETSAPRNLPFYERLGFTVTADVEVPEGPRTWCMTRKPGA

SEQ ID NO: 45879 - protein, 976 aa, synthetic construct
MALPVTALLLPLALLLHAARPLEIQNPDPAVYQLRDSKSSDKSVCLFTDFDSQTNVSQSKDSDVYITDKTVLDMRSMDFKSNSAVAWSNKSDFACANAFNNSIIPEDTFFPSPESSDSTDHVKPKETENTKQPSKSCHKPKAIVHTEKVNMMSLTVLGLRMLFAKTVAVNFLLTAKLFFLRAKRSGSGATNFSLLKQAGDVEENPGPTSMALPVTALLLPLALLLHAARPEIVLTQSPATLSLSPGERATLSCRASQSVSSYLAWYQQKPGQAPRLLIYDASNRATGIPARFSGSGSGTDFTLTISSLEPEDFAVYYCQQRSNWPPTFGQGTKVEIKGGGGSGGGGSGGGGSQLQLQESGPGLVKPSETLSLTCTVSGGSISSSSYWWGWTRQPPGRGLEWIGTMYYSGNIYYNPSLQSRATISVDTSKNQFSLKLSSVTAADTAVYYCARHVGYSYGRRFWYFDLWGRGTLVTVSSTREDLKNVFPPEVAVFEPSEAEISHTQKATLVCLATGFYPDHVELSWWVNGKEVHSGVSTDPQPLKEQPALNDSRYCLSSRLRVSATFWQNPRNHFRCQVQFYGLSENDEWTQDRAKPVTQIVSAEAWGRADDVIKIHWQEKKSNTILGSQEGNTMKTNDTYMKFSWLTVPEKSLDKEHRCIVRHENNKNGVDQEIIFPPIKTDVITMDPKDNCSKDANDTLLLQLTNTSAYYMYLLLLLKSVVYFAIITCCLLRRTAFCCNGEKSRAKRSGSGVKQTLNFDLLKLAGDVESNPGPSRGHMTEYKPTVRLATRDDVPRAVRTLAAAFADYPATRHTVDPDRHIERVTELQELFLTRVGLDIGKVWVADDGAAVAVWTTPESVEAGAVFAEIGPRMAELSGSRLAAQQQMEGLLAPHRPKEPAWFLATVGVSPDHQGKGLGSAVVLPGVEAAERAGVPAFLETSAPRNLPFYERLGFTVTADVEVPEGPRTWCMTRKPGA

SEQ ID NO: 45880 - protein, 874 aa, synthetic construct
MALPVTALLLPLALLLHAARPLEEDLKNVFPPEVAVFEPSKAEIAHTQKATLVCLATGFYPDHVELSWWVNGKEVHSGVCTDPQPLKEQPALNDSRYCLSSRLRVSATFWQNPRNHFRCQVQFYGLSENDEWTQDRAKPVTQIVSAEAWGRADCGITSASYHQGVLSATILYEILLGKATLYAVLVSALVLMAMVKRKDSRGRAKRSGSGATNFSLLKQAGDVEENPGPTSMALPVTALLLPLALLLHAARPEIVLTQSPATLSLSPGERATLSCRASQSVSSYLAWYQQKPGQAPRLLIYDASNRATGIPARFSGSGSGTDFTLTISSLEPEDFAVYYCQQRSNWPPTFGQGTKVEIKGGGGSGGGGSGGGGSQLQLQESGPGLVKPSETLSLTCTVSGGSISSSSYWWGWTRQPPGRGLEWIGTMYYSGNIYYNPSLQSRATISVDTSKNQFSLKLSSVTAADTAVYYCARHVGYSYGRRFWYFDLWGRGTLVTVSSTRIQNPDPAVYQLRDSKSSDKSVCLFTDFDSQTNVSQSKDSDVYITDKCVLDMRSMDFKSNSAVAWSNKSDFACANAFNNSIIPEDTFFPSSDVPCDVKLVEKSFETDTNLNFQNLSVIGFRILLLKVAGFNLLMTLRLWSSRAKRSGSGVKQTLNFDLLKLAGDVESNPGPSRGHMTEYKPTVRLATRDDVPRAVRTLAAAFADYPATRHTVDPDRHIERVTELQELFLTRVGLDIGKVWVADDGAAVAVWTTPESVEAGAVFAEIGPRMAELSGSRLAAQQQMEGLLAPHRPKEPAWFLATVGVSPDHQGKGLGSAVVLPGVEAAERAGVPAFLETSAPRNLPFYERLGFTVTADVEVPEGPRTWCMTRKPGA

SEQ ID NO: 45881 - protein, 874 aa, synthetic construct
MALPVTALLLPLALLLHAARPLEIQNPDPAVYQLRDSKSSDKSVCLFTDFDSQTNVSQSKDSDVYITDKCVLDMRSMDFKSNSAVAWSNKSDFACANAFNNSIIPEDTFFPSSDVPCDVKLVEKSFETDTNLNFQNLSVIGFRILLLKVAGFNLLMTLRLWSSRAKRSGSGATNFSLLKQAGDVEENPGPTSMALPVTALLLPLALLLHAARPEIVLTQSPATLSLSPGERATLSCRASQSVSSYLAWYQQKPGQAPRLLIYDASNRATGIPARFSGSGSGTDFTLTISSLEPEDFAVYYCQQRSNWPPTFGQGTKVEIKGGGGSGGGGSGGGGSQLQLQESGPGLVKPSETLSLTCTVSGGSISSSSYWWGWTRQPPGRGLEWIGTMYYSGNIYYNPSLQSRATISVDTSKNQFSLKLSSVTAADTAVYYCARHVGYSYGRRFWYFDLWGRGTLVTVSSTREDLKNVFPPEVAVFEPSKAEIAHTQKATLVCLATGFYPDHVELSWWVNGKEVHSGVCTDPQPLKEQPALNDSRYCLSSRLRVSATFWQNPRNHFRCQVQFYGLSENDEWTQDRAKPVTQIVSAEAWGRADCGITSASYHQGVLSATILYEILLGKATLYAVLVSALVLMAMVKRKDSRGRAKRSGSGVKQTLNFDLLKLAGDVESNPGPSRGHMTEYKPTVRLATRDDVPRAVRTLAAAFADYPATRHTVDPDRHIERVTELQELFLTRVGLDIGKVWVADDGAAVAVWTTPESVEAGAVFAEIGPRMAELSGSRLAAQQQMEGLLAPHRPKEPAWFLATVGVSPDHQGKGLGSAVVLPGVEAAERAGVPAFLETSAPRNLPFYERLGFTVTADVEVPEGPRTWCMTRKPGA

SEQ ID NO: 45882 - protein, 767 aa, synthetic construct
MALPVTALLLPLALLLHAARPLEQSFGLLDPKLCYLLDGILFIYGVILTALFLRVKFSRSADAPAYQQGQNQLYNELNLGRREEYDVLDKRRGRDPEMGGKPQRRKNPQEGLYNELQKDKMAEAYSEIGMKGERRRGKGHDGLYQGLSTATKDTYDALHMQALPPRRAKRSGSGATNFSLLKQAGDVEENPGPTSMALPVTALLLPLALLLHAARPEIVLTQSPATLSLSPGERATLSCRASQSVSSYLAWYQQKPGQAPRLLIYDASNRATGIPARFSGSGSGTDFTLTISSLEPEDFAVYYCQQRSNWPPTFGQGTKVEIKGGGGSGGGGSGGGGSQLQLQESGPGLVKPSETLSLTCTVSGGSISSSSYWWGWTRQPPGRGLEWIGTMYYSGNIYYNPSLQSRATISVDTSKNQFSLKLSSVTAADTAVYYCARHVGYSYGRRFWYFDLWGRGTLVTVSSTRELGEPQLCYILDAILFLYGIVLTLLYCRLKIQVRKAAITSYEKSDGVYTGLSTRNQETYETLKHEKPPQRAKRSGSGVKQTLNFDLLKLAGDVESNPGPSRGHMTEYKPTVRLATRDDVPRAVRTLAAAFADYPATRHTVDPDRHIERVTELQELFLTRVGLDIGKVWVADDGAAVAVWTTPESVEAGAVFAEIGPRMAELSGSRLAAQQQMEGLLAPHRPKEPAWFLATVGVSPDHQGKGLGSAVVLPGVEAAERAGVPAFLETSAPRNLPFYERLGFTVTADVEVPEGPRTWCMTRKPGA

SEQ ID NO: 45883 - protein, 978 aa, synthetic construct; identical to SEQ ID NO: 45874

SEQ ID NO: 45884 - protein, 978 aa, synthetic construct; identical to SEQ ID NO: 45875

SEQ ID NO: 45885 - protein, 977 aa, synthetic construct
MALPVTALLLPLALLLHAARPLEEEDLKNVFPPEVAVFEPSEAEISHTQKATLVCLATGFYPDHVELSWWVNGKEVHSGVCTDPQPLKEQPALNDSRYCLSSRLRVSATFWQNPRNHFRCQVQFYGLSENDEWTQDRAKPVTQIVSAEAWGRADDVIKIHWQEKKSNTILGSQEGNTMKTNDTYMKFSWLTVPEKSLDKEHRCIVRHENNKNGVDQEIIFPPIKTDVITMDPKDNCSKDANDTLLLQLTNTSAYYMYLLLLLKSVVYFAIITCCLLRRTAFCCNGEKSRAKRSGSGATNFSLLKQAGDVEENPGPTSMALPVTALLLPLALLLHAARPEIVLTQSPATLSLSPGERATLSCRASQSVSSYLAWYQQKPGQAPRLLIYDASNRATGIPARFSGSGSGTDFTLTISSLEPEDFAVYYCQQRSNWPPTFGQGTKVEIKGGGGSGGGGSGGGGSQLQLQESGPGLVKPSETLSLTCTVSGGSISSSSYWWGWTRQPPGRGLEWIGTMYYSGNIYYNPSLQSRATISVDTSKNQFSLKLSSVTAADTAVYYCARHVGYSYGRRFWYFDLWGRGTLVTVSSTRIQNPDPAVYQLRDSKSSDKSVCLFTDFDSQTNVSQSKDSDVYITDKCVLDMRSMDFKSNSAVAWSNKSDFACANAFNNSIIPEDTFFPSPESSDSTDHVKPKETENTKQPSKSCHKPKAIVHTEKVNMMSLTVLGLRMLFAKTVAVNFLLTAKLFFLRAKRSGSGVKQTLNFDLLKLAGDVESNPGPSRGHMTEYKPTVRLATRDDVPRAVRTLAAAFADYPATRHTVDPDRHIERVTELQELFLTRVGLDIGKVWVADDGAAVAVWTTPESVEAGAVFAEIGPRMAELSGSRLAAQQQMEGLLAPHRPKEPAWFLATVGVSPDHQGKGLGSAVVLPGVEAAERAGVPAFLETSAPRNLPFYERLGFTVTADVEVPEGPRTWCMTRKPGA

SEQ ID NO: 45886 - protein, 977 aa, synthetic construct
MALPVTALLLPLALLLHAARPLEIQNPDPAVYQLRDSKSSDKSVCLFTDFDSQTNVSQSKDSDVYITDKCVLDMRSMDFKSNSAVAWSNKSDFACANAFNNSIIPEDTFFPSPESSDSTDHVKPKETENTKQPSKSCHKPKAIVHTEKVNMMSLTVLGLRMLFAKTVAVNFLLTAKLFFLRAKRSGSGATNFSLLKQAGDVEENPGPTSMALPVTALLLPLALLLHAARPEIVLTQSPATLSLSPGERATLSCRASQSVSSYLAWYQQKPGQAPRLLIYDASNRATGIPARFSGSGSGTDFTLTISSLEPEDFAVYYCQQRSNWPPTFGQGTKVEIKGGGGSGGGGSGGGGSQLQLQESGPGLVKPSETLSLTCTVSGGSISSSSYWWGWTRQPPGRGLEWIGTMYYSGNIYYNPSLQSRATISVDTSKNQFSLKLSSVTAADTAVYYCARHVGYSYGRRFWYFDLWGRGTLVTVSSTREEDLKNVFPPEVAVFEPSEAEISHTQKATLVCLATGFYPDHVELSWWVNGKEVHSGVCTDPQPLKEQPALNDSRYCLSSRLRVSATFWQNPRNHFRCQVQFYGLSENDEWTQDRAKPVTQIVSAEAWGRADDVIKIHWQEKKSNTILGSQEGNTMKTNDTYMKFSWLTVPEKSLDKEHRCIVRHENNKNGVDQEIIFPPIKTDVITMDPKDNCSKDANDTLLLQLTNTSAYYMYLLLLLKSVVYFAIITCCLLRRTAFCCNGEKSRAKRSGSGVKQTLNFDLLKLAGDVESNPGPSRGHMTEYKPTVRLATRDDVPRAVRTLAAAFADYPATRHTVDPDRHIERVTELQELFLTRVGLDIGKVWVADDGAAVAVWTTPESVEAGAVFAEIGPRMAELSGSRLAAQQQMEGLLAPHRPKEPAWFLATVGVSPDHQGKGLGSAVVLPGVEAAERAGVPAFLETSAPRNLPFYERLGFTVTADVEVPEGPRTWCMTRKPGA

SEQ ID NO: 45887 - protein, 874 aa, synthetic construct
MALPVTALLLPLALLLHAARPLEEDLKNVFPPEVAVFEPSEAEISHTQKATLVCLATGFYPDHVELSWWVNGKEVHSGVSTDPQPLKEQPALNDSRYCLSSRLRVSATFWQNPRNHFRCQVQFYGLSENDEWTQDRAKPVTQIVSAEAWGRADCGFTSESYQQGVLSATNLSVIGFRILLLKVAGFNLLMTLRLWSSRAKRSGSGATNFSLLKQAGDVEENPGPTSMALPVTALLLPLALLLHAARPEIVLTQSPATLSLSPGERATLSCRASQSVSSYLAWYQQKPGQAPRLLIYDASNRATGIPARFSGSGSGTDFTLTISSLEPEDFAVYYCQQRSNWPPTFGQGTKVEIKGGGGSGGGGSGGGGSQLQLQESGPGLVKPSETLSLTCTVSGGSISSSSYWWGWTRQPPGRGLEWIGTMYYSGNIYYNPSLQSRATISVDTSKNQFSLKLSSVTAADTAVYYCARHVGYSYGRRFWYFDLWGRGTLVTVSSTRIQNPDPAVYQLRDSKSSDKSVCLFTDFDSQTNVSQSKDSDVYITDKTVLDMRSMDFKSNSAVAWSNKSDFACANAFNNSIIPEDTFFPSPESSCDVKLVEKSFETDTNLNFQILYEILLGKATLYAVLVSALVLMAMVKRKDSRGRAKRSGSGVKQTLNFDLLKLAGDVESNPGPSRGHMTEYKPTVRLATRDDVPRAVRTLAAAFADYPATRHTVDPDRHIERVTELQELFLTRVGLDIGKVWVADDGAAVAVWTTPESVEAGAVFAEIGPRMAELSGSRLAAQQQMEGLLAPHRPKEPAWFLATVGVSPDHQGKGLGSAVVLPGVEAAERAGVPAFLETSAPRNLPFYERLGFTVTADVEVPEGPRTWCMTRKPGA

SEQ ID NO: 45888 - protein, 874 aa, synthetic construct
MALPVTALLLPLALLLHAARPLEIQNPDPAVYQLRDSKSSDKSVCLFTDFDSQTNVSQSKDSDVYITDKTVLDMRSMDFKSNSAVAWSNKSDFACANAFNNSIIPEDTFFPSPESSCDVKLVEKSFETDTNLNFQILYEILLGKATLYAVLVSALVLMAMVKRKDSRGRAKRSGSGATNFSLLKQAGDVEENPGPTSMALPVTALLLPLALLLHAARPEIVLTQSPATLSLSPGERATLSCRASQSVSSYLAWYQQKPGQAPRLLIYDASNRATGIPARFSGSGSGTDFTLTISSLEPEDFAVYYCQQRSNWPPTFGQGTKVEIKGGGGSGGGGSGGGGSQLQLQESGPGLVKPSETLSLTCTVSGGSISSSSYWWGWTRQPPGRGLEWIGTMYYSGNIYYNPSLQSRATISVDTSKNQFSLKLSSVTAADTAVYYCARHVGYSYGRRFWYFDLWGRGTLVTVSSTREDLKNVFPPEVAVFEPSEAEISHTQKATLVCLATGFYPDHVELSWWVNGKEVHSGVSTDPQPLKEQPALNDSRYCLSSRLRVSATFWQNPRNHFRCQVQFYGLSENDEWTQDRAKPVTQIVSAEAWGRADCGFTSESYQQGVLSATNLSVIGFRILLLKVAGFNLLMTLRLWSSRAKRSGSGVKQTLNFDLLKLAGDVESNPGPSRGHMTEYKPTVRLATRDDVPRAVRTLAAAFADYPATRHTVDPDRHIERVTELQELFLTRVGLDIGKVWVADDGAAVAVWTTPESVEAGAVFAEIGPRMAELSGSRLAAQQQMEGLLAPHRPKEPAWFLATVGVSPDHQGKGLGSAVVLPGVEAAERAGVPAFLETSAPRNLPFYERLGFTVTADVEVPEGPRTWCMTRKPGA

SEQ ID NO: 45889 - protein, 874 aa, synthetic construct
MALPVTALLLPLALLLHAARPLEEDLKNVFPPEVAVFEPSEAEISHTQKATLVCLATGFYPDHVELSWWVNGKEVHSGVCTDPQPLKEQPALNDSRYCLSSRLRVSATFWQNPRNHFRCQVQFYGLSENDEWTQDRAKPVTQIVSAEAWGRADCDVKLVEKSFETDTNLNFQNLSVIGFRILLLKVAGFNLLMTLRLWSSRAKRSGSGATNFSLLKQAGDVEENPGPTSMALPVTALLLPLALLLHAARPEIVLTQSPATLSLSPGERATLSCRASQSVSSYLAWYQQKPGQAPRLLIYDASNRATGIPARFSGSGSGTDFTLTISSLEPEDFAVYYCQQRSNWPPTFGQGTKVEIKGGGGSGGGGSGGGGSQLQLQESGPGLVKPSETLSLTCTVSGGSISSSSYWWGWTRQPPGRGLEWIGTMYYSGNIYYNPSLQSRATISVDTSKNQFSLKLSSVTAADTAVYYCARHVGYSYGRRFWYFDLWGRGTLVTVSSTRIQNPDPAVYQLRDSKSSDKSVCLFTDFDSQTNVSQSKDSDVYITDKCVLDMRSMDFKSNSAVAWSNKSDFACANAFNNSIIPEDTFFPSPESSCGFTSESYQQGVLSATILYEILLGKATLYAVLVSALVLMAMVKRKDSRGRAKRSGSGVKQTLNFDLLKLAGDVESNPGPSRGHMTEYKPTVRLATRDDVPRAVRTLAAAFADYPATRHTVDPDRHIERVTELQELFLTRVGLDIGKVWVADDGAAVAVWTTPESVEAGAVFAEIGPRMAELSGSRLAAQQQMEGLLAPHRPKEPAWFLATVGVSPDHQGKGLGSAVVLPGVEAAERAGVPAFLETSAPRNLPFYERLGFTVTADVEVPEGPRTWCMTRKPGA

SEQ ID NO: 45890 - protein, 874 aa, synthetic construct
MALPVTALLLPLALLLHAARPLEEDLKNVFPPEVAVFEPSEAEISHTQKATLVCLATGFYPDHVELSWWVNGKEVHSGVSTDPQPLKEQPALNDSRYCLSSRLRVSATFWQNPRNHFRCQVQFYGLSENDEWTQDRAKPVTQIVSAEAWGRADCDVKLVEKSFETDTNLNFQNLSVIGFRILLLKVAGFNLLMTLRLWSSRAKRSGSGATNFSLLKQAGDVEENPGPTSMALPVTALLLPLALLLHAARPEIVLTQSPATLSLSPGERATLSCRASQSVSSYLAWYQQKPGQAPRLLIYDASNRATGIPARFSGSGSGTDFTLTISSLEPEDFAVYYCQQRSNWPPTFGQGTKVEIKGGGGSGGGGSGGGGSQLQLQESGPGLVKPSETLSLTCTVSGGSISSSSYWWGWTRQPPGRGLEWIGTMYYSGNIYYNPSLQSRATISVDTSKNQFSLKLSSVTAADTAVYYCARHVGYSYGRRFWYFDLWGRGTLVTVSSTRIQNPDPAVYQLRDSKSSDKSVCLFTDFDSQTNVSQSKDSDVYITDKTVLDMRSMDFKSNSAVAWSNKSDFACANAFNNSIIPEDTFFPSPESSCGFTSESYQQGVLSATILYEILLGKATLYAVLVSALVLMAMVKRKDSRGRAKRSGSGVKQTLNFDLLKLAGDVESNPGPSRGHMTEYKPTVRLATRDDVPRAVRTLAAAFADYPATRHTVDPDRHIERVTELQELFLTRVGLDIGKVWVADDGAAVAVWTTPESVEAGAVFAEIGPRMAELSGSRLAAQQQMEGLLAPHRPKEPAWFLATVGVSPDHQGKGLGSAVVLPGVEAAERAGVPAFLETSAPRNLPFYERLGFTVTADVEVPEGPRTWCMTRKPGA

SEQ ID NO: 45891 - protein, 977 aa, synthetic construct
MALPVTALLLPLALLLHAARPLEEEDLKNVFPPEVAVFEPSEAEISHTQKATLVCLATGFYPDHVELSWWVNGKEVHSGVSTDPQPLKEQPALNDSRYCLSSRLRVSATFWQNPRNHFRCQVQFYGLSENDEWTQDRAKPVTQIVSAEAWGRADDVIKIHWQEKKSNTILGSQEGNTMKTNDTYMKFSWLTVPEKSLDKEHRCIVRHENNKNGVDQEIIFPPIKTDVITMDPKDNCSKDANDTLLLQLTNTSAYYMYLLLLLKSVVYFAIITCCLLRRTAFCCNGEKSRAKRSGSGATNFSLLKQAGDVEENPGPTSMALPVTALLLPLALLLHAARPEIVLTQSPATLSLSPGERATLSCRASQSVSSYLAWYQQKPGQAPRLLIYDASNRATGIPARFSGSGSGTDFTLTISSLEPEDFAVYYCQQRSNWPPTFGQGTKVEIKGGGGSGGGGSGGGGSQLQLQESGPGLVKPSETLSLTCTVSGGSISSSSYWWGWTRQPPGRGLEWIGTMYYSGNIYYNPSLQSRATISVDTSKNQFSLKLSSVTAADTAVYYCARHVGYSYGRRFWYFDLWGRGTLVTVSSTRIQNPDPAVYQLRDSKSSDKSVCLFTDFDSQTNVSQSKDSDVYITDKTVLDMRSMDFKSNSAVAWSNKSDFACANAFNNSIIPEDTFFPSPESSDSTDHVKPKETENTKQPSKSCHKPKAIVHTEKVNMMSLTVLGLRMLFAKTVAVNFLLTAKLFFLRAKRSGSGVKQTLNFDLLKLAGDVESNPGPSRGHMTEYKPTVRLATRDDVPRAVRTLAAAFADYPATRHTVDPDRHIERVTELQELFLTRVGLDIGKVWVADDGAAVAVWTTPESVEAGAVFAEIGPRMAELSGSRLAAQQQMEGLLAPHRPKEPAWFLATVGVSPDHQGKGLGSAVVLPGVEAAERAGVPAFLETSAPRNLPFYERLGFTVTADVEVPEGPRTWCMTRKPGA

SEQ ID NO: 45892 - protein, 874 aa, synthetic construct
MALPVTALLLPLALLLHAARPLEEDLKNVFPPEVAVFEPSEAEISHTQKATLVCLATGFYPDHVELSWWVNGKEVHSGVCTDPQPLKEQPALNDSRYCLSSRLRVSATFWQNPRNHFRCQVQFYGLSENDEWTQDRAKPVTQIVSAEAWGRADCGFTSESYQQGVLSATNLSVIGFRILLLKVAGFNLLMTLRLWSSRAKRSGSGATNFSLLKQAGDVEENPGPTSMALPVTALLLPLALLLHAARPEIVLTQSPATLSLSPGERATLSCRASQSVSSYLAWYQQKPGQAPRLLIYDASNRATGIPARFSGSGSGTDFTLTISSLEPEDFAVYYCQQRSNWPPTFGQGTKVEIKGGGGSGGGGSGGGGSQLQLQESGPGLVKPSETLSLTCTVSGGSISSSSYWWGWTRQPPGRGLEWIGTMYYSGNIYYNPSLQSRATISVDTSKNQFSLKLSSVTAADTAVYYCARHVGYSYGRRFWYFDLWGRGTLVTVSSTRIQNPDPAVYQLRDSKSSDKSVCLFTDFDSQTNVSQSKDSDVYITDKCVLDMRSMDFKSNSAVAWSNKSDFACANAFNNSIIPEDTFFPSPESSCDVKLVEKSFETDTNLNFQILYEILLGKATLYAVLVSALVLMAMVKRKDSRGRAKRSGSGVKQTLNFDLLKLAGDVESNPGPSRGHMTEYKPTVRLATRDDVPRAVRTLAAAFADYPATRHTVDPDRHIERVTELQELFLTRVGLDIGKVWVADDGAAVAVWTTPESVEAGAVFAEIGPRMAELSGSRLAAQQQMEGLLAPHRPKEPAWFLATVGVSPDHQGKGLGSAVVLPGVEAAERAGVPAFLETSAPRNLPFYERLGFTVTADVEVPEGPRTWCMTRKPGA

SEQ ID NO: 45893 - protein, 903 aa, synthetic construct
MALPVTALLLPLALLLHAARPLEEEDLKNVFPPEVAVFEPSEAEISHTQKATLVCLATGFYPDHVELSWWVNGKEVHSGVCTDPQPLKEQPALNDSRYCLSSRLRVSATFWQNPRNHFRCQVQFYGLSENDEWTQDRAKPVTQIVSAEAWGRADCGFTSESYQQGVLSATNLSVIGFRILLLKVAGFNLLMTLRLWSSRAKRSGSGATNFSLLKQAGDVEENPGPTSMALPVTALLLPLALLLHAARPEIVLTQSPATLSLSPGERATLSCRASQSVSSYLAWYQQKPGQAPRLLIYDASNRATGIPARFSGSGSGTDFTLTISSLEPEDFAVYYCQQRSNWPPTFGQGTKVEIKGGGGSGGGGSGGGGSQLQLQESGPGLVKPSETLSLTCTVSGGSISSSSYWWGWTRQPPGRGLEWIGTMYYSGNIYYNPSLQSRATISVDTSKNQFSLKLSSVTAADTAVYYCARHVGYSYGRRFWYFDLWGRGTLVTVSSTRGQPKANPTVTLFPPSSEELQANKATLVCLISDFYPGAVTVAWKADGSPVKAGVETTKPSKQSNNKYAASSYLSLTPEQWKSHRSYSCQVTHEGSTVEKTVAPTECSPIKTDVITMDPKDNCSKDANDTLLLQLTNTSAYYMYLLLLLKSVVYFAIITCCLLRRTAFCCNGEKSRAKRSGSGVKQTLNFDLLKLAGDVESNPGPSRGHMTEYKPTVRLATRDDVPRAVRTLAAAFADYPATRHTVDPDRHIERVTELQELFLTRVGLDIGKVWVADDGAAVAVWTTPESVEAGAVFAEIGPRMAELSGSRLAAQQQMEGLLAPHRPKEPAWFLATVGVSPDHQGKGLGSAVVLPGVEAAERAGVPAFLETSAPRNLPFYERLGFTVTADVEVPEGPRTWCMTRKPGA

SEQ ID NO: 45894 - protein, 903 aa, synthetic construct
MALPVTALLLPLALLLHAARPLEGQPKANPTVTLFPPSSEELQANKATLVCLISDFYPGAVTVAWKADGSPVKAGVETTKPSKQSNNKYAASSYLSLTPEQWKSHRSYSCQVTHEGSTVEKTVAPTECSPIKTDVITMDPKDNCSKDANDTLLLQLTNTSAYYMYLLLLLKSVVYFAIITCCLLRRTAFCCNGEKSRAKRSGSGATNFSLLKQAGDVEENPGPTSMALPVTALLLPLALLLHAARPEIVLTQSPATLSLSPGERATLSCRASQSVSSYLAWYQQKPGQAPRLLIYDASNRATGIPARFSGSGSGTDFTLTISSLEPEDFAVYYCQQRSNWPPTFGQGTKVEIKGGGGSGGGGSGGGGSQLQLQESGPGLVKPSETLSLTCTVSGGSISSSSYWWGWTRQPPGRGLEWIGTMYYSGNIYYNPSLQSRATISVDTSKNQFSLKLSSVTAADTAVYYCARHVGYSYGRRFWYFDLWGRGTLVTVSSTREEDLKNVFPPEVAVFEPSEAEISHTQKATLVCLATGFYPDHVELSWWVNGKEVHSGVCTDPQPLKEQPALNDSRYCLSSRLRVSATFWQNPRNHFRCQVQFYGLSENDEWTQDRAKPVTQIVSAEAWGRADCGFTSESYQQGVLSATNLSVIGFRILLLKVAGFNLLMTLRLWSSRAKRSGSGVKQTLNFDLLKLAGDVESNPGPSRGHMTEYKPTVRLATRDDVPRAVRTLAAAFADYPATRHTVDPDRHIERVTELQELFLTRVGLDIGKVWVADDGAAVAVWTTPESVEAGAVFAEIGPRMAELSGSRLAAQQQMEGLLAPHRPKEPAWFLATVGVSPDHQGKGLGSAVVLPGVEAAERAGVPAFLETSAPRNLPFYERLGFTVTADVEVPEGPRTWCMTRKPGA

SEQ ID NO: 45895 - protein, 900 aa, synthetic construct
MALPVTALLLPLALLLHAARPLEEASTKGPSVFPLAPSSKSTSGGTAALGCLVKDYFPEPVTVSWNSGALTSGVHTFPAVLQSSGLYSLSSVVTVPSSSLGTQTYICNVNHKPSNTKVDKRVEPKSCPIKTDVITMDPKDNCSKDANDTLLLQLTNTSAYYMYLLLLLKSVVYFAIITCCLLRRTAFCCNGEKSRAKRSGSGATNFSLLKQAGDVEENPGPTSMALPVTALLLPLALLLHAARPEIVLTQSPATLSLSPGERATLSCRASQSVSSYLAWYQQKPGQAPRLLIYDASNRATGIPARFSGSGSGTDFTLTISSLEPEDFAVYYCQQRSNWPPTFGQGTKVEIKGGGGSGGGGSGGGGSQLQLQESGPGLVKPSETLSLTCTVSGGSISSSSYWWGWTRQPPGRGLEWIGTMYYSGNIYYNPSLQSRATISVDTSKNQFSLKLSSVTAADTAVYYCARHVGYSYGRRFWYFDLWGRGTLVTVSSTRGQPKANPTVTLFPPSSEELQANKATLVCLISDFYPGAVTVAWKADGSPVKAGVETTKPSKQSNNKYAASSYLSLTPEQWKSHRSYSCQVTHEGSTVEKTVAPTECSEVKTDSTDHVKPKETENTKQPSKSCHKPKAIVHTEKVNMMSLTVLGLRMLFAKTVAVNFLLTAKLFFLRAKRSGSGVKQTLNFDLLKLAGDVESNPGPSRGHMTEYKPTVRLATRDDVPRAVRTLAAAFADYPATRHTVDPDRHIERVTELQELFLTRVGLDIGKVWVADDGAAVAVWTTPESVEAGAVFAEIGPRMAELSGSRLAAQQQMEGLLAPHRPKEPAWFLATVGVSPDHQGKGLGSAVVLPGVEAAERAGVPAFLETSAPRNLPFYERLGFTVTADVEVPEGPRTWCMTRKPGA

SEQ ID NO: 45896 - protein, 878 aa, synthetic construct
MALPVTALLLPLALLLHAARPLEEASTKGPSVFPLAPSSKSTSGGTAALGCLVKDYFPEPVTVSWNSGALTSGVHTFPAVLQSSGLYSLSSVVTVPSSSLGTQTYICNVNHKPSNTKVDKRVEPKSCGRADCGFTSESYQQGVLSATILYEILLGKATLYAVLVSALVLMAMVKRKDSRGRAKRSGSGATNFSLLKQAGDVEENPGPTSMALPVTALLLPLALLLHAARPEIVLTQSPATLSLSPGERATLSCRASQSVSSYLAWYQQKPGQAPRLLIYDASNRATGIPARFSGSGSGTDFTLTISSLEPEDFAVYYCQQRSNWPPTFGQGTKVEIKGGGGSGGGGSGGGGSQLQLQESGPGLVKPSETLSLTCTVSGGSISSSSYWWGWTRQPPGRGLEWIGTMYYSGNIYYNPSLQSRATISVDTSKNQFSLKLSSVTAADTAVYYCARHVGYSYGRRFWYFDLWGRGTLVTVSSTRGQPKANPTVTLFPPSSEELQANKATLVCLISDFYPGAVTVAWKADGSPVKAGVETTKPSKQSNNKYAASSYLSLTPEQWKSHRSYSCQVTHEGSTVEKTVAPTECSIPEDTFFPSPESSCDVKLVEKSFETDTNLNFQNLSVIGFRILLLKVAGFNLLMTLRLWSSRAKRSGSGVKQTLNFDLLKLAGDVESNPGPSRGHMTEYKPTVRLATRDDVPRAVRTLAAAFADYPATRHTVDPDRHIERVTELQELFLTRVGLDIGKVWVADDGAAVAVWTTPESVEAGAVFAEIGPRMAELSGSRLAAQQQMEGLLAPHRPKEPAWFLATVGVSPDHQGKGLGSAVVLPGVEAAERAGVPAFLETSAPRNLPFYERLGFTVTADVEVPEGPRTWCMTRKPGA

SEQ ID NO: 45897 - protein, 878 aa, synthetic construct
MALPVTALLLPLALLLHAARPLEEASTKGPSVFPLAPSSKSTSGGTAALGCLVKDYFPEPVTVSWNSGALTSGVHTFPAVLQSSGLYSLSSVVTVPSSSLGTQTYICNVNHKPSNTKVDKRVEPKSCIPEDTFFPSPESSCDVKLVEKSFETDTNLNFQNLSVIGFRILLLKVAGFNLLMTLRLWSSRAKRSGSGATNFSLLKQAGDVEENPGPTSMALPVTALLLPLALLLHAARPEIVLTQSPATLSLSPGERATLSCRASQSVSSYLAWYQQKPGQAPRLLIYDASNRATGIPARFSGSGSGTDFTLTISSLEPEDFAVYYCQQRSNWPPTFGQGTKVEIKGGGGSGGGGSGGGGSQLQLQESGPGLVKPSETLSLTCTVSGGSISSSSYWWGWTRQPPGRGLEWIGTMYYSGNIYYNPSLQSRATISVDTSKNQFSLKLSSVTAADTAVYYCARHVGYSYGRRFWYFDLWGRGTLVTVSSTRGQPKANPTVTLFPPSSEELQANKATLVCLISDFYPGAVTVAWKADGSPVKAGVETTKPSKQSNNKYAASSYLSLTPEQWKSHRSYSCQVTHEGSTVEKTVAPTECSGRADCGFTSESYQQGVLSATILYEILLGKATLYAVLVSALVLMAMVKRKDSRGRAKRSGSGVKQTLNFDLLKLAGDVESNPGPSRGHMTEYKPTVRLATRDDVPRAVRTLAAAFADYPATRHTVDPDRHIERVTELQELFLTRVGLDIGKVWVADDGAAVAVWTTPESVEAGAVFAEIGPRMAELSGSRLAAQQQMEGLLAPHRPKEPAWFLATVGVSPDHQGKGLGSAVVLPGVEAAERAGVPAFLETSAPRNLPFYERLGFTVTADVEVPEGPRTWCMTRKPGA

SEQ ID NO: 45898 - protein, 625 aa, synthetic construct
MALPVTALLLPLALLLHAARPEIVLTQSPATLSLSPGERATLSCRASQSVSSYLAWYQQKPGQAPRLLIYDASNRATGIPARFSGSGSGTDFTLTISSLEPEDFAVYYCQQRSNWPPTFGQGTKVEIKLEDLKNVFPPEVAVFEPSEAEISHTQKATLVCLATGFYPDHVELSWWVNGKEVHSGVCTDPQPLKEQPALNDSRYCLSSRLRVSATFWQNPRNHFRCQVQFYGLSENDEWTQDRAKPVTQIVSAEAWGRADSGFTSESYQQGVLSATILYEILLGKATLYAVLVSALVLMAMVKRKDSRGRAKRSGSGATNFSLLKQAGDVEENPGPTSMDWIWRILFLVGAATGAHSFEQLQLQESGPGLVKPSETLSLTCTVSGGSISSSSYWWGWTRQPPGRGLEWIGTMYYSGNIYYNPSLQSRATISVDTSKNQFSLKLSSVTAADTAVYYCARHVGYSYGRRFWYFDLWGRGTLVTVSSTRIQNPDPAVYQLRDSKSSDKSVCLFTDFDSQTNVSQSKDSDVYITDKCVLDMRSMDFKSNSAVAWSNKSDFACANAFNNSIIPEDTFFPSPESSSDVKLVEKSFETDTNLNFQNLSVIGFRILLLKVAGFNLLMTLRLWSS

SEQ ID NO: 45899 - protein, 904 aa, synthetic construct
MALPVTALLLPLALLLHAARPEVQLLESGGGLVQPGGSLRLSCAASGRTFSMGWYRQAPGKGLEFVSAITYSGGSPYYADSVKGRFTISRDNSKNTVYLQMNSLRAEDTAVYYCAANPTYGSDWNAENWGQGTLVTVSSGTGGGGSGGGGSGGGGSEFEIVLTQSPATLSLSPGERATLSCRASQSVSSYLAWYQQKPGQAPRLLIYDASNRATGIPARFSGSGSGTDFTLTISSLEPEDFAVYYCQQRSNWPPTFGQGTKVEIKLEIQNPDPAVYQLRDSKSSDKSVCLFTDFDSQTNVSQSKDSDVYITDKCVLDMRSMDFKSNSAVAWSNKSDFACANAFNNSIIPEDTFFPSSDVPCDVKLVEKSFETDTNLNFQNLSVIGFRILLLKVAGFNLLMTLRLWSSRAKRSGSGVKQTLNFDLLKLAGDVESNPGPTSTMDWIWRILFLVGAATGTHSGPEVQLVESGGGLVQPGGSLRLSCAASGRTFTMGWYRQAPGKEREFVAAISLSPTLAYYADSVKGRFTISRDNSKNTVVLQMNSLRAEDTALYYCAADRKSVMSIRPDYWGQGTLVTVSSGSGGGGSGGGGSGGGGSFEQLQLQESGPGLVKPSETLSLTCTVSGGSISSSSYWWGWTRQPPGRGLEWIGTMYYSGNIYYNPSLQSRATISVDTSKNQFSLKLSSVTAADTAVYYCARHVGYSYGRRFWYFDLWGRGTLVTVSSTREDLKNVFPPEVAVFEPSKAEIAHTQKATLVCLATGFYPDHVELSWWVNGKEVHSGVCTDPQPLKEQPALNDSRYCLSSRLRVSATFWQNPRNHFRCQVQFYGLSENDEWTQDRAKPVTQIVSAEAWGRADCGITSASYHQGVLSATILYEILLGKATLYAVLVSALVLMAMVKRKDSRG

SEQ ID NO: 45900 - protein, 904 aa, synthetic construct
MALPVTALLLPLALLLHAARPEVQLVESGGGLVQAGGSLRLSCAASGRTFSMGWFRQAPGKEREFVAAITYSGGSPYYADSVKGRFTISRDNAKNTVYLQMNSLKPEDTAVYYCAANPTYGSDWNAENWGQGTQVTVSSGTGGGGSGGGGSGGGGSEFEIVLTQSPATLSLSPGERATLSCRASQSVSSYLAWYQQKPGQAPRLLIYDASNRATGIPARFSGSGSGTDFTLTISSLEPEDFAVYYCQQRSNWPPTFGQGTKVEIKLEIQNPDPAVYQLRDSKSSDKSVCLFTDFDSQTNVSQSKDSDVYITDKCVLDMRSMDFKSNSAVAWSNKSDFACANAFNNSIIPEDTFFPSSDVPCDVKLVEKSFETDTNLNFQNLSVIGFRILLLKVAGFNLLMTLRLWSSRAKRSGSGVKQTLNFDLLKLAGDVESNPGPTSTMDWIWRILFLVGAATGAHSGPEVQLVESGGGLVQPGGSLRLSCAASGRTFTMGWYRQAPGKEREFVAAISLSPTLAYYADSVKGRFTISRDNSKNTVVLQMNSLRAEDTALYYCAADRKSVMSIRPDYWGQGTLVTVSSGSGGGGSGGGGSGGGGSFEQLQLQESGPGLVKPSETLSLTCTVSGGSISSSSYWWGWTRQPPGRGLEWIGTMYYSGNIYYNPSLQSRATISVDTSKNQFSLKLSSVTAADTAVYYCARHVGYSYGRRFWYFDLWGRGTLVTVSSTREDLKNVFPPEVAVFEPSKAEIAHTQKATLVCLATGFYPDHVELSWWVNGKEVHSGVCTDPQPLKEQPALNDSRYCLSSRLRVSATFWQNPRNHFRCQVQFYGLSENDEWTQDRAKPVTQIVSAEAWGRADCGITSASYHQGVLSATILYEILLGKATLYAVLVSALVLMAMVKRKDSRG

SEQ ID NO: 45901 - protein, 901 aa, synthetic construct
MALPVTALLLPLALLLHAARPEVQLVESGGGLVQAGGSLRLSCAASGRTFSMGWFRQAPGKEREFVAAITYSGGSPYYADSVKGRFTISRDNAKNTVYLQMNSLKPEDTAVYYCAANPTYGSDWNAENWGQGTQVTVSSGTGGGGSGGGGSGGGGSEFEIVLTQSPATLSLSPGERATLSCRASQSVSSYLAWYQQKPGQAPRLLIYDASNRATGIPARFSGSGSGTDFTLTISSLEPEDFAVYYCQQRSNWPPTFGQGTKVEIKLEDLKNVFPPEVAVFEPSEAEISHTQKATLVCLATGFYPDHVELSWWVNGKEVHSGVCTDPQPLKEQPALNDSRYCLSSRLRVSATFWQNPRNHFRCQVQFYGLSENDEWTQDRAKPVTQIVSAEAWGRADCGFTSESYQQGVLSATILYEILLGKATLYAVLVSALVLMAMVKRKDSRGRAKRSGSGATNFSLLKQAGDVEENPGPTSATMDWIWRILFLVGAATGAHSGPEVQLVESGGGLVQAGGSLRLSCAASGRTFTMGWFRQAPGKEREFVAAISLSPTLAYYADSVKGRFTISRDNAKNTVVLQMNSLKPEDTALYYCAADRKSVMSIRPDYWGQGTQVTVSSGSGGGGSGGGGSGGGGSFEQLQLQESGPGLVKPSETLSLTCTVSGGSISSSSYWWGWTRQPPGRGLEWIGTMYYSGNIYYNPSLQSRATISVDTSKNQFSLKLSSVTAADTAVYYCARHVGYSYGRRFWYFDLWGRGTLVTVSSTRIQNPDPAVYQLRDSKSSDKSVCLFTDFDSQTNVSQSKDSDVYITDKCVLDMRSMDFKSNSAVAWSNKSDFACANAFNNSIIPEDTFFPSPESSCDVKLVEKSFETDTNLNFQNLSVIGFRILLLKVAGFNLLMTLRLWSS

SEQ ID NO: 45902 - protein, 772 aa, synthetic construct
MALPVTALLLPLALLLHAARPEVQLVESGGGLVQPGGSLRLSCEASGFASDDYIIGWFRQAPGKEREGVSCISSKYANTVYTDSVKGRFRLSRGTAKNTVYLQMSALKPEDTAVYYCAMDSRRVTCPEISTMHRNFDSWGQGTLVTVSSGTGGGGSGGGGSGGGGSEFEIVLTQSPATLSLSPGERATLSCRASQSVSSYLAWYQQKPGQAPRLLIYDASNRATGIPARFSGSGSGTDFTLTISSLEPEDFAVYYCQQRSNWPPTFGQGTKVEIKLEDLKNVFPPEVAVFEPSKAEIAHTQKATLVCLATGFYPDHVELSWWVNGKEVHSGVCTDPQPLKEQPALNDSRYCLSSRLRVSATFWQNPRNHFRCQVQFYGLSENDEWTQDRAKPVTQIVSAEAWGRADCGITSASYHQGVLSATILYEILLGKATLYAVLVSALVLMAMVKRKDSRGRAKRSGSGATNFSLLKQAGDVEENPGPTSMDWIWRILFLVGAATGAHSFEQLQLQESGPGLVKPSETLSLTCTVSGGSISSSSYWWGWTRQPPGRGLEWIGTMYYSGNIYYNPSLQSRATISVDTSKNQFSLKLSSVTAADTAVYYCARHVGYSYGRRFWYFDLWGRGTLVTVSSTRIQNPDPAVYQLRDSKSSDKSVCLFTDFDSQTNVSQSKDSDVYITDKCVLDMRSMDFKSNSAVAWSNKSDFACANAFNNSIIPEDTFFPSSDVPCDVKLVEKSFETDTNLNFQNLSVIGFRILLLKVAGFNLLMTLRLWSS

SEQ ID NO: 45903 - protein, 763 aa, synthetic construct
MALPVTALLLPLALLLHAARPEIVLTQSPATLSLSPGERATLSCRASQSVSSYLAWYQQKPGQAPRLLIYDASNRATGIPARFSGSGSGTDFTLTISSLEPEDFAVYYCQQRSNWPPTFGQGTKVEIKLEDLKNVFPPEVAVFEPSEAEISHTQKATLVCLATGFYPDHVELSWWVNGKEVHSGVCTDPQPLKEQPALNDSRYCLSSRLRVSATFWQNPRNHFRCQVQFYGLSENDEWTQDRAKPVTQIVSAEAWGRADCGFTSESYQQGVLSATILYEILLGKATLYAVLVSALVLMAMVKRKDSRGRAKRSGSGATNFSLLKQAGDVEENPGPTSTMDWIWRILFLVGAATGAHSGPEVQLVESGGGLVQPGGSLRLSCAASGRTFTMGWYRQAPGKEREFVAAISLSPTLAYYADSVKGRFTISRDNSKNTVVLQMNSLRAEDTALYYCAADRKSVMSIRPDYWGQGTLVTVSSGSGGGGSGGGGSGGGGSFEQLQLQESGPGLVKPSETLSLTCTVSGGSISSSSYWWGWTRQPPGRGLEWIGTMYYSGNIYYNPSLQSRATISVDTSKNQFSLKLSSVTAADTAVYYCARHVGYSYGRRFWYFDLWGRGTLVTVSSTRIQNPDPAVYQLRDSKSSDKSVCLFTDFDSQTNVSQSKDSDVYITDKCVLDMRSMDFKSNSAVAWSNKSDFACANAFNNSIIPEDTFFPSPESSCDVKLVEKSFETDTNLNFQNLSVIGFRILLLKVAGFNLLMTLRLWSS

SEQ ID NO: 45904 - protein, 770 aa, synthetic construct
MALPVTALLLPLALLLHAARPEIVLTQSPATLSLSPGERATLSCRASQSVSSYLAWYQQKPGQAPRLLIYDASNRATGIPARFSGSGSGTDFTLTISSLEPEDFAVYYCQQRSNWPPTFGQGTKVEIKLEDLKNVFPPEVAVFEPSEAEISHTQKATLVCLATGFYPDHVELSWWVNGKEVHSGVCTDPQPLKEQPALNDSRYCLSSRLRVSATFWQNPRNHFRCQVQFYGLSENDEWTQDRAKPVTQIVSAEAWGRADCGFTSESYQQGVLSATILYEILLGKATLYAVLVSALVLMAMVKRKDSRGRAKRSGSGATNFSLLKQAGDVEENPGPTSTMDWIWRILFLVGAATGAHSGPQVQLVESGGGLVQPGGSLRLSCAASGNINSRNCMGWFRQAPGKGREGVAAIGQVTGRTYYVDSVKGRFTISLDNSKNTLYLQMNSLRAEDTAVYYCAAAPGCLLSALRSADYRNWGQGTLVTVSSGSGGGGSGGGGSGGGGSFEQLQLQESGPGLVKPSETLSLTCTVSGGSISSSSYWWGWTRQPPGRGLEWIGTMYYSGNIYYNPSLQSRATISVDTSKNQFSLKLSSVTAADTAVYYCARHVGYSYGRRFWYFDLWGRGTLVTVSSTRIQNPDPAVYQLRDSKSSDKSVCLFTDFDSQTNVSQSKDSDVYITDKCVLDMRSMDFKSNSAVAWSNKSDFACANAFNNSIIPEDTFFPSPESSCDVKLVEKSFETDTNLNFQNLSVIGFRILLLKVAGFNLLMTLRLWSS

SEQ ID NO: 45905 - protein, 770 aa, synthetic construct
MALPVTALLLPLALLLHAARPEIVLTQSPATLSLSPGERATLSCRASQSVSSYLAWYQQKPGQAPRLLIYDASNRATGIPARFSGSGSGTDFTLTISSLEPEDFAVYYCQQRSNWPPTFGQGTKVEIKLEDLKNVFPPEVAVFEPSEAEISHTQKATLVCLATGFYPDHVELSWWVNGKEVHSGVCTDPQPLKEQPALNDSRYCLSSRLRVSATFWQNPRNHFRCQVQFYGLSENDEWTQDRAKPVTQIVSAEAWGRADCGFTSESYQQGVLSATILYEILLGKATLYAVLVSALVLMAMVKRKDSRGRAKRSGSGATNFSLLKQAGDVEENPGPTSTMDWIWRILFLVGAATGAHSGPQVQLVESGGGSVQAGGSLRLSCGASGNISSRNCMGWFRQAPGKEREGVAAIGQVTGRSYYVDSVKGRFTISLDNAKNTLYLQMNTLKPEDTAMYYCAAAPGCLLSALRSADYRNWGQGTQVTVSSGSGGGGSGGGGSGGGGSFEQLQLQESGPGLVKPSETLSLTCTVSGGSISSSSYWWGWTRQPPGRGLEWIGTMYYSGNIYYNPSLQSRATISVDTSKNQFSLKLSSVTAADTAVYYCARHVGYSYGRRFWYFDLWGRGTLVTVSSTRIQNPDPAVYQLRDSKSSDKSVCLFTDFDSQTNVSQSKDSDVYITDKCVLDMRSMDFKSNSAVAWSNKSDFACANAFNNSIIPEDTFFPSPESSCDVKLVEKSFETDTNLNFQNLSVIGFRILLLKVAGFNLLMTLRLWSS

SEQ ID NO: 45906 - protein, 911 aa, synthetic construct
MALPVTALLLPLALLLHAARPEVQLVESGGGLVQAGGSLRLSCAASGRTFSMGWFRQAPGKEREFVAAITYSGGSPYYADSVKGRFTISRDNAKNTVYLQMNSLKPEDTAVYYCAANPTYGSDWNAENWGQGTQVTVSSGTGGGGSGGGGSGGGGSEFEIVLTQSPATLSLSPGERATLSCRASQSVSSYLAWYQQKPGQAPRLLIYDASNRATGIPARFSGSGSGTDFTLTISSLEPEDFAVYYCQQRSNWPPTFGQGTKVEIKLEIQNPDPAVYQLRDSKSSDKSVCLFTDFDSQTNVSQSKDSDVYITDKCVLDMRSMDFKSNSAVAWSNKSDFACANAFNNSIIPEDTFFPSSDVPCDVKLVEKSFETDTNLNFQNLSVIGFRILLLKVAGFNLLMTLRLWSSRAKRSGSGVKQTLNFDLLKLAGDVESNPGPTSTMDWIWRILFLVGAATGAHSGPQVQLVESGGGSVQAGGSLRLSCGASGNISSRNCMGWFRQAPGKEREGVAAIGQVTGRSYYVDSVKGRFTISLDNAKNTLYLQMNTLKPEDTAMYYCAAAPGCLLSALRSADYRNWGQGTQVTVSSGSGGGGSGGGGSGGGGSFEQLQLQESGPGLVKPSETLSLTCTVSGGSISSSSYWWGWTRQPPGRGLEWIGTMYYSGNIYYNPSLQSRATISVDTSKNQFSLKLSSVTAADTAVYYCARHVGYSYGRRFWYFDLWGRGTLVTVSSTREDLKNVFPPEVAVFEPSKAEIAHTQKATLVCLATGFYPDHVELSWWVNGKEVHSGVCTDPQPLKEQPALNDSRYCLSSRLRVSATFWQNPRNHFRCQVQFYGLSENDEWTQDRAKPVTQIVSAEAWGRADCGITSASYHQGVLSATILYEILLGKATLYAVLVSALVLMAMVKRKDSRG

SEQ ID NO: 45907 - protein, 908 aa, synthetic construct
MALPVTALLLPLALLLHAARPQVQLVESGGGSVQAGGSLRLSCGASGNISSRNCMGWFRQAPGKEREGVAAIGQVTGRSYYVDSVKGRFTISLDNAKNTLYLQMNTLKPEDTAMYYCAAAPGCLLSALRSADYRNWGQGTQVTVSSGTGGGGSGGGGSGGGGSEFEIVLTQSPATLSLSPGERATLSCRASQSVSSYLAWYQQKPGQAPRLLIYDASNRATGIPARFSGSGSGTDFTLTISSLEPEDFAVYYCQQRSNWPPTFGQGTKVEIKLEDLKNVFPPEVAVFEPSEAEISHTQKATLVCLATGFYPDHVELSWWVNGKEVHSGVCTDPQPLKEQPALNDSRYCLSSRLRVSATFWQNPRNHFRCQVQFYGLSENDEWTQDRAKPVTQIVSAEAWGRADCGFTSESYQQGVLSATILYEILLGKATLYAVLVSALVLMAMVKRKDSRGRAKRSGSGATNFSLLKQAGDVEENPGPTSATMDWIWRILFLVGAATGAHSGPEVQLVESGGGLVQAGGSLRLSCAASGRTFTMGWFRQAPGKEREFVAAISLSPTLAYYADSVKGRFTISRDNAKNTVVLQMNSLKPEDTALYYCAADRKSVMSIRPDYWGQGTQVTVSSGSGGGGSGGGGSGGGGSFEQLQLQESGPGLVKPSETLSLTCTVSGGSISSSSYWWGWTRQPPGRGLEWIGTMYYSGNIYYNPSLQSRATISVDTSKNQFSLKLSSVTAADTAVYYCARHVGYSYGRRFWYFDLWGRGTLVTVSSTRIQNPDPAVYQLRDSKSSDKSVCLFTDFDSQTNVSQSKDSDVYITDKCVLDMRSMDFKSNSAVAWSNKSDFACANAFNNSIIPEDTFFPSPESSCDVKLVEKSFETDTNLNFQNLSVIGFRILLLKVAGFNLLMTLRLWSS

SEQ ID NO: 45908 - protein, 771 aa, synthetic construct
MALPVTALLLPLALLLHAARPQVQLVESGGGSVQAGGSLRLSCGASGNISSRNCMGWFRQAPGKEREGVAAIGQVTGRSYYVDSVKGRFTISLDNAKNTLYLQMNTLKPEDTAMYYCAAAPGCLLSALRSADYRNWGQGTQVTVSSGTGGGGSGGGGSGGGGSEFEIVLTQSPATLSLSPGERATLSCRASQSVSSYLAWYQQKPGQAPRLLIYDASNRATGIPARFSGSGSGTDFTLTISSLEPEDFAVYYCQQRSNWPPTFGQGTKVEIKLEDLKNVFPPEVAVFEPSEAEISHTQKATLVCLATGFYPDHVELSWWVNGKEVHSGVCTDPQPLKEQPALNDSRYCLSSRLRVSATFWQNPRNHFRCQVQFYGLSENDEWTQDRAKPVTQIVSAEAWGRADCGFTSESYQQGVLSATILYEILLGKATLYAVLVSALVLMAMVKRKDSRGRAKRSGSGATNFSLLKQAGDVEENPGPTSATMDWIWRILFLVGAATGAHSFEQLQLQESGPGLVKPSETLSLTCTVSGGSISSSSYWWGWTRQPPGRGLEWIGTMYYSGNIYYNPSLQSRATISVDTSKNQFSLKLSSVTAADTAVYYCARHVGYSYGRRFWYFDLWGRGTLVTVSSTRIQNPDPAVYQLRDSKSSDKSVCLFTDFDSQTNVSQSKDSDVYITDKCVLDMRSMDFKSNSAVAWSNKSDFACANAFNNSIIPEDTFFPSPESSCDVKLVEKSFETDTNLNFQNLSVIGFRILLLKVAGFNLLMTLRLWSS

SEQ ID NO: 45909 - protein, 771 aa, synthetic construct
MALPVTALLLPLALLLHAARPQVQLVESGGGVVQPGGSLRLSCAASGLSFSTYTVAWFRQAPGKGLEGVAAIPYTSQHMVYTDSVRGRFTISRDNSKNTLYLQMNSLRAEDTAVYYCATDRRPGTSMLAINGYNRWGQGTTVTVSSGTGGGGSGGGGSGGGGSEFEIVLTQSPATLSLSPGERATLSCRASQSVSSYLAWYQQKPGQAPRLLIYDASNRATGIPARFSGSGSGTDFTLTISSLEPEDFAVYYCQQRSNWPPTFGQGTKVEIKLEDLKNVFPPEVAVFEPSEAEISHTQKATLVCLATGFYPDHVELSWWVNGKEVHSGVCTDPQPLKEQPALNDSRYCLSSRLRVSATFWQNPRNHFRCQVQFYGLSENDEWTQDRAKPVTQIVSAEAWGRADCGFTSESYQQGVLSATILYEILLGKATLYAVLVSALVLMAMVKRKDSRGRAKRSGSGATNFSLLKQAGDVEENPGPTSATMDWIWRILFLVGAATGAHSFEQLQLQESGPGLVKPSETLSLTCTVSGGSISSSSYWWGWTRQPPGRGLEWIGTMYYSGNIYYNPSLQSRATISVDTSKNQFSLKLSSVTAADTAVYYCARHVGYSYGRRFWYFDLWGRGTLVTVSSTRIQNPDPAVYQLRDSKSSDKSVCLFTDFDSQTNVSQSKDSDVYITDKCVLDMRSMDFKSNSAVAWSNKSDFACANAFNNSIIPEDTFFPSPESSCDVKLVEKSFETDTNLNFQNLSVIGFRILLLKVAGFNLLMTLRLWSS

SEQ ID NO: 45910 - protein, 770 aa, synthetic construct
MALPVTALLLPLALLLHAARPEIVLTQSPATLSLSPGERATLSCRASQSVSSYLAWYQQKPGQAPRLLIYDASNRATGIPARFSGSGSGTDFTLTISSLEPEDFAVYYCQQRSNWPPTFGQGTKVEIKLEDLKNVFPPEVAVFEPSEAEISHTQKATLVCLATGFYPDHVELSWWVNGKEVHSGVCTDPQPLKEQPALNDSRYCLSSRLRVSATFWQNPRNHFRCQVQFYGLSENDEWTQDRAKPVTQIVSAEAWGRADCGFTSESYQQGVLSATILYEILLGKATLYAVLVSALVLMAMVKRKDSRGRAKRSGSGATNFSLLKQAGDVEENPGPTSTMDWIWRILFLVGAATGAHSGPQVQLVESGGGVVQPGGSLRLSCAASGLSFSTYTVAWFRQAPGKGLEGVAAIPYTSQHMVYTDSVRGRFTISRDNSKNTLYLQMNSLRAEDTAVYYCATDRRPGTSMLAINGYNRWGQGTTVTVSSGSGGGGSGGGGSGGGGSFEQLQLQESGPGLVKPSETLSLTCTVSGGSISSSSYWWGWTRQPPGRGLEWIGTMYYSGNIYYNPSLQSRATISVDTSKNQFSLKLSSVTAADTAVYYCARHVGYSYGRRFWYFDLWGRGTLVTVSSTRIQNPDPAVYQLRDSKSSDKSVCLFTDFDSQTNVSQSKDSDVYITDKCVLDMRSMDFKSNSAVAWSNKSDFACANAFNNSIIPEDTFFPSPESSCDVKLVEKSFETDTNLNFQNLSVIGFRILLLKVAGFNLLMTLRLWSS

SEQ ID NO: 45911 - protein, 772 aa, synthetic construct
MALPVTALLLPLALLLHAARPEIVLTQSPATLSLSPGERATLSCRASQSVSSYLAWYQQKPGQAPRLLIYDASNRATGIPARFSGSGSGTDFTLTISSLEPEDFAVYYCQQRSNWPPTFGQGTKVEIKLEDLKNVFPPEVAVFEPSEAEISHTQKATLVCLATGFYPDHVELSWWVNGKEVHSGVCTDPQPLKEQPALNDSRYCLSSRLRVSATFWQNPRNHFRCQVQFYGLSENDEWTQDRAKPVTQIVSAEAWGRADCGFTSESYQQGVLSATILYEILLGKATLYAVLVSALVLMAMVKRKDSRGRAKRSGSGATNFSLLKQAGDVEENPGPTSTMDWIWRILFLVGAATGAHSGPEVQLVESGGGSVQAGGSLRLSCAASGYTYSINCMGWFRQAPGKEREGVAAISTGGGRTDYRDSVKGRFTISQDNAKNTVYLQMNSLKPEDTAMYYCAGKTTYPGYGCGLGRSAYNYWGQGTQVTVSSGSGGGGSGGGGSGGGGSFEQLQLQESGPGLVKPSETLSLTCTVSGGSISSSSYWWGWTRQPPGRGLEWIGTMYYSGNIYYNPSLQSRATISVDTSKNQFSLKLSSVTAADTAVYYCARHVGYSYGRRFWYFDLWGRGTLVTVSSTRIQNPDPAVYQLRDSKSSDKSVCLFTDFDSQTNVSQSKDSDVYITDKCVLDMRSMDFKSNSAVAWSNKSDFACANAFNNSIIPEDTFFPSPESSCDVKLVEKSFETDTNLNFQNLSVIGFRILLLKVAGFNLLMTLRLWSS

SEQ ID NO: 45912 - protein, 625 aa, synthetic construct
MALPVTALLLPLALLLHAARPEIVLTQSPATLSLSPGERATLSCRASQSVSSYLAWYQQKPGQAPRLLIYDASNRATGIPARFSGSGSGTDFTLTISSLEPEDFAVYYCQQRSNWPPTFGQGTKVEIKLEDLKHVFPPEVAVFEPSDAEIWHTQKATLVCLATGFYPDHVELSWWVNGKEVHSGVSTDPQPLKEQPALNDSRYCLSSRLRVSATFWQNPRNHFRCQVQFYGLSENDEWTQDRAKPVTQIVSAEAWGRADCGFTSESYQQGVLSATILYEILLGKATLYAVLVSALVLMAMVKRKDSRGRAKRSGSGATNFSLLKQAGDVEENPGPTSMDWIWRILFLVGAATGAHSFEQLQLQESGPGLVKPSETLSLTCTVSGGSISSSSYWWGWTRQPPGRGLEWIGTMYYSGNIYYNPSLQSRATISVDTSKNQFSLKLSSVTAADTAVYYCARHVGYSYGRRFWYFDLWGRGTLVTVSSTRIQNPDPAVYQLRDSKSSDKSVCLFTDFDSQTNVSQSKDSDVYITDKTVLDMRSMDFKSNSAVAWSSKSDFACANAFNNSIIPEDTFFPSPEMACDVKLVEKSFETDTNLNFQNLLVIWLRILLLKVAGFNLLMTLRLWSS

SEQ ID NO: 45913 - protein, 625 aa, synthetic construct
MALPVTALLLPLALLLHAARPEIVLTQSPATLSLSPGERATLSCRASQSVSSYLAWYQQKPGQAPRLLIYDASNRATGIPARFSGSGSGTDFTLTISSLEPEDFAVYYCQQRSNWPPTFGQGTKVEIKLEDLKHVFPPEVAVFEPSDAEIWHTQKATLVCLATGFYPDHVELSWWVNGKEVHSGVSTDPQPLKEQPALNDSRYCLSSRLRVSATFWQNPRNHFRCQVQFYGLSENDEWTQDRAKPVTQIVSAEAWGRADCGFTSESYQQGVLSATILYEILLGKATLYAVLVSALVLMAMVKRKDSRGRAKRSGSGATNFSLLKQAGDVEENPGPTSMDWIWRILFLVGAATGAHSFEQLQLQESGPGLVKPSETLSLTCTVSGGSISSSSYWWGWTRQPPGRGLEWIGTMYYSGNIYYNPSLQSRATISVDTSKNQFSLKLSSVTAADTAVYYCARHVGYSYGRRFWYFDLWGRGTLVTVSSTRIQNPDPAVYQLRDSKSSDKSVCLFTDFDSQTNVSQSKDSDVYITDKTVLDMRSMDFKSNSAVAWSTKSDFACANAFNNSIIPEDTFFPSPEVVCDVKLVEKSFETDTNLNFQNLVVIGARILLLKVAGFNLLMTLRLWSS

SEQ ID NO: 45914 - protein, 625 aa, synthetic construct
MALPVTALLLPLALLLHAARPEIVLTQSPATLSLSPGERATLSCRASQSVSSYLAWYQQKPGQAPRLLIYDASNRATGIPARFSGSGSGTDFTLTISSLEPEDFAVYYCQQRSNWPPTFGQGTKVEIKLEDLKNVFPPEVAVFEPSKAEISRTQKATLVCLATGFYPPHVELSWWVNGKEVHDGVCTDPQPLKEQPALNDSRYCLSSRLRVSATFWQNPRNHFRCQVQFYGLSENDEWTQDRAKPVTQIVSAEAWGRADCGFTSESYQQGVLSATILYEILLGKATLYAVLVSALVLMAMVKRKDSRGRAKRSGSGATNFSLLKQAGDVEENPGPTSMDWIWRILFLVGAATGAHSFEQLQLQESGPGLVKPSETLSLTCTVSGGSISSSSYWWGWTRQPPGRGLEWIGTMYYSGNIYYNPSLQSRATISVDTSKNQFSLKLSSVTAADTAVYYCARHVGYSYGRRFWYFDLWGRGTLVTVSSTRIQNPDPAVYQLRDSKSSDKFVCLFTDFDSQINVSQSKDSDVYITDKCVLDMRSMDFKSNSAVAWSNKSDFTCANAFNNSIIPEDTFFPSPESSCDVKLVEKSFETDTNLNFQNLSVIGFRILLLKVAGFNLLMTLRLWSS

SEQ ID NO: 45915 - protein, 767 aa, synthetic construct
MALPVTALLLPLALLLHAARPEIVLTQSPATLSLSPGERATLSCRASQSVSSYLAWYQQKPGQAPRLLIYDASNRATGIPARFSGSGSGTDFTLTISSLEPEDFAVYYCQQRSNWPPTFGQGTKVEIKLEDLKNVFPPEVAVFEPSEAEISHTQKATLVCLATGFYPDHVELSWWVNGKEVHSGVCTDPQPLKEQPALNDSRYCLSSRLRVSATFWQNPRNHFRCQVQFYGLSENDEWTQDRAKPVTQIVSAEAWGRADCGFTSESYQQGVLSATILYEILLGKATLYAVLVSALVLMAMVKRKDSRGRAKRSGSGATNFSLLKQAGDVEENPGPTSTMDWIWRILFLVGAATGAHSGPQVQLQESGPGLVKPSQTLSLTCTVSGASITTGEYYWNWFRQPPGKGLEWMGAIAASGSTTYSPSFESRTSISRDTSKNQFSLKLSSVTAADTAVYYCGRSFGVAAVTTGQNRGQGTLVTVSSGSGGGGSGGGGSGGGGSFEQLQLQESGPGLVKPSETLSLTCTVSGGSISSSSYWWGWTRQPPGRGLEWIGTMYYSGNIYYNPSLQSRATISVDTSKNQFSLKLSSVTAADTAVYYCARHVGYSYGRRFWYFDLWGRGTLVTVSSTRIQNPDPAVYQLRDSKSSDKSVCLFTDFDSQTNVSQSKDSDVYITDKCVLDMRSMDFKSNSAVAWSNKSDFACANAFNNSIIPEDTFFPSPESSCDVKLVEKSFETDTNLNFQNLSVIGFRILLLKVAGFNLLMTLRLWSS

SEQ ID NO: 45916 - protein, 908 aa, synthetic construct
MALPVTALLLPLALLLHAARPQVQLQESGPGLVKPSQTLSLTCTVSGGSITTGEFYWNWFRQPPGKGLEWMGAIAASGSTTYSPSFESRTSISRDTSKNQFSLKLSSVTAADTAVYYCGRSFGVAAVTTGQNRGQGTLVTVSSGTGGGGSGGGGSGGGGSEFEIVLTQSPATLSLSPGERATLSCRASQSVSSYLAWYQQKPGQAPRLLIYDASNRATGIPARFSGSGSGTDFTLTISSLEPEDFAVYYCQQRSNWPPTFGQGTKVEIKLEIQNPDPAVYQLRDSKSSDKSVCLFTDFDSQTNVSQSKDSDVYITDKCVLDMRSMDFKSNSAVAWSNKSDFACANAFNNSIIPEDTFFPSSDVPCDVKLVEKSFETDTNLNFQNLSVIGFRILLLKVAGFNLLMTLRLWSSRAKRSGSGVKQTLNFDLLKLAGDVESNPGPTSTMDWIWRILFLVGAATGAHSGPEVQLVESGGGLVQPGGSLRLSCAASGRTFTMGWYRQAPGKEREFVAAISLSPTLAYYADSVKGRFTISRDNSKNTVVLQMNSLRAEDTALYYCAADRKSVMSIRPDYWGQGTLVTVSSGSGGGGSGGGGSGGGGSFEQLQLQESGPGLVKPSETLSLTCTVSGGSISSSSYWWGWTRQPPGRGLEWIGTMYYSGNIYYNPSLQSRATISVDTSKNQFSLKLSSVTAADTAVYYCARHVGYSYGRRFWYFDLWGRGTLVTVSSTREDLKNVFPPEVAVFEPSKAEIAHTQKATLVCLATGFYPDHVELSWWVNGKEVHSGVCTDPQPLKEQPALNDSRYCLSSRLRVSATFWQNPRNHFRCQVQFYGLSENDEWTQDRAKPVTQIVSAEAWGRADCGITSASYHQGVLSATILYEILLGKATLYAVLVSALVLMAMVKRKDSRG

SEQ ID NO: 45917 - protein, 771 aa, synthetic construct
MALPVTALLLPLALLLHAARPQVQLQESGPGLVKPSQTLSLTCTVSGGSITTGEFYWNWFRQPPGKGLEWMGAIAASGSTTYSPSFESRTSISRDTSKNQFSLKLSSVTAADTAVYYCGRSFGVAAVTTGQNRGQGTLVTVSSGTGGGGSGGGGSGGGGSEFEIVLTQSPATLSLSPGERATLSCRASQSVSSYLAWYQQKPGQAPRLLIYDASNRATGIPARFSGSGSGTDFTLTISSLEPEDFAVYYCQQRSNWPPTFGQGTKVEIKLEIQNPDPAVYQLRDSKSSDKSVCLFTDFDSQTNVSQSKDSDVYITDKCVLDMRSMDFKSNSAVAWSNKSDFACANAFNNSIIPEDTFFPSSDVPCDVKLVEKSFETDTNLNFQNLSVIGFRILLLKVAGFNLLMTLRLWSSRAKRSGSGVKQTLNFDLLKLAGDVESNPGPTSTMDWIWRILFLVGAATGAHSFEQLQLQESGPGLVKPSETLSLTCTVSGGSISSSSYWWGWTRQPPGRGLEWIGTMYYSGNIYYNPSLQSRATISVDTSKNQFSLKLSSVTAADTAVYYCARHVGYSYGRRFWYFDLWGRGTLVTVSSTREDLKNVFPPEVAVFEPSKAEIAHTQKATLVCLATGFYPDHVELSWWVNGKEVHSGVCTDPQPLKEQPALNDSRYCLSSRLRVSATFWQNPRNHFRCQVQFYGLSENDEWTQDRAKPVTQIVSAEAWGRADCGITSASYHQGVLSATILYEILLGKATLYAVLVSALVLMAMVKRKDSRG

SEQ ID NO: 45918 - protein, 904 aa, synthetic construct
MALPVTALLLPLALLLHAARPEVQLVESGGGLVQAGGSLRLSCAASGRTFSMGWFRQAPGKEREFVAAITYSGGSPYYADSVKGRFTISRDNAKNTVYLQMNSLKPEDTAVYYCAANPTYGSDWNAENWGQGTQVTVSSGTGGGGSGGGGSGGGGSEFEIVLTQSPATLSLSPGERATLSCRASQSVSSYLAWYQQKPGQAPRLLIYDASNRATGIPARFSGSGSGTDFTLTISSLEPEDFAVYYCQQRSNWPPTFGQGTKVEIKLEDLKNVFPPEVAVFEPSEAEISHTQKATLVCLATGFYPDHVELSWWVNGKEVHSGVCTDPQPLKEQPALNDSRYCLSSRLRVSATFWQNPRNHFRCQVQFYGLSENDEWTQDRAKPVTQIVSAEAWGRADCGFTSESYQQGVLSATILYEILLGKATLYAVLVSALVLMAMVKRKDSRGRAKRSGSGATNFSLLKQAGDVEENPGPTSTMDWIWRILFLVGAATGAHSGPQVQLQESGPGLVKPSQTLSLTCTVSGASITTGEYYWNWFRQPPGKGLEWMGAIAASGSTTYSPSFESRTSISRDTSKNQFSLKLSSVTAADTAVYYCGRSFGVAAVTTGQNRGQGTLVTVSSGSGGGGSGGGGSGGGGSFEQLQLQESGPGLVKPSETLSLTCTVSGGSISSSSYWWGWTRQPPGRGLEWIGTMYYSGNIYYNPSLQSRATISVDTSKNQFSLKLSSVTAADTAVYYCARHVGYSYGRRFWYFDLWGRGTLVTVSSTRIQNPDPAVYQLRDSKSSDKSVCLFTDFDSQTNVSQSKDSDVYITDKCVLDMRSMDFKSNSAVAWSNKSDFACANAFNNSIIPEDTFFPSPESSCDVKLVEKSFETDTNLNFQNLSVIGFRILLLKVAGFNLLMTLRLWSS

SEQ ID NO: 45919 - protein, 911 aa, synthetic construct
MALPVTALLLPLALLLHAARPEVQLVESGGGLVQAGGSLRLSCAASGRTFSMGWFRQAPGKEREFVAAITYSGGSPYYADSVKGRFTISRDNAKNTVYLQMNSLKPEDTAVYYCAANPTYGSDWNAENWGQGTQVTVSSGTGGGGSGGGGSGGGGSEFEIVLTQSPATLSLSPGERATLSCRASQSVSSYLAWYQQKPGQAPRLLIYDASNRATGIPARFSGSGSGTDFTLTISSLEPEDFAVYYCQQRSNWPPTFGQGTKVEIKLEIQNPDPAVYQLRDSKSSDKSVCLFTDFDSQTNVSQSKDSDVYITDKCVLDMRSMDFKSNSAVAWSNKSDFACANAFNNSIIPEDTFFPSSDVPCDVKLVEKSFETDTNLNFQNLSVIGFRILLLKVAGFNLLMTLRLWSSRAKRSGSGVKQTLNFDLLKLAGDVESNPGPTSTMDWIWRILFLVGAATGAHSGPQVQLVESGGGLVQPGGSLRLSCAASGNINSRNCMGWFRQAPGKGREGVAAIGQVTGRTYYVDSVKGRFTISLDNSKNTLYLQMNSLRAEDTAVYYCAAAPGCLLSALRSADYRNWGQGTLVTVSSGSGGGGSGGGGSGGGGSFEQLQLQESGPGLVKPSETLSLTCTVSGGSISSSSYWWGWTRQPPGRGLEWIGTMYYSGNIYYNPSLQSRATISVDTSKNQFSLKLSSVTAADTAVYYCARHVGYSYGRRFWYFDLWGRGTLVTVSSTREDLKNVFPPEVAVFEPSKAEIAHTQKATLVCLATGFYPDHVELSWWVNGKEVHSGVCTDPQPLKEQPALNDSRYCLSSRLRVSATFWQNPRNHFRCQVQFYGLSENDEWTQDRAKPVTQIVSAEAWGRADCGITSASYHQGVLSATILYEILLGKATLYAVLVSALVLMAMVKRKDSRG

SEQ ID NO: 45920 - protein, 907 aa, synthetic construct
MALPVTALLLPLALLLHAARPEVQLVESGGGLVQAGGSLRLSCAASGRTFSMGWFRQAPGKEREFVAAITYSGGSPYYADSVKGRFTISRDNAKNTVYLQMNSLKPEDTAVYYCAANPTYGSDWNAENWGQGTQVTVSSGTGGGGSGGGGSGGGGSEFEIVLTQSPATLSLSPGERATLSCRASQSVSSYLAWYQQKPGQAPRLLIYDASNRATGIPARFSGSGSGTDFTLTISSLEPEDFAVYYCQQRSNWPPTFGQGTKVEIKLEDLKNVFPPEVAVFEPSEAEISHTQKATLVCLATGFYPDHVELSWWVNGKEVHSGVCTDPQPLKEQPALNDSRYCLSSRLRVSATFWQNPRNHFRCQVQFYGLSENDEWTQDRAKPVTQIVSAEAWGRADCGFTSESYQQGVLSATILYEILLGKATLYAVLVSALVLMAMVKRKDSRGRAKRSGSGATNFSLLKQAGDVEENPGPTSTMDWIWRILFLVGAATGAHSGPQVQLVESGGGLVQPGGSLRLSCAASGNINSRNCMGWFRQAPGKGREGVAAIGQVTGRTYYVDSVKGRFTISLDNSKNTLYLQMNSLRAEDTAVYYCAAAPGCLLSALRSADYRNWGQGTLVTVSSGSGGGGSGGGGSGGGGSFEQLQLQESGPGLVKPSETLSLTCTVSGGSISSSSYWWGWTRQPPGRGLEWIGTMYYSGNIYYNPSLQSRATISVDTSKNQFSLKLSSVTAADTAVYYCARHVGYSYGRRFWYFDLWGRGTLVTVSSTRIQNPDPAVYQLRDSKSSDKSVCLFTDFDSQTNVSQSKDSDVYITDKCVLDMRSMDFKSNSAVAWSNKSDFACANAFNNSIIPEDTFFPSPESSCDVKLVEKSFETDTNLNFQNLSVIGFRILLLKVAGFNLLMTLRLWSS

SEQ ID NO: 45921 - protein, 907 aa, synthetic construct
MALPVTALLLPLALLLHAARPEVQLVESGGGLVQAGGSLRLSCAASGRTFTMGWFRQAPGKEREFVAAISLSPTLAYYADSVKGRFTISRDNAKNTVVLQMNSLKPEDTALYYCAADRKSVMSIRPDYWGQGTQVTVSSGTGGGGSGGGGSGGGGSEFEIVLTQSPATLSLSPGERATLSCRASQSVSSYLAWYQQKPGQAPRLLIYDASNRATGIPARFSGSGSGTDFTLTISSLEPEDFAVYYCQQRSNWPPTFGQGTKVEIKLEDLKNVFPPEVAVFEPSEAEISHTQKATLVCLATGFYPDHVELSWWVNGKEVHSGVCTDPQPLKEQPALNDSRYCLSSRLRVSATFWQNPRNHFRCQVQFYGLSENDEWTQDRAKPVTQIVSAEAWGRADCGFTSESYQQGVLSATILYEILLGKATLYAVLVSALVLMAMVKRKDSRGRAKRSGSGATNFSLLKQAGDVEENPGPTSTMDWIWRILFLVGAATGAHSGPQVQLVESGGGLVQPGGSLRLSCAASGNINSRNCMGWFRQAPGKGREGVAAIGQVTGRTYYVDSVKGRFTISLDNSKNTLYLQMNSLRAEDTAVYYCAAAPGCLLSALRSADYRNWGQGTLVTVSSGSGGGGSGGGGSGGGGSFEQLQLQESGPGLVKPSETLSLTCTVSGGSISSSSYWWGWTRQPPGRGLEWIGTMYYSGNIYYNPSLQSRATISVDTSKNQFSLKLSSVTAADTAVYYCARHVGYSYGRRFWYFDLWGRGTLVTVSSTRIQNPDPAVYQLRDSKSSDKSVCLFTDFDSQTNVSQSKDSDVYITDKCVLDMRSMDFKSNSAVAWSNKSDFACANAFNNSIIPEDTFFPSPESSCDVKLVEKSFETDTNLNFQNLSVIGFRILLLKVAGFNLLMTLRLWSS

SEQ ID NO: 45922 - protein, 911 aa, synthetic construct
MALPVTALLLPLALLLHAARPQVQLQESGPGLVKPSQTLSLTCTVSGGSITTGEFYWNWFRQPPGKGLEWMGAIAASGSTTYSPSFESRTSISRDTSKNQFSLKLSSVTAADTAVYYCGRSFGVAAVTTGQNRGQGTLVTVSSGTGGGGSGGGGSGGGGSEFEIVLTQSPATLSLSPGERATLSCRASQSVSSYLAWYQQKPGQAPRLLIYDASNRATGIPARFSGSGSGTDFTLTISSLEPEDFAVYYCQQRSNWPPTFGQGTKVEIKLEDLKNVFPPEVAVFEPSEAEISHTQKATLVCLATGFYPDHVELSWWVNGKEVHSGVCTDPQPLKEQPALNDSRYCLSSRLRVSATFWQNPRNHFRCQVQFYGLSENDEWTQDRAKPVTQIVSAEAWGRADCGFTSESYQQGVLSATILYEILLGKATLYAVLVSALVLMAMVKRKDSRGRAKRSGSGATNFSLLKQAGDVEENPGPTSTMDWIWRILFLVGAATGAHSGPQVQLVESGGGLVQPGGSLRLSCAASGNINSRNCMGWFRQAPGKGREGVAAIGQVTGRTYYVDSVKGRFTISLDNSKNTLYLQMNSLRAEDTAVYYCAAAPGCLLSALRSADYRNWGQGTLVTVSSGSGGGGSGGGGSGGGGSFEQLQLQESGPGLVKPSETLSLTCTVSGGSISSSSYWWGWTRQPPGRGLEWIGTMYYSGNIYYNPSLQSRATISVDTSKNQFSLKLSSVTAADTAVYYCARHVGYSYGRRFWYFDLWGRGTLVTVSSTRIQNPDPAVYQLRDSKSSDKSVCLFTDFDSQTNVSQSKDSDVYITDKCVLDMRSMDFKSNSAVAWSNKSDFACANAFNNSIIPEDTFFPSPESSCDVKLVEKSFETDTNLNFQNLSVIGFRILLLKVAGFNLLMTLRLWSS

SEQ ID NO: 45923 - protein, 487 aa, synthetic construct
MALPVTALLLPLALLLHAARPDIQMTQSPSSLSASVGDRVTITCKASDHINNWLAWYQQKPGKAPKLLIYGATTLETGVPSRFSGSGSGTDFTLTISSLQPEDFATYYCQQSWNTPWTFGQGTKVEIKRGGGGSGGGGSGGGGSEVQLVESGGGLVQPGGSLRLSCAASGYTFSSYWVNWVRQAPGKGLEWVAQIYPGDGDTNYNGKFKGRFTISRDNSKNTLYLQMNSLRAEDTAVYYCARSITTVVGCAMDYWGQGTLVTVSSTRKIEVMYPPPYLDNEKSNGTIIHVKGKHLCPSPLFPGPSKPFWVLVVVGGVLACYSLLVTVAFIIFWVRSKRSRLLHSDYMNMTPRRPGPTRKHYQPYAPPRDFAAYRSRVKFSRSADAPAYQQGQNQLYNELNLGRREEYDVLDKRRGRDPEMGGKPRRKNPQEGLYNELQKDKMAEAYSEIGMKGERRRGKGHDGLYQGLSTATKDTYDALHMQALPPR

SEQ ID NO: 45924 - protein, 493 aa, synthetic construct
MALPVTALLLPLALLLHAARPDIQMTQSPSSLSASVGDRVTITCKASDHINNWLAWYQQKPGKAPKLLIYGATTLETGVPSRFSGSGSGTDFTLTISSLQPEDFATYYCQQSWNTPWTFGQGTKVEIKRGGGGSGGGGSGGGGSEVQLVESGGGLVQPGGSLRLSCAASGYTFSSYWVNWVRQAPGKGLEWVAQIYPGDGDTNYNGKFKGRFTISRDNSKNTLYLQMNSLRAEDTAVYYCARSITTVVGCAMDYWGQGTLVTVSSTRAKPTTTPAPRPPTPAPTIASQPLSLRPEACRPAAGGAVHTRGLDFACDIYIWAPLAGTCGVLLLSLVITLYCKRGRKKLLYIFKQPFMRPVQTTQEEDGCSCRFPEEEEGGCELRVKFSRSADAPAYQQGQNQLYNELNLGRREEYDVLDKRRGRDPEMGGKPRRKNPQEGLYNELQKDKMAEAYSEIGMKGERRRGKGHDGLYQGLSTATKDTYDALHMQALPPR

SEQ ID NO: 45925 - protein, 493 aa, synthetic construct
MALPVTALLLPLALLLHAARPEVQLVESGGGLVQPGGSLRLSCAASGYTFSSYWVNWVRQAPGKGLEWVAQIYPGDGDTNYNGKFKGRFTISRDNSKNTLYLQMNSLRAEDTAVYYCARSITTVVGCAMDYWGQGTLVTVSSGGGGSGGGGSGGGGSDIQMTQSPSSLSASVGDRVTITCKASDHINNWLAWYQQKPGKAPKLLIYGATTLETGVPSRFSGSGSGTDFTLTISSLQPEDFATYYCQQSWNTPWTFGQGTKVEIKRTRAKPTTTPAPRPPTPAPTIASQPLSLRPEACRPAAGGAVHTRGLDFACDIYIWAPLAGTCGVLLLSLVITLYCKRGRKKLLYIFKQPFMRPVQTTQEEDGCSCRFPEEEEGGCELRVKFSRSADAPAYQQGQNQLYNELNLGRREEYDVLDKRRGRDPEMGGKPRRKNPQEGLYNELQKDKMAEAYSEIGMKGERRRGKGHDGLYQGLSTATKDTYDALHMQALPPR

SEQ ID NO: 45926 - protein, 626 aa, synthetic construct
MALPVTALLLPLALLLHAARPDIQMTQSPSSLSASVGDRVTITCKASDHINNWLAWYQQKPGKAPKLLIYGATTLETGVPSRFSGSGSGTDFTLTISSLQPEDFATYYCQQSWNTPWTFGQGTKVEIKRLEIQNPDPAVYQLRDSKSSDKSVCLFTDFDSQTNVSQSKDSDVYITDKCVLDMRSMDFKSNSAVAWSNKSDFACANAFNNSIIPEDTFFPSSDVPCDVKLVEKSFETDTNLNFQNLSVIGFRILLLKVAGFNLLMTLRLWSSRAKRSGSGVKQTLNFDLLKLAGDVESNPGPTSMDWIWRILFLVGAATGAHSFEEVQLVESGGGLVQPGGSLRLSCAASGYTFSSYWVNWVRQAPGKGLEWVAQIYPGDGDTNYNGKFKGRFTISRDNSKNTLYLQMNSLRAEDTAVYYCARSITTVVGCAMDYWGQGTLVTVSSTREDLKNVFPPEVAVFEPSKAEIAHTQKATLVCLATGFYPDHVELSWWVNGKEVHSGVCTDPQPLKEQPALNDSRYCLSSRLRVSATFWQNPRNHFRCQVQFYGLSENDEWTQDRAKPVTQIVSAEAWGRADCGITSASYHQGVLSATILYEILLGKATLYAVLVSALVLMAMVKRKDSRG

SEQ ID NO: 45927 - protein, 622 aa, synthetic construct
MALPVTALLLPLALLLHAARPDIQMTQSPSSLSASVGDRVTITCKASDHINNWLAWYQQKPGKAPKLLIYGATTLETGVPSRFSGSGSGTDFTLTISSLQPEDFATYYCQQSWNTPWTFGQGTKVEIKRLEDLKNVFPPEVAVFEPSKAEIAHTQKATLVCLATGFYPDHVELSWWVNGKEVHSGVCTDPQPLKEQPALNDSRYCLSSRLRVSATFWQNPRNHFRCQVQFYGLSENDEWTQDRAKPVTQIVSAEAWGRADCGITSASYHQGVLSATILYEILLGKATLYAVLVSALVLMAMVKRKDSRGRAKRSGSGATNFSLLKQAGDVEENPGPTSMDWIWRILFLVGAATGAHSFEEVQLVESGGGLVQPGGSLRLSCAASGYTFSSYWVNWVRQAPGKGLEWVAQIYPGDGDTNYNGKFKGRFTISRDNSKNTLYLQMNSLRAEDTAVYYCARSITTVVGCAMDYWGQGTLVTVSSTRIQNPDPAVYQLRDSKSSDKSVCLFTDFDSQTNVSQSKDSDVYITDKCVLDMRSMDFKSNSAVAWSNKSDFACANAFNNSIIPEDTFFPSSDVPCDVKLVEKSFETDTNLNFQNLSVIGFRILLLKVAGFNLLMTLRLWSS

SEQ ID NO: 45928 - protein, 622 aa, synthetic construct
MALPVTALLLPLALLLHAARPDIQMTQSPSSLSASVGDRVTITCKASDHINNWLAWYQQKPGKAPKLLIYGATTLETGVPSRFSGSGSGTDFTLTISSLQPEDFATYYCQQSWNTPWTFGQGTKVEIKRLEDLKNVFPPEVAVFEPSEAEISHTQKATLVCLATGFYPDHVELSWWVNGKEVHSGVCTDPQPLKEQPALNDSRYCLSSRLRVSATFWQNPRNHFRCQVQFYGLSENDEWTQDRAKPVTQIVSAEAWGRADCGFTSESYQQGVLSATILYEILLGKATLYAVLVSALVLMAMVKRKDSRGRAKRSGSGATNFSLLKQAGDVEENPGPTSMDWIWRILFLVGAATGAHSFEEVQLVESGGGLVQPGGSLRLSCAASGYTFSSYWVNWVRQAPGKGLEWVAQIYPGDGDTNYNGKFKGRFTISRDNSKNTLYLQMNSLRAEDTAVYYCARSITTVVGCAMDYWGQGTLVTVSSTRIQNPDPAVYQLRDSKSSDKSVCLFTDFDSQTNVSQSKDSDVYITDKCVLDMRSMDFKSNSAVAWSNKSDFACANAFNNSIIPEDTFFPSPESSCDVKLVEKSFETDTNLNFQNLSVIGFRILLLKVAGFNLLMTLRLWSS

SEQ ID NO: 45929 - protein, 626 aa, synthetic construct
MALPVTALLLPLALLLHAARPDIQMTQSPSSLSASVGDRVTITCKASDHINNWLAWYQQKPGKAPKLLIYGATTLETGVPSRFSGSGSGTDFTLTISSLQPEDFATYYCQQSWNTPWTFGQGTKVEIKRLEIQNPDPAVYQLRDSKSSDKSVCLFTDFDSQTNVSQSKDSDVYITDKCVLDMRSMDFKSNSAVAWSNKSDFACANAFNNSIIPEDTFFPSPESSCDVKLVEKSFETDTNLNFQNLSVIGFRILLLKVAGFNLLMTLRLWSSRAKRSGSGVKQTLNFDLLKLAGDVESNPGPTSMDWIWRILFLVGAATGAHSFEEVQLVESGGGLVQPGGSLRLSCAASGYTFSSYWVNWVRQAPGKGLEWVAQIYPGDGDTNYNGKFKGRFTISRDNSKNTLYLQMNSLRAEDTAVYYCARSITTVVGCAMDYWGQGTLVTVSSTREDLKNVFPPEVAVFEPSEAEISHTQKATLVCLATGFYPDHVELSWWVNGKEVHSGVCTDPQPLKEQPALNDSRYCLSSRLRVSATFWQNPRNHFRCQVQFYGLSENDEWTQDRAKPVTQIVSAEAWGRADCGFTSESYQQGVLSATILYEILLGKATLYAVLVSALVLMAMVKRKDSRG

SEQ ID NO: 45930 - protein, 638 aa, synthetic construct
MALPVTALLLPLALLLHAARPLEEDLKNVFPPEVAVFEPSKAEIAHTQKATLVCLATGFYPDHVELSWWVNGKEVHSGVCTDPQPLKEQPALNDSRYCLSSRLRVSATFWQNPRNHFRCQVQFYGLSENDEWTQDRAKPVTQIVSAEAWGRADCGITSASYHQGVLSATILYEILLGKATLYAVLVSALVLMAMVKRKDSRGRAKRSGSGATNFSLLKQAGDVEENPGPTSMALPVTALLLPLALLLHAARPDIQMTQSPSSLSASVGDRVTITCKASDHINNWLAWYQQKPGKAPKLLIYGATTLETGVPSRFSGSGSGTDFTLTISSLQPEDFATYYCQQSWNTPWTFGQGTKVEIKRGGGGSGGGGSGGGGSEVQLVESGGGLVQPGGSLRLSCAASGYTFSSYWVNWVRQAPGKGLEWVAQIYPGDGDTNYNGKFKGRFTISRDNSKNTLYLQMNSLRAEDTAVYYCARSITTVVGCAMDYWGQGTLVTVSSTRIQNPDPAVYQLRDSKSSDKSVCLFTDFDSQTNVSQSKDSDVYITDKCVLDMRSMDFKSNSAVAWSNKSDFACANAFNNSIIPEDTFFPSSDVPCDVKLVEKSFETDTNLNFQNLSVIGFRILLLKVAGFNLLMTLRLWSS

SEQ ID NO: 45931 - protein, 645 aa, synthetic construct
MALPVTALLLPLALLLHAARPLEGSGDRPDPAVYQLRDSKSSDKSVCLFTDFDSQTNVSQSKDSDVYITDKCVLDMRSMDFKSNSAVAWSNKSDFACANAFNNSIIPEDTFFPSPESSCDVKLVEKSFETDTNLNFQNLSVIGFRILLLKVAGFNLLMTLRLWSSSSRAKRSGSGVKQTLNFDLLKLAGDVESNPGPTSMALPVTALLLPLALLLHAARPDIQMTQSPSSLSASVGDRVTITCKASDHINNWLAWYQQKPGKAPKLLIYGATTLETGVPSRFSGSGSGTDFTLTISSLQPEDFATYYCQQSWNTPWTFGQGTKVEIKRGGGGSGGGGSGGGGSEVQLVESGGGLVQPGGSLRLSCAASGYTFSSYWVNWVRQAPGKGLEWVAQIYPGDGDTNYNGKFKGRFTISRDNSKNTLYLQMNSLRAEDTAVYYCARSITTVVGCAMDYWGQGTLVTVSSTREDLKNVFPPEVAVFEPSEAEISHTQKATLVCLATGFYPDHVELSWWVNGKEVHSGVCTDPQPLKEQPALNDSRYCLSSRLRVSATFWQNPRNHFRCQVQFYGLSENDEWTQDRAKPVTQIVSAEAWGRADCGFTSESYQQGVLSATILYEILLGKATLYAVLVSALVLMAMVKRKDSRG

SEQ ID NO: 45932 - protein, 622 aa, synthetic construct
MALPVTALLLPLALLLHAARPDIQMTQSPSSLSASVGDRVTITCKASDHINNWLAWYQQKPGKAPKLLIYGATTLETGVPSRFSGSGSGTDFTLTISSLQPEDFATYYCQQSWNTPWTFGQGTKVEIKRLEDLKNVFPPEVAVFEPSEAEISHTQKATLVCLATGFYPDHVELSWWVNGKEVHSGVSTDPQPLKEQPALNDSRYCLSSRLRVSATFWQNPRNHFRCQVQFYGLSENDEWTQDRAKPVTQIVSAEAWGRADCGFTSESYQQGVLSATILYEILLGKATLYAVLVSALVLMAMVKRKDSRGRAKRSGSGATNFSLLKQAGDVEENPGPTSMDWIWRILFLVGAATGAHSFEEVQLVESGGGLVQPGGSLRLSCAASGYTFSSYWVNWVRQAPGKGLEWVAQIYPGDGDTNYNGKFKGRFTISRDNSKNTLYLQMNSLRAEDTAVYYCARSITTVVGCAMDYWGQGTLVTVSSTRIQNPDPAVYQLRDSKSSDKSVCLFTDFDSQTNVSQSKDSDVYITDKTVLDMRSMDFKSNSAVAWSNKSDFACANAFNNSIIPEDTFFPSPESSCDVKLVEKSFETDTNLNFQNLSVIGFRILLLKVAGFNLLMTLRLWSS

SEQ ID NO: 45933 - protein, 630 aa, synthetic construct
MALPVTALLLPLALLLHAARPDIQMTQSPSSLSASVGDRVTITCKASDHINNWLAWYQQKPGKAPKLLIYGATTLETGVPSRFSGSGSGTDFTLTISSLQPEDFATYYCQQSWNTPWTFGQGTKVEIKRLEDKQLDADVSPKPTIFLPSIAETKLQKAGTYLCLLEKFFPDVIKIHWQEKKSNTILGSQEGNTMKTNDTYMKFSWLTVPEKSLDKEHRCIVRHENNKNGVDQEIIFPPIKTDVITMDPKDNCSKDANDTLLLQLTNTSAYYMYLLLLLKSVVYFAIITCCLLRRTAFCCNGEKSRAKRSGSGATNFSLLKQAGDVEENPGPTSMDWIWRILFLVGAATGAHSFEEVQLVESGGGLVQPGGSLRLSCAASGYTFSSYWVNWVRQAPGKGLEWVAQIYPGDGDTNYNGKFKGRFTISRDNSKNTLYLQMNSLRAEDTAVYYCARSITTVVGCAMDYWGQGTLVTVSSTRSQPHTKPSVFVMKNGTNVACLVKEFYPKDIRINLVSSKKITEFDPAIVISPSGKYNAVKLGKYEDSNSVTCSVQHDNKTVHSTDFEVKTDSTDHVKPKETENTKQPSKSCHKPKAIVHTEKVNMMSLTVLGLRMLFAKTVAVNFLLTAKLFFL

SEQ ID NO: 45934 - protein, 630 aa, synthetic construct
MALPVTALLLPLALLLHAARPDIQMTQSPSSLSASVGDRVTITCKASDHINNWLAWYQQKPGKAPKLLIYGATTLETGVPSRFSGSGSGTDFTLTISSLQPEDFATYYCQQSWNTPWTFGQGTKVEIKRLESQPHTKPSVFVMKNGTNVACLVKEFYPKDIRINLVSSKKITEFDPAIVISPSGKYNAVKLGKYEDSNSVTCSVQHDNKTVHSTDFEVKTDSTDHVKPKETENTKQPSKSCHKPKAIVHTEKVNMMSLTVLGLRMLFAKTVAVNFLLTAKLFFLRAKRSGSGATNFSLLKQAGDVEENPGPTSMDWIWRILFLVGAATGAHSFEEVQLVESGGGLVQPGGSLRLSCAASGYTFSSYWVNWVRQAPGKGLEWVAQIYPGDGDTNYNGKFKGRFTISRDNSKNTLYLQMNSLRAEDTAVYYCARSITTVVGCAMDYWGQGTLVTVSSTRDKQLDADVSPKPTIFLPSIAETKLQKAGTYLCLLEKFFPDVIKIHWQEKKSNTILGSQEGNTMKTNDTYMKFSWLTVPEKSLDKEHRCIVRHENNKNGVDQEIIFPPIKTDVITMDPKDNCSKDANDTLLLQLTNTSAYYMYLLLLLKSVVYFAIITCCLLRRTAFCCNGEKS

SEQ ID NO: 45935 - protein, 645 aa, synthetic construct
MALPVTALLLPLALLLHAARPLEDKQLDADVSPKPTIFLPSIAETKLQKAGTYLCLLEKFFPDVIKIHWQEKKSNTILGSQEGNTMKTNDTYMKFSWLTVPEKSLDKEHRCIVRHENNKNGVDQEIIFPPIKTDVITMDPKDNCSKDANDTLLLQLTNTSAYYMYLLLLLKSVVYFAIITCCLLRRTAFCCNGEKSRAKRSGSGATNFSLLKQAGDVEENPGPTSMALPVTALLLPLALLLHAARPDIQMTQSPSSLSASVGDRVTITCKASDHINNWLAWYQQKPGKAPKLLIYGATTLETGVPSRFSGSGSGTDFTLTISSLQPEDFATYYCQQSWNTPWTFGQGTKVEIKRGGGGSGGGGSGGGGSEVQLVESGGGLVQPGGSLRLSCAASGYTFSSYWVNWVRQAPGKGLEWVAQIYPGDGDTNYNGKFKGRFTISRDNSKNTLYLQMNSLRAEDTAVYYCARSITTVVGCAMDYWGQGTLVTVSSTRSQPHTKPSVFVMKNGTNVACLVKEFYPKDIRINLVSSKKITEFDPAIVISPSGKYNAVKLGKYEDSNSVTCSVQHDNKTVHSTDFEVKTDSTDHVKPKETENTKQPSKSCHKPKAIVHTEKVNMMSLTVLGLRMLFAKTVAVNFLLTAKLFFL

SEQ ID NO: 45936 - protein, 799 aa, synthetic construct
MALPVTALLLPLALLLHAARPDIQMTQSPSSLSASVGDRVTITCKASDHINNWLAWYQQKPGKAPKLLIYGATTLETGVPSRFSGSGSGTDFTLTISSLQPEDFATYYCQQSWNTPWTFGQGTKVEIKRGQPKANPTVTLFPPSSEELQANKATLVCLISDFYPGAVTVAWKADGSPVKAGVETTKPSKQSNNKYAASSYLSLTPEQWKSHRSYSCQVTHEGSTVEKTVAPTECSGSQSFGLLDPKLCYLLDGILFIYGVILTALFLRVKFSRSADAPAYQQGQNQLYNELNLGRREEYDVLDKRRGRDPEMGGKPQRRKNPQEGLYNELQKDKMAEAYSEIGMKGERRRGKGHDGLYQGLSTATKDTYDALHMQALPPRRAKRSGSGATNFSLLKQAGDVEENPGPTSMDWIWRILFLVGAATGAHSFEEVQLVESGGGLVQPGGSLRLSCAASGYTFSSYWVNWVRQAPGKGLEWVAQIYPGDGDTNYNGKFKGRFTISRDNSKNTLYLQMNSLRAEDTAVYYCARSITTVVGCAMDYWGQGTLVTVSSASTKGPSVFPLAPSSKSTSGGTAALGCLVKDYFPEPVTVSWNSGALTSGVHTFPAVLQSSGLYSLSSVVTVPSSSLGTQTYICNVNHKPSNTKVDKRVEPKSCGTQSFGLLDPKLCYLLDGILFIYGVILTALFLRVKFSRSADAPAYQQGQNQLYNELNLGRREEYDVLDKRRGRDPEMGGKPQRRKNPQEGLYNELQKDKMAEAYSEIGMKGERRRGKGHDGLYQGLSTATKDTYDALHMQALPPR

SEQ ID NO: 45937 - protein, 818 aa, synthetic construct
MALPVTALLLPLALLLHAARPDIQMTQSPSSLSASVGDRVTITCKASDHINNWLAWYQQKPGKAPKLLIYGATTLETGVPSRFSGSGSGTDFTLTISSLQPEDFATYYCQQSWNTPWTFGQGTKVEIKRLEDLKNVFPPEVAVFEPSEAEISHTQKATLVCLATGFYPDHVELSWWVNGKEVHSGVSTDPQPLKEQPALNDSRYCLSSRLRVSATFWQNPRNHFRCQVQFYGLSENDEWTQDRAKPVTQIVSAEAWGRADCGSQSFGLLDPKLCYLLDGILFIYGVILTALFLRVKFSRSADAPAYQQGQNQLYNELNLGRREEYDVLDKRRGRDPEMGGKPQRRKNPQEGLYNELQKDKMAEAYSEIGMKGERRRGKGHDGLYQGLSTATKDTYDALHMQALPPRRAKRSGSGATNFSLLKQAGDVEENPGPTSMDWIWRILFLVGAATGAHSFEEVQLVESGGGLVQPGGSLRLSCAASGYTFSSYWVNWVRQAPGKGLEWVAQIYPGDGDTNYNGKFKGRFTISRDNSKNTLYLQMNSLRAEDTAVYYCARSITTVVGCAMDYWGQGTLVTVSSTRIQNPDPAVYQLRDSKSSDKSVCLFTDFDSQTNVSQSKDSDVYITDKTVLDMRSMDFKSNSAVAWSNKSDFACANAFNNSIIPEDTFFPSPESSCGTQSFGLLDPKLCYLLDGILFIYGVILTALFLRVKFSRSADAPAYQQGQNQLYNELNLGRREEYDVLDKRRGRDPEMGGKPQRRKNPQEGLYNELQKDKMAEAYSEIGMKGERRRGKGHDGLYQGLSTATKDTYDALHMQALPPR

SEQ ID NO: 45938 - protein, 860 aa, synthetic construct
MALPVTALLLPLALLLHAARPDIQMTQSPSSLSASVGDRVTITCKASDHINNWLAWYQQKPGKAPKLLIYGATTLETGVPSRFSGSGSGTDFTLTISSLQPEDFATYYCQQSWNTPWTFGQGTKVEIKRLEEDLKNVFPPEVAVFEPSEAEISHTQKATLVCLATGFYPDHVELSWWVNGKEVHSGVSTDPQPLKEQPALNDSRYCLSSRLRVSATFWQNPRNHFRCQVQFYGLSENDEWTQDRAKPVTQIVSAEAWGRADCGSQSFGLLDPKLCYLLDGILFIYGVILTALFLRVKFSRSADAPAYQQGQNQLYNELNLGRREEYDVLDKRRGRDPEMGGKPQRRKNPQEGLYNELQKDKMAEAYSEIGMKGERRRGKGHDGLYQGLSTATKDTYDALHMQALPPRRAKRSGSGATNFSLLKQAGDVEENPGPTSMDWIWRILFLVGAATGAHSFEEVQLVESGGGLVQPGGSLRLSCAASGYTFSSYWVNWVRQAPGKGLEWVAQIYPGDGDTNYNGKFKGRFTISRDNSKNTLYLQMNSLRAEDTAVYYCARSITTVVGCAMDYWGQGTLVTVSSTRIQNPDPAVYQLRDSKSSDKSVCLFTDFDSQTNVSQSKDSDVYITDKTVLDMRSMDFKSNSAVAWSNKSDFACANAFNNSIIPEDTFFPSPESSCGTQSFGLLDPKLCYLLDGILFIYGVILTALFLRSKRSRLLHSDYMNMTPRRPGPTRKHYQPYAPPRDFAAYRSRVKFSRSADAPAYQQGQNQLYNELNLGRREEYDVLDKRRGRDPEMGGKPQRRKNPQEGLYNELQKDKMAEAYSEIGMKGERRRGKGHDGLYQGLSTATKDTYDALHMQALPPR

SEQ ID NO: 45939 - protein, 903 aa, synthetic construct
MALPVTALLLPLALLLHAARPDIQMTQSPSSLSASVGDRVTITCKASDHINNWLAWYQQKPGKAPKLLIYGATTLETGVPSRFSGSGSGTDFTLTISSLQPEDFATYYCQQSWNTPWTFGQGTKVEIKRLEEDLKNVFPPEVAVFEPSEAEISHTQKATLVCLATGFYPDHVELSWWVNGKEVHSGVSTDPQPLKEQPALNDSRYCLSSRLRVSATFWQNPRNHFRCQVQFYGLSENDEWTQDRAKPVTQIVSAEAWGRADCGSQSFGLLDPKLCYLLDGILFIYGVILTALFLKRGRKKLLYIFKQPFMRPVQTTQEEDGCSCRFPEEEEGGCELRVKFSRSADAPAYQQGQNQLYNELNLGRREEYDVLDKRRGRDPEMGGKPQRRKNPQEGLYNELQKDKMAEAYSEIGMKGERRRGKGHDGLYQGLSTATKDTYDALHMQALPPRRAKRSGSGATNFSLLKQAGDVEENPGPTSMDWIWRILFLVGAATGAHSFEEVQLVESGGGLVQPGGSLRLSCAASGYTFSSYWVNWVRQAPGKGLEWVAQIYPGDGDTNYNGKFKGRFTISRDNSKNTLYLQMNSLRAEDTAVYYCARSITTVVGCAMDYWGQGTLVTVSSTRIQNPDPAVYQLRDSKSSDKSVCLFTDFDSQTNVSQSKDSDVYITDKTVLDMRSMDFKSNSAVAWSNKSDFACANAFNNSIIPEDTFFPSPESSCGTQSFGLLDPKLCYLLDGILFIYGVILTALFLKRGRKKLLYIFKQPFMRPVQTTQEEDGCSCRFPEEEEGGCELRVKFSRSADAPAYQQGQNQLYNELNLGRREEYDVLDKRRGRDPEMGGKPQRRKNPQEGLYNELQKDKMAEAYSEIGMKGERRRGKGHDGLYQGLSTATKDTYDALHMQALPPR

SEQ ID NO: 45940 - protein, 590 aa, synthetic construct
MALPVTALLLPLALLLHAARPDIQMTQSPSSLSASVGDRVTITCKASDHINNWLAWYQQKPGKAPKLLIYGATTLETGVPSRFSGSGSGTDFTLTISSLQPEDFATYYCQQSWNTPWTFGQGTKVEIKRLEQSFGLLDPKLCYLLDGILFIYGVILTALFLRVKFSRSADAPAYQQGQNQLYNELNLGRREEYDVLDKRRGRDPEMGGKPQRRKNPQEGLYNELQKDKMAEAYSEIGMKGERRRGKGHDGLYQGLSTATKDTYDALHMQALPPRRAKRSGSGATNFSLLKQAGDVEENPGPTSMDWIWRILFLVGAATGAHSFEEVQLVESGGGLVQPGGSLRLSCAASGYTFSSYWVNWVRQAPGKGLEWVAQIYPGDGDTNYNGKFKGRFTISRDNSKNTLYLQMNSLRAEDTAVYYCARSITTVVGCAMDYWGQGTLVTVSSTRQSFGLLDPKLCYLLDGILFIYGVILTALFLRVKFSRSADAPAYQQGQNQLYNELNLGRREEYDVLDKRRGRDPEMGGKPQRRKNPQEGLYNELQKDKMAEAYSEIGMKGERRRGKGHDGLYQGLSTATKDTYDALHMQALPPR

SEQ ID NO: 45941 - protein, 648 aa, synthetic construct
MALPVTALLLPLALLLHAARPDIQMTQSPSSLSASVGDRVTITCKASDHINNWLAWYQQKPGKAPKLLIYGATTLETGVPSRFSGSGSGTDFTLTISSLQPEDFATYYCQQSWNTPWTFGQGTKVEIKRLEGQPKANPTVTLFPPSSEELQANKATLVCLISDFYPGAVTVAWKADGSPVKAGVETTKPSKQSNNKYAASSYLSLTPEQWKSHRSYSCQVTHEGSTVEKTVAPTECSPIKTDVITMDPKDNCSKDANDTLLLQLTNTSAYYMYLLLLLKSVVYFAIITCCLLRRTAFCCNGEKSRAKRSGSGATNFSLLKQAGDVEENPGPTSMDWIWRILFLVGAATGAHSFEEVQLVESGGGLVQPGGSLRLSCAASGYTFSSYWVNWVRQAPGKGLEWVAQIYPGDGDTNYNGKFKGRFTISRDNSKNTLYLQMNSLRAEDTAVYYCARSITTVVGCAMDYWGQGTLVTVSSTRASTKGPSVFPLAPSSKSTSGGTAALGCLVKDYFPEPVTVSWNSGALTSGVHTFPAVLQSSGLYSLSSVVTVPSSSLGTQTYICNVNHKPSNTKVDKRVEPKSCEVKTDSTDHVKPKETENTKQPSKSCHKPKAIVHTEKVNMMSLTVLGLRMLFAKTVAVNFLLTAKLFFL

SEQ ID NO: 45942 - protein, 626 aa, synthetic construct
MALPVTALLLPLALLLHAARPDIQMTQSPSSLSASVGDRVTITCKASDHINNWLAWYQQKPGKAPKLLIYGATTLETGVPSRFSGSGSGTDFTLTISSLQPEDFATYYCQQSWNTPWTFGQGTKVEIKRLEGQPKANPTVTLFPPSSEELQANKATLVCLISDFYPGAVTVAWKADGSPVKAGVETTKPSKQSNNKYAASSYLSLTPEQWKSHRSYSCQVTHEGSTVEKTVAPTECSGRADCGITSASYHQGVLSATILYEILLGKATLYAVLVSALVLMAMVKRKDSRGRAKRSGSGATNFSLLKQAGDVEENPGPTSMDWIWRILFLVGAATGAHSFEEVQLVESGGGLVQPGGSLRLSCAASGYTFSSYWVNWVRQAPGKGLEWVAQIYPGDGDTNYNGKFKGRFTISRDNSKNTLYLQMNSLRAEDTAVYYCARSITTVVGCAMDYWGQGTLVTVSSTRASTKGPSVFPLAPSSKSTSGGTAALGCLVKDYFPEPVTVSWNSGALTSGVHTFPAVLQSSGLYSLSSVVTVPSSSLGTQTYICNVNHKPSNTKVDKRVEPKSCIPEDTFFPSSDVPCDVKLVEKSFETDTNLNFQNLSVIGFRILLLKVAGFNLLMTLRLWSS

SEQ ID NO: 45943 - protein, 626 aa, synthetic construct
MALPVTALLLPLALLLHAARPDIQMTQSPSSLSASVGDRVTITCKASDHINNWLAWYQQKPGKAPKLLIYGATTLETGVPSRFSGSGSGTDFTLTISSLQPEDFATYYCQQSWNTPWTFGQGTKVEIKRLEGQPKANPTVTLFPPSSEELQANKATLVCLISDFYPGAVTVAWKADGSPVKAGVETTKPSKQSNNKYAASSYLSLTPEQWKSHRSYSCQVTHEGSTVEKTVAPTECSGRADCGFTSESYQQGVLSATILYEILLGKATLYAVLVSALVLMAMVKRKDSRGRAKRSGSGATNFSLLKQAGDVEENPGPTSMDWIWRILFLVGAATGAHSFEEVQLVESGGGLVQPGGSLRLSCAASGYTFSSYWVNWVRQAPGKGLEWVAQIYPGDGDTNYNGKFKGRFTISRDNSKNTLYLQMNSLRAEDTAVYYCARSITTVVGCAMDYWGQGTLVTVSSTRASTKGPSVFPLAPSSKSTSGGTAALGCLVKDYFPEPVTVSWNSGALTSGVHTFPAVLQSSGLYSLSSVVTVPSSSLGTQTYICNVNHKPSNTKVDKRVEPKSCIPEDTFFPSPESSCDVKLVEKSFETDTNLNFQNLSVIGFRILLLKVAGFNLLMTLRLWSS

SEQ ID NO: 45944 - protein, 452 aa, synthetic construct
MALPVTALLLPLALLLHAARPDIQMTQSPSSLSASVGDRVTITCKASDHINNWLAWYQQKPGKAPKLLIYGATTLETGVPSRFSGSGSGTDFTLTISSLQPEDFATYYCQQSWNTPWTFGQGTKVEIKRGGGGSGGGGSGGGGSEVQLVESGGGLVQPGGSLRLSCAASGYTFSSYWVNWVRQAPGKGLEWVAQIYPGDGDTNYNGKFKGRFTISRDNSKNTLYLQMNSLRAEDTAVYYCARSITTVVGCAMDYWGQGTLVTVSSTRDGNEEMGGITQTPYKVSISGTTVILTCPQYPGSEILWQHNDKNIGGDEDDKNIGSDEDHLSLKEFSELEQSGYYVCYPRGSKPEDANFYLYLRARVCENCMEMDVMSVATIVIVDICITGGLLLLVYYWSKNRKAKAKPVTRGAGAGGRQRGQNKERPPPVPNPDYEPIRKGQRDLYSGLNQRRI

SEQ ID NO: 45945 - protein, 417 aa, synthetic construct
MALPVTALLLPLALLLHAARPDIQMTQSPSSLSASVGDRVTITCKASDHINNWLAWYQQKPGKAPKLLIYGATTLETGVPSRFSGSGSGTDFTLTISSLQPEDFATYYCQQSWNTPWTFGQGTKVEIKRGGGGSGGGGSGGGGSEVQLVESGGGLVQPGGSLRLSCAASGYTFSSYWVNWVRQAPGKGLEWVAQIYPGDGDTNYNGKFKGRFTISRDNSKNTLYLQMNSLRAEDTAVYYCARSITTVVGCAMDYWGQGTLVTVSSTRFKIPIEELEDRVFVNCNTSITWVEGTVGTLLSDITRLDLGKRILDPRGIYRCNGTDIYKDKESTVQVHYRMCQSCVELDPATVAGIIVTDVIATLLLALGVFCFAGHETGRLSGAADTQALLRNDQVYQPLRDRDDAQYSHLGGNWARNK

SEQ ID NO: 45946 - protein, 427 aa, synthetic construct
MALPVTALLLPLALLLHAARPDIQMTQSPSSLSASVGDRVTITCKASDHINNWLAWYQQKPGKAPKLLIYGATTLETGVPSRFSGSGSGTDFTLTISSLQPEDFATYYCQQSWNTPWTFGQGTKVEIKRGGGGSGGGGSGGGGSEVQLVESGGGLVQPGGSLRLSCAASGYTFSSYWVNWVRQAPGKGLEWVAQIYPGDGDTNYNGKFKGRFTISRDNSKNTLYLQMNSLRAEDTAVYYCARSITTVVGCAMDYWGQGTLVTVSSTRQSIKGNHLVKVYDYQEDGSVLLTCDAEAKNITWFKDGKMIGFLTEDKKKWNLGSNAKDPRGMYQCKGSQNKSKPLQVYYRMCQNCIELNAATISGFLFAEIVSIFVLAVGVYFIAGQDGVRQSRASDKQTLLPNDQLYQPLKDREDDQYSHLQGNQLRRN

SEQ ID NO: 45947 - protein, 410 aa, synthetic construct
MALPVTALLLPLALLLHAARPDIQMTQSPSSLSASVGDRVTITCKASDHINNWLAWYQQKPGKAPKLLIYGATTLETGVPSRFSGSGSGTDFTLTISSLQPEDFATYYCQQSWNTPWTFGQGTKVEIKRGGGGSGGGGSGGGGSEVQLVESGGGLVQPGGSLRLSCAASGYTFSSYWVNWVRQAPGKGLEWVAQIYPGDGDTNYNGKFKGRFTISRDNSKNTLYLQMNSLRAEDTAVYYCARSITTVVGCAMDYWGQGTLVTVSSTRQSFGLLDPKLCYLLDGILFIYGVILTALFLRVKFSRSADAPAYQQGQNQLYNELNLGRREEYDVLDKRRGRDPEMGGKPQRRKNPQEGLYNELQKDKMAEAYSEIGMKGERRRGKGHDGLYQGLSTATKDTYDALHMQALPPR

SEQ ID NO: 45948 - protein, 505 aa, synthetic construct
MALPVTALLLPLALLLHAARPDIQMTQSPSSLSASVGDRVTITCKASDHINNWLAWYQQKPGKAPKLLIYGATTLETGVPSRFSGSGSGTDFTLTISSLQPEDFATYYCQQSWNTPWTFGQGTKVEIKRGGGGSGGGGSGGGGSEVQLVESGGGLVQPGGSLRLSCAASGYTFSSYWVNWVRQAPGKGLEWVAQIYPGDGDTNYNGKFKGRFTISRDNSKNTLYLQMNSLRAEDTAVYYCARSITTVVGCAMDYWGQGTLVTVSSTRGMRTEDLPKAVVFLEPQWYRVLEKDSVTLKCQGAYSPEDNSTQWFHNESLISSQASSYFIDAATVDDSGEYRCQTNLSTLSDPVQLEVHIGWLLLQAPRWVFKEEDPIHLRCHSWKNTALHKVTYLQNGKGRKYFHHNSDFYIPKATLKDSGSYFCRGLVGSKNVSSETVNITITQGLAVPTISSFFPPGYQVSFCLVMVLLFAVDTGLYFSVKTNIRSSTRDWKDHKFKWRKDPQDK

SEQ ID NO: 45949 - protein, 480 aa, synthetic construct
MALPVTALLLPLALLLHAARPDIQMTQSPSSLSASVGDRVTITCKASDHINNWLAWYQQKPGKAPKLLIYGATTLETGVPSRFSGSGSGTDFTLTISSLQPEDFATYYCQQSWNTPWTFGQGTKVEIKRGGGGSGGGGSGGGGSEVQLVESGGGLVQPGGSLRLSCAASGYTFSSYWVNWVRQAPGKGLEWVAQIYPGDGDTNYNGKFKGRFTISRDNSKNTLYLQMNSLRAEDTAVYYCARSITTVVGCAMDYWGQGTLVTVSSTRGMRTEDLPKAVVFLEPQWYRVLEKDSVTLKCQGAYSPEDNSTQWFHNESLISSQASSYFIDAATVDDSGEYRCQTNLSTLSDPVQLEVHIGWLLLQAPRWVFKEEDPIHLRCHSWKNTALHKVTYLQNGKGRKYFHHNSDFYIPKATLKDSGSYFCRGLVGSKNVSSETVNITITQGLAVPTISSFFPPGYQVSFCLVMVLLFAVDTGLYFSV

SEQ ID NO: 45950 - protein, 481 aa, synthetic construct
MALPVTALLLPLALLLHAARPDIQMTQSPSSLSASVGDRVTITCKASDHINNWLAWYQQKPGKAPKLLIYGATTLETGVPSRFSGSGSGTDFTLTISSLQPEDFATYYCQQSWNTPWTFGQGTKVEIKRGGGGSGGGGSGGGGSEVQLVESGGGLVQPGGSLRLSCAASGYTFSSYWVNWVRQAPGKGLEWVAQIYPGDGDTNYNGKFKGRFTISRDNSKNTLYLQMNSLRAEDTAVYYCARSITTVVGCAMDYWGQGTLVTVSSTRGMRTEDLPKAVVFLEPQWYRVLEKDSVTLKCQGAYSPEDNSTQWFHNESLISSQASSYFIDAATVDDSGEYRCQTNLSTLSDPVQLEVHIGWLLLQAPRWVFKEEDPIHLRCHSWKNTALHKVTYLQNGKGRKYFHHNSDFYIPKATLKDSGSYFCRGLVGSKNVSSETVNITITQGLAVPTISSFFPPGYQVSFCLVMVLLFAVDTGLYFSVK

SEQ ID NO: 45951 - protein, 725 aa, synthetic construct
MALPVTALLLPLALLLHAARPDIQMTQSPSSLSASVGDRVTITCKASDHINNWLAWYQQKPGKAPKLLIYGATTLETGVPSRFSGSGSGTDFTLTISSLQPEDFATYYCQQSWNTPWTFGQGTKVEIKRLEGQPKANPTVTLFPPSSEELQANKATLVCLISDFYPGAVTVAWKADGSPVKAGVETTKPSKQSNNKYAASSYLSLTPEQWKSHRSYSCQVTHEGSTVEKTVAPTECSGSQSFGLLDPKLCYLLDGILFIYGVILTALFLRVKFSRSADAPAYQQGQNQLYNELNLGRREEYDVLDKRRGRDPEMGGKPQRRKNPQEGLYNELQKDKMAEAYSEIGMKGERRRGKGHDGLYQGLSTATKDTYDALHMQALPPRRAKRSGSGATNFSLLKQAGDVEENPGPTSMDWIWRILFLVGAATGAHSFEEVQLVESGGGLVQPGGSLRLSCAASGYTFSSYWVNWVRQAPGKGLEWVAQIYPGDGDTNYNGKFKGRFTISRDNSKNTLYLQMNSLRAEDTAVYYCARSITTVVGCAMDYWGQGTLVTVSSTRASTKGPSVFPLAPSSKSTSGGTAALGCLVKDYFPEPVTVSWNSGALTSGVHTFPAVLQSSGLYSLSSVVTVPSSSLGTQTYICNVNHKPSNTKVDKRVEPKSCGTITQGLAVSTISSFFPPGYQVSFCLVMVLLFAVDTGLYFSVKTNIRSSTRDWKDHKFKWRKDPQDK

SEQ ID NO: 45952 - protein, 740 aa, synthetic construct
MALPVTALLLPLALLLHAARPDIQMTQSPSSLSASVGDRVTITCKASDHINNWLAWYQQKPGKAPKLLIYGATTLETGVPSRFSGSGSGTDFTLTISSLQPEDFATYYCQQSWNTPWTFGQGTKVEIKRLEDLKNVFPPEVAVFEPSEAEISHTQKATLVCLATGFYPDHVELSWWVNGKEVHSGVSTDPQPLKEQPALNDSRYCLSSRLRVSATFWQNPRNHFRCQVQFYGLSENDEWTQDRAKPVTQIVSAEAWGRADCGSQSFGLLDPKLCYLLDGILFIYGVILTALFLRVKFSRSADAPAYQQGQNQLYNELNLGRREEYDVLDKRRGRDPEMGGKPQRRKNPQEGLYNELQKDKMAEAYSEIGMKGERRRGKGHDGLYQGLSTATKDTYDALHMQALPPRRAKRSGSGATNFSLLKQAGDVEENPGPTSMDWIWRILFLVGAATGAHSFEEVQLVESGGGLVQPGGSLRLSCAASGYTFSSYWVNWVRQAPGKGLEWVAQIYPGDGDTNYNGKFKGRFTISRDNSKNTLYLQMNSLRAEDTAVYYCARSITTVVGCAMDYWGQGTLVTVSSTRIQNPDPAVYQLRDSKSSDKSVCLFTDFDSQTNVSQSKDSDVYITDKTVLDMRSMDFKSNSAVAWSNKSDFACANAFNNSIIPEDTFFPSPESSCGTITQGLAVSTISSFFPPGYQVSFCLVMVLLFAVDTGLYFSVKTNIRSSTRDWKDHKFKWRKDPQDK

SEQ ID NO: 45953 - protein, 715 aa, synthetic construct
MALPVTALLLPLALLLHAARPDIQMTQSPSSLSASVGDRVTITCKASDHINNWLAWYQQKPGKAPKLLIYGATTLETGVPSRFSGSGSGTDFTLTISSLQPEDFATYYCQQSWNTPWTFGQGTKVEIKRLEDLKNVFPPEVAVFEPSEAEISHTQKATLVCLATGFYPDHVELSWWVNGKEVHSGVSTDPQPLKEQPALNDSRYCLSSRLRVSATFWQNPRNHFRCQVQFYGLSENDEWTQDRAKPVTQIVSAEAWGRADCGSQSFGLLDPKLCYLLDGILFIYGVILTALFLRVKFSRSADAPAYQQGQNQLYNELNLGRREEYDVLDKRRGRDPEMGGKPQRRKNPQEGLYNELQKDKMAEAYSEIGMKGERRRGKGHDGLYQGLSTATKDTYDALHMQALPPRRAKRSGSGATNFSLLKQAGDVEENPGPTSMDWIWRILFLVGAATGAHSFEEVQLVESGGGLVQPGGSLRLSCAASGYTFSSYWVNWVRQAPGKGLEWVAQIYPGDGDTNYNGKFKGRFTISRDNSKNTLYLQMNSLRAEDTAVYYCARSITTVVGCAMDYWGQGTLVTVSSTRIQNPDPAVYQLRDSKSSDKSVCLFTDFDSQTNVSQSKDSDVYITDKTVLDMRSMDFKSNSAVAWSNKSDFACANAFNNSIIPEDTFFPSPESSCGTITQGLAVSTISSFFPPGYQVSFCLVMVLLFAVDTGLYFSV

SEQ ID NO: 45954 - protein, 716 aa, synthetic construct
MALPVTALLLPLALLLHAARPDIQMTQSPSSLSASVGDRVTITCKASDHINNWLAWYQQKPGKAPKLLIYGATTLETGVPSRFSGSGSGTDFTLTISSLQPEDFATYYCQQSWNTPWTFGQGTKVEIKRLEDLKNVFPPEVAVFEPSEAEISHTQKATLVCLATGFYPDHVELSWWVNGKEVHSGVSTDPQPLKEQPALNDSRYCLSSRLRVSATFWQNPRNHFRCQVQFYGLSENDEWTQDRAKPVTQIVSAEAWGRADCGSQSFGLLDPKLCYLLDGILFIYGVILTALFLRVKFSRSADAPAYQQGQNQLYNELNLGRREEYDVLDKRRGRDPEMGGKPQRRKNPQEGLYNELQKDKMAEAYSEIGMKGERRRGKGHDGLYQGLSTATKDTYDALHMQALPPRRAKRSGSGATNFSLLKQAGDVEENPGPTSMDWIWRILFLVGAATGAHSFEEVQLVESGGGLVQPGGSLRLSCAASGYTFSSYWVNWVRQAPGKGLEWVAQIYPGDGDTNYNGKFKGRFTISRDNSKNTLYLQMNSLRAEDTAVYYCARSITTVVGCAMDYWGQGTLVTVSSTRIQNPDPAVYQLRDSKSSDKSVCLFTDFDSQTNVSQSKDSDVYITDKTVLDMRSMDFKSNSAVAWSNKSDFACANAFNNSIIPEDTFFPSPESSCGTITQGLAVSTISSFFPPGYQVSFCLVMVLLFAVDTGLYFSVK

SEQ ID NO: 45955 - protein, 717 aa, synthetic construct
MALPVTALLLPLALLLHAARPDIQMTQSPSSLSASVGDRVTITCKASDHINNWLAWYQQKPGKAPKLLIYGATTLETGVPSRFSGSGSGTDFTLTISSLQPEDFATYYCQQSWNTPWTFGQGTKVEIKRLEDLKNVFPPEVAVFEPSEAEISHTQKATLVCLATGFYPDHVELSWWVNGKEVHSGVSTDPQPLKEQPALNDSRYCLSSRLRVSATFWQNPRNHFRCQVQFYGLSENDEWTQDRAKPVTQIVSAEAWGRADCGSQSFGLLDPKLCYLLDGILFIYGVILTALFLRVKFSRSADAPAYQQGQNQLYNELNLGRREEYDVLDKRRGRDPEMGGKPQRRKNPQEGLYNELQKDKMAEAYSEIGMKGERRRGKGHDGLYQGLSTATKDTYDALHMQALPPRRAKRSGSGATNFSLLKQAGDVEENPGPTSMDWIWRILFLVGAATGAHSFEEVQLVESGGGLVQPGGSLRLSCAASGYTFSSYWVNWVRQAPGKGLEWVAQIYPGDGDTNYNGKFKGRFTISRDNSKNTLYLQMNSLRAEDTAVYYCARSITTVVGCAMDYWGQGTLVTVSSTRIQNPDPAVYQLRDSKSSDKSVCLFTDFDSQTNVSQSKDSDVYITDKTVLDMRSMDFKSNSAVAWSNKSDFACANAFNNSIIPEDTFFPSPESSCGTITQGLAVSTISSFFPPGYQVSFCLVMVLLFAVDTGLYFSVKT

SEQ ID NO: 45956 - protein, 653 aa, synthetic construct
MALPVTALLLPLALLLHAARPDIQMTQSPSSLSASVGDRVTITCKASDHINNWLAWYQQKPGKAPKLLIYGATTLETGVPSRFSGSGSGTDFTLTISSLQPEDFATYYCQQSWNTPWTFGQGTKVEIKRLEGQPKANPTVTLFPPSSEELQANKATLVCLISDFYPGAVTVAWKADGSPVKAGVETTKPSKQSNNKYAASSYLSLTPEQWKSHRSYSCQVTHEGSTVEKTVAPTECSGSLGEPQLCYILDAILFLYGIVLTLLYCRLKIQVRKAAITSYEKSDGVYTGLSTRNQETYETLKHEKPPQRAKRSGSGATNFSLLKQAGDVEENPGPTSMDWIWRILFLVGAATGAHSFEEVQLVESGGGLVQPGGSLRLSCAASGYTFSSYWVNWVRQAPGKGLEWVAQIYPGDGDTNYNGKFKGRFTISRDNSKNTLYLQMNSLRAEDTAVYYCARSITTVVGCAMDYWGQGTLVTVSSTRASTKGPSVFPLAPSSKSTSGGTAALGCLVKDYFPEPVTVSWNSGALTSGVHTFPAVLQSSGLYSLSSVVTVPSSSLGTQTYICNVNHKPSNTKVDKRVEPKSCGTLGEPQLCYILDAILFLYGIVLTLLYCRLKIQVRKAAITSYEKSDGVYTGLSTRNQETYETLKHEKPPQ

SEQ ID NO: 45957 - protein, 623 aa, synthetic construct
MALPVTALLLPLALLLHAARPDIQMTQSPSSLSASVGDRVTITCKASDHINNWLAWYQQKPGKAPKLLIYGATTLETGVPSRFSGSGSGTDFTLTISSLQPEDFATYYCQQSWNTPWTFGQGTKVEIKRLEDLKNVFPPEVAVFEPSEAEISHTQKATLVCLATGFYPDHVELSWWVNGKEVHSGVCTDPQPLKEQPALNDSRYCLSSRLRVSATFWQNPRNHFRCQVQFYGLSENDEWTQDRAKPVTQIVSAEAWGRADCGFTSESYQQGVLSAYYMYLLLLLKSVVYFAIITCCLLRRTAFCCNGEKSRAKRSGSGATNFSLLKQAGDVEENPGPTSMDWIWRILFLVGAATGAHSFEEVQLVESGGGLVQPGGSLRLSCAASGYTFSSYWVNWVRQAPGKGLEWVAQIYPGDGDTNYNGKFKGRFTISRDNSKNTLYLQMNSLRAEDTAVYYCARSITTVVGCAMDYWGQGTLVTVSSTRIQNPDPAVYQLRDSKSSDKSVCLFTDFDSQTNVSQSKDSDVYITDKCVLDMRSMDFKSNSAVAWSNKSDFACANAFNNSIIPEDTFFPSPESSCDVKLVEKSFETDTNLNFQNLSVIGFRILLLKVAGFNLLMTLRLWSS

SEQ ID NO: 45958 - protein, 629 aa, synthetic construct
MALPVTALLLPLALLLHAARPDIQMTQSPSSLSASVGDRVTITCKASDHINNWLAWYQQKPGKAPKLLIYGATTLETGVPSRFSGSGSGTDFTLTISSLQPEDFATYYCQQSWNTPWTFGQGTKVEIKRLEDKQLDADVSPKPTIFLPSIAETKLQKAGTYLCLLEKFFPDVIKIHWQEKKSNTILGSQEGNTMKTNDTYMKFSWLTVPEKSLDKEHRCIVRHENNKNGVDQEIIFPPIKTDVITMDPKDNCSKDANDTLLLQLTNTSAYYMYEILLGKATLYAVLVSALVLMAMVKRKDSRGRAKRSGSGATNFSLLKQAGDVEENPGPTSMDWIWRILFLVGAATGAHSFEEVQLVESGGGLVQPGGSLRLSCAASGYTFSSYWVNWVRQAPGKGLEWVAQIYPGDGDTNYNGKFKGRFTISRDNSKNTLYLQMNSLRAEDTAVYYCARSITTVVGCAMDYWGQGTLVTVSSTRSQPHTKPSVFVMKNGTNVACLVKEFYPKDIRINLVSSKKITEFDPAIVISPSGKYNAVKLGKYEDSNSVTCSVQHDNKTVHSTDFEVKTDSTDHVKPKETENTKQPSKSCHKPKAIVHTEKVNMMSLTVIGFRILLLKVAGFNLLMTLRLWSS

SEQ ID NO: 45959 - protein, 629 aa, synthetic construct
MALPVTALLLPLALLLHAARPDIQMTQSPSSLSASVGDRVTITCKASDHINNWLAWYQQKPGKAPKLLIYGATTLETGVPSRFSGSGSGTDFTLTISSLQPEDFATYYCQQSWNTPWTFGQGTKVEIKRLEDKQLDADVSPKPTIFLPSIAETKLQKAGTYLCLLEKFFPDVIKIHWQEKKSNTILGSQEGNTMKTNDTYMKFSWLTVPEKSLDKEHRCIVRHENNKNGVDQEIIFPPIKTDVITMDPKDNCSKDANDTLLLQLTNTSATILYEILLGKATLYAVLVSALVLMAMVKRKDSRGRAKRSGSGATNFSLLKQAGDVEENPGPTSMDWIWRILFLVGAATGAHSFEEVQLVESGGGLVQPGGSLRLSCAASGYTFSSYWVNWVRQAPGKGLEWVAQIYPGDGDTNYNGKFKGRFTISRDNSKNTLYLQMNSLRAEDTAVYYCARSITTVVGCAMDYWGQGTLVTVSSTRSQPHTKPSVFVMKNGTNVACLVKEFYPKDIRINLVSSKKITEFDPAIVISPSGKYNAVKLGKYEDSNSVTCSVQHDNKTVHSTDFEVKTDSTDHVKPKETENTKQPSKSCHKPKAIVHTEKVNMMSLTVIGFRILLLKVAGFNLLMTLRLWSS

SEQ ID NO: 45960 - protein, 629 aa, synthetic construct
MALPVTALLLPLALLLHAARPDIQMTQSPSSLSASVGDRVTITCKASDHINNWLAWYQQKPGKAPKLLIYGATTLETGVPSRFSGSGSGTDFTLTISSLQPEDFATYYCQQSWNTPWTFGQGTKVEIKRLEDKQLDADVSPKPTIFLPSIAETKLQKAGTYLCLLEKFFPDVIKIHWQEKKSNTILGSQEGNTMKTNDTYMKFSWLTVPEKSLDKEHRCIVRHENNKNGVDQEIIFPPIKTDVITMDPKDNCSKDANDTLLLQLTNTSAYYMYEILLGKATLYAVLVSALVLMAMVKRKDSRGRAKRSGSGATNFSLLKQAGDVEENPGPTSMDWIWRILFLVGAATGAHSFEEVQLVESGGGLVQPGGSLRLSCAASGYTFSSYWVNWVRQAPGKGLEWVAQIYPGDGDTNYNGKFKGRFTISRDNSKNTLYLQMNSLRAEDTAVYYCARSITTVVGCAMDYWGQGTLVTVSSTRSQPHTKPSVFVMKNGTNVACLVKEFYPKDIRINLVSSKKITEFDPAIVISPSGKYNAVKLGKYEDSNSVTCSVQHDNKTVHSTDFEVKTDSTDHVKPKETENTKQPSKSCHKPKAIVHTEKVNMMSLTVLGFRILLLKVAGFNLLMTLRLWSS

SEQ ID NO: 45961 - protein, 629 aa, synthetic construct
MALPVTALLLPLALLLHAARPDIQMTQSPSSLSASVGDRVTITCKASDHINNWLAWYQQKPGKAPKLLIYGATTLETGVPSRFSGSGSGTDFTLTISSLQPEDFATYYCQQSWNTPWTFGQGTKVEIKRLEDKQLDADVSPKPTIFLPSIAETKLQKAGTYLCLLEKFFPDVIKIHWQEKKSNTILGSQEGNTMKTNDTYMKFSWLTVPEKSLDKEHRCIVRHENNKNGVDQEIIFPPIKTDVITMDPKDNCSKDANDTLLLQLTNTSATILYEILLGKATLYAVLVSALVLMAMVKRKDSRGRAKRSGSGATNFSLLKQAGDVEENPGPTSMDWIWRILFLVGAATGAHSFEEVQLVESGGGLVQPGGSLRLSCAASGYTFSSYWVNWVRQAPGKGLEWVAQIYPGDGDTNYNGKFKGRFTISRDNSKNTLYLQMNSLRAEDTAVYYCARSITTVVGCAMDYWGQGTLVTVSSTRSQPHTKPSVFVMKNGTNVACLVKEFYPKDIRINLVSSKKITEFDPAIVISPSGKYNAVKLGKYEDSNSVTCSVQHDNKTVHSTDFEVKTDSTDHVKPKETENTKQPSKSCHKPKAIVHTEKVNMMSLTVLGFRILLLKVAGFNLLMTLRLWSS

SEQ ID NO: 45962 - protein, 623 aa, synthetic construct
MALPVTALLLPLALLLHAARPDIQMTQSPSSLSASVGDRVTITCKASDHINNWLAWYQQKPGKAPKLLIYGATTLETGVPSRFSGSGSGTDFTLTISSLQPEDFATYYCQQSWNTPWTFGQGTKVEIKRLEDLKNVFPPEVAVFEPSEAEISHTQKATLVCLATGFYPDHVELSWWVNGKEVHSGVCTDPQPLKEQPALNDSRYCLSSRLRVSATFWQNPRNHFRCQVQFYGLSENDEWTQDRAKPVTQIVSAEAWGRADCGFTSESYQQGVLSATILYLLLLLKSVVYFAIITCCLLRRTAFCCNGEKSRAKRSGSGATNFSLLKQAGDVEENPGPTSMDWIWRILFLVGAATGAHSFEEVQLVESGGGLVQPGGSLRLSCAASGYTFSSYWVNWVRQAPGKGLEWVAQIYPGDGDTNYNGKFKGRFTISRDNSKNTLYLQMNSLRAEDTAVYYCARSITTVVGCAMDYWGQGTLVTVSSTRIQNPDPAVYQLRDSKSSDKSVCLFTDFDSQTNVSQSKDSDVYITDKCVLDMRSMDFKSNSAVAWSNKSDFACANAFNNSIIPEDTFFPSPESSCDVKLVEKSFETDTNLNFQNLSVIGLRMLFAKTVAVNFLLTAKLFFL

SEQ ID NO: 45963 - protein, 652 aa, synthetic construct
MALPVTALLLPLALLLHAARPDIQMTQSPSSLSASVGDRVTITCKASDHINNWLAWYQQKPGKAPKLLIYGATTLETGVPSRFSGSGSGTDFTLTISSLQPEDFATYYCQQSWNTPWTFGQGTKVEIKRLEDLKNVFPPEVAVFEPSEAEISHTQKATLVCLATGFYPDHVELSWWVNGKEVHSGVSTDPQPLKEQPALNDSRYCLSSRLRVSATFWQNPRNHFRCQVQFYGLSENDEWTQDRAKPVTQIVSAEAWGRADCGSSKDANDTLLLQLTNTSAYYMYLLLLLKSVVYFAIITCCLLRRTAFCCNGEKSRAKRSGSGATNFSLLKQAGDVEENPGPTSMDWIWRILFLVGAATGAHSFEEVQLVESGGGLVQPGGSLRLSCAASGYTFSSYWVNWVRQAPGKGLEWVAQIYPGDGDTNYNGKFKGRFTISRDNSKNTLYLQMNSLRAEDTAVYYCARSITTVVGCAMDYWGQGTLVTVSSTRIQNPDPAVYQLRDSKSSDKSVCLFTDFDSQTNVSQSKDSDVYITDKTVLDMRSMDFKSNSAVAWSNKSDFACANAFNNSIIPEDTFFPSPESSCGTEVKTDSTDHVKPKETENTKQPSKSCHKPKAIVHTEKVNMMSLTVLGLRMLFAKTVAVNFLLTAKLFFL

SEQ ID NO: 45964 - protein, 622 aa, synthetic construct
MALPVTALLLPLALLLHAARPDIQMTQSPSSLSASVGDRVTITCKASDHINNWLAWYQQKPGKAPKLLIYGATTLETGVPSRFSGSGSGTDFTLTISSLQPEDFATYYCQQSWNTPWTFGQGTKVEIKRLEDLKNVFPPEVAVFEPSEAEISHTQKATLVCLATGFYPDHVELSWWVNGKEVHSGVCTDPQPLKEQPALNDSRYCLSSRLRVSATFWQNPRNHFRCQVQFYGLSENDEWTQDRAKPVTQIVSAEAWGRADCDVKLVEKSFETDTNLNFQNLSVIGFRILLLKVAGFNLLMTLRLWSSRAKRSGSGATNFSLLKQAGDVEENPGPTSMDWIWRILFLVGAATGAHSFEEVQLVESGGGLVQPGGSLRLSCAASGYTFSSYWVNWVRQAPGKGLEWVAQIYPGDGDTNYNGKFKGRFTISRDNSKNTLYLQMNSLRAEDTAVYYCARSITTVVGCAMDYWGQGTLVTVSSTRIQNPDPAVYQLRDSKSSDKSVCLFTDFDSQTNVSQSKDSDVYITDKCVLDMRSMDFKSNSAVAWSNKSDFACANAFNNSIIPEDTFFPSPESSCGFTSESYQQGVLSATILYEILLGKATLYAVLVSALVLMAMVKRKDSRG

SEQ ID NO: 45965 - protein, 622 aa, synthetic construct
MALPVTALLLPLALLLHAARPDIQMTQSPSSLSASVGDRVTITCKASDHINNWLAWYQQKPGKAPKLLIYGATTLETGVPSRFSGSGSGTDFTLTISSLQPEDFATYYCQQSWNTPWTFGQGTKVEIKRLEDLKNVFPPEVAVFEPSEAEISHTQKATLVCLATGFYPDHVELSWWVNGKEVHSGVCTDPQPLKEQPALNDSRYCLSSRLRVSATFWQNPRNHFRCQVQFYGLSENDEWTQDRAKPVTQIVSAEAWGRADCGFTSESYQQGVLSATNLSVIGFRILLLKVAGFNLLMTLRLWSSRAKRSGSGATNFSLLKQAGDVEENPGPTSMDWIWRILFLVGAATGAHSFEEVQLVESGGGLVQPGGSLRLSCAASGYTFSSYWVNWVRQAPGKGLEWVAQIYPGDGDTNYNGKFKGRFTISRDNSKNTLYLQMNSLRAEDTAVYYCARSITTVVGCAMDYWGQGTLVTVSSTRIQNPDPAVYQLRDSKSSDKSVCLFTDFDSQTNVSQSKDSDVYITDKCVLDMRSMDFKSNSAVAWSNKSDFACANAFNNSIIPEDTFFPSPESSCDVKLVEKSFETDTNLNFQILYEILLGKATLYAVLVSALVLMAMVKRKDSRG

SEQ ID NO: 45966 - protein, 622 aa, synthetic construct; identical to SEQ ID NO: 45964

SEQ ID NO: 45967 - protein, 622 aa, synthetic construct; identical to SEQ ID NO: 45965

SEQ ID NO: 45968 - protein, 622 aa, synthetic construct; identical to SEQ ID NO: 45964

SEQ ID NO: 45969 - protein, 625 aa, synthetic construct
MALPVTALLLPLALLLHAARPDIQMTQSPSSLSASVGDRVTITCKASDHINNWLAWYQQKPGKAPKLLIYGATTLETGVPSRFSGSGSGTDFTLTISSLQPEDFATYYCQQSWNTPWTFGQGTKVEIKRLEADVSPKPTIFLPSIAETKLQKAGTYLCLLEKFFPDVIKIHWQEKKSNTILGSQEGNTMKTNDTYMKFSWLTVPEKSLDKEHRCIVRHENNKNGVDQEIIFPPIKTDVITMDPKDNCSKDANDTLLLQLTNTSAYYMYLLLLLKSVVYFAIITCCLLRRTAFCCNGEKSRAKRSGSGATNFSLLKQAGDVEENPGPTSMDWIWRILFLVGAATGAHSFEEVQLVESGGGLVQPGGSLRLSCAASGYTFSSYWVNWVRQAPGKGLEWVAQIYPGDGDTNYNGKFKGRFTISRDNSKNTLYLQMNSLRAEDTAVYYCARSITTVVGCAMDYWGQGTLVTVSSTRSQPHTKPSVFVMKNGTNVACLVKEFYPKDIRINLVSSKKITEFDPAIVISPSGKYNAVKLGKYEDSNSVTCSVQHDNKTVHSTDFEVKTDSTDHVKPKETENTKQPSKSCHKPKAIVHTEKVNMMSLTVIGFRILLLKVAGFNLLMTLRLWSS

SEQ ID NO: 45970 - protein, 625 aa, synthetic construct
MALPVTALLLPLALLLHAARPDIQMTQSPSSLSASVGDRVTITCKASDHINNWLAWYQQKPGKAPKLLIYGATTLETGVPSRFSGSGSGTDFTLTISSLQPEDFATYYCQQSWNTPWTFGQGTKVEIKRLEADVSPKPTIFLPSIAETKLQKAGTYLCLLEKFFPDVIKIHWQEKKSNTILGSQEGNTMKTNDTYMKFSWLTVPEKSLDKEHRCIVRHENNKNGVDQEIIFPPIKTDVITMDPKDNCSKDANDTLLLQLTNTSAYYMYLLLLLKSVVYFAIITCCLLRRTAFCCNGEKSRAKRSGSGATNFSLLKQAGDVEENPGPTSMDWIWRILFLVGAATGAHSFEEVQLVESGGGLVQPGGSLRLSCAASGYTFSSYWVNWVRQAPGKGLEWVAQIYPGDGDTNYNGKFKGRFTISRDNSKNTLYLQMNSLRAEDTAVYYCARSITTVVGCAMDYWGQGTLVTVSSTRSQPHTKPSVFVMKNGTNVACLVKEFYPKDIRINLVSSKKITEFDPAIVISPSGKYNAVKLGKYEDSNSVTCSVQHDNKTVHSTDFEVKTDSTDHVKPKETENTKQPSKSCHKPKAIVHTEKVNMMSLTVLGFRILLLKVAGFNLLMTLRLWSS

SEQ ID NO: 45971 - protein, 622 aa, synthetic construct; identical to SEQ ID NO: 45964

SEQ ID NO: 45972 - protein, 626 aa, synthetic construct
MALPVTALLLPLALLLHAARPDIQMTQSPSSLSASVGDRVTITCKASDHINNWLAWYQQKPGKAPKLLIYGATTLETGVPSRFSGSGSGTDFTLTISSLQPEDFATYYCQQSWNTPWTFGQGTKVEIKRLEIQNPDPAVYQLRDSKSSDKSVCLFTDFDSQTNVSQSKDSDVYITDKCVLDMRSMDFKSNSAVAWSNKSDFACANAFNNSIIPEDTFFPSPESSCGFTSESYQQGVLSATILYEILLGKATLYAVLVSALVLMAMVKRKDSRGRAKRSGSGVKQTLNFDLLKLAGDVESNPGPTSMDWIWRILFLVGAATGAHSFEEVQLVESGGGLVQPGGSLRLSCAASGYTFSSYWVNWVRQAPGKGLEWVAQIYPGDGDTNYNGKFKGRFTISRDNSKNTLYLQMNSLRAEDTAVYYCARSITTVVGCAMDYWGQGTLVTVSSTREDLKNVFPPEVAVFEPSEAEISHTQKATLVCLATGFYPDHVELSWWVNGKEVHSGVCTDPQPLKEQPALNDSRYCLSSRLRVSATFWQNPRNHFRCQVQFYGLSENDEWTQDRAKPVTQIVSAEAWGRADCDVKLVEKSFETDTNLNFQNLSVIGFRILLLKVAGFNLLMTLRLWSS

SEQ ID NO: 45973 - protein, 757 aa, synthetic construct
MALPVTALLLPLALLLHAARPEVQLVESGGGLVQPGGSLRLSCAASGFSFSDFWMSWVRQAPGKGLEWVATISQAGSEKDYVDSVKGRFTISRDNAKKSLYLQMNSLRAEDTAVYYCASGVYSFDYRGQGTLVTVSSGTGGGGSGGGGSGGGGSEFDIQMTQSPSSLSASVGDRVTITCKASDHINNWLAWYQQKPGKAPKLLIYGATTLETGVPSRFSGSGSGTDFTLTISSLQPEDFATYYCQQSWNTPWTFGQGTKVEIKRLEDLKNVFPPEVAVFEPSEAEISHTQKATLVCLATGFYPDHVELSWWVNGKEVHSGVCTDPQPLKEQPALNDSRYCLSSRLRVSATFWQNPRNHFRCQVQFYGLSENDEWTQDRAKPVTQIVSAEAWGRADCDVKLVEKSFETDTNLNFQNLSVIGFRILLLKVAGFNLLMTLRLWSSRAKRSGSGATNFSLLKQAGDVEENPGPTSMDWIWRILFLVGAATGAHSFEEVQLVESGGGLVQPGGSLRLSCAASGYTFSSYWVNWVRQAPGKGLEWVAQIYPGDGDTNYNGKFKGRFTISRDNSKNTLYLQMNSLRAEDTAVYYCARSITTVVGCAMDYWGQGTLVTVSSTRIQNPDPAVYQLRDSKSSDKSVCLFTDFDSQTNVSQSKDSDVYITDKCVLDMRSMDFKSNSAVAWSNKSDFACANAFNNSIIPEDTFFPSPESSCGFTSESYQQGVLSATILYEILLGKATLYAVLVSALVLMAMVKRKDSRG

SEQ ID NO: 45974 - protein, 761 aa, synthetic construct
MALPVTALLLPLALLLHAARPEVQLVESGGGLVQPGGSLRLSCAASGFSFSDFWMSWVRQAPGKGLEWVATISQAGSEKDYVDSVKGRFTISRDNAKKSLYLQMNSLRAEDTAVYYCASGVYSFDYRGQGTLVTVSSGTGGGGSGGGGSGGGGSEFDIQMTQSPSSLSASVGDRVTITCKASDHINNWLAWYQQKPGKAPKLLIYGATTLETGVPSRFSGSGSGTDFTLTISSLQPEDFATYYCQQSWNTPWTFGQGTKVEIKRLEIQNPDPAVYQLRDSKSSDKSVCLFTDFDSQTNVSQSKDSDVYITDKCVLDMRSMDFKSNSAVAWSNKSDFACANAFNNSIIPEDTFFPSPESSCGFTSESYQQGVLSATILYEILLGKATLYAVLVSALVLMAMVKRKDSRGRAKRSGSGVKQTLNFDLLKLAGDVESNPGPTSMDWIWRILFLVGAATGAHSFEEVQLVESGGGLVQPGGSLRLSCAASGYTFSSYWVNWVRQAPGKGLEWVAQIYPGDGDTNYNGKFKGRFTISRDNSKNTLYLQMNSLRAEDTAVYYCARSITTVVGCAMDYWGQGTLVTVSSTREDLKNVFPPEVAVFEPSEAEISHTQKATLVCLATGFYPDHVELSWWVNGKEVHSGVCTDPQPLKEQPALNDSRYCLSSRLRVSATFWQNPRNHFRCQVQFYGLSENDEWTQDRAKPVTQIVSAEAWGRADCDVKLVEKSFETDTNLNFQNLSVIGFRILLLKVAGFNLLMTLRLWSS

SEQ ID NO: 45975 - protein, 894 aa, synthetic construct
MALPVTALLLPLALLLHAARPEVQLVESGGGLVQPGGSLRLSCAASGFSFSDFWMSWVRQAPGKGLEWVATISQAGSEKDYVDSVKGRFTISRDNAKKSLYLQMNSLRAEDTAVYYCASGVYSFDYRGQGTLVTVSSGTGGGGSGGGGSGGGGSEFDIQMTQSPSSLSASVGDRVTITCKASDHINNWLAWYQQKPGKAPKLLIYGATTLETGVPSRFSGSGSGTDFTLTISSLQPEDFATYYCQQSWNTPWTFGQGTKVEIKRLEDLKNVFPPEVAVFEPSEAEISHTQKATLVCLATGFYPDHVELSWWVNGKEVHSGVCTDPQPLKEQPALNDSRYCLSSRLRVSATFWQNPRNHFRCQVQFYGLSENDEWTQDRAKPVTQIVSAEAWGRADCDVKLVEKSFETDTNLNFQNLSVIGFRILLLKVAGFNLLMTLRLWSSRAKRSGSGATNFSLLKQAGDVEENPGPTSMDWIWRILFLVGAATGAHSGPQLQLQESGPGLVKPSETLSLTCTVSGDSISSGDYYWGWIRQPPGKGLEWIGHIYYSGVTYYNPSLKSRVTISVDTSRNQFSLKLSSVTAADTAVYYCTREDSSNWRSRGQGTLVTVSSGSGGGGSGGGGSGGGGSFEEVQLVESGGGLVQPGGSLRLSCAASGYTFSSYWVNWVRQAPGKGLEWVAQIYPGDGDTNYNGKFKGRFTISRDNSKNTLYLQMNSLRAEDTAVYYCARSITTVVGCAMDYWGQGTLVTVSSTRIQNPDPAVYQLRDSKSSDKSVCLFTDFDSQTNVSQSKDSDVYITDKCVLDMRSMDFKSNSAVAWSNKSDFACANAFNNSIIPEDTFFPSPESSCGFTSESYQQGVLSATILYEILLGKATLYAVLVSALVLMAMVKRKDSRG

SEQ ID NO: 45976 - protein, 898 aa, synthetic construct
MALPVTALLLPLALLLHAARPEVQLVESGGGLVQPGGSLRLSCAASGFSFSDFWMSWVRQAPGKGLEWVATISQAGSEKDYVDSVKGRFTISRDNAKKSLYLQMNSLRAEDTAVYYCASGVYSFDYRGQGTLVTVSSGTGGGGSGGGGSGGGGSEFDIQMTQSPSSLSASVGDRVTITCKASDHINNWLAWYQQKPGKAPKLLIYGATTLETGVPSRFSGSGSGTDFTLTISSLQPEDFATYYCQQSWNTPWTFGQGTKVEIKRLEIQNPDPAVYQLRDSKSSDKSVCLFTDFDSQTNVSQSKDSDVYITDKCVLDMRSMDFKSNSAVAWSNKSDFACANAFNNSIIPEDTFFPSPESSCGFTSESYQQGVLSATILYEILLGKATLYAVLVSALVLMAMVKRKDSRGRAKRSGSGVKQTLNFDLLKLAGDVESNPGPTSMDWIWRILFLVGAATGAHSGPQLQLQESGPGLVKPSETLSLTCTVSGDSISSGDYYWGWIRQPPGKGLEWIGHIYYSGVTYYNPSLKSRVTISVDTSRNQFSLKLSSVTAADTAVYYCTREDSSNWRSRGQGTLVTVSSGSGGGGSGGGGSGGGGSFEEVQLVESGGGLVQPGGSLRLSCAASGYTFSSYWVNWVRQAPGKGLEWVAQIYPGDGDTNYNGKFKGRFTISRDNSKNTLYLQMNSLRAEDTAVYYCARSITTVVGCAMDYWGQGTLVTVSSTREDLKNVFPPEVAVFEPSEAEISHTQKATLVCLATGFYPDHVELSWWVNGKEVHSGVCTDPQPLKEQPALNDSRYCLSSRLRVSATFWQNPRNHFRCQVQFYGLSENDEWTQDRAKPVTQIVSAEAWGRADCDVKLVEKSFETDTNLNFQNLSVIGFRILLLKVAGFNLLMTLRLWSS

SEQ ID NO: 45977 - protein, 692 aa, synthetic construct
MALPVTALLLPLALLLHAARPDIQMTQSPSSLSASVGDRVTITCKASDHINNWLAWYQQKPGKAPKLLIYGATTLETGVPSRFSGSGSGTDFTLTISSLQPEDFATYYCQQSWNTPWTFGQGTKVEIKRLEDLKNVFPPEVAVFEPSEAEISHTQKATLVCLATGFYPDHVELSWWVNGKEVHSGVCTDPQPLKEQPALNDSRYCLSSRLRVSATFWQNPRNHFRCQVQFYGLSENDEWTQDRAKPVTQIVSAEAWGRADCDVKLVEKSFETDTNLNFQNLSVIGFRILLLKVAGFNLLMTLRLWSSRAKRSGSGATNFSLLKQAGDVEENPGPTSMDWIWRILFLVGAATGAHSGPMDPDLEIRAAFLRQRNTALRTEVAELEQEVQRLENEVSQYETRYGPLGGGKGSGGGGSGGGGSGGGGSFEEVQLVESGGGLVQPGGSLRLSCAASGYTFSSYWVNWVRQAPGKGLEWVAQIYPGDGDTNYNGKFKGRFTISRDNSKNTLYLQMNSLRAEDTAVYYCARSITTVVGCAMDYWGQGTLVTVSSTRIQNPDPAVYQLRDSKSSDKSVCLFTDFDSQTNVSQSKDSDVYITDKCVLDMRSMDFKSNSAVAWSNKSDFACANAFNNSIIPEDTFFPSPESSCGFTSESYQQGVLSATILYEILLGKATLYAVLVSALVLMAMVKRKDSRG

SEQ ID NO: 45978 - protein, 696 aa, synthetic construct
MALPVTALLLPLALLLHAARPDIQMTQSPSSLSASVGDRVTITCKASDHINNWLAWYQQKPGKAPKLLIYGATTLETGVPSRFSGSGSGTDFTLTISSLQPEDFATYYCQQSWNTPWTFGQGTKVEIKRLEIQNPDPAVYQLRDSKSSDKSVCLFTDFDSQTNVSQSKDSDVYITDKCVLDMRSMDFKSNSAVAWSNKSDFACANAFNNSIIPEDTFFPSPESSCGFTSESYQQGVLSATILYEILLGKATLYAVLVSALVLMAMVKRKDSRGRAKRSGSGVKQTLNFDLLKLAGDVESNPGPTSMDWIWRILFLVGAATGAHSGPMDPDLEIRAAFLRQRNTALRTEVAELEQEVQRLENEVSQYETRYGPLGGGKGSGGGGSGGGGSGGGGSFEEVQLVESGGGLVQPGGSLRLSCAASGYTFSSYWVNWVRQAPGKGLEWVAQIYPGDGDTNYNGKFKGRFTISRDNSKNTLYLQMNSLRAEDTAVYYCARSITTVVGCAMDYWGQGTLVTVSSTREDLKNVFPPEVAVFEPSEAEISHTQKATLVCLATGFYPDHVELSWWVNGKEVHSGVCTDPQPLKEQPALNDSRYCLSSRLRVSATFWQNPRNHFRCQVQFYGLSENDEWTQDRAKPVTQIVSAEAWGRADCDVKLVEKSFETDTNLNFQNLSVIGFRILLLKVAGFNLLMTLRLWSS

SEQ ID NO: 45979 - protein, 669 aa, synthetic construct
MALPVTALLLPLALLLHAARPDIQMTQSPSSLSASVGDRVTITCKASDHINNWLAWYQQKPGKAPKLLIYGATTLETGVPSRFSGSGSGTDFTLTISSLQPEDFATYYCQQSWNTPWTFGQGTKVEIKRLEDLKNVFPPEVAVFEPSEAEISHTQKATLVCLATGFYPDHVELSWWVNGKEVHSGVCTDPQPLKEQPALNDSRYCLSSRLRVSATFWQNPRNHFRCQVQFYGLSENDEWTQDRAKPVTQIVSAEAWGRADCDVKLVEKSFETDTNLNFQNLSVIGFRILLLKVAGFNLLMTLRLWSSRAKRSGSGATNFSLLKQAGDVEENPGPTSMDWIWRILFLVGAATGAHSGPEVAALEKEVAALEKEVAALEKEVAALEKGSGGGGSGGGGSGGGGSFEEVQLVESGGGLVQPGGSLRLSCAASGYTFSSYWVNWVRQAPGKGLEWVAQIYPGDGDTNYNGKFKGRFTISRDNSKNTLYLQMNSLRAEDTAVYYCARSITTVVGCAMDYWGQGTLVTVSSTRIQNPDPAVYQLRDSKSSDKSVCLFTDFDSQTNVSQSKDSDVYITDKCVLDMRSMDFKSNSAVAWSNKSDFACANAFNNSIIPEDTFFPSPESSCGFTSESYQQGVLSATILYEILLGKATLYAVLVSALVLMAMVKRKDSRG

SEQ ID NO: 45980 - protein, 673 aa, synthetic construct
MALPVTALLLPLALLLHAARPDIQMTQSPSSLSASVGDRVTITCKASDHINNWLAWYQQKPGKAPKLLIYGATTLETGVPSRFSGSGSGTDFTLTISSLQPEDFATYYCQQSWNTPWTFGQGTKVEIKRLEIQNPDPAVYQLRDSKSSDKSVCLFTDFDSQTNVSQSKDSDVYITDKCVLDMRSMDFKSNSAVAWSNKSDFACANAFNNSIIPEDTFFPSPESSCGFTSESYQQGVLSATILYEILLGKATLYAVLVSALVLMAMVKRKDSRGRAKRSGSGVKQTLNFDLLKLAGDVESNPGPTSMDWIWRILFLVGAATGAHSGPEVAALEKEVAALEKEVAALEKEVAALEKGSGGGGSGGGGSGGGGSFEEVQLVESGGGLVQPGGSLRLSCAASGYTFSSYWVNWVRQAPGKGLEWVAQIYPGDGDTNYNGKFKGRFTISRDNSKNTLYLQMNSLRAEDTAVYYCARSITTVVGCAMDYWGQGTLVTVSSTREDLKNVFPPEVAVFEPSEAEISHTQKATLVCLATGFYPDHVELSWWVNGKEVHSGVCTDPQPLKEQPALNDSRYCLSSRLRVSATFWQNPRNHFRCQVQFYGLSENDEWTQDRAKPVTQIVSAEAWGRADCDVKLVEKSFETDTNLNFQNLSVIGFRILLLKVAGFNLLMTLRLWSS

SEQ ID NO: 45981 - protein, 759 aa, synthetic construct
MALPVTALLLPLALLLHAARPDIQMTQSPSSLSASVGDRVTITCKASDHINNWLAWYQQKPGKAPKLLIYGATTLETGVPSRFSGSGSGTDFTLTISSLQPEDFATYYCQQSWNTPWTFGQGTKVEIKRLEDLKNVFPPEVAVFEPSEAEISHTQKATLVCLATGFYPDHVELSWWVNGKEVHSGVCTDPQPLKEQPALNDSRYCLSSRLRVSATFWQNPRNHFRCQVQFYGLSENDEWTQDRAKPVTQIVSAEAWGRADCDVKLVEKSFETDTNLNFQNLSVIGFRILLLKVAGFNLLMTLRLWSSRAKRSGSGATNFSLLKQAGDVEENPGPTSMDWIWRILFLVGAATGAHSGPQVQLQESGGGLAQAGGSLRLSCAASGRTFSMGWFRQAPGKEREFVAAITYSGGSPYYASSVRGRFTISRDNAKNTVYLQMNSLKPEDTAVYYCAANPTYGSDWNAENWGQGTQVTVSSGSGGGGSGGGGSGGGGSFEEVQLVESGGGLVQPGGSLRLSCAASGYTFSSYWVNWVRQAPGKGLEWVAQIYPGDGDTNYNGKFKGRFTISRDNSKNTLYLQMNSLRAEDTAVYYCARSITTVVGCAMDYWGQGTLVTVSSTRIQNPDPAVYQLRDSKSSDKSVCLFTDFDSQTNVSQSKDSDVYITDKCVLDMRSMDFKSNSAVAWSNKSDFACANAFNNSIIPEDTFFPSPESSCGFTSESYQQGVLSATILYEILLGKATLYAVLVSALVLMAMVKRKDSRG

SEQ ID NO: 45982 - protein, 763 aa, synthetic construct
MALPVTALLLPLALLLHAARPDIQMTQSPSSLSASVGDRVTITCKASDHINNWLAWYQQKPGKAPKLLIYGATTLETGVPSRFSGSGSGTDFTLTISSLQPEDFATYYCQQSWNTPWTFGQGTKVEIKRLEIQNPDPAVYQLRDSKSSDKSVCLFTDFDSQTNVSQSKDSDVYITDKCVLDMRSMDFKSNSAVAWSNKSDFACANAFNNSIIPEDTFFPSPESSCGFTSESYQQGVLSATILYEILLGKATLYAVLVSALVLMAMVKRKDSRGRAKRSGSGVKQTLNFDLLKLAGDVESNPGPTSMDWIWRILFLVGAATGAHSGPQVQLQESGGGLAQAGGSLRLSCAASGRTFSMGWFRQAPGKEREFVAAITYSGGSPYYASSVRGRFTISRDNAKNTVYLQMNSLKPEDTAVYYCAANPTYGSDWNAENWGQGTQVTVSSGSGGGGSGGGGSGGGGSFEEVQLVESGGGLVQPGGSLRLSCAASGYTFSSYWVNWVRQAPGKGLEWVAQIYPGDGDTNYNGKFKGRFTISRDNSKNTLYLQMNSLRAEDTAVYYCARSITTVVGCAMDYWGQGTLVTVSSTREDLKNVFPPEVAVFEPSEAEISHTQKATLVCLATGFYPDHVELSWWVNGKEVHSGVCTDPQPLKEQPALNDSRYCLSSRLRVSATFWQNPRNHFRCQVQFYGLSENDEWTQDRAKPVTQIVSAEAWGRADCDVKLVEKSFETDTNLNFQNLSVIGFRILLLKVAGFNLLMTLRLWSS

SEQ ID NO: 45983 - protein, 765 aa, synthetic construct
MALPVTALLLPLALLLHAARPEVQLVESGGSLVQPGGSLRLSCAASGFTFDDYAMSWVRQVPGKGLEWVSSINWSGTHTDYADSVKGRFTISRNNANNTLYLQMNSLKSEDTAVYYCAKNWRDAGTTWFEKSGSAGQGTQVTVSSGTGGGGSGGGGSGGGGSEFDIQMTQSPSSLSASVGDRVTITCKASDHINNWLAWYQQKPGKAPKLLIYGATTLETGVPSRFSGSGSGTDFTLTISSLQPEDFATYYCQQSWNTPWTFGQGTKVEIKRLEDLKNVFPPEVAVFEPSEAEISHTQKATLVCLATGFYPDHVELSWWVNGKEVHSGVCTDPQPLKEQPALNDSRYCLSSRLRVSATFWQNPRNHFRCQVQFYGLSENDEWTQDRAKPVTQIVSAEAWGRADCDVKLVEKSFETDTNLNFQNLSVIGFRILLLKVAGFNLLMTLRLWSSRAKRSGSGATNFSLLKQAGDVEENPGPTSMDWIWRILFLVGAATGAHSFEEVQLVESGGGLVQPGGSLRLSCAASGYTFSSYWVNWVRQAPGKGLEWVAQIYPGDGDTNYNGKFKGRFTISRDNSKNTLYLQMNSLRAEDTAVYYCARSITTVVGCAMDYWGQGTLVTVSSTRIQNPDPAVYQLRDSKSSDKSVCLFTDFDSQTNVSQSKDSDVYITDKCVLDMRSMDFKSNSAVAWSNKSDFACANAFNNSIIPEDTFFPSPESSCGFTSESYQQGVLSATILYEILLGKATLYAVLVSALVLMAMVKRKDSRG

SEQ ID NO: 45984 - protein, 769 aa, synthetic construct
MALPVTALLLPLALLLHAARPEVQLVESGGSLVQPGGSLRLSCAASGFTFDDYAMSWVRQVPGKGLEWVSSINWSGTHTDYADSVKGRFTISRNNANNTLYLQMNSLKSEDTAVYYCAKNWRDAGTTWFEKSGSAGQGTQVTVSSGTGGGGSGGGGSGGGGSEFDIQMTQSPSSLSASVGDRVTITCKASDHINNWLAWYQQKPGKAPKLLIYGATTLETGVPSRFSGSGSGTDFTLTISSLQPEDFATYYCQQSWNTPWTFGQGTKVEIKRLEIQNPDPAVYQLRDSKSSDKSVCLFTDFDSQTNVSQSKDSDVYITDKCVLDMRSMDFKSNSAVAWSNKSDFACANAFNNSIIPEDTFFPSPESSCGFTSESYQQGVLSATILYEILLGKATLYAVLVSALVLMAMVKRKDSRGRAKRSGSGVKQTLNFDLLKLAGDVESNPGPTSMDWIWRILFLVGAATGAHSFEEVQLVESGGGLVQPGGSLRLSCAASGYTFSSYWVNWVRQAPGKGLEWVAQIYPGDGDTNYNGKFKGRFTISRDNSKNTLYLQMNSLRAEDTAVYYCARSITTVVGCAMDYWGQGTLVTVSSTREDLKNVFPPEVAVFEPSEAEISHTQKATLVCLATGFYPDHVELSWWVNGKEVHSGVCTDPQPLKEQPALNDSRYCLSSRLRVSATFWQNPRNHFRCQVQFYGLSENDEWTQDRAKPVTQIVSAEAWGRADCDVKLVEKSFETDTNLNFQNLSVIGFRILLLKVAGFNLLMTLRLWSS

SEQ ID NO: 45985 - protein, 763 aa, synthetic construct
MALPVTALLLPLALLLHAARPEVQLLESGGGLVQPGGSLRLSCAASGFIFSSYAMSWVRQAPGKGQEWVSGVSGTGVNTYYADSVKGRFTISRDNSKNTLYLQMNSLRAEDTAVYYCASGKGWDSGSWYEDYRGQGTLVTVSSGTGGGGSGGGGSGGGGSEFDIQMTQSPSSLSASVGDRVTITCKASDHINNWLAWYQQKPGKAPKLLIYGATTLETGVPSRFSGSGSGTDFTLTISSLQPEDFATYYCQQSWNTPWTFGQGTKVEIKRLEDLKNVFPPEVAVFEPSEAEISHTQKATLVCLATGFYPDHVELSWWVNGKEVHSGVCTDPQPLKEQPALNDSRYCLSSRLRVSATFWQNPRNHFRCQVQFYGLSENDEWTQDRAKPVTQIVSAEAWGRADCDVKLVEKSFETDTNLNFQNLSVIGFRILLLKVAGFNLLMTLRLWSSRAKRSGSGATNFSLLKQAGDVEENPGPTSMDWIWRILFLVGAATGAHSFEEVQLVESGGGLVQPGGSLRLSCAASGYTFSSYWVNWVRQAPGKGLEWVAQIYPGDGDTNYNGKFKGRFTISRDNSKNTLYLQMNSLRAEDTAVYYCARSITTVVGCAMDYWGQGTLVTVSSTRIQNPDPAVYQLRDSKSSDKSVCLFTDFDSQTNVSQSKDSDVYITDKCVLDMRSMDFKSNSAVAWSNKSDFACANAFNNSIIPEDTFFPSPESSCGFTSESYQQGVLSATILYEILLGKATLYAVLVSALVLMAMVKRKDSRG

SEQ ID NO: 45986 - protein, 767 aa, synthetic construct
MALPVTALLLPLALLLHAARPEVQLLESGGGLVQPGGSLRLSCAASGFIFSSYAMSWVRQAPGKGQEWVSGVSGTGVNTYYADSVKGRFTISRDNSKNTLYLQMNSLRAEDTAVYYCASGKGWDSGSWYEDYRGQGTLVTVSSGTGGGGSGGGGSGGGGSEFDIQMTQSPSSLSASVGDRVTITCKASDHINNWLAWYQQKPGKAPKLLIYGATTLETGVPSRFSGSGSGTDFTLTISSLQPEDFATYYCQQSWNTPWTFGQGTKVEIKRLEIQNPDPAVYQLRDSKSSDKSVCLFTDFDSQTNVSQSKDSDVYITDKCVLDMRSMDFKSNSAVAWSNKSDFACANAFNNSIIPEDTFFPSPESSCGFTSESYQQGVLSATILYEILLGKATLYAVLVSALVLMAMVKRKDSRGRAKRSGSGVKQTLNFDLLKLAGDVESNPGPTSMDWIWRILFLVGAATGAHSFEEVQLVESGGGLVQPGGSLRLSCAASGYTFSSYWVNWVRQAPGKGLEWVAQIYPGDGDTNYNGKFKGRFTISRDNSKNTLYLQMNSLRAEDTAVYYCARSITTVVGCAMDYWGQGTLVTVSSTREDLKNVFPPEVAVFEPSEAEISHTQKATLVCLATGFYPDHVELSWWVNGKEVHSGVCTDPQPLKEQPALNDSRYCLSSRLRVSATFWQNPRNHFRCQVQFYGLSENDEWTQDRAKPVTQIVSAEAWGRADCDVKLVEKSFETDTNLNFQNLSVIGFRILLLKVAGFNLLMTLRLWSS

SEQ ID NO: 45987 - protein, 731 aa, synthetic construct
MALPVTALLLPLALLLHAARPMLPAPKNLVVSRITEDSARLSWTAPDAAFDSFPIRYIETLIWGEAIWLDVPGSERSYDLTGLKPGTEYAVVITGVKGGRFSSPLVASFTTGTGGGGSGGGGSGGGGSEFDIQMTQSPSSLSASVGDRVTITCKASDHINNWLAWYQQKPGKAPKLLIYGATTLETGVPSRFSGSGSGTDFTLTISSLQPEDFATYYCQQSWNTPWTFGQGTKVEIKRLEDLKNVFPPEVAVFEPSEAEISHTQKATLVCLATGFYPDHVELSWWVNGKEVHSGVCTDPQPLKEQPALNDSRYCLSSRLRVSATFWQNPRNHFRCQVQFYGLSENDEWTQDRAKPVTQIVSAEAWGRADCDVKLVEKSFETDTNLNFQNLSVIGFRILLLKVAGFNLLMTLRLWSSRAKRSGSGATNFSLLKQAGDVEENPGPTSMDWIWRILFLVGAATGAHSFEEVQLVESGGGLVQPGGSLRLSCAASGYTFSSYWVNWVRQAPGKGLEWVAQIYPGDGDTNYNGKFKGRFTISRDNSKNTLYLQMNSLRAEDTAVYYCARSITTVVGCAMDYWGQGTLVTVSSTRIQNPDPAVYQLRDSKSSDKSVCLFTDFDSQTNVSQSKDSDVYITDKCVLDMRSMDFKSNSAVAWSNKSDFACANAFNNSIIPEDTFFPSPESSCGFTSESYQQGVLSATILYEILLGKATLYAVLVSALVLMAMVKRKDSRG

SEQ ID NO: 45988 - protein, 735 aa, synthetic construct
MALPVTALLLPLALLLHAARPMLPAPKNLVVSRITEDSARLSWTAPDAAFDSFPIRYIETLIWGEAIWLDVPGSERSYDLTGLKPGTEYAVVITGVKGGRFSSPLVASFTTGTGGGGSGGGGSGGGGSEFDIQMTQSPSSLSASVGDRVTITCKASDHINNWLAWYQQKPGKAPKLLIYGATTLETGVPSRFSGSGSGTDFTLTISSLQPEDFATYYCQQSWNTPWTFGQGTKVEIKRLEIQNPDPAVYQLRDSKSSDKSVCLFTDFDSQTNVSQSKDSDVYITDKCVLDMRSMDFKSNSAVAWSNKSDFACANAFNNSIIPEDTFFPSPESSCGFTSESYQQGVLSATILYEILLGKATLYAVLVSALVLMAMVKRKDSRGRAKRSGSGVKQTLNFDLLKLAGDVESNPGPTSMDWIWRILFLVGAATGAHSFEEVQLVESGGGLVQPGGSLRLSCAASGYTFSSYWVNWVRQAPGKGLEWVAQIYPGDGDTNYNGKFKGRFTISRDNSKNTLYLQMNSLRAEDTAVYYCARSITTVVGCAMDYWGQGTLVTVSSTREDLKNVFPPEVAVFEPSEAEISHTQKATLVCLATGFYPDHVELSWWVNGKEVHSGVCTDPQPLKEQPALNDSRYCLSSRLRVSATFWQNPRNHFRCQVQFYGLSENDEWTQDRAKPVTQIVSAEAWGRADCDVKLVEKSFETDTNLNFQNLSVIGFRILLLKVAGFNLLMTLRLWSS

SEQ ID NO: 45989 - protein, 760 aa, synthetic construct
MALPVTALLLPLALLLHAARPEVQLVESGGGLVQPGGSLRLSCAASGFNIKDTCIGWVRRAPGKEEELVAKICKYSGHTRYADSVKGRFTISADTSKNTAYLQMNSLRAEDTAVYYCAAVSVRDGHYNYWGQGTTVTVSSGTGGGGSGGGGSGGGGSEFDIQMTQSPSSLSASVGDRVTITCKASDHINNWLAWYQQKPGKAPKLLIYGATTLETGVPSRFSGSGSGTDFTLTISSLQPEDFATYYCQQSWNTPWTFGQGTKVEIKRLEDLKNVFPPEVAVFEPSEAEISHTQKATLVCLATGFYPDHVELSWWVNGKEVHSGVCTDPQPLKEQPALNDSRYCLSSRLRVSATFWQNPRNHFRCQVQFYGLSENDEWTQDRAKPVTQIVSAEAWGRADCDVKLVEKSFETDTNLNFQNLSVIGFRILLLKVAGFNLLMTLRLWSSRAKRSGSGATNFSLLKQAGDVEENPGPTSMDWIWRILFLVGAATGAHSFEEVQLVESGGGLVQPGGSLRLSCAASGYTFSSYWVNWVRQAPGKGLEWVAQIYPGDGDTNYNGKFKGRFTISRDNSKNTLYLQMNSLRAEDTAVYYCARSITTVVGCAMDYWGQGTLVTVSSTRIQNPDPAVYQLRDSKSSDKSVCLFTDFDSQTNVSQSKDSDVYITDKCVLDMRSMDFKSNSAVAWSNKSDFACANAFNNSIIPEDTFFPSPESSCGFTSESYQQGVLSATILYEILLGKATLYAVLVSALVLMAMVKRKDSRG

SEQ ID NO: 45990 - protein, 764 aa, synthetic construct
MALPVTALLLPLALLLHAARPEVQLVESGGGLVQPGGSLRLSCAASGFNIKDTCIGWVRRAPGKEEELVAKICKYSGHTRYADSVKGRFTISADTSKNTAYLQMNSLRAEDTAVYYCAAVSVRDGHYNYWGQGTTVTVSSGTGGGGSGGGGSGGGGSEFDIQMTQSPSSLSASVGDRVTITCKASDHINNWLAWYQQKPGKAPKLLIYGATTLETGVPSRFSGSGSGTDFTLTISSLQPEDFATYYCQQSWNTPWTFGQGTKVEIKRLEIQNPDPAVYQLRDSKSSDKSVCLFTDFDSQTNVSQSKDSDVYITDKCVLDMRSMDFKSNSAVAWSNKSDFACANAFNNSIIPEDTFFPSPESSCGFTSESYQQGVLSATILYEILLGKATLYAVLVSALVLMAMVKRKDSRGRAKRSGSGVKQTLNFDLLKLAGDVESNPGPTSMDWIWRILFLVGAATGAHSFEEVQLVESGGGLVQPGGSLRLSCAASGYTFSSYWVNWVRQAPGKGLEWVAQIYPGDGDTNYNGKFKGRFTISRDNSKNTLYLQMNSLRAEDTAVYYCARSITTVVGCAMDYWGQGTLVTVSSTREDLKNVFPPEVAVFEPSEAEISHTQKATLVCLATGFYPDHVELSWWVNGKEVHSGVCTDPQPLKEQPALNDSRYCLSSRLRVSATFWQNPRNHFRCQVQFYGLSENDEWTQDRAKPVTQIVSAEAWGRADCDVKLVEKSFETDTNLNFQNLSVIGFRILLLKVAGFNLLMTLRLWSS

SEQ ID NO: 45991 - protein, 1131 aa, synthetic construct
MALPVTALLLPLALLLHAARPEVQLVESGGGLVQAGGSLRLSCAASGRTFSMGWFRQAPGKEREFVAAITYSGGSPYYADSVKGRFTISRDNAKNTVYLQMNSLKPEDTAVYYCAANPTYGSDWNAENWGQGTQVTVSSGTGGGGSGGGGSGGGGSEFDIQMTQSPSSLSASVGDRVTITCKASDHINNWLAWYQQKPGKAPKLLIYGATTLETGVPSRFSGSGSGTDFTLTISSLQPEDFATYYCQQSWNTPWTFGQGTKVEIKRLEDLKNVFPPEVAVFEPSEAEISHTQKATLVCLATGFYPDHVELSWWVNGKEVHSGVCTDPQPLKEQPALNDSRYCLSSRLRVSATFWQNPRNHFRCQVQFYGLSENDEWTQDRAKPVTQIVSAEAWGRADCDVKLVEKSFETDTNLNFQNLSVIGFRILLLKVAGFNLLMTLRLWSSRAKRSGSGATNFSLLKQAGDVEENPGPTSATMDWIWRILFLVGAATGAHSGPEVQLVESGGGLVQAGGSLRLSCAASGRTFTMGWFRQAPGKEREFVAAISLSPTLAYYADSVKGRFTISRDNAKNTVVLQMNSLKPEDTALYYCAADRKSVMSIRPDYWGQGTQVTVSSGSGGGGSGGGGSGGGGSFEEVQLVESGGGLVQPGGSLRLSCAASGYTFSSYWVNWVRQAPGKGLEWVAQIYPGDGDTNYNGKFKGRFTISRDNSKNTLYLQMNSLRAEDTAVYYCARSITTVVGCAMDYWGQGTLVTVSSTRIQNPDPAVYQLRDSKSSDKSVCLFTDFDSQTNVSQSKDSDVYITDKCVLDMRSMDFKSNSAVAWSNKSDFACANAFNNSIIPEDTFFPSPESSCGFTSESYQQGVLSATILYEILLGKATLYAVLVSALVLMAMVKRKDSRGRAKRSGSGVKQTLNFDLLKLAGDVESNPGPSRGHMTEYKPTVRLATRDDVPRAVRTLAAAFADYPATRHTVDPDRHIERVTELQELFLTRVGLDIGKVWVADDGAAVAVWTTPESVEAGAVFAEIGPRMAELSGSRLAAQQQMEGLLAPHRPKEPAWFLATVGVSPDHQGKGLGSAVVLPGVEAAERAGVPAFLETSAPRNLPFYERLGFTVTADVEVPEGPRTWCMTRKPGA

SEQ ID NO: 45992 - protein, 769 aa, synthetic construct
MALPVTALLLPLALLLHAARPEVQLVESGGGLVQPGGSLRLSCAASGFASDYYIIGWFRQAPGKEREGVSCISSRYANTNYADSVKGRFTISRDNAKNTVYLQMNSLKPEDTAVYYCAADTRRYTCPDIATMHRNFDSWGQGTLVTVSSGTGGGGSGGGGSGGGGSEFDIQMTQSPSSLSASVGDRVTITCKASDHINNWLAWYQQKPGKAPKLLIYGATTLETGVPSRFSGSGSGTDFTLTISSLQPEDFATYYCQQSWNTPWTFGQGTKVEIKRLEDLKNVFPPEVAVFEPSEAEISHTQKATLVCLATGFYPDHVELSWWVNGKEVHSGVCTDPQPLKEQPALNDSRYCLSSRLRVSATFWQNPRNHFRCQVQFYGLSENDEWTQDRAKPVTQIVSAEAWGRADCDVKLVEKSFETDTNLNFQNLSVIGFRILLLKVAGFNLLMTLRLWSSRAKRSGSGATNFSLLKQAGDVEENPGPTSMDWIWRILFLVGAATGAHSFEEVQLVESGGGLVQPGGSLRLSCAASGYTFSSYWVNWVRQAPGKGLEWVAQIYPGDGDTNYNGKFKGRFTISRDNSKNTLYLQMNSLRAEDTAVYYCARSITTVVGCAMDYWGQGTLVTVSSTRIQNPDPAVYQLRDSKSSDKSVCLFTDFDSQTNVSQSKDSDVYITDKCVLDMRSMDFKSNSAVAWSNKSDFACANAFNNSIIPEDTFFPSPESSCGFTSESYQQGVLSATILYEILLGKATLYAVLVSALVLMAMVKRKDSRG

SEQ ID NO: 45993 - protein, 769 aa, synthetic construct
MALPVTALLLPLALLLHAARPEVQLVESGGGLVQPGGSLRLSCEASGFASDDYIIGWFRQAPGKEREGVSCISSKYANTVYTDSVKGRFRLSRGTAKNTVYLQMSALKPEDTAVYYCAMDSRRVTCPEISTMHRNFDSWGQGTLVTVSSGTGGGGSGGGGSGGGGSEFDIQMTQSPSSLSASVGDRVTITCKASDHINNWLAWYQQKPGKAPKLLIYGATTLETGVPSRFSGSGSGTDFTLTISSLQPEDFATYYCQQSWNTPWTFGQGTKVEIKRLEDLKNVFPPEVAVFEPSEAEISHTQKATLVCLATGFYPDHVELSWWVNGKEVHSGVCTDPQPLKEQPALNDSRYCLSSRLRVSATFWQNPRNHFRCQVQFYGLSENDEWTQDRAKPVTQIVSAEAWGRADCDVKLVEKSFETDTNLNFQNLSVIGFRILLLKVAGFNLLMTLRLWSSRAKRSGSGATNFSLLKQAGDVEENPGPTSMDWIWRILFLVGAATGAHSFEEVQLVESGGGLVQPGGSLRLSCAASGYTFSSYWVNWVRQAPGKGLEWVAQIYPGDGDTNYNGKFKGRFTISRDNSKNTLYLQMNSLRAEDTAVYYCARSITTVVGCAMDYWGQGTLVTVSSTRIQNPDPAVYQLRDSKSSDKSVCLFTDFDSQTNVSQSKDSDVYITDKCVLDMRSMDFKSNSAVAWSNKSDFACANAFNNSIIPEDTFFPSPESSCGFTSESYQQGVLSATILYEILLGKATLYAVLVSALVLMAMVKRKDSRG

SEQ ID NO: 45994 - protein, 769 aa, synthetic construct
MALPVTALLLPLALLLHAARPEVQLVESGGGLVQPGGSLRLSCAASGFASDYYIIGWFRQAPGKEREGVSCISSRYANTNYADSVKGRFTISRDNAKNTVYLQMNSLKPEDTAVYYCAADTRRYTCPDIATMHRNFDSWGQGTLVTVSSGTGGGGSGGGGSGGGGSEFDIQMTQSPSSLSASVGDRVTITCKASDHINNWLAWYQQKPGKAPKLLIYGATTLETGVPSRFSGSGSGTDFTLTISSLQPEDFATYYCQQSWNTPWTFGQGTKVEIKRLEIQNPDPAVYQLRDSKSSDKSVCLFTDFDSQTNVSQSKDSDVYITDKCVLDMRSMDFKSNSAVAWSNKSDFACANAFNNSIIPEDTFFPSPESSCGFTSESYQQGVLSATILYEILLGKATLYAVLVSALVLMAMVKRKDSRGRAKRSGSGATNFSLLKQAGDVEENPGPTSMDWIWRILFLVGAATGAHSFEEVQLVESGGGLVQPGGSLRLSCAASGYTFSSYWVNWVRQAPGKGLEWVAQIYPGDGDTNYNGKFKGRFTISRDNSKNTLYLQMNSLRAEDTAVYYCARSITTVVGCAMDYWGQGTLVTVSSTRDLKNVFPPEVAVFEPSEAEISHTQKATLVCLATGFYPDHVELSWWVNGKEVHSGVCTDPQPLKEQPALNDSRYCLSSRLRVSATFWQNPRNHFRCQVQFYGLSENDEWTQDRAKPVTQIVSAEAWGRADCDVKLVEKSFETDTNLNFQNLSVIGFRILLLKVAGFNLLMTLRLWSS

SEQ ID NO: 45995 - protein, 769 aa, synthetic construct
MALPVTALLLPLALLLHAARPEVQLVESGGGLVQPGGSLRLSCEASGFASDDYIIGWFRQAPGKEREGVSCISSKYANTVYTDSVKGRFRLSRGTAKNTVYLQMSALKPEDTAVYYCAMDSRRVTCPEISTMHRNFDSWGQGTLVTVSSGTGGGGSGGGGSGGGGSEFDIQMTQSPSSLSASVGDRVTITCKASDHINNWLAWYQQKPGKAPKLLIYGATTLETGVPSRFSGSGSGTDFTLTISSLQPEDFATYYCQQSWNTPWTFGQGTKVEIKRLEIQNPDPAVYQLRDSKSSDKSVCLFTDFDSQTNVSQSKDSDVYITDKCVLDMRSMDFKSNSAVAWSNKSDFACANAFNNSIIPEDTFFPSPESSCGFTSESYQQGVLSATILYEILLGKATLYAVLVSALVLMAMVKRKDSRGRAKRSGSGATNFSLLKQAGDVEENPGPTSMDWIWRILFLVGAATGAHSFEEVQLVESGGGLVQPGGSLRLSCAASGYTFSSYWVNWVRQAPGKGLEWVAQIYPGDGDTNYNGKFKGRFTISRDNSKNTLYLQMNSLRAEDTAVYYCARSITTVVGCAMDYWGQGTLVTVSSTRDLKNVFPPEVAVFEPSEAEISHTQKATLVCLATGFYPDHVELSWWVNGKEVHSGVCTDPQPLKEQPALNDSRYCLSSRLRVSATFWQNPRNHFRCQVQFYGLSENDEWTQDRAKPVTQIVSAEAWGRADCDVKLVEKSFETDTNLNFQNLSVIGFRILLLKVAGFNLLMTLRLWSS

SEQ ID NO: 45996 - protein, 760 aa, synthetic construct
MALPVTALLLPLALLLHAARPQVKLEESGGGLVQPGESLRLSCSASGSIFKVFRVFAMSWYRQGPGKQRELVASISSGETTTYAESVKGRFTISRDNAKNTAYLQMDSLKPEDTAVYYCNADHTFTGDFWGQGTQVTVSSGTGGGGSGGGGSGGGGSEFDIQMTQSPSSLSASVGDRVTITCKASDHINNWLAWYQQKPGKAPKLLIYGATTLETGVPSRFSGSGSGTDFTLTISSLQPEDFATYYCQQSWNTPWTFGQGTKVEIKRLEIQNPDPAVYQLRDSKSSDKSVCLFTDFDSQTNVSQSKDSDVYITDKCVLDMRSMDFKSNSAVAWSNKSDFACANAFNNSIIPEDTFFPSPESSCGFTSESYQQGVLSATILYEILLGKATLYAVLVSALVLMAMVKRKDSRGRAKRSGSGATNFSLLKQAGDVEENPGPTSMDWIWRILFLVGAATGAHSFEEVQLVESGGGLVQPGGSLRLSCAASGYTFSSYWVNWVRQAPGKGLEWVAQIYPGDGDTNYNGKFKGRFTISRDNSKNTLYLQMNSLRAEDTAVYYCARSITTVVGCAMDYWGQGTLVTVSSTRDLKNVFPPEVAVFEPSEAEISHTQKATLVCLATGFYPDHVELSWWVNGKEVHSGVCTDPQPLKEQPALNDSRYCLSSRLRVSATFWQNPRNHFRCQVQFYGLSENDEWTQDRAKPVTQIVSAEAWGRADCDVKLVEKSFETDTNLNFQNLSVIGFRILLLKVAGFNLLMTLRLWSS

SEQ ID NO: 45997 - protein, 761 aa, synthetic construct
MALPVTALLLPLALLLHAARPDIQMTQSPSSLSASVGDRVTITCKASDHINNWLAWYQQKPGKAPKLLIYGATTLETGVPSRFSGSGSGTDFTLTISSLQPEDFATYYCQQSWNTPWTFGQGTKVEIKRLEDLKNVFPPEVAVFEPSEAEISHTQKATLVCLATGFYPDHVELSWWVNGKEVHSGVCTDPQPLKEQPALNDSRYCLSSRLRVSATFWQNPRNHFRCQVQFYGLSENDEWTQDRAKPVTQIVSAEAWGRADCDVKLVEKSFETDTNLNFQNLSVIGFRILLLKVAGFNLLMTLRLWSSRAKRSGSGATNFSLLKQAGDVEENPGPTSATMDWIWRILFLVGAATGAHSGPEVQLVESGGGLVQAGGSLRLSCAASGRTFSMGWFRQAPGKEREFVAAITYSGGSPYYADSVKGRFTISRDNAKNTVYLQMNSLKPEDTAVYYCAANPTYGSDWNAENWGQGTQVTVSSGSGGGGSGGGGSGGGGSFEEVQLVESGGGLVQPGGSLRLSCAASGYTFSSYWVNWVRQAPGKGLEWVAQIYPGDGDTNYNGKFKGRFTISRDNSKNTLYLQMNSLRAEDTAVYYCARSITTVVGCAMDYWGQGTLVTVSSTRIQNPDPAVYQLRDSKSSDKSVCLFTDFDSQTNVSQSKDSDVYITDKCVLDMRSMDFKSNSAVAWSNKSDFACANAFNNSIIPEDTFFPSPESSCGFTSESYQQGVLSATILYEILLGKATLYAVLVSALVLMAMVKRKDSRG

SEQ ID NO: 45998 - protein, 762 aa, synthetic construct
MALPVTALLLPLALLLHAARPDIQMTQSPSSLSASVGDRVTITCKASDHINNWLAWYQQKPGKAPKLLIYGATTLETGVPSRFSGSGSGTDFTLTISSLQPEDFATYYCQQSWNTPWTFGQGTKVEIKRLEDLKNVFPPEVAVFEPSEAEISHTQKATLVCLATGFYPDHVELSWWVNGKEVHSGVCTDPQPLKEQPALNDSRYCLSSRLRVSATFWQNPRNHFRCQVQFYGLSENDEWTQDRAKPVTQIVSAEAWGRADCDVKLVEKSFETDTNLNFQNLSVIGFRILLLKVAGFNLLMTLRLWSSRAKRSGSGATNFSLLKQAGDVEENPGPTSATMDWIWRILFLVGAATGAHSGPEVQLVESGGGLVQPGGSLRLSCAASGSIFGFNDMAWYRQAPGKQRELVALISRVGVTSSADSVKGRFTISRVNAKDTVYLQMNSLKPEDTAVYYCYMDQRLDGSTLAYWGQGTQVTVSSGSGGGGSGGGGSGGGGSFEEVQLVESGGGLVQPGGSLRLSCAASGYTFSSYWVNWVRQAPGKGLEWVAQIYPGDGDTNYNGKFKGRFTISRDNSKNTLYLQMNSLRAEDTAVYYCARSITTVVGCAMDYWGQGTLVTVSSTRIQNPDPAVYQLRDSKSSDKSVCLFTDFDSQTNVSQSKDSDVYITDKCVLDMRSMDFKSNSAVAWSNKSDFACANAFNNSIIPEDTFFPSPESSCGFTSESYQQGVLSATILYEILLGKATLYAVLVSALVLMAMVKRKDSRG

SEQ ID NO: 45999 - protein, 758 aa, synthetic construct
MALPVTALLLPLALLLHAARPDIQMTQSPSSLSASVGDRVTITCKASDHINNWLAWYQQKPGKAPKLLIYGATTLETGVPSRFSGSGSGTDFTLTISSLQPEDFATYYCQQSWNTPWTFGQGTKVEIKRLEDLKNVFPPEVAVFEPSEAEISHTQKATLVCLATGFYPDHVELSWWVNGKEVHSGVCTDPQPLKEQPALNDSRYCLSSRLRVSATFWQNPRNHFRCQVQFYGLSENDEWTQDRAKPVTQIVSAEAWGRADCDVKLVEKSFETDTNLNFQNLSVIGFRILLLKVAGFNLLMTLRLWSSRAKRSGSGATNFSLLKQAGDVEENPGPTSATMDWIWRILFLVGAATGAHSGPEVQLVESGGGLVQAGGSLRLSCAASGSVFSGNVMGWYRQAPGKEREWVAAIASGGSIYYRDSVKGRFTISRDNAKNTVYLQMNSLKPEDTAVYYCNSHPPTLPYWGLGTQVTVSSGSGGGGSGGGGSGGGGSFEEVQLVESGGGLVQPGGSLRLSCAASGYTFSSYWVNWVRQAPGKGLEWVAQIYPGDGDTNYNGKFKGRFTISRDNSKNTLYLQMNSLRAEDTAVYYCARSITTVVGCAMDYWGQGTLVTVSSTRIQNPDPAVYQLRDSKSSDKSVCLFTDFDSQTNVSQSKDSDVYITDKCVLDMRSMDFKSNSAVAWSNKSDFACANAFNNSIIPEDTFFPSPESSCGFTSESYQQGVLSATILYEILLGKATLYAVLVSALVLMAMVKRKDSRG

SEQ ID NO: 46000 - protein, 756 aa, synthetic construct
MALPVTALLLPLALLLHAARPDIQMTQSPSSLSASVGDRVTITCKASDHINNWLAWYQQKPGKAPKLLIYGATTLETGVPSRFSGSGSGTDFTLTISSLQPEDFATYYCQQSWNTPWTFGQGTKVEIKRLEDLKNVFPPEVAVFEPSEAEISHTQKATLVCLATGFYPDHVELSWWVNGKEVHSGVCTDPQPLKEQPALNDSRYCLSSRLRVSATFWQNPRNHFRCQVQFYGLSENDEWTQDRAKPVTQIVSAEAWGRADCDVKLVEKSFETDTNLNFQNLSVIGFRILLLKVAGFNLLMTLRLWSSRAKRSGSGATNFSLLKQAGDVEENPGPTSATMDWIWRILFLVGAATGAHSGPEVQLLESGGGLVQPGGSLRLSCAASGFSFSSYALSWVRQAPGKGLEWVSSIGENDGTTDYADAVKGRFTISRDNSKNTLYLQMNSLRVEDTAVYYCVKDGIHWGQGTLVTVSSGSGGGGSGGGGSGGGGSFEEVQLVESGGGLVQPGGSLRLSCAASGYTFSSYWVNWVRQAPGKGLEWVAQIYPGDGDTNYNGKFKGRFTISRDNSKNTLYLQMNSLRAEDTAVYYCARSITTVVGCAMDYWGQGTLVTVSSTRIQNPDPAVYQLRDSKSSDKSVCLFTDFDSQTNVSQSKDSDVYITDKCVLDMRSMDFKSNSAVAWSNKSDFACANAFNNSIIPEDTFFPSPESSCGFTSESYQQGVLSATILYEILLGKATLYAVLVSALVLMAMVKRKDSRG

SEQ ID NO: 46001 - protein, 1125 aa, synthetic construct
MGPRLLFWALLCLLGTGPVEAGVTQSPTHLIKTRGQQATLRCSPISGHTSVYWYQQALGLGLQFLLWYDEGEERNRGNFPPRFSGRQFPNYSSELNVNALELEDSALYLCASSLGGPRGLAGLRGDEQFFGPGTRLTVLEGTGGGGSGGGEFDIQMTQSPSSLSASVGDRVTITCKASDHINNWLAWYQQKPGKAPKLLIYGATTLETGVPSRFSGSGSGTDFTLTISSLQPEDFATYYCQQSWNTPWTFGQGTKVEIKRLEDLKNVFPPEVAVFEPSEAEISHTQKATLVCLATGFYPDHVELSWWVNGKEVHSGVCTDPQPLKEQPALNDSRYCLSSRLRVSATFWQNPRNHFRCQVQFYGLSENDEWTQDRAKPVTQIVSAEAWGRADCDVKLVEKSFETDTNLNFQNLSVIGFRILLLKVAGFNLLMTLRLWSSRAKRSGSGATNFSLLKQAGDVEENPGPTSATMDWIWRILFLVGAATGAHSGPEVQLVESGGGLVQAGGSLRLSCAASGRTFSMGWFRQAPGKEREFVAAITYSGGSPYYADSVKGRFTISRDNAKNTVYLQMNSLKPEDTAVYYCAANPTYGSDWNAENWGQGTQVTVSSGSGGGGSGGGGSGGGGSFEEVQLVESGGGLVQPGGSLRLSCAASGYTFSSYWVNWVRQAPGKGLEWVAQIYPGDGDTNYNGKFKGRFTISRDNSKNTLYLQMNSLRAEDTAVYYCARSITTVVGCAMDYWGQGTLVTVSSTRIQNPDPAVYQLRDSKSSDKSVCLFTDFDSQTNVSQSKDSDVYITDKCVLDMRSMDFKSNSAVAWSNKSDFACANAFNNSIIPEDTFFPSPESSCGFTSESYQQGVLSATILYEILLGKATLYAVLVSALVLMAMVKRKDSRGRAKRSGSGVKQTLNFDLLKLAGDVESNPGPSRGHMTEYKPTVRLATRDDVPRAVRTLAAAFADYPATRHTVDPDRHIERVTELQELFLTRVGLDIGKVWVADDGAAVAVWTTPESVEAGAVFAEIGPRMAELSGSRLAAQQQMEGLLAPHRPKEPAWFLATVGVSPDHQGKGLGSAVVLPGVEAAERAGVPAFLETSAPRNLPFYERLGFTVTADVEVPEGPRTWCMTRKPGA

SEQ ID NO: 46002 - protein, 1124 aa, synthetic construct
MGPRLLFWALLCLLGTGPVEAGVTQSPTHLIKTRGQQATLRCSPISGHTSVYWYQQALGLGLQFLLWYDEGEERNRGNFPPRFSGRQFPNYSSELNVNALELEDSALYLCASSLGGDELGADGNEQFFGPGTRLTVLEGTGGGGSGGGSEFDIQMTQSPSSLSASVGDRVTITCKASDHINNWLAWYQQKPGKAPKLLIYGATTLETGVPSRFSGSGSGTDFTLTISSLQPEDFATYYCQQSWNTPWTFGQGTKVEIKRLEDLKNVFPPEVAVFEPSEAEISHTQKATLVCLATGFYPDHVELSWWVNGKEVHSGVCTDPQPLKEQPALNDSRYCLSSRLRVSATFWQNPRNHFRCQVQFYGLSENDEWTQDRAKPVTQIVSAEAWGRADCDVKLVEKSFETDTNLNFQNLSVIGFRILLLKVAGFNLLMTLRLWSSRAKRSGSGATNFSLLKQAGDVEENPGPTSATMDWIWRILFLVGAATGAHSGPEVQLVESGGGLVQAGGSLRLSCAASGRTFSMGWFRQAPGKEREFVAAITYSGGSPYYADSVKGRFTISRDNAKNTVYLQMNSLKPEDTAVYYCAANPTYGSDWNAENWGQGTQVTVSSGSGGGGSGGGGSGGGGSFEEVQLVESGGGLVQPGGSLRLSCAASGYTFSSYWVNWVRQAPGKGLEWVAQIYPGDGDTNYNGKFKGRFTISRDNSKNTLYLQMNSLRAEDTAVYYCARSITTVVGCAMDYWGQGTLVTVSSTRIQNPDPAVYQLRDSKSSDKSVCLFTDFDSQTNVSQSKDSDVYITDKCVLDMRSMDFKSNSAVAWSNKSDFACANAFNNSIIPEDTFFPSPESSCGFTSESYQQGVLSATILYEILLGKATLYAVLVSALVLMAMVKRKDSRGRAKRSGSGVKQTLNFDLLKLAGDVESNPGPSRGHMTEYKPTVRLATRDDVPRAVRTLAAAFADYPATRHTVDPDRHIERVTELQELFLTRVGLDIGKVWVADDGAAVAVWTTPESVEAGAVFAEIGPRMAELSGSRLAAQQQMEGLLAPHRPKEPAWFLATVGVSPDHQGKGLGSAVVLPGVEAAERAGVPAFLETSAPRNLPFYERLGFTVTADVEVPEGPRTWCMTRKPGA

SEQ ID NO: 46003 - protein, 949 aa, synthetic construct
MALPVTALLLPLALLLHAARPDIQMTQSPSSLSASVGDRVTITCKASDHINNWLAWYQQKPGKAPKLLIYGATTLETGVPSRFSGSGSGTDFTLTISSLQPEDFATYYCQQSWNTPWTFGQGTKVEIKRLEDLKNVFPPEVAVFEPSEAEISHTQKATLVCLATGFYPDHVELSWWVNGKEVHSGVCTDPQPLKEQPALNDSRYCLSSRLRVSATFWQNPRNHFRCQVQFYGLSENDEWTQDRAKPVTQIVSAEAWGRADCDVKLVEKSFETDTNLNFQNLSVIGFRILLLKVAGFNLLMTLRLWSSRAKRSGSGATNFSLLKQAGDVEENPGPTSATMDWIWRILFLVGAATGAHSGPMGSWLEFYHRLNAIDSRLWALGGSEAELAAFEKEIAAFESELQAYKGKGNPEVESLRDHAAHIREWLQAYRHNGSGGGGSGGGGSGGGGSFEEVQLVESGGGLVQPGGSLRLSCAASGYTFSSYWVNWVRQAPGKGLEWVAQIYPGDGDTNYNGKFKGRFTISRDNSKNTLYLQMNSLRAEDTAVYYCARSITTVVGCAMDYWGQGTLVTVSSTRIQNPDPAVYQLRDSKSSDKSVCLFTDFDSQTNVSQSKDSDVYITDKCVLDMRSMDFKSNSAVAWSNKSDFACANAFNNSIIPEDTFFPSPESSCGFTSESYQQGVLSATILYEILLGKATLYAVLVSALVLMAMVKRKDSRGRAKRSGSGVKQTLNFDLLKLAGDVESNPGPSRGHMTEYKPTVRLATRDDVPRAVRTLAAAFADYPATRHTVDPDRHIERVTELQELFLTRVGLDIGKVWVADDGAAVAVWTTPESVEAGAVFAEIGPRMAELSGSRLAAQQQMEGLLAPHRPKEPAWFLATVGVSPDHQGKGLGSAVVLPGVEAAERAGVPAFLETSAPRNLPFYERLGFTVTADVEVPEGPRTWCMTRKPGA

SEQ ID NO: 46004 - protein, 949 aa, synthetic construct
MALPVTALLLPLALLLHAARPACMGSWFEFYDRLNAIDARLWALGGSEAELAAFEKEIAAFESELQAYKGKGNPEVENLRVHAAAIREWLQAYRHNGTGGGGSGGGGSGGGGSEFDIQMTQSPSSLSASVGDRVTITCKASDHINNWLAWYQQKPGKAPKLLIYGATTLETGVPSRFSGSGSGTDFTLTISSLQPEDFATYYCQQSWNTPWTFGQGTKVEIKRLEDLKNVFPPEVAVFEPSEAEISHTQKATLVCLATGFYPDHVELSWWVNGKEVHSGVCTDPQPLKEQPALNDSRYCLSSRLRVSATFWQNPRNHFRCQVQFYGLSENDEWTQDRAKPVTQIVSAEAWGRADCDVKLVEKSFETDTNLNFQNLSVIGFRILLLKVAGFNLLMTLRLWSSRAKRSGSGATNFSLLKQAGDVEENPGPTSMDWIWRILFLVGAATGAHSFEEVQLVESGGGLVQPGGSLRLSCAASGYTFSSYWVNWVRQAPGKGLEWVAQIYPGDGDTNYNGKFKGRFTISRDNSKNTLYLQMNSLRAEDTAVYYCARSITTVVGCAMDYWGQGTLVTVSSTRIQNPDPAVYQLRDSKSSDKSVCLFTDFDSQTNVSQSKDSDVYITDKCVLDMRSMDFKSNSAVAWSNKSDFACANAFNNSIIPEDTFFPSPESSCGFTSESYQQGVLSATILYEILLGKATLYAVLVSALVLMAMVKRKDSRGRAKRSGSGVKQTLNFDLLKLAGDVESNPGPSRGHMTEYKPTVRLATRDDVPRAVRTLAAAFADYPATRHTVDPDRHIERVTELQELFLTRVGLDIGKVWVADDGAAVAVWTTPESVEAGAVFAEIGPRMAELSGSRLAAQQQMEGLLAPHRPKEPAWFLATVGVSPDHQGKGLGSAVVLPGVEAAERAGVPAFLETSAPRNLPFYERLGFTVTADVEVPEGPRTWCMTRKPGA

SEQ ID NO: 46005 - protein, 1066 aa, synthetic construct
MALPVTALLLPLALLLHAARPACMDPDLEIRAAFLRQRNTALRTEVAELEQEVQRLENEVSQYETRYGPLGGGKGTGGGGSGGGGSGGGGSEFDIQMTQSPSSLSASVGDRVTITCKASDHINNWLAWYQQKPGKAPKLLIYGATTLETGVPSRFSGSGSGTDFTLTISSLQPEDFATYYCQQSWNTPWTFGQGTKVEIKRLEDLKNVFPPEVAVFEPSEAEISHTQKATLVCLATGFYPDHVELSWWVNGKEVHSGVCTDPQPLKEQPALNDSRYCLSSRLRVSATFWQNPRNHFRCQVQFYGLSENDEWTQDRAKPVTQIVSAEAWGRADCDVKLVEKSFETDTNLNFQNLSVIGFRILLLKVAGFNLLMTLRLWSSRAKRSGSGATNFSLLKQAGDVEENPGPTSATMDWIWRILFLVGAATGAHSGPEVQLVESGGGLVQAGGSLRLSCAASGRTFSMGWFRQAPGKEREFVAAITYSGGSPYYADSVKGRFTISRDNAKNTVYLQMNSLKPEDTAVYYCAANPTYGSDWNAENWGQGTQVTVSSGSGGGGSGGGGSGGGGSFEEVQLVESGGGLVQPGGSLRLSCAASGYTFSSYWVNWVRQAPGKGLEWVAQIYPGDGDTNYNGKFKGRFTISRDNSKNTLYLQMNSLRAEDTAVYYCARSITTVVGCAMDYWGQGTLVTVSSTRIQNPDPAVYQLRDSKSSDKSVCLFTDFDSQTNVSQSKDSDVYITDKCVLDMRSMDFKSNSAVAWSNKSDFACANAFNNSIIPEDTFFPSPESSCGFTSESYQQGVLSATILYEILLGKATLYAVLVSALVLMAMVKRKDSRGRAKRSGSGVKQTLNFDLLKLAGDVESNPGPSRGHMTEYKPTVRLATRDDVPRAVRTLAAAFADYPATRHTVDPDRHIERVTELQELFLTRVGLDIGKVWVADDGAAVAVWTTPESVEAGAVFAEIGPRMAELSGSRLAAQQQMEGLLAPHRPKEPAWFLATVGVSPDHQGKGLGSAVVLPGVEAAERAGVPAFLETSAPRNLPFYERLGFTVTADVEVPEGPRTWCMTRKPGA

SEQ ID NO: 46006 - protein, 949 aa, synthetic construct
MALPVTALLLPLALLLHAARPDIQMTQSPSSLSASVGDRVTITCKASDHINNWLAWYQQKPGKAPKLLIYGATTLETGVPSRFSGSGSGTDFTLTISSLQPEDFATYYCQQSWNTPWTFGQGTKVEIKRLEDLKNVFPPEVAVFEPSEAEISHTQKATLVCLATGFYPDHVELSWWVNGKEVHSGVCTDPQPLKEQPALNDSRYCLSSRLRVSATFWQNPRNHFRCQVQFYGLSENDEWTQDRAKPVTQIVSAEAWGRADCDVKLVEKSFETDTNLNFQNLSVIGFRILLLKVAGFNLLMTLRLWSSRAKRSGSGATNFSLLKQAGDVEENPGPTSATMDWIWRILFLVGAATGAHSGPMGSWSEFYDRLHAIHHRLYALGGSEAELAAFEKEIAAFESELQAYKGKGNPEVEALRDTAAFIRTRLQAYRHNGSGGGGSGGGGSGGGGSFEEVQLVESGGGLVQPGGSLRLSCAASGYTFSSYWVNWVRQAPGKGLEWVAQIYPGDGDTNYNGKFKGRFTISRDNSKNTLYLQMNSLRAEDTAVYYCARSITTVVGCAMDYWGQGTLVTVSSTRIQNPDPAVYQLRDSKSSDKSVCLFTDFDSQTNVSQSKDSDVYITDKCVLDMRSMDFKSNSAVAWSNKSDFACANAFNNSIIPEDTFFPSPESSCGFTSESYQQGVLSATILYEILLGKATLYAVLVSALVLMAMVKRKDSRGRAKRSGSGVKQTLNFDLLKLAGDVESNPGPSRGHMTEYKPTVRLATRDDVPRAVRTLAAAFADYPATRHTVDPDRHIERVTELQELFLTRVGLDIGKVWVADDGAAVAVWTTPESVEAGAVFAEIGPRMAELSGSRLAAQQQMEGLLAPHRPKEPAWFLATVGVSPDHQGKGLGSAVVLPGVEAAERAGVPAFLETSAPRNLPFYERLGFTVTADVEVPEGPRTWCMTRKPGA

SEQ ID NO: 46007 - protein, 1159 aa, synthetic construct
MALPVTALLLPLALLLHAARPDIQMTQSPSSLSASVGDRVTITCKASDHINNWLAWYQQKPGKAPKLLIYGATTLETGVPSRFSGSGSGTDFTLTISSLQPEDFATYYCQQSWNTPWTFGQGTKVEIKRLEDLKNVFPPEVAVFEPSEAEISHTQKATLVCLATGFYPDHVELSWWVNGKEVHSGVCTDPQPLKEQPALNDSRYCLSSRLRVSATFWQNPRNHFRCQVQFYGLSENDEWTQDRAKPVTQIVSAEAWGRADCDVKLVEKSFETDTNLNFQNLSVIGFRILLLKVAGFNLLMTLRLWSSRAKRSGSGATNFSLLKQAGDVEENPGPTSTMDWIWRILFLVGAATGAHSLFNQEVQIPLTESYCGPCPKNWICYKNNCYQFFDESKNWYESQASCMSQNASLLKVYSKEDQDLLKLVKSAHWMGLVHIPTNGSWQWEDGSILSPNLLTIIEMQKGDCALYASSFKGYIENCSTPNTYICMQRTVSGGGGSGGGGSGGGGDLFNQEVQIPLTESYCGPCPKNWICYKNNCYQFFDESKNWYESQASCMSQNASLLKVYSKEDQDLLKLVKSAHWMGLVHIPTNGSWQWEDGSILSPNLLTIIEMQKGDCALYASSFKGYIENCSTPNTYICMQRTVGSGGGGSGGGGSGGGGSFEEVQLVESGGGLVQPGGSLRLSCAASGYTFSSYWVNWVRQAPGKGLEWVAQIYPGDGDTNYNGKFKGRFTISRDNSKNTLYLQMNSLRAEDTAVYYCARSITTVVGCAMDYWGQGTLVTVSSTRIQNPDPAVYQLRDSKSSDKSVCLFTDFDSQTNVSQSKDSDVYITDKCVLDMRSMDFKSNSAVAWSNKSDFACANAFNNSIIPEDTFFPSPESSCGFTSESYQQGVLSATILYEILLGKATLYAVLVSALVLMAMVKRKDSRGRAKRSGSGVKQTLNFDLLKLAGDVESNPGPSRGHMTEYKPTVRLATRDDVPRAVRTLAAAFADYPATRHTVDPDRHIERVTELQELFLTRVGLDIGKVWVADDGAAVAVWTTPESVEAGAVFAEIGPRMAELSGSRLAAQQQMEGLLAPHRPKEPAWFLATVGVSPDHQGKGLGSAVVLPGVEAAERAGVPAFLETSAPRNLPFYERLGFTVTADVEVPEGPRTWCMTRKPGA

SEQ ID NO: 46008 - protein, 622 aa, synthetic construct; identical to SEQ ID NO: 45965

SEQ ID NO: 46009 - protein, 626 aa, synthetic construct
MALPVTALLLPLALLLHAARPDIQMTQSPSSLSASVGDRVTITCKASDHINNWLAWYQQKPGKAPKLLIYGATTLETGVPSRFSGSGSGTDFTLTISSLQPEDFATYYCQQSWNTPWTFGQGTKVEIKRLEIQNPDPAVYQLRDSKSSDKSVCLFTDFDSQTNVSQSKDSDVYITDKCVLDMRSMDFKSNSAVAWSNKSDFACANAFNNSIIPEDTFFPSPESSCDVKLVEKSFETDTNLNFQILYEILLGKATLYAVLVSALVLMAMVKRKDSRGRAKRSGSGVKQTLNFDLLKLAGDVESNPGPTSMDWIWRILFLVGAATGAHSFEEVQLVESGGGLVQPGGSLRLSCAASGYTFSSYWVNWVRQAPGKGLEWVAQIYPGDGDTNYNGKFKGRFTISRDNSKNTLYLQMNSLRAEDTAVYYCARSITTVVGCAMDYWGQGTLVTVSSTREDLKNVFPPEVAVFEPSEAEISHTQKATLVCLATGFYPDHVELSWWVNGKEVHSGVCTDPQPLKEQPALNDSRYCLSSRLRVSATFWQNPRNHFRCQVQFYGLSENDEWTQDRAKPVTQIVSAEAWGRADCGFTSESYQQGVLSATNLSVIGFRILLLKVAGFNLLMTLRLWSS

SEQ ID NO: 46010 - protein, 757 aa, synthetic construct
MALPVTALLLPLALLLHAARPEVQLVESGGGLVQPGGSLRLSCAASGFSFSDFWMSWVRQAPGKGLEWVATISQAGSEKDYVDSVKGRFTISRDNAKKSLYLQMNSLRAEDTAVYYCASGVYSFDYRGQGTLVTVSSGTGGGGSGGGGSGGGGSEFDIQMTQSPSSLSASVGDRVTITCKASDHINNWLAWYQQKPGKAPKLLIYGATTLETGVPSRFSGSGSGTDFTLTISSLQPEDFATYYCQQSWNTPWTFGQGTKVEIKRLEDLKNVFPPEVAVFEPSEAEISHTQKATLVCLATGFYPDHVELSWWVNGKEVHSGVCTDPQPLKEQPALNDSRYCLSSRLRVSATFWQNPRNHFRCQVQFYGLSENDEWTQDRAKPVTQIVSAEAWGRADCGFTSESYQQGVLSATNLSVIGFRILLLKVAGFNLLMTLRLWSSRAKRSGSGATNFSLLKQAGDVEENPGPTSMDWIWRILFLVGAATGAHSFEEVQLVESGGGLVQPGGSLRLSCAASGYTFSSYWVNWVRQAPGKGLEWVAQIYPGDGDTNYNGKFKGRFTISRDNSKNTLYLQMNSLRAEDTAVYYCARSITTVVGCAMDYWGQGTLVTVSSTRIQNPDPAVYQLRDSKSSDKSVCLFTDFDSQTNVSQSKDSDVYITDKCVLDMRSMDFKSNSAVAWSNKSDFACANAFNNSIIPEDTFFPSPESSCDVKLVEKSFETDTNLNFQILYEILLGKATLYAVLVSALVLMAMVKRKDSRG

SEQ ID NO: 46011 - protein, 761 aa, synthetic construct
MALPVTALLLPLALLLHAARPEVQLVESGGGLVQPGGSLRLSCAASGFSFSDFWMSWVRQAPGKGLEWVATISQAGSEKDYVDSVKGRFTISRDNAKKSLYLQMNSLRAEDTAVYYCASGVYSFDYRGQGTLVTVSSGTGGGGSGGGGSGGGGSEFDIQMTQSPSSLSASVGDRVTITCKASDHINNWLAWYQQKPGKAPKLLIYGATTLETGVPSRFSGSGSGTDFTLTISSLQPEDFATYYCQQSWNTPWTFGQGTKVEIKRLEIQNPDPAVYQLRDSKSSDKSVCLFTDFDSQTNVSQSKDSDVYITDKCVLDMRSMDFKSNSAVAWSNKSDFACANAFNNSIIPEDTFFPSPESSCDVKLVEKSFETDTNLNFQILYEILLGKATLYAVLVSALVLMAMVKRKDSRGRAKRSGSGVKQTLNFDLLKLAGDVESNPGPTSMDWIWRILFLVGAATGAHSFEEVQLVESGGGLVQPGGSLRLSCAASGYTFSSYWVNWVRQAPGKGLEWVAQIYPGDGDTNYNGKFKGRFTISRDNSKNTLYLQMNSLRAEDTAVYYCARSITTVVGCAMDYWGQGTLVTVSSTREDLKNVFPPEVAVFEPSEAEISHTQKATLVCLATGFYPDHVELSWWVNGKEVHSGVCTDPQPLKEQPALNDSRYCLSSRLRVSATFWQNPRNHFRCQVQFYGLSENDEWTQDRAKPVTQIVSAEAWGRADCGFTSESYQQGVLSATNLSVIGFRILLLKVAGFNLLMTLRLWSS

SEQ ID NO: 46012 - protein, 894 aa, synthetic construct
MALPVTALLLPLALLLHAARPEVQLVESGGGLVQPGGSLRLSCAASGFSFSDFWMSWVRQAPGKGLEWVATISQAGSEKDYVDSVKGRFTISRDNAKKSLYLQMNSLRAEDTAVYYCASGVYSFDYRGQGTLVTVSSGTGGGGSGGGGSGGGGSEFDIQMTQSPSSLSASVGDRVTITCKASDHINNWLAWYQQKPGKAPKLLIYGATTLETGVPSRFSGSGSGTDFTLTISSLQPEDFATYYCQQSWNTPWTFGQGTKVEIKRLEDLKNVFPPEVAVFEPSEAEISHTQKATLVCLATGFYPDHVELSWWVNGKEVHSGVCTDPQPLKEQPALNDSRYCLSSRLRVSATFWQNPRNHFRCQVQFYGLSENDEWTQDRAKPVTQIVSAEAWGRADCGFTSESYQQGVLSATNLSVIGFRILLLKVAGFNLLMTLRLWSSRAKRSGSGATNFSLLKQAGDVEENPGPTSMDWIWRILFLVGAATGAHSGPQLQLQESGPGLVKPSETLSLTCTVSGDSISSGDYYWGWIRQPPGKGLEWIGHIYYSGVTYYNPSLKSRVTISVDTSRNQFSLKLSSVTAADTAVYYCTREDSSNWRSRGQGTLVTVSSGSGGGGSGGGGSGGGGSFEEVQLVESGGGLVQPGGSLRLSCAASGYTFSSYWVNWVRQAPGKGLEWVAQIYPGDGDTNYNGKFKGRFTISRDNSKNTLYLQMNSLRAEDTAVYYCARSITTVVGCAMDYWGQGTLVTVSSTRIQNPDPAVYQLRDSKSSDKSVCLFTDFDSQTNVSQSKDSDVYITDKCVLDMRSMDFKSNSAVAWSNKSDFACANAFNNSIIPEDTFFPSPESSCDVKLVEKSFETDTNLNFQILYEILLGKATLYAVLVSALVLMAMVKRKDSRG

SEQ ID NO: 46013 - protein, 898 aa, synthetic construct
MALPVTALLLPLALLLHAARPEVQLVESGGGLVQPGGSLRLSCAASGFSFSDFWMSWVRQAPGKGLEWVATISQAGSEKDYVDSVKGRFTISRDNAKKSLYLQMNSLRAEDTAVYYCASGVYSFDYRGQGTLVTVSSGTGGGGSGGGGSGGGGSEFDIQMTQSPSSLSASVGDRVTITCKASDHINNWLAWYQQKPGKAPKLLIYGATTLETGVPSRFSGSGSGTDFTLTISSLQPEDFATYYCQQSWNTPWTFGQGTKVEIKRLEIQNPDPAVYQLRDSKSSDKSVCLFTDFDSQTNVSQSKDSDVYITDKCVLDMRSMDFKSNSAVAWSNKSDFACANAFNNSIIPEDTFFPSPESSCDVKLVEKSFETDTNLNFQILYEILLGKATLYAVLVSALVLMAMVKRKDSRGRAKRSGSGVKQTLNFDLLKLAGDVESNPGPTSMDWIWRILFLVGAATGAHSGPQLQLQESGPGLVKPSETLSLTCTVSGDSISSGDYYWGWIRQPPGKGLEWIGHIYYSGVTYYNPSLKSRVTISVDTSRNQFSLKLSSVTAADTAVYYCTREDSSNWRSRGQGTLVTVSSGSGGGGSGGGGSGGGGSFEEVQLVESGGGLVQPGGSLRLSCAASGYTFSSYWVNWVRQAPGKGLEWVAQIYPGDGDTNYNGKFKGRFTISRDNSKNTLYLQMNSLRAEDTAVYYCARSITTVVGCAMDYWGQGTLVTVSSTREDLKNVFPPEVAVFEPSEAEISHTQKATLVCLATGFYPDHVELSWWVNGKEVHSGVCTDPQPLKEQPALNDSRYCLSSRLRVSATFWQNPRNHFRCQVQFYGLSENDEWTQDRAKPVTQIVSAEAWGRADCGFTSESYQQGVLSATNLSVIGFRILLLKVAGFNLLMTLRLWSS

SEQ ID NO: 46014 - protein, 726 aa, synthetic construct
MALPVTALLLPLALLLHAARPDIQMTQSPSSLSASVGDRVTITCKASDHINNWLAWYQQKPGKAPKLLIYGATTLETGVPSRFSGSGSGTDFTLTISSLQPEDFATYYCQQSWNTPWTFGQGTKVEIKRLEDLKNVFPPEVAVFEPSEAEISHTQKATLVCLATGFYPDHVELSWWVNGKEVHSGVCTDPQPLKEQPALNDSRYCLSSRLRVSATFWQNPRNHFRCQVQFYGLSENDEWTQDRAKPVTQIVSAEAWGRADDVIKIHWQEKKSNTILGSQEGNTMKTNDTYMKFSWLTVPEKSLDKEHRCIVRHENNKNGVDQEIIFPPIKTDVITMDPKDNCSKDANDTLLLQLTNTSAYYMYLLLLLKSVVYFAIITCCLLMAMVKRKDSRGRAKRSGSGATNFSLLKQAGDVEENPGPTSMDWIWRILFLVGAATGAHSFEEVQLVESGGGLVQPGGSLRLSCAASGYTFSSYWVNWVRQAPGKGLEWVAQIYPGDGDTNYNGKFKGRFTISRDNSKNTLYLQMNSLRAEDTAVYYCARSITTVVGCAMDYWGQGTLVTVSSTRIQNPDPAVYQLRDSKSSDKSVCLFTDFDSQTNVSQSKDSDVYITDKCVLDMRSMDFKSNSAVAWSNKSDFACANAFNNSIIPEDTFFPSPESSDSTDHVKPKETENTKQPSKSCHKPKAIVHTEKVNMMSLTVLGLRMLFAKTVAVNFLLTAKLFFLLTA

SEQ ID NO: 46015 - protein, 730 aa, synthetic construct
MALPVTALLLPLALLLHAARPDIQMTQSPSSLSASVGDRVTITCKASDHINNWLAWYQQKPGKAPKLLIYGATTLETGVPSRFSGSGSGTDFTLTISSLQPEDFATYYCQQSWNTPWTFGQGTKVEIKRLEIQNPDPAVYQLRDSKSSDKSVCLFTDFDSQTNVSQSKDSDVYITDKCVLDMRSMDFKSNSAVAWSNKSDFACANAFNNSIIPEDTFFPSPESSDSTDHVKPKETENTKQPSKSCHKPKAIVHTEKVNMMSLTVLGLRMLFAKTVAVNFLLTAKLFFLLTARAKRSGSGVKQTLNFDLLKLAGDVESNPGPTSMDWIWRILFLVGAATGAHSFEEVQLVESGGGLVQPGGSLRLSCAASGYTFSSYWVNWVRQAPGKGLEWVAQIYPGDGDTNYNGKFKGRFTISRDNSKNTLYLQMNSLRAEDTAVYYCARSITTVVGCAMDYWGQGTLVTVSSTREDLKNVFPPEVAVFEPSEAEISHTQKATLVCLATGFYPDHVELSWWVNGKEVHSGVCTDPQPLKEQPALNDSRYCLSSRLRVSATFWQNPRNHFRCQVQFYGLSENDEWTQDRAKPVTQIVSAEAWGRADDVIKIHWQEKKSNTILGSQEGNTMKTNDTYMKFSWLTVPEKSLDKEHRCIVRHENNKNGVDQEIIFPPIKTDVITMDPKDNCSKDANDTLLLQLTNTSAYYMYLLLLLKSVVYFAIITCCLLMAMVKRKDSRG

SEQ ID NO: 46016 - protein, 861 aa, synthetic construct
MALPVTALLLPLALLLHAARPEVQLVESGGGLVQPGGSLRLSCAASGFSFSDFWMSWVRQAPGKGLEWVATISQAGSEKDYVDSVKGRFTISRDNAKKSLYLQMNSLRAEDTAVYYCASGVYSFDYRGQGTLVTVSSGTGGGGSGGGGSGGGGSEFDIQMTQSPSSLSASVGDRVTITCKASDHINNWLAWYQQKPGKAPKLLIYGATTLETGVPSRFSGSGSGTDFTLTISSLQPEDFATYYCQQSWNTPWTFGQGTKVEIKRLEDLKNVFPPEVAVFEPSEAEISHTQKATLVCLATGFYPDHVELSWWVNGKEVHSGVCTDPQPLKEQPALNDSRYCLSSRLRVSATFWQNPRNHFRCQVQFYGLSENDEWTQDRAKPVTQIVSAEAWGRADDVIKIHWQEKKSNTILGSQEGNTMKTNDTYMKFSWLTVPEKSLDKEHRCIVRHENNKNGVDQEIIFPPIKTDVITMDPKDNCSKDANDTLLLQLTNTSAYYMYLLLLLKSVVYFAIITCCLLMAMVKRKDSRGRAKRSGSGATNFSLLKQAGDVEENPGPTSMDWIWRILFLVGAATGAHSFEEVQLVESGGGLVQPGGSLRLSCAASGYTFSSYWVNWVRQAPGKGLEWVAQIYPGDGDTNYNGKFKGRFTISRDNSKNTLYLQMNSLRAEDTAVYYCARSITTVVGCAMDYWGQGTLVTVSSTRIQNPDPAVYQLRDSKSSDKSVCLFTDFDSQTNVSQSKDSDVYITDKCVLDMRSMDFKSNSAVAWSNKSDFACANAFNNSIIPEDTFFPSPESSDSTDHVKPKETENTKQPSKSCHKPKAIVHTEKVNMMSLTVLGLRMLFAKTVAVNFLLTAKLFFLLTA

SEQ ID NO: 46017 - protein, 865 aa, synthetic construct
MALPVTALLLPLALLLHAARPEVQLVESGGGLVQPGGSLRLSCAASGFSFSDFWMSWVRQAPGKGLEWVATISQAGSEKDYVDSVKGRFTISRDNAKKSLYLQMNSLRAEDTAVYYCASGVYSFDYRGQGTLVTVSSGTGGGGSGGGGSGGGGSEFDIQMTQSPSSLSASVGDRVTITCKASDHINNWLAWYQQKPGKAPKLLIYGATTLETGVPSRFSGSGSGTDFTLTISSLQPEDFATYYCQQSWNTPWTFGQGTKVEIKRLEIQNPDPAVYQLRDSKSSDKSVCLFTDFDSQTNVSQSKDSDVYITDKCVLDMRSMDFKSNSAVAWSNKSDFACANAFNNSIIPEDTFFPSPESSDSTDHVKPKETENTKQPSKSCHKPKAIVHTEKVNMMSLTVLGLRMLFAKTVAVNFLLTAKLFFLLTARAKRSGSGVKQTLNFDLLKLAGDVESNPGPTSMDWIWRILFLVGAATGAHSFEEVQLVESGGGLVQPGGSLRLSCAASGYTFSSYWVNWVRQAPGKGLEWVAQIYPGDGDTNYNGKFKGRFTISRDNSKNTLYLQMNSLRAEDTAVYYCARSITTVVGCAMDYWGQGTLVTVSSTREDLKNVFPPEVAVFEPSEAEISHTQKATLVCLATGFYPDHVELSWWVNGKEVHSGVCTDPQPLKEQPALNDSRYCLSSRLRVSATFWQNPRNHFRCQVQFYGLSENDEWTQDRAKPVTQIVSAEAWGRADDVIKIHWQEKKSNTILGSQEGNTMKTNDTYMKFSWLTVPEKSLDKEHRCIVRHENNKNGVDQEIIFPPIKTDVITMDPKDNCSKDANDTLLLQLTNTSAYYMYLLLLLKSVVYFAIITCCLLMAMVKRKDSRG

SEQ ID NO: 46018 - protein, 998 aa, synthetic construct
MALPVTALLLPLALLLHAARPEVQLVESGGGLVQPGGSLRLSCAASGFSFSDFWMSWVRQAPGKGLEWVATISQAGSEKDYVDSVKGRFTISRDNAKKSLYLQMNSLRAEDTAVYYCASGVYSFDYRGQGTLVTVSSGTGGGGSGGGGSGGGGSEFDIQMTQSPSSLSASVGDRVTITCKASDHINNWLAWYQQKPGKAPKLLIYGATTLETGVPSRFSGSGSGTDFTLTISSLQPEDFATYYCQQSWNTPWTFGQGTKVEIKRLEDLKNVFPPEVAVFEPSEAEISHTQKATLVCLATGFYPDHVELSWWVNGKEVHSGVCTDPQPLKEQPALNDSRYCLSSRLRVSATFWQNPRNHFRCQVQFYGLSENDEWTQDRAKPVTQIVSAEAWGRADDVIKIHWQEKKSNTILGSQEGNTMKTNDTYMKFSWLTVPEKSLDKEHRCIVRHENNKNGVDQEIIFPPIKTDVITMDPKDNCSKDANDTLLLQLTNTSAYYMYLLLLLKSVVYFAIITCCLLMAMVKRKDSRGRAKRSGSGATNFSLLKQAGDVEENPGPTSMDWIWRILFLVGAATGAHSGPQLQLQESGPGLVKPSETLSLTCTVSGDSISSGDYYWGWIRQPPGKGLEWIGHIYYSGVTYYNPSLKSRVTISVDTSRNQFSLKLSSVTAADTAVYYCTREDSSNWRSRGQGTLVTVSSGSGGGGSGGGGSGGGGSFEEVQLVESGGGLVQPGGSLRLSCAASGYTFSSYWVNWVRQAPGKGLEWVAQIYPGDGDTNYNGKFKGRFTISRDNSKNTLYLQMNSLRAEDTAVYYCARSITTVVGCAMDYWGQGTLVTVSSTRIQNPDPAVYQLRDSKSSDKSVCLFTDFDSQTNVSQSKDSDVYITDKCVLDMRSMDFKSNSAVAWSNKSDFACANAFNNSIIPEDTFFPSPESSDSTDHVKPKETENTKQPSKSCHKPKAIVHTEKVNMMSLTVLGLRMLFAKTVAVNFLLTAKLFFLLTA

SEQ ID NO: 46019 - protein, 1002 aa, synthetic construct
MALPVTALLLPLALLLHAARPEVQLVESGGGLVQPGGSLRLSCAASGFSFSDFWMSWVRQAPGKGLEWVATISQAGSEKDYVDSVKGRFTISRDNAKKSLYLQMNSLRAEDTAVYYCASGVYSFDYRGQGTLVTVSSGTGGGGSGGGGSGGGGSEFDIQMTQSPSSLSASVGDRVTITCKASDHINNWLAWYQQKPGKAPKLLIYGATTLETGVPSRFSGSGSGTDFTLTISSLQPEDFATYYCQQSWNTPWTFGQGTKVEIKRLEIQNPDPAVYQLRDSKSSDKSVCLFTDFDSQTNVSQSKDSDVYITDKCVLDMRSMDFKSNSAVAWSNKSDFACANAFNNSIIPEDTFFPSPESSDSTDHVKPKETENTKQPSKSCHKPKAIVHTEKVNMMSLTVLGLRMLFAKTVAVNFLLTAKLFFLLTARAKRSGSGVKQTLNFDLLKLAGDVESNPGPTSMDWIWRILFLVGAATGAHSGPQLQLQESGPGLVKPSETLSLTCTVSGDSISSGDYYWGWIRQPPGKGLEWIGHIYYSGVTYYNPSLKSRVTISVDTSRNQFSLKLSSVTAADTAVYYCTREDSSNWRSRGQGTLVTVSSGSGGGGSGGGGSGGGGSFEEVQLVESGGGLVQPGGSLRLSCAASGYTFSSYWVNWVRQAPGKGLEWVAQIYPGDGDTNYNGKFKGRFTISRDNSKNTLYLQMNSLRAEDTAVYYCARSITTVVGCAMDYWGQGTLVTVSSTREDLKNVFPPEVAVFEPSEAEISHTQKATLVCLATGFYPDHVELSWWVNGKEVHSGVCTDPQPLKEQPALNDSRYCLSSRLRVSATFWQNPRNHFRCQVQFYGLSENDEWTQDRAKPVTQIVSAEAWGRADDVIKIHWQEKKSNTILGSQEGNTMKTNDTYMKFSWLTVPEKSLDKEHRCIVRHENNKNGVDQEIIFPPIKTDVITMDPKDNCSKDANDTLLLQLTNTSAYYMYLLLLLKSVVYFAIITCCLLMAMVKRKDSRG

SEQ ID NO: 46020 - protein, 724 aa, synthetic construct
MALPVTALLLPLALLLHAARPDIQMTQSPSSLSASVGDRVTITCKASDHINNWLAWYQQKPGKAPKLLIYGATTLETGVPSRFSGSGSGTDFTLTISSLQPEDFATYYCQQSWNTPWTFGQGTKVEIKRLEDLKNVFPPEVAVFEPSEAEISHTQKATLVCLATGFYPDHVELSWWVNGKEVHSGVCTDPQPLKEQPALNDSRYCLSSRLRVSATFWQNPRNHFRCQVQFYGLSENDEWTQDRAKPVTQIVSAEAWGRADDVIKIHWQEKKSNTILGSQEGNTMKTNDTYMKFSWLTVPEKSLDKEHRCIVRHENNKNGVDQEIIFPPIKTDVITMDPKDNCSKDANDTLLLQLTNTSAYYMYLLLLLKSVVYFAIITCCLLRRTAFCCNGEKSRAKRSGSGATNFSLLKQAGDVEENPGPTSMDWIWRILFLVGAATGAHSFEEVQLVESGGGLVQPGGSLRLSCAASGYTFSSYWVNWVRQAPGKGLEWVAQIYPGDGDTNYNGKFKGRFTISRDNSKNTLYLQMNSLRAEDTAVYYCARSITTVVGCAMDYWGQGTLVTVSSTRIQNPDPAVYQLRDSKSSDKSVCLFTDFDSQTNVSQSKDSDVYITDKCVLDMRSMDFKSNSAVAWSNKSDFACANAFNNSIIPEDTFFPSPESSDSTDHVKPKETENTKQPSKSCHKPKAIVHTEKVNMMSLTVLGLRMLFAKTVAVNFLLTAKLFFL

SEQ ID NO: 46021 - protein, 728 aa, synthetic construct
MALPVTALLLPLALLLHAARPDIQMTQSPSSLSASVGDRVTITCKASDHINNWLAWYQQKPGKAPKLLIYGATTLETGVPSRFSGSGSGTDFTLTISSLQPEDFATYYCQQSWNTPWTFGQGTKVEIKRLEIQNPDPAVYQLRDSKSSDKSVCLFTDFDSQTNVSQSKDSDVYITDKCVLDMRSMDFKSNSAVAWSNKSDFACANAFNNSIIPEDTFFPSPESSDSTDHVKPKETENTKQPSKSCHKPKAIVHTEKVNMMSLTVLGLRMLFAKTVAVNFLLTAKLFFLRAKRSGSGVKQTLNFDLLKLAGDVESNPGPTSMDWIWRILFLVGAATGAHSFEEVQLVESGGGLVQPGGSLRLSCAASGYTFSSYWVNWVRQAPGKGLEWVAQIYPGDGDTNYNGKFKGRFTISRDNSKNTLYLQMNSLRAEDTAVYYCARSITTVVGCAMDYWGQGTLVTVSSTREDLKNVFPPEVAVFEPSEAEISHTQKATLVCLATGFYPDHVELSWWVNGKEVHSGVCTDPQPLKEQPALNDSRYCLSSRLRVSATFWQNPRNHFRCQVQFYGLSENDEWTQDRAKPVTQIVSAEAWGRADDVIKIHWQEKKSNTILGSQEGNTMKTNDTYMKFSWLTVPEKSLDKEHRCIVRHENNKNGVDQEIIFPPIKTDVITMDPKDNCSKDANDTLLLQLTNTSAYYMYLLLLLKSVVYFAIITCCLLRRTAFCCNGEKS

SEQ ID NO: 46022 - protein, 859 aa, synthetic construct
MALPVTALLLPLALLLHAARPEVQLVESGGGLVQPGGSLRLSCAASGFSFSDFWMSWVRQAPGKGLEWVATISQAGSEKDYVDSVKGRFTISRDNAKKSLYLQMNSLRAEDTAVYYCASGVYSFDYRGQGTLVTVSSGTGGGGSGGGGSGGGGSEFDIQMTQSPSSLSASVGDRVTITCKASDHINNWLAWYQQKPGKAPKLLIYGATTLETGVPSRFSGSGSGTDFTLTISSLQPEDFATYYCQQSWNTPWTFGQGTKVEIKRLEDLKNVFPPEVAVFEPSEAEISHTQKATLVCLATGFYPDHVELSWWVNGKEVHSGVCTDPQPLKEQPALNDSRYCLSSRLRVSATFWQNPRNHFRCQVQFYGLSENDEWTQDRAKPVTQIVSAEAWGRADDVIKIHWQEKKSNTILGSQEGNTMKTNDTYMKFSWLTVPEKSLDKEHRCIVRHENNKNGVDQEIIFPPIKTDVITMDPKDNCSKDANDTLLLQLTNTSAYYMYLLLLLKSVVYFAIITCCLLRRTAFCCNGEKSRAKRSGSGATNFSLLKQAGDVEENPGPTSMDWIWRILFLVGAATGAHSFEEVQLVESGGGLVQPGGSLRLSCAASGYTFSSYWVNWVRQAPGKGLEWVAQIYPGDGDTNYNGKFKGRFTISRDNSKNTLYLQMNSLRAEDTAVYYCARSITTVVGCAMDYWGQGTLVTVSSTRIQNPDPAVYQLRDSKSSDKSVCLFTDFDSQTNVSQSKDSDVYITDKCVLDMRSMDFKSNSAVAWSNKSDFACANAFNNSIIPEDTFFPSPESSDSTDHVKPKETENTKQPSKSCHKPKAIVHTEKVNMMSLTVLGLRMLFAKTVAVNFLLTAKLFFL

SEQ ID NO: 46023 - protein, 996 aa, synthetic construct
MALPVTALLLPLALLLHAARPEVQLVESGGGLVQPGGSLRLSCAASGFSFSDFWMSWVRQAPGKGLEWVATISQAGSEKDYVDSVKGRFTISRDNAKKSLYLQMNSLRAEDTAVYYCASGVYSFDYRGQGTLVTVSSGTGGGGSGGGGSGGGGSEFDIQMTQSPSSLSASVGDRVTITCKASDHINNWLAWYQQKPGKAPKLLIYGATTLETGVPSRFSGSGSGTDFTLTISSLQPEDFATYYCQQSWNTPWTFGQGTKVEIKRLEDLKNVFPPEVAVFEPSEAEISHTQKATLVCLATGFYPDHVELSWWVNGKEVHSGVCTDPQPLKEQPALNDSRYCLSSRLRVSATFWQNPRNHFRCQVQFYGLSENDEWTQDRAKPVTQIVSAEAWGRADDVIKIHWQEKKSNTILGSQEGNTMKTNDTYMKFSWLTVPEKSLDKEHRCIVRHENNKNGVDQEIIFPPIKTDVITMDPKDNCSKDANDTLLLQLTNTSAYYMYLLLLLKSVVYFAIITCCLLRRTAFCCNGEKSRAKRSGSGATNFSLLKQAGDVEENPGPTSMDWIWRILFLVGAATGAHSGPQLQLQESGPGLVKPSETLSLTCTVSGDSISSGDYYWGWIRQPPGKGLEWIGHIYYSGVTYYNPSLKSRVTISVDTSRNQFSLKLSSVTAADTAVYYCTREDSSNWRSRGQGTLVTVSSGSGGGGSGGGGSGGGGSFEEVQLVESGGGLVQPGGSLRLSCAASGYTFSSYWVNWVRQAPGKGLEWVAQIYPGDGDTNYNGKFKGRFTISRDNSKNTLYLQMNSLRAEDTAVYYCARSITTVVGCAMDYWGQGTLVTVSSTRIQNPDPAVYQLRDSKSSDKSVCLFTDFDSQTNVSQSKDSDVYITDKCVLDMRSMDFKSNSAVAWSNKSDFACANAFNNSIIPEDTFFPSPESSDSTDHVKPKETENTKQPSKSCHKPKAIVHTEKVNMMSLTVLGLRMLFAKTVAVNFLLTAKLFFL

SEQ ID NO: 46024 - protein, 622 aa, synthetic construct
MALPVTALLLPLALLLHAARPDIQMTQSPSSLSASVGDRVTITCKASDHINNWLAWYQQKPGKAPKLLIYGATTLETGVPSRFSGSGSGTDFTLTISSLQPEDFATYYCQQSWNTPWTFGQGTKVEIKRLEDLKNVFPPEVAVFEPSEAEISHTQKATLVCLATGFYPDHVELSWWVNGKEVHSGVSTDPQPLKEQPALNDSRYCLSSRLRVSATFWQNPRNHFRCQVQFYGLSENDEWTQDRAKPVTQIVSAEAWGRADCDVKLVEKSFETDTNLNFQNLSVIGFRILLLKVAGFNLLMTLRLWSSRAKRSGSGATNFSLLKQAGDVEENPGPTSMDWIWRILFLVGAATGAHSFEEVQLVESGGGLVQPGGSLRLSCAASGYTFSSYWVNWVRQAPGKGLEWVAQIYPGDGDTNYNGKFKGRFTISRDNSKNTLYLQMNSLRAEDTAVYYCARSITTVVGCAMDYWGQGTLVTVSSTRIQNPDPAVYQLRDSKSSDKSVCLFTDFDSQTNVSQSKDSDVYITDKTVLDMRSMDFKSNSAVAWSNKSDFACANAFNNSIIPEDTFFPSPESSCGFTSESYQQGVLSATILYEILLGKATLYAVLVSALVLMAMVKRKDSRG

SEQ ID NO: 46025 - protein, 622 aa, synthetic construct
MALPVTALLLPLALLLHAARPDIQMTQSPSSLSASVGDRVTITCKASDHINNWLAWYQQKPGKAPKLLIYGATTLETGVPSRFSGSGSGTDFTLTISSLQPEDFATYYCQQSWNTPWTFGQGTKVEIKRLEDLKNVFPPEVAVFEPSEAEISHTQKATLVCLATGFYPDHVELSWWVNGKEVHSGVSTDPQPLKEQPALNDSRYCLSSRLRVSATFWQNPRNHFRCQVQFYGLSENDEWTQDRAKPVTQIVSAEAWGRADCGFTSESYQQGVLSATNLSVIGFRILLLKVAGFNLLMTLRLWSSRAKRSGSGATNFSLLKQAGDVEENPGPTSMDWIWRILFLVGAATGAHSFEEVQLVESGGGLVQPGGSLRLSCAASGYTFSSYWVNWVRQAPGKGLEWVAQIYPGDGDTNYNGKFKGRFTISRDNSKNTLYLQMNSLRAEDTAVYYCARSITTVVGCAMDYWGQGTLVTVSSTRIQNPDPAVYQLRDSKSSDKSVCLFTDFDSQTNVSQSKDSDVYITDKTVLDMRSMDFKSNSAVAWSNKSDFACANAFNNSIIPEDTFFPSPESSCDVKLVEKSFETDTNLNFQILYEILLGKATLYAVLVSALVLMAMVKRKDSRG

SEQ ID NO: 46026 - protein, 726 aa, synthetic construct
MALPVTALLLPLALLLHAARPDIQMTQSPSSLSASVGDRVTITCKASDHINNWLAWYQQKPGKAPKLLIYGATTLETGVPSRFSGSGSGTDFTLTISSLQPEDFATYYCQQSWNTPWTFGQGTKVEIKRLEDLKNVFPPEVAVFEPSEAEISHTQKATLVCLATGFYPDHVELSWWVNGKEVHSGVSTDPQPLKEQPALNDSRYCLSSRLRVSATFWQNPRNHFRCQVQFYGLSENDEWTQDRAKPVTQIVSAEAWGRADDVIKIHWQEKKSNTILGSQEGNTMKTNDTYMKFSWLTVPEKSLDKEHRCIVRHENNKNGVDQEIIFPPIKTDVITMDPKDNCSKDANDTLLLQLTNTSAYYMYLLLLLKSVVYFAIITCCLLMAMVKRKDSRGRAKRSGSGATNFSLLKQAGDVEENPGPTSMDWIWRILFLVGAATGAHSFEEVQLVESGGGLVQPGGSLRLSCAASGYTFSSYWVNWVRQAPGKGLEWVAQIYPGDGDTNYNGKFKGRFTISRDNSKNTLYLQMNSLRAEDTAVYYCARSITTVVGCAMDYWGQGTLVTVSSTRIQNPDPAVYQLRDSKSSDKSVCLFTDFDSQTNVSQSKDSDVYITDKTVLDMRSMDFKSNSAVAWSNKSDFACANAFNNSIIPEDTFFPSPESSDSTDHVKPKETENTKQPSKSCHKPKAIVHTEKVNMMSLTVLGLRMLFAKTVAVNFLLTAKLFFLLTA

SEQ ID NO: 46027 - protein, 724 aa, synthetic construct
MALPVTALLLPLALLLHAARPDIQMTQSPSSLSASVGDRVTITCKASDHINNWLAWYQQKPGKAPKLLIYGATTLETGVPSRFSGSGSGTDFTLTISSLQPEDFATYYCQQSWNTPWTFGQGTKVEIKRLEDLKNVFPPEVAVFEPSEAEISHTQKATLVCLATGFYPDHVELSWWVNGKEVHSGVSTDPQPLKEQPALNDSRYCLSSRLRVSATFWQNPRNHFRCQVQFYGLSENDEWTQDRAKPVTQIVSAEAWGRADDVIKIHWQEKKSNTILGSQEGNTMKTNDTYMKFSWLTVPEKSLDKEHRCIVRHENNKNGVDQEIIFPPIKTDVITMDPKDNCSKDANDTLLLQLTNTSAYYMYLLLLLKSVVYFAIITCCLLRRTAFCCNGEKSRAKRSGSGATNFSLLKQAGDVEENPGPTSMDWIWRILFLVGAATGAHSFEEVQLVESGGGLVQPGGSLRLSCAASGYTFSSYWVNWVRQAPGKGLEWVAQIYPGDGDTNYNGKFKGRFTISRDNSKNTLYLQMNSLRAEDTAVYYCARSITTVVGCAMDYWGQGTLVTVSSTRIQNPDPAVYQLRDSKSSDKSVCLFTDFDSQTNVSQSKDSDVYITDKTVLDMRSMDFKSNSAVAWSNKSDFACANAFNNSIIPEDTFFPSPESSDSTDHVKPKETENTKQPSKSCHKPKAIVHTEKVNMMSLTVLGLRMLFAKTVAVNFLLTAKLFFL

SEQ ID NO: 46028 - protein, 867 aa, synthetic construct
MALPVTALLLPLALLLHAARPLEEDLKNVFPPEVAVFEPSEAEISHTQKATLVCLATGFYPDHVELSWWVNGKEVHSGVCTDPQPLKEQPALNDSRYCLSSRLRVSATFWQNPRNHFRCQVQFYGLSENDEWTQDRAKPVTQIVSAEAWGRADCGFTSESYQQGVLSATNLSVIGFRILLLKVAGFNLLMTLRLWSSRAKRSGSGATNFSLLKQAGDVEENPGPTSMALPVTALLLPLALLLHAARPDIQMTQSPSSLSASVGDRVTITCKASDHINNWLAWYQQKPGKAPKLLIYGATTLETGVPSRFSGSGSGTDFTLTISSLQPEDFATYYCQQSWNTPWTFGQGTKVEIKRGGGGSGGGGSGGGGSEVQLVESGGGLVQPGGSLRLSCAASGYTFSSYWVNWVRQAPGKGLEWVAQIYPGDGDTNYNGKFKGRFTISRDNSKNTLYLQMNSLRAEDTAVYYCARSITTVVGCAMDYWGQGTLVTVSSTRIQNPDPAVYQLRDSKSSDKSVCLFTDFDSQTNVSQSKDSDVYITDKCVLDMRSMDFKSNSAVAWSNKSDFACANAFNNSIIPEDTFFPSPESSCDVKLVEKSFETDTNLNFQILYEVIGFRILLLKVAGFNLLMTLRLWSSRAKRSGSGVKQTLNFDLLKLAGDVESNPGPSRGHMTEYKPTVRLATRDDVPRAVRTLAAAFADYPATRHTVDPDRHIERVTELQELFLTRVGLDIGKVWVADDGAAVAVWTTPESVEAGAVFAEIGPRMAELSGSRLAAQQQMEGLLAPHRPKEPAWFLATVGVSPDHQGKGLGSAVVLPGVEAAERAGVPAFLETSAPRNLPFYERLGFTVTADVEVPEGPRTWCMTRKPGA

SEQ ID NO: 46029 - protein, 867 aa, synthetic construct
MALPVTALLLPLALLLHAARPLEIQNPDPAVYQLRDSKSSDKSVCLFTDFDSQTNVSQSKDSDVYITDKCVLDMRSMDFKSNSAVAWSNKSDFACANAFNNSIIPEDTFFPSPESSCDVKLVEKSFETDTNLNFQILYEVIGFRILLLKVAGFNLLMTLRLWSSRAKRSGSGATNFSLLKQAGDVEENPGPTSMALPVTALLLPLALLLHAARPDIQMTQSPSSLSASVGDRVTITCKASDHINNWLAWYQQKPGKAPKLLIYGATTLETGVPSRFSGSGSGTDFTLTISSLQPEDFATYYCQQSWNTPWTFGQGTKVEIKRGGGGSGGGGSGGGGSEVQLVESGGGLVQPGGSLRLSCAASGYTFSSYWVNWVRQAPGKGLEWVAQIYPGDGDTNYNGKFKGRFTISRDNSKNTLYLQMNSLRAEDTAVYYCARSITTVVGCAMDYWGQGTLVTVSSTREDLKNVFPPEVAVFEPSEAEISHTQKATLVCLATGFYPDHVELSWWVNGKEVHSGVCTDPQPLKEQPALNDSRYCLSSRLRVSATFWQNPRNHFRCQVQFYGLSENDEWTQDRAKPVTQIVSAEAWGRADCGFTSESYQQGVLSATNLSVIGFRILLLKVAGFNLLMTLRLWSSRAKRSGSGVKQTLNFDLLKLAGDVESNPGPSRGHMTEYKPTVRLATRDDVPRAVRTLAAAFADYPATRHTVDPDRHIERVTELQELFLTRVGLDIGKVWVADDGAAVAVWTTPESVEAGAVFAEIGPRMAELSGSRLAAQQQMEGLLAPHRPKEPAWFLATVGVSPDHQGKGLGSAVVLPGVEAAERAGVPAFLETSAPRNLPFYERLGFTVTADVEVPEGPRTWCMTRKPGA

SEQ ID NO: 46030 - protein, 867 aa, synthetic construct; identical to SEQ ID NO: 46028

SEQ ID NO: 46031 - protein, 975 aa, synthetic construct
MALPVTALLLPLALLLHAARPLEEDLKNVFPPEVAVFEPSEAEISHTQKATLVCLATGFYPDHVELSWWVNGKEVHSGVSTDPQPLKEQPALNDSRYCLSSRLRVSATFWQNPRNHFRCQVQFYGLSENDEWTQDRAKPVTQIVSAEAWGRADDVIKIHWQEKKSNTILGSQEGNTMKTNDTYMKFSWLTVPEKSLDKEHRCIVRHENNKNGVDQEIIFPPIKTDVITMDPKDNCSKDANDTLLLQLTNTSAYYMYLLLLLKSVVYFAIITCCLLMAMVKRKDSRGRAKRSGSGATNFSLLKQAGDVEENPGPTSMALPVTALLLPLALLLHAARPDIQMTQSPSSLSASVGDRVTITCKASDHINNWLAWYQQKPGKAPKLLIYGATTLETGVPSRFSGSGSGTDFTLTISSLQPEDFATYYCQQSWNTPWTFGQGTKVEIKRGGGGSGGGGSGGGGSEVQLVESGGGLVQPGGSLRLSCAASGYTFSSYWVNWVRQAPGKGLEWVAQIYPGDGDTNYNGKFKGRFTISRDNSKNTLYLQMNSLRAEDTAVYYCARSITTVVGCAMDYWGQGTLVTVSSTRIQNPDPAVYQLRDSKSSDKSVCLFTDFDSQTNVSQSKDSDVYITDKTVLDMRSMDFKSNSAVAWSNKSDFACANAFNNSIIPEDTFFPSPESSDSTDHVKPKETENTKQPSKSCHKPKAIVHTEKVNMMSLTVLGLRMLFAKTVAVNFLLTAKLFFLLTARAKRSGSGVKQTLNFDLLKLAGDVESNPGPSRGHMTEYKPTVRLATRDDVPRAVRTLAAAFADYPATRHTVDPDRHIERVTELQELFLTRVGLDIGKVWVADDGAAVAVWTTPESVEAGAVFAEIGPRMAELSGSRLAAQQQMEGLLAPHRPKEPAWFLATVGVSPDHQGKGLGSAVVLPGVEAAERAGVPAFLETSAPRNLPFYERLGFTVTADVEVPEGPRTWCMTRKPGA

SEQ ID NO: 46032 - protein, 975 aa, synthetic construct
MALPVTALLLPLALLLHAARPLEIQNPDPAVYQLRDSKSSDKSVCLFTDFDSQTNVSQSKDSDVYITDKTVLDMRSMDFKSNSAVAWSNKSDFACANAFNNSIIPEDTFFPSPESSDSTDHVKPKETENTKQPSKSCHKPKAIVHTEKVNMMSLTVLGLRMLFAKTVAVNFLLTAKLFFLLTARAKRSGSGATNFSLLKQAGDVEENPGPTSMALPVTALLLPLALLLHAARPDIQMTQSPSSLSASVGDRVTITCKASDHINNWLAWYQQKPGKAPKLLIYGATTLETGVPSRFSGSGSGTDFTLTISSLQPEDFATYYCQQSWNTPWTFGQGTKVEIKRGGGGSGGGGSGGGGSEVQLVESGGGLVQPGGSLRLSCAASGYTFSSYWVNWVRQAPGKGLEWVAQIYPGDGDTNYNGKFKGRFTISRDNSKNTLYLQMNSLRAEDTAVYYCARSITTVVGCAMDYWGQGTLVTVSSTREDLKNVFPPEVAVFEPSEAEISHTQKATLVCLATGFYPDHVELSWWVNGKEVHSGVSTDPQPLKEQPALNDSRYCLSSRLRVSATFWQNPRNHFRCQVQFYGLSENDEWTQDRAKPVTQIVSAEAWGRADDVIKIHWQEKKSNTILGSQEGNTMKTNDTYMKFSWLTVPEKSLDKEHRCIVRHENNKNGVDQEIIFPPIKTDVITMDPKDNCSKDANDTLLLQLTNTSAYYMYLLLLLKSVVYFAIITCCLLMAMVKRKDSRGRAKRSGSGVKQTLNFDLLKLAGDVESNPGPSRGHMTEYKPTVRLATRDDVPRAVRTLAAAFADYPATRHTVDPDRHIERVTELQELFLTRVGLDIGKVWVADDGAAVAVWTTPESVEAGAVFAEIGPRMAELSGSRLAAQQQMEGLLAPHRPKEPAWFLATVGVSPDHQGKGLGSAVVLPGVEAAERAGVPAFLETSAPRNLPFYERLGFTVTADVEVPEGPRTWCMTRKPGA

SEQ ID NO: 46033 - protein, 973 aa, synthetic construct
MALPVTALLLPLALLLHAARPLEEDLKNVFPPEVAVFEPSEAEISHTQKATLVCLATGFYPDHVELSWWVNGKEVHSGVCTDPQPLKEQPALNDSRYCLSSRLRVSATFWQNPRNHFRCQVQFYGLSENDEWTQDRAKPVTQIVSAEAWGRADDVIKIHWQEKKSNTILGSQEGNTMKTNDTYMKFSWLTVPEKSLDKEHRCIVRHENNKNGVDQEIIFPPIKTDVITMDPKDNCSKDANDTLLLQLTNTSAYYMYLLLLLKSVVYFAIITCCLLRRTAFCCNGEKSRAKRSGSGATNFSLLKQAGDVEENPGPTSMALPVTALLLPLALLLHAARPDIQMTQSPSSLSASVGDRVTITCKASDHINNWLAWYQQKPGKAPKLLIYGATTLETGVPSRFSGSGSGTDFTLTISSLQPEDFATYYCQQSWNTPWTFGQGTKVEIKRGGGGSGGGGSGGGGSEVQLVESGGGLVQPGGSLRLSCAASGYTFSSYWVNWVRQAPGKGLEWVAQIYPGDGDTNYNGKFKGRFTISRDNSKNTLYLQMNSLRAEDTAVYYCARSITTVVGCAMDYWGQGTLVTVSSTRIQNPDPAVYQLRDSKSSDKSVCLFTDFDSQTNVSQSKDSDVYITDKCVLDMRSMDFKSNSAVAWSNKSDFACANAFNNSIIPEDTFFPSPESSDSTDHVKPKETENTKQPSKSCHKPKAIVHTEKVNMMSLTVLGLRMLFAKTVAVNFLLTAKLFFLRAKRSGSGVKQTLNFDLLKLAGDVESNPGPSRGHMTEYKPTVRLATRDDVPRAVRTLAAAFADYPATRHTVDPDRHIERVTELQELFLTRVGLDIGKVWVADDGAAVAVWTTPESVEAGAVFAEIGPRMAELSGSRLAAQQQMEGLLAPHRPKEPAWFLATVGVSPDHQGKGLGSAVVLPGVEAAERAGVPAFLETSAPRNLPFYERLGFTVTADVEVPEGPRTWCMTRKPGA

SEQ ID NO: 46034 - protein, 973 aa, synthetic construct
MALPVTALLLPLALLLHAARPLEIQNPDPAVYQLRDSKSSDKSVCLFTDFDSQTNVSQSKDSDVYITDKCVLDMRSMDFKSNSAVAWSNKSDFACANAFNNSIIPEDTFFPSPESSDSTDHVKPKETENTKQPSKSCHKPKAIVHTEKVNMMSLTVLGLRMLFAKTVAVNFLLTAKLFFLRAKRSGSGATNFSLLKQAGDVEENPGPTSMALPVTALLLPLALLLHAARPDIQMTQSPSSLSASVGDRVTITCKASDHINNWLAWYQQKPGKAPKLLIYGATTLETGVPSRFSGSGSGTDFTLTISSLQPEDFATYYCQQSWNTPWTFGQGTKVEIKRGGGGSGGGGSGGGGSEVQLVESGGGLVQPGGSLRLSCAASGYTFSSYWVNWVRQAPGKGLEWVAQIYPGDGDTNYNGKFKGRFTISRDNSKNTLYLQMNSLRAEDTAVYYCARSITTVVGCAMDYWGQGTLVTVSSTREDLKNVFPPEVAVFEPSEAEISHTQKATLVCLATGFYPDHVELSWWVNGKEVHSGVCTDPQPLKEQPALNDSRYCLSSRLRVSATFWQNPRNHFRCQVQFYGLSENDEWTQDRAKPVTQIVSAEAWGRADDVIKIHWQEKKSNTILGSQEGNTMKTNDTYMKFSWLTVPEKSLDKEHRCIVRHENNKNGVDQEIIFPPIKTDVITMDPKDNCSKDANDTLLLQLTNTSAYYMYLLLLLKSVVYFAIITCCLLRRTAFCCNGEKSRAKRSGSGVKQTLNFDLLKLAGDVESNPGPSRGHMTEYKPTVRLATRDDVPRAVRTLAAAFADYPATRHTVDPDRHIERVTELQELFLTRVGLDIGKVWVADDGAAVAVWTTPESVEAGAVFAEIGPRMAELSGSRLAAQQQMEGLLAPHRPKEPAWFLATVGVSPDHQGKGLGSAVVLPGVEAAERAGVPAFLETSAPRNLPFYERLGFTVTADVEVPEGPRTWCMTRKPGA

SEQ ID NO: 46035 - protein, 973 aa, synthetic construct
MALPVTALLLPLALLLHAARPLEEDLKNVFPPEVAVFEPSEAEISHTQKATLVCLATGFYPDHVELSWWVNGKEVHSGVSTDPQPLKEQPALNDSRYCLSSRLRVSATFWQNPRNHFRCQVQFYGLSENDEWTQDRAKPVTQIVSAEAWGRADDVIKIHWQEKKSNTILGSQEGNTMKTNDTYMKFSWLTVPEKSLDKEHRCIVRHENNKNGVDQEIIFPPIKTDVITMDPKDNCSKDANDTLLLQLTNTSAYYMYLLLLLKSVVYFAIITCCLLRRTAFCCNGEKSRAKRSGSGATNFSLLKQAGDVEENPGPTSMALPVTALLLPLALLLHAARPDIQMTQSPSSLSASVGDRVTITCKASDHINNWLAWYQQKPGKAPKLLIYGATTLETGVPSRFSGSGSGTDFTLTISSLQPEDFATYYCQQSWNTPWTFGQGTKVEIKRGGGGSGGGGSGGGGSEVQLVESGGGLVQPGGSLRLSCAASGYTFSSYWVNWVRQAPGKGLEWVAQIYPGDGDTNYNGKFKGRFTISRDNSKNTLYLQMNSLRAEDTAVYYCARSITTVVGCAMDYWGQGTLVTVSSTRIQNPDPAVYQLRDSKSSDKSVCLFTDFDSQTNVSQSKDSDVYITDKTVLDMRSMDFKSNSAVAWSNKSDFACANAFNNSIIPEDTFFPSPESSDSTDHVKPKETENTKQPSKSCHKPKAIVHTEKVNMMSLTVLGLRMLFAKTVAVNFLLTAKLFFLRAKRSGSGVKQTLNFDLLKLAGDVESNPGPSRGHMTEYKPTVRLATRDDVPRAVRTLAAAFADYPATRHTVDPDRHIERVTELQELFLTRVGLDIGKVWVADDGAAVAVWTTPESVEAGAVFAEIGPRMAELSGSRLAAQQQMEGLLAPHRPKEPAWFLATVGVSPDHQGKGLGSAVVLPGVEAAERAGVPAFLETSAPRNLPFYERLGFTVTADVEVPEGPRTWCMTRKPGA

SEQ ID NO: 46036 - protein, 973 aa, synthetic construct
MALPVTALLLPLALLLHAARPLEIQNPDPAVYQLRDSKSSDKSVCLFTDFDSQTNVSQSKDSDVYITDKTVLDMRSMDFKSNSAVAWSNKSDFACANAFNNSIIPEDTFFPSPESSDSTDHVKPKETENTKQPSKSCHKPKAIVHTEKVNMMSLTVLGLRMLFAKTVAVNFLLTAKLFFLRAKRSGSGATNFSLLKQAGDVEENPGPTSMALPVTALLLPLALLLHAARPDIQMTQSPSSLSASVGDRVTITCKASDHINNWLAWYQQKPGKAPKLLIYGATTLETGVPSRFSGSGSGTDFTLTISSLQPEDFATYYCQQSWNTPWTFGQGTKVEIKRGGGGSGGGGSGGGGSEVQLVESGGGLVQPGGSLRLSCAASGYTFSSYWVNWVRQAPGKGLEWVAQIYPGDGDTNYNGKFKGRFTISRDNSKNTLYLQMNSLRAEDTAVYYCARSITTVVGCAMDYWGQGTLVTVSSTREDLKNVFPPEVAVFEPSEAEISHTQKATLVCLATGFYPDHVELSWWVNGKEVHSGVSTDPQPLKEQPALNDSRYCLSSRLRVSATFWQNPRNHFRCQVQFYGLSENDEWTQDRAKPVTQIVSAEAWGRADDVIKIHWQEKKSNTILGSQEGNTMKTNDTYMKFSWLTVPEKSLDKEHRCIVRHENNKNGVDQEIIFPPIKTDVITMDPKDNCSKDANDTLLLQLTNTSAYYMYLLLLLKSVVYFAIITCCLLRRTAFCCNGEKSRAKRSGSGVKQTLNFDLLKLAGDVESNPGPSRGHMTEYKPTVRLATRDDVPRAVRTLAAAFADYPATRHTVDPDRHIERVTELQELFLTRVGLDIGKVWVADDGAAVAVWTTPESVEAGAVFAEIGPRMAELSGSRLAAQQQMEGLLAPHRPKEPAWFLATVGVSPDHQGKGLGSAVVLPGVEAAERAGVPAFLETSAPRNLPFYERLGFTVTADVEVPEGPRTWCMTRKPGA

SEQ ID NO: 46037 - protein, 871 aa, synthetic construct
MALPVTALLLPLALLLHAARPLEEDLKNVFPPEVAVFEPSKAEIAHTQKATLVCLATGFYPDHVELSWWVNGKEVHSGVCTDPQPLKEQPALNDSRYCLSSRLRVSATFWQNPRNHFRCQVQFYGLSENDEWTQDRAKPVTQIVSAEAWGRADCGITSASYHQGVLSATILYEILLGKATLYAVLVSALVLMAMVKRKDSRGRAKRSGSGATNFSLLKQAGDVEENPGPTSMALPVTALLLPLALLLHAARPDIQMTQSPSSLSASVGDRVTITCKASDHINNWLAWYQQKPGKAPKLLIYGATTLETGVPSRFSGSGSGTDFTLTISSLQPEDFATYYCQQSWNTPWTFGQGTKVEIKRGGGGSGGGGSGGGGSEVQLVESGGGLVQPGGSLRLSCAASGYTFSSYWVNWVRQAPGKGLEWVAQIYPGDGDTNYNGKFKGRFTISRDNSKNTLYLQMNSLRAEDTAVYYCARSITTVVGCAMDYWGQGTLVTVSSTRIQNPDPAVYQLRDSKSSDKSVCLFTDFDSQTNVSQSKDSDVYITDKCVLDMRSMDFKSNSAVAWSNKSDFACANAFNNSIIPEDTFFPSSDVPCDVKLVEKSFETDTNLNFQNLSVIGFRILLLKVAGFNLLMTLRLWSSRAKRSGSGVKQTLNFDLLKLAGDVESNPGPSRGHMTEYKPTVRLATRDDVPRAVRTLAAAFADYPATRHTVDPDRHIERVTELQELFLTRVGLDIGKVWVADDGAAVAVWTTPESVEAGAVFAEIGPRMAELSGSRLAAQQQMEGLLAPHRPKEPAWFLATVGVSPDHQGKGLGSAVVLPGVEAAERAGVPAFLETSAPRNLPFYERLGFTVTADVEVPEGPRTWCMTRKPGA

SEQ ID NO: 46038 - protein, 871 aa, synthetic construct
MALPVTALLLPLALLLHAARPLEIQNPDPAVYQLRDSKSSDKSVCLFTDFDSQTNVSQSKDSDVYITDKCVLDMRSMDFKSNSAVAWSNKSDFACANAFNNSIIPEDTFFPSSDVPCDVKLVEKSFETDTNLNFQNLSVIGFRILLLKVAGFNLLMTLRLWSSRAKRSGSGATNFSLLKQAGDVEENPGPTSMALPVTALLLPLALLLHAARPDIQMTQSPSSLSASVGDRVTITCKASDHINNWLAWYQQKPGKAPKLLIYGATTLETGVPSRFSGSGSGTDFTLTISSLQPEDFATYYCQQSWNTPWTFGQGTKVEIKRGGGGSGGGGSGGGGSEVQLVESGGGLVQPGGSLRLSCAASGYTFSSYWVNWVRQAPGKGLEWVAQIYPGDGDTNYNGKFKGRFTISRDNSKNTLYLQMNSLRAEDTAVYYCARSITTVVGCAMDYWGQGTLVTVSSTREDLKNVFPPEVAVFEPSKAEIAHTQKATLVCLATGFYPDHVELSWWVNGKEVHSGVCTDPQPLKEQPALNDSRYCLSSRLRVSATFWQNPRNHFRCQVQFYGLSENDEWTQDRAKPVTQIVSAEAWGRADCGITSASYHQGVLSATILYEILLGKATLYAVLVSALVLMAMVKRKDSRGRAKRSGSGVKQTLNFDLLKLAGDVESNPGPSRGHMTEYKPTVRLATRDDVPRAVRTLAAAFADYPATRHTVDPDRHIERVTELQELFLTRVGLDIGKVWVADDGAAVAVWTTPESVEAGAVFAEIGPRMAELSGSRLAAQQQMEGLLAPHRPKEPAWFLATVGVSPDHQGKGLGSAVVLPGVEAAERAGVPAFLETSAPRNLPFYERLGFTVTADVEVPEGPRTWCMTRKPGA

SEQ ID NO: 46039 - protein, 764 aa, synthetic construct
MALPVTALLLPLALLLHAARPLEQSFGLLDPKLCYLLDGILFIYGVILTALFLRVKFSRSADAPAYQQGQNQLYNELNLGRREEYDVLDKRRGRDPEMGGKPQRRKNPQEGLYNELQKDKMAEAYSEIGMKGERRRGKGHDGLYQGLSTATKDTYDALHMQALPPRRAKRSGSGATNFSLLKQAGDVEENPGPTSMALPVTALLLPLALLLHAARPDIQMTQSPSSLSASVGDRVTITCKASDHINNWLAWYQQKPGKAPKLLIYGATTLETGVPSRFSGSGSGTDFTLTISSLQPEDFATYYCQQSWNTPWTFGQGTKVEIKRGGGGSGGGGSGGGGSEVQLVESGGGLVQPGGSLRLSCAASGYTFSSYWVNWVRQAPGKGLEWVAQIYPGDGDTNYNGKFKGRFTISRDNSKNTLYLQMNSLRAEDTAVYYCARSITTVVGCAMDYWGQGTLVTVSSTRELGEPQLCYILDAILFLYGIVLTLLYCRLKIQVRKAAITSYEKSDGVYTGLSTRNQETYETLKHEKPPQRAKRSGSGVKQTLNFDLLKLAGDVESNPGPSRGHMTEYKPTVRLATRDDVPRAVRTLAAAFADYPATRHTVDPDRHIERVTELQELFLTRVGLDIGKVWVADDGAAVAVWTTPESVEAGAVFAEIGPRMAELSGSRLAAQQQMEGLLAPHRPKEPAWFLATVGVSPDHQGKGLGSAVVLPGVEAAERAGVPAFLETSAPRNLPFYERLGFTVTADVEVPEGPRTWCMTRKPGA

SEQ ID NO: 46040 - protein, 975 aa, synthetic construct; identical to SEQ ID NO: 46031

SEQ ID NO: 46041 - protein, 975 aa, synthetic construct; identical to SEQ ID NO: 46032

SEQ ID NO: 46042 - protein, 974 aa, synthetic construct
MALPVTALLLPLALLLHAARPLEEEDLKNVFPPEVAVFEPSEAEISHTQKATLVCLATGFYPDHVELSWWVNGKEVHSGVCTDPQPLKEQPALNDSRYCLSSRLRVSATFWQNPRNHFRCQVQFYGLSENDEWTQDRAKPVTQIVSAEAWGRADDVIKIHWQEKKSNTILGSQEGNTMKTNDTYMKFSWLTVPEKSLDKEHRCIVRHENNKNGVDQEIIFPPIKTDVITMDPKDNCSKDANDTLLLQLTNTSAYYMYLLLLLKSVVYFAIITCCLLRRTAFCCNGEKSRAKRSGSGATNFSLLKQAGDVEENPGPTSMALPVTALLLPLALLLHAARPDIQMTQSPSSLSASVGDRVTITCKASDHINNWLAWYQQKPGKAPKLLIYGATTLETGVPSRFSGSGSGTDFTLTISSLQPEDFATYYCQQSWNTPWTFGQGTKVEIKRGGGGSGGGGSGGGGSEVQLVESGGGLVQPGGSLRLSCAASGYTFSSYWVNWVRQAPGKGLEWVAQIYPGDGDTNYNGKFKGRFTISRDNSKNTLYLQMNSLRAEDTAVYYCARSITTVVGCAMDYWGQGTLVTVSSTRIQNPDPAVYQLRDSKSSDKSVCLFTDFDSQTNVSQSKDSDVYITDKCVLDMRSMDFKSNSAVAWSNKSDFACANAFNNSIIPEDTFFPSPESSDSTDHVKPKETENTKQPSKSCHKPKAIVHTEKVNMMSLTVLGLRMLFAKTVAVNFLLTAKLFFLRAKRSGSGVKQTLNFDLLKLAGDVESNPGPSRGHMTEYKPTVRLATRDDVPRAVRTLAAAFADYPATRHTVDPDRHIERVTELQELFLTRVGLDIGKVWVADDGAAVAVWTTPESVEAGAVFAEIGPRMAELSGSRLAAQQQMEGLLAPHRPKEPAWFLATVGVSPDHQGKGLGSAVVLPGVEAAERAGVPAFLETSAPRNLPFYERLGFTVTADVEVPEGPRTWCMTRKPGA

SEQ ID NO: 46043 - protein, 974 aa, synthetic construct
MALPVTALLLPLALLLHAARPLEIQNPDPAVYQLRDSKSSDKSVCLFTDFDSQTNVSQSKDSDVYITDKCVLDMRSMDFKSNSAVAWSNKSDFACANAFNNSIIPEDTFFPSPESSDSTDHVKPKETENTKQPSKSCHKPKAIVHTEKVNMMSLTVLGLRMLFAKTVAVNFLLTAKLFFLRAKRSGSGATNFSLLKQAGDVEENPGPTSMALPVTALLLPLALLLHAARPDIQMTQSPSSLSASVGDRVTITCKASDHINNWLAWYQQKPGKAPKLLIYGATTLETGVPSRFSGSGSGTDFTLTISSLQPEDFATYYCQQSWNTPWTFGQGTKVEIKRGGGGSGGGGSGGGGSEVQLVESGGGLVQPGGSLRLSCAASGYTFSSYWVNWVRQAPGKGLEWVAQIYPGDGDTNYNGKFKGRFTISRDNSKNTLYLQMNSLRAEDTAVYYCARSITTVVGCAMDYWGQGTLVTVSSTREEDLKNVFPPEVAVFEPSEAEISHTQKATLVCLATGFYPDHVELSWWVNGKEVHSGVCTDPQPLKEQPALNDSRYCLSSRLRVSATFWQNPRNHFRCQVQFYGLSENDEWTQDRAKPVTQIVSAEAWGRADDVIKIHWQEKKSNTILGSQEGNTMKTNDTYMKFSWLTVPEKSLDKEHRCIVRHENNKNGVDQEIIFPPIKTDVITMDPKDNCSKDANDTLLLQLTNTSAYYMYLLLLLKSVVYFAIITCCLLRRTAFCCNGEKSRAKRSGSGVKQTLNFDLLKLAGDVESNPGPSRGHMTEYKPTVRLATRDDVPRAVRTLAAAFADYPATRHTVDPDRHIERVTELQELFLTRVGLDIGKVWVADDGAAVAVWTTPESVEAGAVFAEIGPRMAELSGSRLAAQQQMEGLLAPHRPKEPAWFLATVGVSPDHQGKGLGSAVVLPGVEAAERAGVPAFLETSAPRNLPFYERLGFTVTADVEVPEGPRTWCMTRKPGA

SEQ ID NO: 46044 - protein, 871 aa, synthetic construct
MALPVTALLLPLALLLHAARPLEEDLKNVFPPEVAVFEPSEAEISHTQKATLVCLATGFYPDHVELSWWVNGKEVHSGVSTDPQPLKEQPALNDSRYCLSSRLRVSATFWQNPRNHFRCQVQFYGLSENDEWTQDRAKPVTQIVSAEAWGRADCGFTSESYQQGVLSATNLSVIGFRILLLKVAGFNLLMTLRLWSSRAKRSGSGATNFSLLKQAGDVEENPGPTSMALPVTALLLPLALLLHAARPDIQMTQSPSSLSASVGDRVTITCKASDHINNWLAWYQQKPGKAPKLLIYGATTLETGVPSRFSGSGSGTDFTLTISSLQPEDFATYYCQQSWNTPWTFGQGTKVEIKRGGGGSGGGGSGGGGSEVQLVESGGGLVQPGGSLRLSCAASGYTFSSYWVNWVRQAPGKGLEWVAQIYPGDGDTNYNGKFKGRFTISRDNSKNTLYLQMNSLRAEDTAVYYCARSITTVVGCAMDYWGQGTLVTVSSTRIQNPDPAVYQLRDSKSSDKSVCLFTDFDSQTNVSQSKDSDVYITDKTVLDMRSMDFKSNSAVAWSNKSDFACANAFNNSIIPEDTFFPSPESSCDVKLVEKSFETDTNLNFQILYEILLGKATLYAVLVSALVLMAMVKRKDSRGRAKRSGSGVKQTLNFDLLKLAGDVESNPGPSRGHMTEYKPTVRLATRDDVPRAVRTLAAAFADYPATRHTVDPDRHIERVTELQELFLTRVGLDIGKVWVADDGAAVAVWTTPESVEAGAVFAEIGPRMAELSGSRLAAQQQMEGLLAPHRPKEPAWFLATVGVSPDHQGKGLGSAVVLPGVEAAERAGVPAFLETSAPRNLPFYERLGFTVTADVEVPEGPRTWCMTRKPGA

SEQ ID NO: 46045 - protein, 871 aa, synthetic construct
MALPVTALLLPLALLLHAARPLEIQNPDPAVYQLRDSKSSDKSVCLFTDFDSQTNVSQSKDSDVYITDKTVLDMRSMDFKSNSAVAWSNKSDFACANAFNNSIIPEDTFFPSPESSCDVKLVEKSFETDTNLNFQILYEILLGKATLYAVLVSALVLMAMVKRKDSRGRAKRSGSGATNFSLLKQAGDVEENPGPTSMALPVTALLLPLALLLHAARPDIQMTQSPSSLSASVGDRVTITCKASDHINNWLAWYQQKPGKAPKLLIYGATTLETGVPSRFSGSGSGTDFTLTISSLQPEDFATYYCQQSWNTPWTFGQGTKVEIKRGGGGSGGGGSGGGGSEVQLVESGGGLVQPGGSLRLSCAASGYTFSSYWVNWVRQAPGKGLEWVAQIYPGDGDTNYNGKFKGRFTISRDNSKNTLYLQMNSLRAEDTAVYYCARSITTVVGCAMDYWGQGTLVTVSSTREDLKNVFPPEVAVFEPSEAEISHTQKATLVCLATGFYPDHVELSWWVNGKEVHSGVSTDPQPLKEQPALNDSRYCLSSRLRVSATFWQNPRNHFRCQVQFYGLSENDEWTQDRAKPVTQIVSAEAWGRADCGFTSESYQQGVLSATNLSVIGFRILLLKVAGFNLLMTLRLWSSRAKRSGSGVKQTLNFDLLKLAGDVESNPGPSRGHMTEYKPTVRLATRDDVPRAVRTLAAAFADYPATRHTVDPDRHIERVTELQELFLTRVGLDIGKVWVADDGAAVAVWTTPESVEAGAVFAEIGPRMAELSGSRLAAQQQMEGLLAPHRPKEPAWFLATVGVSPDHQGKGLGSAVVLPGVEAAERAGVPAFLETSAPRNLPFYERLGFTVTADVEVPEGPRTWCMTRKPGA

SEQ ID NO: 46046 - protein, 871 aa, synthetic construct
MALPVTALLLPLALLLHAARPLEEDLKNVFPPEVAVFEPSEAEISHTQKATLVCLATGFYPDHVELSWWVNGKEVHSGVCTDPQPLKEQPALNDSRYCLSSRLRVSATFWQNPRNHFRCQVQFYGLSENDEWTQDRAKPVTQIVSAEAWGRADCDVKLVEKSFETDTNLNFQNLSVIGFRILLLKVAGFNLLMTLRLWSSRAKRSGSGATNFSLLKQAGDVEENPGPTSMALPVTALLLPLALLLHAARPDIQMTQSPSSLSASVGDRVTITCKASDHINNWLAWYQQKPGKAPKLLIYGATTLETGVPSRFSGSGSGTDFTLTISSLQPEDFATYYCQQSWNTPWTFGQGTKVEIKRGGGGSGGGGSGGGGSEVQLVESGGGLVQPGGSLRLSCAASGYTFSSYWVNWVRQAPGKGLEWVAQIYPGDGDTNYNGKFKGRFTISRDNSKNTLYLQMNSLRAEDTAVYYCARSITTVVGCAMDYWGQGTLVTVSSTRIQNPDPAVYQLRDSKSSDKSVCLFTDFDSQTNVSQSKDSDVYITDKCVLDMRSMDFKSNSAVAWSNKSDFACANAFNNSIIPEDTFFPSPESSCGFTSESYQQGVLSATILYEILLGKATLYAVLVSALVLMAMVKRKDSRGRAKRSGSGVKQTLNFDLLKLAGDVESNPGPSRGHMTEYKPTVRLATRDDVPRAVRTLAAAFADYPATRHTVDPDRHIERVTELQELFLTRVGLDIGKVWVADDGAAVAVWTTPESVEAGAVFAEIGPRMAELSGSRLAAQQQMEGLLAPHRPKEPAWFLATVGVSPDHQGKGLGSAVVLPGVEAAERAGVPAFLETSAPRNLPFYERLGFTVTADVEVPEGPRTWCMTRKPGA

SEQ ID NO: 46047 - protein, 871 aa, synthetic construct
MALPVTALLLPLALLLHAARPLEEDLKNVFPPEVAVFEPSEAEISHTQKATLVCLATGFYPDHVELSWWVNGKEVHSGVSTDPQPLKEQPALNDSRYCLSSRLRVSATFWQNPRNHFRCQVQFYGLSENDEWTQDRAKPVTQIVSAEAWGRADCDVKLVEKSFETDTNLNFQNLSVIGFRILLLKVAGFNLLMTLRLWSSRAKRSGSGATNFSLLKQAGDVEENPGPTSMALPVTALLLPLALLLHAARPDIQMTQSPSSLSASVGDRVTITCKASDHINNWLAWYQQKPGKAPKLLIYGATTLETGVPSRFSGSGSGTDFTLTISSLQPEDFATYYCQQSWNTPWTFGQGTKVEIKRGGGGSGGGGSGGGGSEVQLVESGGGLVQPGGSLRLSCAASGYTFSSYWVNWVRQAPGKGLEWVAQIYPGDGDTNYNGKFKGRFTISRDNSKNTLYLQMNSLRAEDTAVYYCARSITTVVGCAMDYWGQGTLVTVSSTRIQNPDPAVYQLRDSKSSDKSVCLFTDFDSQTNVSQSKDSDVYITDKTVLDMRSMDFKSNSAVAWSNKSDFACANAFNNSIIPEDTFFPSPESSCGFTSESYQQGVLSATILYEILLGKATLYAVLVSALVLMAMVKRKDSRGRAKRSGSGVKQTLNFDLLKLAGDVESNPGPSRGHMTEYKPTVRLATRDDVPRAVRTLAAAFADYPATRHTVDPDRHIERVTELQELFLTRVGLDIGKVWVADDGAAVAVWTTPESVEAGAVFAEIGPRMAELSGSRLAAQQQMEGLLAPHRPKEPAWFLATVGVSPDHQGKGLGSAVVLPGVEAAERAGVPAFLETSAPRNLPFYERLGFTVTADVEVPEGPRTWCMTRKPGA

SEQ ID NO: 46048 - protein, 974 aa, synthetic construct
MALPVTALLLPLALLLHAARPLEEEDLKNVFPPEVAVFEPSEAEISHTQKATLVCLATGFYPDHVELSWWVNGKEVHSGVSTDPQPLKEQPALNDSRYCLSSRLRVSATFWQNPRNHFRCQVQFYGLSENDEWTQDRAKPVTQIVSAEAWGRADDVIKIHWQEKKSNTILGSQEGNTMKTNDTYMKFSWLTVPEKSLDKEHRCIVRHENNKNGVDQEIIFPPIKTDVITMDPKDNCSKDANDTLLLQLTNTSAYYMYLLLLLKSVVYFAIITCCLLRRTAFCCNGEKSRAKRSGSGATNFSLLKQAGDVEENPGPTSMALPVTALLLPLALLLHAARPDIQMTQSPSSLSASVGDRVTITCKASDHINNWLAWYQQKPGKAPKLLIYGATTLETGVPSRFSGSGSGTDFTLTISSLQPEDFATYYCQQSWNTPWTFGQGTKVEIKRGGGGSGGGGSGGGGSEVQLVESGGGLVQPGGSLRLSCAASGYTFSSYWVNWVRQAPGKGLEWVAQIYPGDGDTNYNGKFKGRFTISRDNSKNTLYLQMNSLRAEDTAVYYCARSITTVVGCAMDYWGQGTLVTVSSTRIQNPDPAVYQLRDSKSSDKSVCLFTDFDSQTNVSQSKDSDVYITDKTVLDMRSMDFKSNSAVAWSNKSDFACANAFNNSIIPEDTFFPSPESSDSTDHVKPKETENTKQPSKSCHKPKAIVHTEKVNMMSLTVLGLRMLFAKTVAVNFLLTAKLFFLRAKRSGSGVKQTLNFDLLKLAGDVESNPGPSRGHMTEYKPTVRLATRDDVPRAVRTLAAAFADYPATRHTVDPDRHIERVTELQELFLTRVGLDIGKVWVADDGAAVAVWTTPESVEAGAVFAEIGPRMAELSGSRLAAQQQMEGLLAPHRPKEPAWFLATVGVSPDHQGKGLGSAVVLPGVEAAERAGVPAFLETSAPRNLPFYERLGFTVTADVEVPEGPRTWCMTRKPGA

SEQ ID NO: 46049 - protein, 871 aa, synthetic construct
MALPVTALLLPLALLLHAARPLEEDLKNVFPPEVAVFEPSEAEISHTQKATLVCLATGFYPDHVELSWWVNGKEVHSGVCTDPQPLKEQPALNDSRYCLSSRLRVSATFWQNPRNHFRCQVQFYGLSENDEWTQDRAKPVTQIVSAEAWGRADCGFTSESYQQGVLSATNLSVIGFRILLLKVAGFNLLMTLRLWSSRAKRSGSGATNFSLLKQAGDVEENPGPTSMALPVTALLLPLALLLHAARPDIQMTQSPSSLSASVGDRVTITCKASDHINNWLAWYQQKPGKAPKLLIYGATTLETGVPSRFSGSGSGTDFTLTISSLQPEDFATYYCQQSWNTPWTFGQGTKVEIKRGGGGSGGGGSGGGGSEVQLVESGGGLVQPGGSLRLSCAASGYTFSSYWVNWVRQAPGKGLEWVAQIYPGDGDTNYNGKFKGRFTISRDNSKNTLYLQMNSLRAEDTAVYYCARSITTVVGCAMDYWGQGTLVTVSSTRIQNPDPAVYQLRDSKSSDKSVCLFTDFDSQTNVSQSKDSDVYITDKCVLDMRSMDFKSNSAVAWSNKSDFACANAFNNSIIPEDTFFPSPESSCDVKLVEKSFETDTNLNFQILYEILLGKATLYAVLVSALVLMAMVKRKDSRGRAKRSGSGVKQTLNFDLLKLAGDVESNPGPSRGHMTEYKPTVRLATRDDVPRAVRTLAAAFADYPATRHTVDPDRHIERVTELQELFLTRVGLDIGKVWVADDGAAVAVWTTPESVEAGAVFAEIGPRMAELSGSRLAAQQQMEGLLAPHRPKEPAWFLATVGVSPDHQGKGLGSAVVLPGVEAAERAGVPAFLETSAPRNLPFYERLGFTVTADVEVPEGPRTWCMTRKPGA

SEQ ID NO: 46050 - protein, 900 aa, synthetic construct
MALPVTALLLPLALLLHAARPLEEEDLKNVFPPEVAVFEPSEAEISHTQKATLVCLATGFYPDHVELSWWVNGKEVHSGVCTDPQPLKEQPALNDSRYCLSSRLRVSATFWQNPRNHFRCQVQFYGLSENDEWTQDRAKPVTQIVSAEAWGRADCGFTSESYQQGVLSATNLSVIGFRILLLKVAGFNLLMTLRLWSSRAKRSGSGATNFSLLKQAGDVEENPGPTSMALPVTALLLPLALLLHAARPDIQMTQSPSSLSASVGDRVTITCKASDHINNWLAWYQQKPGKAPKLLIYGATTLETGVPSRFSGSGSGTDFTLTISSLQPEDFATYYCQQSWNTPWTFGQGTKVEIKRGGGGSGGGGSGGGGSEVQLVESGGGLVQPGGSLRLSCAASGYTFSSYWVNWVRQAPGKGLEWVAQIYPGDGDTNYNGKFKGRFTISRDNSKNTLYLQMNSLRAEDTAVYYCARSITTVVGCAMDYWGQGTLVTVSSTRGQPKANPTVTLFPPSSEELQANKATLVCLISDFYPGAVTVAWKADGSPVKAGVETTKPSKQSNNKYAASSYLSLTPEQWKSHRSYSCQVTHEGSTVEKTVAPTECSPIKTDVITMDPKDNCSKDANDTLLLQLTNTSAYYMYLLLLLKSVVYFAIITCCLLRRTAFCCNGEKSRAKRSGSGVKQTLNFDLLKLAGDVESNPGPSRGHMTEYKPTVRLATRDDVPRAVRTLAAAFADYPATRHTVDPDRHIERVTELQELFLTRVGLDIGKVWVADDGAAVAVWTTPESVEAGAVFAEIGPRMAELSGSRLAAQQQMEGLLAPHRPKEPAWFLATVGVSPDHQGKGLGSAVVLPGVEAAERAGVPAFLETSAPRNLPFYERLGFTVTADVEVPEGPRTWCMTRKPGA

SEQ ID NO: 46051 - protein, 900 aa, synthetic construct
MALPVTALLLPLALLLHAARPLEGQPKANPTVTLFPPSSEELQANKATLVCLISDFYPGAVTVAWKADGSPVKAGVETTKPSKQSNNKYAASSYLSLTPEQWKSHRSYSCQVTHEGSTVEKTVAPTECSPIKTDVITMDPKDNCSKDANDTLLLQLTNTSAYYMYLLLLLKSVVYFAIITCCLLRRTAFCCNGEKSRAKRSGSGATNFSLLKQAGDVEENPGPTSMALPVTALLLPLALLLHAARPDIQMTQSPSSLSASVGDRVTITCKASDHINNWLAWYQQKPGKAPKLLIYGATTLETGVPSRFSGSGSGTDFTLTISSLQPEDFATYYCQQSWNTPWTFGQGTKVEIKRGGGGSGGGGSGGGGSEVQLVESGGGLVQPGGSLRLSCAASGYTFSSYWVNWVRQAPGKGLEWVAQIYPGDGDTNYNGKFKGRFTISRDNSKNTLYLQMNSLRAEDTAVYYCARSITTVVGCAMDYWGQGTLVTVSSTREEDLKNVFPPEVAVFEPSEAEISHTQKATLVCLATGFYPDHVELSWWVNGKEVHSGVCTDPQPLKEQPALNDSRYCLSSRLRVSATFWQNPRNHFRCQVQFYGLSENDEWTQDRAKPVTQIVSAEAWGRADCGFTSESYQQGVLSATNLSVIGFRILLLKVAGFNLLMTLRLWSSRAKRSGSGVKQTLNFDLLKLAGDVESNPGPSRGHMTEYKPTVRLATRDDVPRAVRTLAAAFADYPATRHTVDPDRHIERVTELQELFLTRVGLDIGKVWVADDGAAVAVWTTPESVEAGAVFAEIGPRMAELSGSRLAAQQQMEGLLAPHRPKEPAWFLATVGVSPDHQGKGLGSAVVLPGVEAAERAGVPAFLETSAPRNLPFYERLGFTVTADVEVPEGPRTWCMTRKPGA

SEQ ID NO: 46052 - protein, 897 aa, synthetic construct
MALPVTALLLPLALLLHAARPLEEASTKGPSVFPLAPSSKSTSGGTAALGCLVKDYFPEPVTVSWNSGALTSGVHTFPAVLQSSGLYSLSSVVTVPSSSLGTQTYICNVNHKPSNTKVDKRVEPKSCPIKTDVITMDPKDNCSKDANDTLLLQLTNTSAYYMYLLLLLKSVVYFAIITCCLLRRTAFCCNGEKSRAKRSGSGATNFSLLKQAGDVEENPGPTSMALPVTALLLPLALLLHAARPDIQMTQSPSSLSASVGDRVTITCKASDHINNWLAWYQQKPGKAPKLLIYGATTLETGVPSRFSGSGSGTDFTLTISSLQPEDFATYYCQQSWNTPWTFGQGTKVEIKRGGGGSGGGGSGGGGSEVQLVESGGGLVQPGGSLRLSCAASGYTFSSYWVNWVRQAPGKGLEWVAQIYPGDGDTNYNGKFKGRFTISRDNSKNTLYLQMNSLRAEDTAVYYCARSITTVVGCAMDYWGQGTLVTVSSTRGQPKANPTVTLFPPSSEELQANKATLVCLISDFYPGAVTVAWKADGSPVKAGVETTKPSKQSNNKYAASSYLSLTPEQWKSHRSYSCQVTHEGSTVEKTVAPTECSEVKTDSTDHVKPKETENTKQPSKSCHKPKAIVHTEKVNMMSLTVLGLRMLFAKTVAVNFLLTAKLFFLRAKRSGSGVKQTLNFDLLKLAGDVESNPGPSRGHMTEYKPTVRLATRDDVPRAVRTLAAAFADYPATRHTVDPDRHIERVTELQELFLTRVGLDIGKVWVADDGAAVAVWTTPESVEAGAVFAEIGPRMAELSGSRLAAQQQMEGLLAPHRPKEPAWFLATVGVSPDHQGKGLGSAVVLPGVEAAERAGVPAFLETSAPRNLPFYERLGFTVTADVEVPEGPRTWCMTRKPGA

SEQ ID NO: 46053 - protein, 875 aa, synthetic construct
MALPVTALLLPLALLLHAARPLEEASTKGPSVFPLAPSSKSTSGGTAALGCLVKDYFPEPVTVSWNSGALTSGVHTFPAVLQSSGLYSLSSVVTVPSSSLGTQTYICNVNHKPSNTKVDKRVEPKSCGRADCGFTSESYQQGVLSATILYEILLGKATLYAVLVSALVLMAMVKRKDSRGRAKRSGSGATNFSLLKQAGDVEENPGPTSMALPVTALLLPLALLLHAARPDIQMTQSPSSLSASVGDRVTITCKASDHINNWLAWYQQKPGKAPKLLIYGATTLETGVPSRFSGSGSGTDFTLTISSLQPEDFATYYCQQSWNTPWTFGQGTKVEIKRGGGGSGGGGSGGGGSEVQLVESGGGLVQPGGSLRLSCAASGYTFSSYWVNWVRQAPGKGLEWVAQIYPGDGDTNYNGKFKGRFTISRDNSKNTLYLQMNSLRAEDTAVYYCARSITTVVGCAMDYWGQGTLVTVSSTRGQPKANPTVTLFPPSSEELQANKATLVCLISDFYPGAVTVAWKADGSPVKAGVETTKPSKQSNNKYAASSYLSLTPEQWKSHRSYSCQVTHEGSTVEKTVAPTECSIPEDTFFPSPESSCDVKLVEKSFETDTNLNFQNLSVIGFRILLLKVAGFNLLMTLRLWSSRAKRSGSGVKQTLNFDLLKLAGDVESNPGPSRGHMTEYKPTVRLATRDDVPRAVRTLAAAFADYPATRHTVDPDRHIERVTELQELFLTRVGLDIGKVWVADDGAAVAVWTTPESVEAGAVFAEIGPRMAELSGSRLAAQQQMEGLLAPHRPKEPAWFLATVGVSPDHQGKGLGSAVVLPGVEAAERAGVPAFLETSAPRNLPFYERLGFTVTADVEVPEGPRTWCMTRKPGA

SEQ ID NO: 46054 - protein, 875 aa, synthetic construct
MALPVTALLLPLALLLHAARPLEEASTKGPSVFPLAPSSKSTSGGTAALGCLVKDYFPEPVTVSWNSGALTSGVHTFPAVLQSSGLYSLSSVVTVPSSSLGTQTYICNVNHKPSNTKVDKRVEPKSCIPEDTFFPSPESSCDVKLVEKSFETDTNLNFQNLSVIGFRILLLKVAGFNLLMTLRLWSSRAKRSGSGATNFSLLKQAGDVEENPGPTSMALPVTALLLPLALLLHAARPDIQMTQSPSSLSASVGDRVTITCKASDHINNWLAWYQQKPGKAPKLLIYGATTLETGVPSRFSGSGSGTDFTLTISSLQPEDFATYYCQQSWNTPWTFGQGTKVEIKRGGGGSGGGGSGGGGSEVQLVESGGGLVQPGGSLRLSCAASGYTFSSYWVNWVRQAPGKGLEWVAQIYPGDGDTNYNGKFKGRFTISRDNSKNTLYLQMNSLRAEDTAVYYCARSITTVVGCAMDYWGQGTLVTVSSTRGQPKANPTVTLFPPSSEELQANKATLVCLISDFYPGAVTVAWKADGSPVKAGVETTKPSKQSNNKYAASSYLSLTPEQWKSHRSYSCQVTHEGSTVEKTVAPTECSGRADCGFTSESYQQGVLSATILYEILLGKATLYAVLVSALVLMAMVKRKDSRGRAKRSGSGVKQTLNFDLLKLAGDVESNPGPSRGHMTEYKPTVRLATRDDVPRAVRTLAAAFADYPATRHTVDPDRHIERVTELQELFLTRVGLDIGKVWVADDGAAVAVWTTPESVEAGAVFAEIGPRMAELSGSRLAAQQQMEGLLAPHRPKEPAWFLATVGVSPDHQGKGLGSAVVLPGVEAAERAGVPAFLETSAPRNLPFYERLGFTVTADVEVPEGPRTWCMTRKPGA

SEQ ID NO: 46055 - protein, 622 aa, synthetic construct
MALPVTALLLPLALLLHAARPDIQMTQSPSSLSASVGDRVTITCKASDHINNWLAWYQQKPGKAPKLLIYGATTLETGVPSRFSGSGSGTDFTLTISSLQPEDFATYYCQQSWNTPWTFGQGTKVEIKRLEDLKNVFPPEVAVFEPSEAEISHTQKATLVCLATGFYPDHVELSWWVNGKEVHSGVCTDPQPLKEQPALNDSRYCLSSRLRVSATFWQNPRNHFRCQVQFYGLSENDEWTQDRAKPVTQIVSAEAWGRADSGFTSESYQQGVLSATILYEILLGKATLYAVLVSALVLMAMVKRKDSRGRAKRSGSGATNFSLLKQAGDVEENPGPTSMDWIWRILFLVGAATGAHSFEEVQLVESGGGLVQPGGSLRLSCAASGYTFSSYWVNWVRQAPGKGLEWVAQIYPGDGDTNYNGKFKGRFTISRDNSKNTLYLQMNSLRAEDTAVYYCARSITTVVGCAMDYWGQGTLVTVSSTRIQNPDPAVYQLRDSKSSDKSVCLFTDFDSQTNVSQSKDSDVYITDKCVLDMRSMDFKSNSAVAWSNKSDFACANAFNNSIIPEDTFFPSPESSSDVKLVEKSFETDTNLNFQNLSVIGFRILLLKVAGFNLLMTLRLWSS

SEQ ID NO: 46056 - protein, 901 aa, synthetic construct
MALPVTALLLPLALLLHAARPEVQLLESGGGLVQPGGSLRLSCAASGRTFSMGWYRQAPGKGLEFVSAITYSGGSPYYADSVKGRFTISRDNSKNTVYLQMNSLRAEDTAVYYCAANPTYGSDWNAENWGQGTLVTVSSGTGGGGSGGGGSGGGGSEFDIQMTQSPSSLSASVGDRVTITCKASDHINNWLAWYQQKPGKAPKLLIYGATTLETGVPSRFSGSGSGTDFTLTISSLQPEDFATYYCQQSWNTPWTFGQGTKVEIKRLEIQNPDPAVYQLRDSKSSDKSVCLFTDFDSQTNVSQSKDSDVYITDKCVLDMRSMDFKSNSAVAWSNKSDFACANAFNNSIIPEDTFFPSSDVPCDVKLVEKSFETDTNLNFQNLSVIGFRILLLKVAGFNLLMTLRLWSSRAKRSGSGVKQTLNFDLLKLAGDVESNPGPTSTMDWIWRILFLVGAATGTHSGPEVQLVESGGGLVQPGGSLRLSCAASGRTFTMGWYRQAPGKEREFVAAISLSPTLAYYADSVKGRFTISRDNSKNTVVLQMNSLRAEDTALYYCAADRKSVMSIRPDYWGQGTLVTVSSGSGGGGSGGGGSGGGGSFEEVQLVESGGGLVQPGGSLRLSCAASGYTFSSYWVNWVRQAPGKGLEWVAQIYPGDGDTNYNGKFKGRFTISRDNSKNTLYLQMNSLRAEDTAVYYCARSITTVVGCAMDYWGQGTLVTVSSTREDLKNVFPPEVAVFEPSKAEIAHTQKATLVCLATGFYPDHVELSWWVNGKEVHSGVCTDPQPLKEQPALNDSRYCLSSRLRVSATFWQNPRNHFRCQVQFYGLSENDEWTQDRAKPVTQIVSAEAWGRADCGITSASYHQGVLSATILYEILLGKATLYAVLVSALVLMAMVKRKDSRG

SEQ ID NO: 46057 - protein, 901 aa, synthetic construct
MALPVTALLLPLALLLHAARPEVQLVESGGGLVQAGGSLRLSCAASGRTFSMGWFRQAPGKEREFVAAITYSGGSPYYADSVKGRFTISRDNAKNTVYLQMNSLKPEDTAVYYCAANPTYGSDWNAENWGQGTQVTVSSGTGGGGSGGGGSGGGGSEFDIQMTQSPSSLSASVGDRVTITCKASDHINNWLAWYQQKPGKAPKLLIYGATTLETGVPSRFSGSGSGTDFTLTISSLQPEDFATYYCQQSWNTPWTFGQGTKVEIKRLEIQNPDPAVYQLRDSKSSDKSVCLFTDFDSQTNVSQSKDSDVYITDKCVLDMRSMDFKSNSAVAWSNKSDFACANAFNNSIIPEDTFFPSSDVPCDVKLVEKSFETDTNLNFQNLSVIGFRILLLKVAGFNLLMTLRLWSSRAKRSGSGVKQTLNFDLLKLAGDVESNPGPTSTMDWIWRILFLVGAATGAHSGPEVQLVESGGGLVQPGGSLRLSCAASGRTFTMGWYRQAPGKEREFVAAISLSPTLAYYADSVKGRFTISRDNSKNTVVLQMNSLRAEDTALYYCAADRKSVMSIRPDYWGQGTLVTVSSGSGGGGSGGGGSGGGGSFEEVQLVESGGGLVQPGGSLRLSCAASGYTFSSYWVNWVRQAPGKGLEWVAQIYPGDGDTNYNGKFKGRFTISRDNSKNTLYLQMNSLRAEDTAVYYCARSITTVVGCAMDYWGQGTLVTVSSTREDLKNVFPPEVAVFEPSKAEIAHTQKATLVCLATGFYPDHVELSWWVNGKEVHSGVCTDPQPLKEQPALNDSRYCLSSRLRVSATFWQNPRNHFRCQVQFYGLSENDEWTQDRAKPVTQIVSAEAWGRADCGITSASYHQGVLSATILYEILLGKATLYAVLVSALVLMAMVKRKDSRG

SEQ ID NO: 46058 - protein, 898 aa, synthetic construct
MALPVTALLLPLALLLHAARPEVQLVESGGGLVQAGGSLRLSCAASGRTFSMGWFRQAPGKEREFVAAITYSGGSPYYADSVKGRFTISRDNAKNTVYLQMNSLKPEDTAVYYCAANPTYGSDWNAENWGQGTQVTVSSGTGGGGSGGGGSGGGGSEFDIQMTQSPSSLSASVGDRVTITCKASDHINNWLAWYQQKPGKAPKLLIYGATTLETGVPSRFSGSGSGTDFTLTISSLQPEDFATYYCQQSWNTPWTFGQGTKVEIKRLEDLKNVFPPEVAVFEPSEAEISHTQKATLVCLATGFYPDHVELSWWVNGKEVHSGVCTDPQPLKEQPALNDSRYCLSSRLRVSATFWQNPRNHFRCQVQFYGLSENDEWTQDRAKPVTQIVSAEAWGRADCGFTSESYQQGVLSATILYEILLGKATLYAVLVSALVLMAMVKRKDSRGRAKRSGSGATNFSLLKQAGDVEENPGPTSATMDWIWRILFLVGAATGAHSGPEVQLVESGGGLVQAGGSLRLSCAASGRTFTMGWFRQAPGKEREFVAAISLSPTLAYYADSVKGRFTISRDNAKNTVVLQMNSLKPEDTALYYCAADRKSVMSIRPDYWGQGTQVTVSSGSGGGGSGGGGSGGGGSFEEVQLVESGGGLVQPGGSLRLSCAASGYTFSSYWVNWVRQAPGKGLEWVAQIYPGDGDTNYNGKFKGRFTISRDNSKNTLYLQMNSLRAEDTAVYYCARSITTVVGCAMDYWGQGTLVTVSSTRIQNPDPAVYQLRDSKSSDKSVCLFTDFDSQTNVSQSKDSDVYITDKCVLDMRSMDFKSNSAVAWSNKSDFACANAFNNSIIPEDTFFPSPESSCDVKLVEKSFETDTNLNFQNLSVIGFRILLLKVAGFNLLMTLRLWSS

SEQ ID NO: 46059 - protein, 769 aa, synthetic construct
MALPVTALLLPLALLLHAARPEVQLVESGGGLVQPGGSLRLSCEASGFASDDYIIGWFRQAPGKEREGVSCISSKYANTVYTDSVKGRFRLSRGTAKNTVYLQMSALKPEDTAVYYCAMDSRRVTCPEISTMHRNFDSWGQGTLVTVSSGTGGGGSGGGGSGGGGSEFDIQMTQSPSSLSASVGDRVTITCKASDHINNWLAWYQQKPGKAPKLLIYGATTLETGVPSRFSGSGSGTDFTLTISSLQPEDFATYYCQQSWNTPWTFGQGTKVEIKRLEDLKNVFPPEVAVFEPSKAEIAHTQKATLVCLATGFYPDHVELSWWVNGKEVHSGVCTDPQPLKEQPALNDSRYCLSSRLRVSATFWQNPRNHFRCQVQFYGLSENDEWTQDRAKPVTQIVSAEAWGRADCGITSASYHQGVLSATILYEILLGKATLYAVLVSALVLMAMVKRKDSRGRAKRSGSGATNFSLLKQAGDVEENPGPTSMDWIWRILFLVGAATGAHSFEEVQLVESGGGLVQPGGSLRLSCAASGYTFSSYWVNWVRQAPGKGLEWVAQIYPGDGDTNYNGKFKGRFTISRDNSKNTLYLQMNSLRAEDTAVYYCARSITTVVGCAMDYWGQGTLVTVSSTRIQNPDPAVYQLRDSKSSDKSVCLFTDFDSQTNVSQSKDSDVYITDKCVLDMRSMDFKSNSAVAWSNKSDFACANAFNNSIIPEDTFFPSSDVPCDVKLVEKSFETDTNLNFQNLSVIGFRILLLKVAGFNLLMTLRLWSS

SEQ ID NO: 46060 - protein, 760 aa, synthetic construct
MALPVTALLLPLALLLHAARPDIQMTQSPSSLSASVGDRVTITCKASDHINNWLAWYQQKPGKAPKLLIYGATTLETGVPSRFSGSGSGTDFTLTISSLQPEDFATYYCQQSWNTPWTFGQGTKVEIKRLEDLKNVFPPEVAVFEPSEAEISHTQKATLVCLATGFYPDHVELSWWVNGKEVHSGVCTDPQPLKEQPALNDSRYCLSSRLRVSATFWQNPRNHFRCQVQFYGLSENDEWTQDRAKPVTQIVSAEAWGRADCGFTSESYQQGVLSATILYEILLGKATLYAVLVSALVLMAMVKRKDSRGRAKRSGSGATNFSLLKQAGDVEENPGPTSTMDWIWRILFLVGAATGAHSGPEVQLVESGGGLVQPGGSLRLSCAASGRTFTMGWYRQAPGKEREFVAAISLSPTLAYYADSVKGRFTISRDNSKNTVVLQMNSLRAEDTALYYCAADRKSVMSIRPDYWGQGTLVTVSSGSGGGGSGGGGSGGGGSFEEVQLVESGGGLVQPGGSLRLSCAASGYTFSSYWVNWVRQAPGKGLEWVAQIYPGDGDTNYNGKFKGRFTISRDNSKNTLYLQMNSLRAEDTAVYYCARSITTVVGCAMDYWGQGTLVTVSSTRIQNPDPAVYQLRDSKSSDKSVCLFTDFDSQTNVSQSKDSDVYITDKCVLDMRSMDFKSNSAVAWSNKSDFACANAFNNSIIPEDTFFPSPESSCDVKLVEKSFETDTNLNFQNLSVIGFRILLLKVAGFNLLMTLRLWSS

SEQ ID NO: 46061 - protein, 767 aa, synthetic construct
MALPVTALLLPLALLLHAARPDIQMTQSPSSLSASVGDRVTITCKASDHINNWLAWYQQKPGKAPKLLIYGATTLETGVPSRFSGSGSGTDFTLTISSLQPEDFATYYCQQSWNTPWTFGQGTKVEIKRLEDLKNVFPPEVAVFEPSEAEISHTQKATLVCLATGFYPDHVELSWWVNGKEVHSGVCTDPQPLKEQPALNDSRYCLSSRLRVSATFWQNPRNHFRCQVQFYGLSENDEWTQDRAKPVTQIVSAEAWGRADCGFTSESYQQGVLSATILYEILLGKATLYAVLVSALVLMAMVKRKDSRGRAKRSGSGATNFSLLKQAGDVEENPGPTSTMDWIWRILFLVGAATGAHSGPQVQLVESGGGLVQPGGSLRLSCAASGNINSRNCMGWFRQAPGKGREGVAAIGQVTGRTYYVDSVKGRFTISLDNSKNTLYLQMNSLRAEDTAVYYCAAAPGCLLSALRSADYRNWGQGTLVTVSSGSGGGGSGGGGSGGGGSFEEVQLVESGGGLVQPGGSLRLSCAASGYTFSSYWVNWVRQAPGKGLEWVAQIYPGDGDTNYNGKFKGRFTISRDNSKNTLYLQMNSLRAEDTAVYYCARSITTVVGCAMDYWGQGTLVTVSSTRIQNPDPAVYQLRDSKSSDKSVCLFTDFDSQTNVSQSKDSDVYITDKCVLDMRSMDFKSNSAVAWSNKSDFACANAFNNSIIPEDTFFPSPESSCDVKLVEKSFETDTNLNFQNLSVIGFRILLLKVAGFNLLMTLRLWSS

SEQ ID NO: 46062 - protein, 767 aa, synthetic construct
MALPVTALLLPLALLLHAARPDIQMTQSPSSLSASVGDRVTITCKASDHINNWLAWYQQKPGKAPKLLIYGATTLETGVPSRFSGSGSGTDFTLTISSLQPEDFATYYCQQSWNTPWTFGQGTKVEIKRLEDLKNVFPPEVAVFEPSEAEISHTQKATLVCLATGFYPDHVELSWWVNGKEVHSGVCTDPQPLKEQPALNDSRYCLSSRLRVSATFWQNPRNHFRCQVQFYGLSENDEWTQDRAKPVTQIVSAEAWGRADCGFTSESYQQGVLSATILYEILLGKATLYAVLVSALVLMAMVKRKDSRGRAKRSGSGATNFSLLKQAGDVEENPGPTSTMDWIWRILFLVGAATGAHSGPQVQLVESGGGSVQAGGSLRLSCGASGNISSRNCMGWFRQAPGKEREGVAAIGQVTGRSYYVDSVKGRFTISLDNAKNTLYLQMNTLKPEDTAMYYCAAAPGCLLSALRSADYRNWGQGTQVTVSSGSGGGGSGGGGSGGGGSFEEVQLVESGGGLVQPGGSLRLSCAASGYTFSSYWVNWVRQAPGKGLEWVAQIYPGDGDTNYNGKFKGRFTISRDNSKNTLYLQMNSLRAEDTAVYYCARSITTVVGCAMDYWGQGTLVTVSSTRIQNPDPAVYQLRDSKSSDKSVCLFTDFDSQTNVSQSKDSDVYITDKCVLDMRSMDFKSNSAVAWSNKSDFACANAFNNSIIPEDTFFPSPESSCDVKLVEKSFETDTNLNFQNLSVIGFRILLLKVAGFNLLMTLRLWSS

SEQ ID NO: 46063 - protein, 908 aa, synthetic construct
MALPVTALLLPLALLLHAARPEVQLVESGGGLVQAGGSLRLSCAASGRTFSMGWFRQAPGKEREFVAAITYSGGSPYYADSVKGRFTISRDNAKNTVYLQMNSLKPEDTAVYYCAANPTYGSDWNAENWGQGTQVTVSSGTGGGGSGGGGSGGGGSEFDIQMTQSPSSLSASVGDRVTITCKASDHINNWLAWYQQKPGKAPKLLIYGATTLETGVPSRFSGSGSGTDFTLTISSLQPEDFATYYCQQSWNTPWTFGQGTKVEIKRLEIQNPDPAVYQLRDSKSSDKSVCLFTDFDSQTNVSQSKDSDVYITDKCVLDMRSMDFKSNSAVAWSNKSDFACANAFNNSIIPEDTFFPSSDVPCDVKLVEKSFETDTNLNFQNLSVIGFRILLLKVAGFNLLMTLRLWSSRAKRSGSGVKQTLNFDLLKLAGDVESNPGPTSTMDWIWRILFLVGAATGAHSGPQVQLVESGGGSVQAGGSLRLSCGASGNISSRNCMGWFRQAPGKEREGVAAIGQVTGRSYYVDSVKGRFTISLDNAKNTLYLQMNTLKPEDTAMYYCAAAPGCLLSALRSADYRNWGQGTQVTVSSGSGGGGSGGGGSGGGGSFEEVQLVESGGGLVQPGGSLRLSCAASGYTFSSYWVNWVRQAPGKGLEWVAQIYPGDGDTNYNGKFKGRFTISRDNSKNTLYLQMNSLRAEDTAVYYCARSITTVVGCAMDYWGQGTLVTVSSTREDLKNVFPPEVAVFEPSKAEIAHTQKATLVCLATGFYPDHVELSWWVNGKEVHSGVCTDPQPLKEQPALNDSRYCLSSRLRVSATFWQNPRNHFRCQVQFYGLSENDEWTQDRAKPVTQIVSAEAWGRADCGITSASYHQGVLSATILYEILLGKATLYAVLVSALVLMAMVKRKDSRG

SEQ ID NO: 46064 - protein, 905 aa, synthetic construct
MALPVTALLLPLALLLHAARPQVQLVESGGGSVQAGGSLRLSCGASGNISSRNCMGWFRQAPGKEREGVAAIGQVTGRSYYVDSVKGRFTISLDNAKNTLYLQMNTLKPEDTAMYYCAAAPGCLLSALRSADYRNWGQGTQVTVSSGTGGGGSGGGGSGGGGSEFDIQMTQSPSSLSASVGDRVTITCKASDHINNWLAWYQQKPGKAPKLLIYGATTLETGVPSRFSGSGSGTDFTLTISSLQPEDFATYYCQQSWNTPWTFGQGTKVEIKRLEDLKNVFPPEVAVFEPSEAEISHTQKATLVCLATGFYPDHVELSWWVNGKEVHSGVCTDPQPLKEQPALNDSRYCLSSRLRVSATFWQNPRNHFRCQVQFYGLSENDEWTQDRAKPVTQIVSAEAWGRADCGFTSESYQQGVLSATILYEILLGKATLYAVLVSALVLMAMVKRKDSRGRAKRSGSGATNFSLLKQAGDVEENPGPTSATMDWIWRILFLVGAATGAHSGPEVQLVESGGGLVQAGGSLRLSCAASGRTFTMGWFRQAPGKEREFVAAISLSPTLAYYADSVKGRFTISRDNAKNTVVLQMNSLKPEDTALYYCAADRKSVMSIRPDYWGQGTQVTVSSGSGGGGSGGGGSGGGGSFEEVQLVESGGGLVQPGGSLRLSCAASGYTFSSYWVNWVRQAPGKGLEWVAQIYPGDGDTNYNGKFKGRFTISRDNSKNTLYLQMNSLRAEDTAVYYCARSITTVVGCAMDYWGQGTLVTVSSTRIQNPDPAVYQLRDSKSSDKSVCLFTDFDSQTNVSQSKDSDVYITDKCVLDMRSMDFKSNSAVAWSNKSDFACANAFNNSIIPEDTFFPSPESSCDVKLVEKSFETDTNLNFQNLSVIGFRILLLKVAGFNLLMTLRLWSS

SEQ ID NO: 46065 - protein, 768 aa, synthetic construct
MALPVTALLLPLALLLHAARPQVQLVESGGGSVQAGGSLRLSCGASGNISSRNCMGWFRQAPGKEREGVAAIGQVTGRSYYVDSVKGRFTISLDNAKNTLYLQMNTLKPEDTAMYYCAAAPGCLLSALRSADYRNWGQGTQVTVSSGTGGGGSGGGGSGGGGSEFDIQMTQSPSSLSASVGDRVTITCKASDHINNWLAWYQQKPGKAPKLLIYGATTLETGVPSRFSGSGSGTDFTLTISSLQPEDFATYYCQQSWNTPWTFGQGTKVEIKRLEDLKNVFPPEVAVFEPSEAEISHTQKATLVCLATGFYPDHVELSWWVNGKEVHSGVCTDPQPLKEQPALNDSRYCLSSRLRVSATFWQNPRNHFRCQVQFYGLSENDEWTQDRAKPVTQIVSAEAWGRADCGFTSESYQQGVLSATILYEILLGKATLYAVLVSALVLMAMVKRKDSRGRAKRSGSGATNFSLLKQAGDVEENPGPTSATMDWIWRILFLVGAATGAHSFEEVQLVESGGGLVQPGGSLRLSCAASGYTFSSYWVNWVRQAPGKGLEWVAQIYPGDGDTNYNGKFKGRFTISRDNSKNTLYLQMNSLRAEDTAVYYCARSITTVVGCAMDYWGQGTLVTVSSTRIQNPDPAVYQLRDSKSSDKSVCLFTDFDSQTNVSQSKDSDVYITDKCVLDMRSMDFKSNSAVAWSNKSDFACANAFNNSIIPEDTFFPSPESSCDVKLVEKSFETDTNLNFQNLSVIGFRILLLKVAGFNLLMTLRLWSS

SEQ ID NO: 46066 - protein, 768 aa, synthetic construct
MALPVTALLLPLALLLHAARPQVQLVESGGGVVQPGGSLRLSCAASGLSFSTYTVAWFRQAPGKGLEGVAAIPYTSQHMVYTDSVRGRFTISRDNSKNTLYLQMNSLRAEDTAVYYCATDRRPGTSMLAINGYNRWGQGTTVTVSSGTGGGGSGGGGSGGGGSEFDIQMTQSPSSLSASVGDRVTITCKASDHINNWLAWYQQKPGKAPKLLIYGATTLETGVPSRFSGSGSGTDFTLTISSLQPEDFATYYCQQSWNTPWTFGQGTKVEIKRLEDLKNVFPPEVAVFEPSEAEISHTQKATLVCLATGFYPDHVELSWWVNGKEVHSGVCTDPQPLKEQPALNDSRYCLSSRLRVSATFWQNPRNHFRCQVQFYGLSENDEWTQDRAKPVTQIVSAEAWGRADCGFTSESYQQGVLSATILYEILLGKATLYAVLVSALVLMAMVKRKDSRGRAKRSGSGATNFSLLKQAGDVEENPGPTSATMDWIWRILFLVGAATGAHSFEEVQLVESGGGLVQPGGSLRLSCAASGYTFSSYWVNWVRQAPGKGLEWVAQIYPGDGDTNYNGKFKGRFTISRDNSKNTLYLQMNSLRAEDTAVYYCARSITTVVGCAMDYWGQGTLVTVSSTRIQNPDPAVYQLRDSKSSDKSVCLFTDFDSQTNVSQSKDSDVYITDKCVLDMRSMDFKSNSAVAWSNKSDFACANAFNNSIIPEDTFFPSPESSCDVKLVEKSFETDTNLNFQNLSVIGFRILLLKVAGFNLLMTLRLWSS

SEQ ID NO: 46067 - protein, 767 aa, synthetic construct
MALPVTALLLPLALLLHAARPDIQMTQSPSSLSASVGDRVTITCKASDHINNWLAWYQQKPGKAPKLLIYGATTLETGVPSRFSGSGSGTDFTLTISSLQPEDFATYYCQQSWNTPWTFGQGTKVEIKRLEDLKNVFPPEVAVFEPSEAEISHTQKATLVCLATGFYPDHVELSWWVNGKEVHSGVCTDPQPLKEQPALNDSRYCLSSRLRVSATFWQNPRNHFRCQVQFYGLSENDEWTQDRAKPVTQIVSAEAWGRADCGFTSESYQQGVLSATILYEILLGKATLYAVLVSALVLMAMVKRKDSRGRAKRSGSGATNFSLLKQAGDVEENPGPTSTMDWIWRILFLVGAATGAHSGPQVQLVESGGGVVQPGGSLRLSCAASGLSFSTYTVAWFRQAPGKGLEGVAAIPYTSQHMVYTDSVRGRFTISRDNSKNTLYLQMNSLRAEDTAVYYCATDRRPGTSMLAINGYNRWGQGTTVTVSSGSGGGGSGGGGSGGGGSFEEVQLVESGGGLVQPGGSLRLSCAASGYTFSSYWVNWVRQAPGKGLEWVAQIYPGDGDTNYNGKFKGRFTISRDNSKNTLYLQMNSLRAEDTAVYYCARSITTVVGCAMDYWGQGTLVTVSSTRIQNPDPAVYQLRDSKSSDKSVCLFTDFDSQTNVSQSKDSDVYITDKCVLDMRSMDFKSNSAVAWSNKSDFACANAFNNSIIPEDTFFPSPESSCDVKLVEKSFETDTNLNFQNLSVIGFRILLLKVAGFNLLMTLRLWSS

SEQ ID NO: 46068 - protein, 769 aa, synthetic construct
MALPVTALLLPLALLLHAARPDIQMTQSPSSLSASVGDRVTITCKASDHINNWLAWYQQKPGKAPKLLIYGATTLETGVPSRFSGSGSGTDFTLTISSLQPEDFATYYCQQSWNTPWTFGQGTKVEIKRLEDLKNVFPPEVAVFEPSEAEISHTQKATLVCLATGFYPDHVELSWWVNGKEVHSGVCTDPQPLKEQPALNDSRYCLSSRLRVSATFWQNPRNHFRCQVQFYGLSENDEWTQDRAKPVTQIVSAEAWGRADCGFTSESYQQGVLSATILYEILLGKATLYAVLVSALVLMAMVKRKDSRGRAKRSGSGATNFSLLKQAGDVEENPGPTSTMDWIWRILFLVGAATGAHSGPEVQLVESGGGSVQAGGSLRLSCAASGYTYSINCMGWFRQAPGKEREGVAAISTGGGRTDYRDSVKGRFTISQDNAKNTVYLQMNSLKPEDTAMYYCAGKTTYPGYGCGLGRSAYNYWGQGTQVTVSSGSGGGGSGGGGSGGGGSFEEVQLVESGGGLVQPGGSLRLSCAASGYTFSSYWVNWVRQAPGKGLEWVAQIYPGDGDTNYNGKFKGRFTISRDNSKNTLYLQMNSLRAEDTAVYYCARSITTVVGCAMDYWGQGTLVTVSSTRIQNPDPAVYQLRDSKSSDKSVCLFTDFDSQTNVSQSKDSDVYITDKCVLDMRSMDFKSNSAVAWSNKSDFACANAFNNSIIPEDTFFPSPESSCDVKLVEKSFETDTNLNFQNLSVIGFRILLLKVAGFNLLMTLRLWSS

SEQ ID NO: 46069 - protein, 622 aa, synthetic construct
MALPVTALLLPLALLLHAARPDIQMTQSPSSLSASVGDRVTITCKASDHINNWLAWYQQKPGKAPKLLIYGATTLETGVPSRFSGSGSGTDFTLTISSLQPEDFATYYCQQSWNTPWTFGQGTKVEIKRLEDLKHVFPPEVAVFEPSDAEIWHTQKATLVCLATGFYPDHVELSWWVNGKEVHSGVSTDPQPLKEQPALNDSRYCLSSRLRVSATFWQNPRNHFRCQVQFYGLSENDEWTQDRAKPVTQIVSAEAWGRADCGFTSESYQQGVLSATILYEILLGKATLYAVLVSALVLMAMVKRKDSRGRAKRSGSGATNFSLLKQAGDVEENPGPTSMDWIWRILFLVGAATGAHSFEEVQLVESGGGLVQPGGSLRLSCAASGYTFSSYWVNWVRQAPGKGLEWVAQIYPGDGDTNYNGKFKGRFTISRDNSKNTLYLQMNSLRAEDTAVYYCARSITTVVGCAMDYWGQGTLVTVSSTRIQNPDPAVYQLRDSKSSDKSVCLFTDFDSQTNVSQSKDSDVYITDKTVLDMRSMDFKSNSAVAWSSKSDFACANAFNNSIIPEDTFFPSPEMACDVKLVEKSFETDTNLNFQNLLVIWLRILLLKVAGFNLLMTLRLWSS

SEQ ID NO: 46070 - protein, 622 aa, synthetic construct
MALPVTALLLPLALLLHAARPDIQMTQSPSSLSASVGDRVTITCKASDHINNWLAWYQQKPGKAPKLLIYGATTLETGVPSRFSGSGSGTDFTLTISSLQPEDFATYYCQQSWNTPWTFGQGTKVEIKRLEDLKHVFPPEVAVFEPSDAEIWHTQKATLVCLATGFYPDHVELSWWVNGKEVHSGVSTDPQPLKEQPALNDSRYCLSSRLRVSATFWQNPRNHFRCQVQFYGLSENDEWTQDRAKPVTQIVSAEAWGRADCGFTSESYQQGVLSATILYEILLGKATLYAVLVSALVLMAMVKRKDSRGRAKRSGSGATNFSLLKQAGDVEENPGPTSMDWIWRILFLVGAATGAHSFEEVQLVESGGGLVQPGGSLRLSCAASGYTFSSYWVNWVRQAPGKGLEWVAQIYPGDGDTNYNGKFKGRFTISRDNSKNTLYLQMNSLRAEDTAVYYCARSITTVVGCAMDYWGQGTLVTVSSTRIQNPDPAVYQLRDSKSSDKSVCLFTDFDSQTNVSQSKDSDVYITDKTVLDMRSMDFKSNSAVAWSTKSDFACANAFNNSIIPEDTFFPSPEVVCDVKLVEKSFETDTNLNFQNLVVIGARILLLKVAGFNLLMTLRLWSS

SEQ ID NO: 46071 - protein, 622 aa, synthetic construct
MALPVTALLLPLALLLHAARPDIQMTQSPSSLSASVGDRVTITCKASDHINNWLAWYQQKPGKAPKLLIYGATTLETGVPSRFSGSGSGTDFTLTISSLQPEDFATYYCQQSWNTPWTFGQGTKVEIKRLEDLKNVFPPEVAVFEPSKAEISRTQKATLVCLATGFYPPHVELSWWVNGKEVHDGVCTDPQPLKEQPALNDSRYCLSSRLRVSATFWQNPRNHFRCQVQFYGLSENDEWTQDRAKPVTQIVSAEAWGRADCGFTSESYQQGVLSATILYEILLGKATLYAVLVSALVLMAMVKRKDSRGRAKRSGSGATNFSLLKQAGDVEENPGPTSMDWIWRILFLVGAATGAHSFEEVQLVESGGGLVQPGGSLRLSCAASGYTFSSYWVNWVRQAPGKGLEWVAQIYPGDGDTNYNGKFKGRFTISRDNSKNTLYLQMNSLRAEDTAVYYCARSITTVVGCAMDYWGQGTLVTVSSTRIQNPDPAVYQLRDSKSSDKFVCLFTDFDSQINVSQSKDSDVYITDKCVLDMRSMDFKSNSAVAWSNKSDFTCANAFNNSIIPEDTFFPSPESSCDVKLVEKSFETDTNLNFQNLSVIGFRILLLKVAGFNLLMTLRLWSS

SEQ ID NO: 46072 - protein, 764 aa, synthetic construct
MALPVTALLLPLALLLHAARPDIQMTQSPSSLSASVGDRVTITCKASDHINNWLAWYQQKPGKAPKLLIYGATTLETGVPSRFSGSGSGTDFTLTISSLQPEDFATYYCQQSWNTPWTFGQGTKVEIKRLEDLKNVFPPEVAVFEPSEAEISHTQKATLVCLATGFYPDHVELSWWVNGKEVHSGVCTDPQPLKEQPALNDSRYCLSSRLRVSATFWQNPRNHFRCQVQFYGLSENDEWTQDRAKPVTQIVSAEAWGRADCGFTSESYQQGVLSATILYEILLGKATLYAVLVSALVLMAMVKRKDSRGRAKRSGSGATNFSLLKQAGDVEENPGPTSTMDWIWRILFLVGAATGAHSGPQVQLQESGPGLVKPSQTLSLTCTVSGASITTGEYYWNWFRQPPGKGLEWMGAIAASGSTTYSPSFESRTSISRDTSKNQFSLKLSSVTAADTAVYYCGRSFGVAAVTTGQNRGQGTLVTVSSGSGGGGSGGGGSGGGGSFEEVQLVESGGGLVQPGGSLRLSCAASGYTFSSYWVNWVRQAPGKGLEWVAQIYPGDGDTNYNGKFKGRFTISRDNSKNTLYLQMNSLRAEDTAVYYCARSITTVVGCAMDYWGQGTLVTVSSTRIQNPDPAVYQLRDSKSSDKSVCLFTDFDSQTNVSQSKDSDVYITDKCVLDMRSMDFKSNSAVAWSNKSDFACANAFNNSIIPEDTFFPSPESSCDVKLVEKSFETDTNLNFQNLSVIGFRILLLKVAGFNLLMTLRLWSS

SEQ ID NO: 46073 - protein, 905 aa, synthetic construct
MALPVTALLLPLALLLHAARPQVQLQESGPGLVKPSQTLSLTCTVSGGSITTGEFYWNWFRQPPGKGLEWMGAIAASGSTTYSPSFESRTSISRDTSKNQFSLKLSSVTAADTAVYYCGRSFGVAAVTTGQNRGQGTLVTVSSGTGGGGSGGGGSGGGGSEFDIQMTQSPSSLSASVGDRVTITCKASDHINNWLAWYQQKPGKAPKLLIYGATTLETGVPSRFSGSGSGTDFTLTISSLQPEDFATYYCQQSWNTPWTFGQGTKVEIKRLEIQNPDPAVYQLRDSKSSDKSVCLFTDFDSQTNVSQSKDSDVYITDKCVLDMRSMDFKSNSAVAWSNKSDFACANAFNNSIIPEDTFFPSSDVPCDVKLVEKSFETDTNLNFQNLSVIGFRILLLKVAGFNLLMTLRLWSSRAKRSGSGVKQTLNFDLLKLAGDVESNPGPTSTMDWIWRILFLVGAATGAHSGPEVQLVESGGGLVQPGGSLRLSCAASGRTFTMGWYRQAPGKEREFVAAISLSPTLAYYADSVKGRFTISRDNSKNTVVLQMNSLRAEDTALYYCAADRKSVMSIRPDYWGQGTLVTVSSGSGGGGSGGGGSGGGGSFEEVQLVESGGGLVQPGGSLRLSCAASGYTFSSYWVNWVRQAPGKGLEWVAQIYPGDGDTNYNGKFKGRFTISRDNSKNTLYLQMNSLRAEDTAVYYCARSITTVVGCAMDYWGQGTLVTVSSTREDLKNVFPPEVAVFEPSKAEIAHTQKATLVCLATGFYPDHVELSWWVNGKEVHSGVCTDPQPLKEQPALNDSRYCLSSRLRVSATFWQNPRNHFRCQVQFYGLSENDEWTQDRAKPVTQIVSAEAWGRADCGITSASYHQGVLSATILYEILLGKATLYAVLVSALVLMAMVKRKDSRG

SEQ ID NO: 46074 - protein, 768 aa, synthetic construct
MALPVTALLLPLALLLHAARPQVQLQESGPGLVKPSQTLSLTCTVSGGSITTGEFYWNWFRQPPGKGLEWMGAIAASGSTTYSPSFESRTSISRDTSKNQFSLKLSSVTAADTAVYYCGRSFGVAAVTTGQNRGQGTLVTVSSGTGGGGSGGGGSGGGGSEFDIQMTQSPSSLSASVGDRVTITCKASDHINNWLAWYQQKPGKAPKLLIYGATTLETGVPSRFSGSGSGTDFTLTISSLQPEDFATYYCQQSWNTPWTFGQGTKVEIKRLEIQNPDPAVYQLRDSKSSDKSVCLFTDFDSQTNVSQSKDSDVYITDKCVLDMRSMDFKSNSAVAWSNKSDFACANAFNNSIIPEDTFFPSSDVPCDVKLVEKSFETDTNLNFQNLSVIGFRILLLKVAGFNLLMTLRLWSSRAKRSGSGVKQTLNFDLLKLAGDVESNPGPTSTMDWIWRILFLVGAATGAHSFEEVQLVESGGGLVQPGGSLRLSCAASGYTFSSYWVNWVRQAPGKGLEWVAQIYPGDGDTNYNGKFKGRFTISRDNSKNTLYLQMNSLRAEDTAVYYCARSITTVVGCAMDYWGQGTLVTVSSTREDLKNVFPPEVAVFEPSKAEIAHTQKATLVCLATGFYPDHVELSWWVNGKEVHSGVCTDPQPLKEQPALNDSRYCLSSRLRVSATFWQNPRNHFRCQVQFYGLSENDEWTQDRAKPVTQIVSAEAWGRADCGITSASYHQGVLSATILYEILLGKATLYAVLVSALVLMAMVKRKDSRG

SEQ ID NO: 46075 - protein, 901 aa, synthetic construct
MALPVTALLLPLALLLHAARPEVQLVESGGGLVQAGGSLRLSCAASGRTFSMGWFRQAPGKEREFVAAITYSGGSPYYADSVKGRFTISRDNAKNTVYLQMNSLKPEDTAVYYCAANPTYGSDWNAENWGQGTQVTVSSGTGGGGSGGGGSGGGGSEFDIQMTQSPSSLSASVGDRVTITCKASDHINNWLAWYQQKPGKAPKLLIYGATTLETGVPSRFSGSGSGTDFTLTISSLQPEDFATYYCQQSWNTPWTFGQGTKVEIKRLEDLKNVFPPEVAVFEPSEAEISHTQKATLVCLATGFYPDHVELSWWVNGKEVHSGVCTDPQPLKEQPALNDSRYCLSSRLRVSATFWQNPRNHFRCQVQFYGLSENDEWTQDRAKPVTQIVSAEAWGRADCGFTSESYQQGVLSATILYEILLGKATLYAVLVSALVLMAMVKRKDSRGRAKRSGSGATNFSLLKQAGDVEENPGPTSTMDWIWRILFLVGAATGAHSGPQVQLQESGPGLVKPSQTLSLTCTVSGASITTGEYYWNWFRQPPGKGLEWMGAIAASGSTTYSPSFESRTSISRDTSKNQFSLKLSSVTAADTAVYYCGRSFGVAAVTTGQNRGQGTLVTVSSGSGGGGSGGGGSGGGGSFEEVQLVESGGGLVQPGGSLRLSCAASGYTFSSYWVNWVRQAPGKGLEWVAQIYPGDGDTNYNGKFKGRFTISRDNSKNTLYLQMNSLRAEDTAVYYCARSITTVVGCAMDYWGQGTLVTVSSTRIQNPDPAVYQLRDSKSSDKSVCLFTDFDSQTNVSQSKDSDVYITDKCVLDMRSMDFKSNSAVAWSNKSDFACANAFNNSIIPEDTFFPSPESSCDVKLVEKSFETDTNLNFQNLSVIGFRILLLKVAGFNLLMTLRLWSS

SEQ ID NO: 46076 - protein, 908 aa, synthetic construct
MALPVTALLLPLALLLHAARPEVQLVESGGGLVQAGGSLRLSCAASGRTFSMGWFRQAPGKEREFVAAITYSGGSPYYADSVKGRFTISRDNAKNTVYLQMNSLKPEDTAVYYCAANPTYGSDWNAENWGQGTQVTVSSGTGGGGSGGGGSGGGGSEFDIQMTQSPSSLSASVGDRVTITCKASDHINNWLAWYQQKPGKAPKLLIYGATTLETGVPSRFSGSGSGTDFTLTISSLQPEDFATYYCQQSWNTPWTFGQGTKVEIKRLEIQNPDPAVYQLRDSKSSDKSVCLFTDFDSQTNVSQSKDSDVYITDKCVLDMRSMDFKSNSAVAWSNKSDFACANAFNNSIIPEDTFFPSSDVPCDVKLVEKSFETDTNLNFQNLSVIGFRILLLKVAGFNLLMTLRLWSSRAKRSGSGVKQTLNFDLLKLAGDVESNPGPTSTMDWIWRILFLVGAATGAHSGPQVQLVESGGGLVQPGGSLRLSCAASGNINSRNCMGWFRQAPGKGREGVAAIGQVTGRTYYVDSVKGRFTISLDNSKNTLYLQMNSLRAEDTAVYYCAAAPGCLLSALRSADYRNWGQGTLVTVSSGSGGGGSGGGGSGGGGSFEEVQLVESGGGLVQPGGSLRLSCAASGYTFSSYWVNWVRQAPGKGLEWVAQIYPGDGDTNYNGKFKGRFTISRDNSKNTLYLQMNSLRAEDTAVYYCARSITTVVGCAMDYWGQGTLVTVSSTREDLKNVFPPEVAVFEPSKAEIAHTQKATLVCLATGFYPDHVELSWWVNGKEVHSGVCTDPQPLKEQPALNDSRYCLSSRLRVSATFWQNPRNHFRCQVQFYGLSENDEWTQDRAKPVTQIVSAEAWGRADCGITSASYHQGVLSATILYEILLGKATLYAVLVSALVLMAMVKRKDSRG

SEQ ID NO: 46077 - protein, 904 aa, synthetic construct
MALPVTALLLPLALLLHAARPEVQLVESGGGLVQAGGSLRLSCAASGRTFSMGWFRQAPGKEREFVAAITYSGGSPYYADSVKGRFTISRDNAKNTVYLQMNSLKPEDTAVYYCAANPTYGSDWNAENWGQGTQVTVSSGTGGGGSGGGGSGGGGSEFDIQMTQSPSSLSASVGDRVTITCKASDHINNWLAWYQQKPGKAPKLLIYGATTLETGVPSRFSGSGSGTDFTLTISSLQPEDFATYYCQQSWNTPWTFGQGTKVEIKRLEDLKNVFPPEVAVFEPSEAEISHTQKATLVCLATGFYPDHVELSWWVNGKEVHSGVCTDPQPLKEQPALNDSRYCLSSRLRVSATFWQNPRNHFRCQVQFYGLSENDEWTQDRAKPVTQIVSAEAWGRADCGFTSESYQQGVLSATILYEILLGKATLYAVLVSALVLMAMVKRKDSRGRAKRSGSGATNFSLLKQAGDVEENPGPTSTMDWIWRILFLVGAATGAHSGPQVQLVESGGGLVQPGGSLRLSCAASGNINSRNCMGWFRQAPGKGREGVAAIGQVTGRTYYVDSVKGRFTISLDNSKNTLYLQMNSLRAEDTAVYYCAAAPGCLLSALRSADYRNWGQGTLVTVSSGSGGGGSGGGGSGGGGSFEEVQLVESGGGLVQPGGSLRLSCAASGYTFSSYWVNWVRQAPGKGLEWVAQIYPGDGDTNYNGKFKGRFTISRDNSKNTLYLQMNSLRAEDTAVYYCARSITTVVGCAMDYWGQGTLVTVSSTRIQNPDPAVYQLRDSKSSDKSVCLFTDFDSQTNVSQSKDSDVYITDKCVLDMRSMDFKSNSAVAWSNKSDFACANAFNNSIIPEDTFFPSPESSCDVKLVEKSFETDTNLNFQNLSVIGFRILLLKVAGFNLLMTLRLWSS

SEQ ID NO: 46078 - protein, 904 aa, synthetic construct
MALPVTALLLPLALLLHAARPEVQLVESGGGLVQAGGSLRLSCAASGRTFTMGWFRQAPGKEREFVAAISLSPTLAYYADSVKGRFTISRDNAKNTVVLQMNSLKPEDTALYYCAADRKSVMSIRPDYWGQGTQVTVSSGTGGGGSGGGGSGGGGSEFDIQMTQSPSSLSASVGDRVTITCKASDHINNWLAWYQQKPGKAPKLLIYGATTLETGVPSRFSGSGSGTDFTLTISSLQPEDFATYYCQQSWNTPWTFGQGTKVEIKRLEDLKNVFPPEVAVFEPSEAEISHTQKATLVCLATGFYPDHVELSWWVNGKEVHSGVCTDPQPLKEQPALNDSRYCLSSRLRVSATFWQNPRNHFRCQVQFYGLSENDEWTQDRAKPVTQIVSAEAWGRADCGFTSESYQQGVLSATILYEILLGKATLYAVLVSALVLMAMVKRKDSRGRAKRSGSGATNFSLLKQAGDVEENPGPTSTMDWIWRILFLVGAATGAHSGPQVQLVESGGGLVQPGGSLRLSCAASGNINSRNCMGWFRQAPGKGREGVAAIGQVTGRTYYVDSVKGRFTISLDNSKNTLYLQMNSLRAEDTAVYYCAAAPGCLLSALRSADYRNWGQGTLVTVSSGSGGGGSGGGGSGGGGSFEEVQLVESGGGLVQPGGSLRLSCAASGYTFSSYWVNWVRQAPGKGLEWVAQIYPGDGDTNYNGKFKGRFTISRDNSKNTLYLQMNSLRAEDTAVYYCARSITTVVGCAMDYWGQGTLVTVSSTRIQNPDPAVYQLRDSKSSDKSVCLFTDFDSQTNVSQSKDSDVYITDKCVLDMRSMDFKSNSAVAWSNKSDFACANAFNNSIIPEDTFFPSPESSCDVKLVEKSFETDTNLNFQNLSVIGFRILLLKVAGFNLLMTLRLWSS

SEQ ID NO: 46079 - protein, 908 aa, synthetic construct
MALPVTALLLPLALLLHAARPQVQLQESGPGLVKPSQTLSLTCTVSGGSITTGEFYWNWFRQPPGKGLEWMGAIAASGSTTYSPSFESRTSISRDTSKNQFSLKLSSVTAADTAVYYCGRSFGVAAVTTGQNRGQGTLVTVSSGTGGGGSGGGGSGGGGSEFDIQMTQSPSSLSASVGDRVTITCKASDHINNWLAWYQQKPGKAPKLLIYGATTLETGVPSRFSGSGSGTDFTLTISSLQPEDFATYYCQQSWNTPWTFGQGTKVEIKRLEDLKNVFPPEVAVFEPSEAEISHTQKATLVCLATGFYPDHVELSWWVNGKEVHSGVCTDPQPLKEQPALNDSRYCLSSRLRVSATFWQNPRNHFRCQVQFYGLSENDEWTQDRAKPVTQIVSAEAWGRADCGFTSESYQQGVLSATILYEILLGKATLYAVLVSALVLMAMVKRKDSRGRAKRSGSGATNFSLLKQAGDVEENPGPTSTMDWIWRILFLVGAATGAHSGPQVQLVESGGGLVQPGGSLRLSCAASGNINSRNCMGWFRQAPGKGREGVAAIGQVTGRTYYVDSVKGRFTISLDNSKNTLYLQMNSLRAEDTAVYYCAAAPGCLLSALRSADYRNWGQGTLVTVSSGSGGGGSGGGGSGGGGSFEEVQLVESGGGLVQPGGSLRLSCAASGYTFSSYWVNWVRQAPGKGLEWVAQIYPGDGDTNYNGKFKGRFTISRDNSKNTLYLQMNSLRAEDTAVYYCARSITTVVGCAMDYWGQGTLVTVSSTRIQNPDPAVYQLRDSKSSDKSVCLFTDFDSQTNVSQSKDSDVYITDKCVLDMRSMDFKSNSAVAWSNKSDFACANAFNNSIIPEDTFFPSPESSCDVKLVEKSFETDTNLNFQNLSVIGFRILLLKVAGFNLLMTLRLWSS

SEQ ID NO: 46080 - protein, 487 aa, synthetic construct
MALPVTALLLPLALLLHAARPDIQMTQSPSSLSASVGDRVTITCKASDHINNWLAWYQQKPGKAPKLLIYGATTLETGVPSRFSGSGSGTDFTLTISSLQPEDFATYYCQQSWNTPWTFGQGTKVEIKRGGGGSGGGGSGGGGSEVQLVESGGGLVQPGGSLRLSCAASGYAFSNYWVNWVRQAPGKGLEWVAQIYPGDGDTNYNGKFKGRFTISRDNSKNTLYLQMNSLRAEDTAVYYCARSITTVVGCAMDYWGQGTLVTVSSTRKIEVMYPPPYLDNEKSNGTIIHVKGKHLCPSPLFPGPSKPFWVLVVVGGVLACYSLLVTVAFIIFWVRSKRSRLLHSDYMNMTPRRPGPTRKHYQPYAPPRDFAAYRSRVKFSRSADAPAYQQGQNQLYNELNLGRREEYDVLDKRRGRDPEMGGKPRRKNPQEGLYNELQKDKMAEAYSEIGMKGERRRGKGHDGLYQGLSTATKDTYDALHMQALPPR

SEQ ID NO: 46081 - protein, 493 aa, synthetic construct
MALPVTALLLPLALLLHAARPDIQMTQSPSSLSASVGDRVTITCKASDHINNWLAWYQQKPGKAPKLLIYGATTLETGVPSRFSGSGSGTDFTLTISSLQPEDFATYYCQQSWNTPWTFGQGTKVEIKRGGGGSGGGGSGGGGSEVQLVESGGGLVQPGGSLRLSCAASGYAFSNYWVNWVRQAPGKGLEWVAQIYPGDGDTNYNGKFKGRFTISRDNSKNTLYLQMNSLRAEDTAVYYCARSITTVVGCAMDYWGQGTLVTVSSTRAKPTTTPAPRPPTPAPTIASQPLSLRPEACRPAAGGAVHTRGLDFACDIYIWAPLAGTCGVLLLSLVITLYCKRGRKKLLYIFKQPFMRPVQTTQEEDGCSCRFPEEEEGGCELRVKFSRSADAPAYQQGQNQLYNELNLGRREEYDVLDKRRGRDPEMGGKPRRKNPQEGLYNELQKDKMAEAYSEIGMKGERRRGKGHDGLYQGLSTATKDTYDALHMQALPPR

SEQ ID NO: 46082 - protein, 493 aa, synthetic construct
MALPVTALLLPLALLLHAARPEVQLVESGGGLVQPGGSLRLSCAASGYAFSNYWVNWVRQAPGKGLEWVAQIYPGDGDTNYNGKFKGRFTISRDNSKNTLYLQMNSLRAEDTAVYYCARSITTVVGCAMDYWGQGTLVTVSSGGGGSGGGGSGGGGSDIQMTQSPSSLSASVGDRVTITCKASDHINNWLAWYQQKPGKAPKLLIYGATTLETGVPSRFSGSGSGTDFTLTISSLQPEDFATYYCQQSWNTPWTFGQGTKVEIKRTRAKPTTTPAPRPPTPAPTIASQPLSLRPEACRPAAGGAVHTRGLDFACDIYIWAPLAGTCGVLLLSLVITLYCKRGRKKLLYIFKQPFMRPVQTTQEEDGCSCRFPEEEEGGCELRVKFSRSADAPAYQQGQNQLYNELNLGRREEYDVLDKRRGRDPEMGGKPRRKNPQEGLYNELQKDKMAEAYSEIGMKGERRRGKGHDGLYQGLSTATKDTYDALHMQALPPR

SEQ ID NO: 46083 - protein, 626 aa, synthetic construct
MALPVTALLLPLALLLHAARPDIQMTQSPSSLSASVGDRVTITCKASDHINNWLAWYQQKPGKAPKLLIYGATTLETGVPSRFSGSGSGTDFTLTISSLQPEDFATYYCQQSWNTPWTFGQGTKVEIKRLEIQNPDPAVYQLRDSKSSDKSVCLFTDFDSQTNVSQSKDSDVYITDKCVLDMRSMDFKSNSAVAWSNKSDFACANAFNNSIIPEDTFFPSSDVPCDVKLVEKSFETDTNLNFQNLSVIGFRILLLKVAGFNLLMTLRLWSSRAKRSGSGVKQTLNFDLLKLAGDVESNPGPTSMDWIWRILFLVGAATGAHSFEEVQLVESGGGLVQPGGSLRLSCAASGYAFSNYWVNWVRQAPGKGLEWVAQIYPGDGDTNYNGKFKGRFTISRDNSKNTLYLQMNSLRAEDTAVYYCARSITTVVGCAMDYWGQGTLVTVSSTREDLKNVFPPEVAVFEPSKAEIAHTQKATLVCLATGFYPDHVELSWWVNGKEVHSGVCTDPQPLKEQPALNDSRYCLSSRLRVSATFWQNPRNHFRCQVQFYGLSENDEWTQDRAKPVTQIVSAEAWGRADCGITSASYHQGVLSATILYEILLGKATLYAVLVSALVLMAMVKRKDSRG

SEQ ID NO: 46084 - protein, 622 aa, synthetic construct
MALPVTALLLPLALLLHAARPDIQMTQSPSSLSASVGDRVTITCKASDHINNWLAWYQQKPGKAPKLLIYGATTLETGVPSRFSGSGSGTDFTLTISSLQPEDFATYYCQQSWNTPWTFGQGTKVEIKRLEDLKNVFPPEVAVFEPSKAEIAHTQKATLVCLATGFYPDHVELSWWVNGKEVHSGVCTDPQPLKEQPALNDSRYCLSSRLRVSATFWQNPRNHFRCQVQFYGLSENDEWTQDRAKPVTQIVSAEAWGRADCGITSASYHQGVLSATILYEILLGKATLYAVLVSALVLMAMVKRKDSRGRAKRSGSGATNFSLLKQAGDVEENPGPTSMDWIWRILFLVGAATGAHSFEEVQLVESGGGLVQPGGSLRLSCAASGYAFSNYWVNWVRQAPGKGLEWVAQIYPGDGDTNYNGKFKGRFTISRDNSKNTLYLQMNSLRAEDTAVYYCARSITTVVGCAMDYWGQGTLVTVSSTRIQNPDPAVYQLRDSKSSDKSVCLFTDFDSQTNVSQSKDSDVYITDKCVLDMRSMDFKSNSAVAWSNKSDFACANAFNNSIIPEDTFFPSSDVPCDVKLVEKSFETDTNLNFQNLSVIGFRILLLKVAGFNLLMTLRLWSS

SEQ ID NO: 46085 - protein, 622 aa, synthetic construct
MALPVTALLLPLALLLHAARPDIQMTQSPSSLSASVGDRVTITCKASDHINNWLAWYQQKPGKAPKLLIYGATTLETGVPSRFSGSGSGTDFTLTISSLQPEDFATYYCQQSWNTPWTFGQGTKVEIKRLEDLKNVFPPEVAVFEPSEAEISHTQKATLVCLATGFYPDHVELSWWVNGKEVHSGVCTDPQPLKEQPALNDSRYCLSSRLRVSATFWQNPRNHFRCQVQFYGLSENDEWTQDRAKPVTQIVSAEAWGRADCGFTSESYQQGVLSATILYEILLGKATLYAVLVSALVLMAMVKRKDSRGRAKRSGSGATNFSLLKQAGDVEENPGPTSMDWIWRILFLVGAATGAHSFEEVQLVESGGGLVQPGGSLRLSCAASGYAFSNYWVNWVRQAPGKGLEWVAQIYPGDGDTNYNGKFKGRFTISRDNSKNTLYLQMNSLRAEDTAVYYCARSITTVVGCAMDYWGQGTLVTVSSTRIQNPDPAVYQLRDSKSSDKSVCLFTDFDSQTNVSQSKDSDVYITDKCVLDMRSMDFKSNSAVAWSNKSDFACANAFNNSIIPEDTFFPSPESSCDVKLVEKSFETDTNLNFQNLSVIGFRILLLKVAGFNLLMTLRLWSS

SEQ ID NO: 46086 - protein, 626 aa, synthetic construct
MALPVTALLLPLALLLHAARPDIQMTQSPSSLSASVGDRVTITCKASDHINNWLAWYQQKPGKAPKLLIYGATTLETGVPSRFSGSGSGTDFTLTISSLQPEDFATYYCQQSWNTPWTFGQGTKVEIKRLEIQNPDPAVYQLRDSKSSDKSVCLFTDFDSQTNVSQSKDSDVYITDKCVLDMRSMDFKSNSAVAWSNKSDFACANAFNNSIIPEDTFFPSPESSCDVKLVEKSFETDTNLNFQNLSVIGFRILLLKVAGFNLLMTLRLWSSRAKRSGSGVKQTLNFDLLKLAGDVESNPGPTSMDWIWRILFLVGAATGAHSFEEVQLVESGGGLVQPGGSLRLSCAASGYAFSNYWVNWVRQAPGKGLEWVAQIYPGDGDTNYNGKFKGRFTISRDNSKNTLYLQMNSLRAEDTAVYYCARSITTVVGCAMDYWGQGTLVTVSSTREDLKNVFPPEVAVFEPSEAEISHTQKATLVCLATGFYPDHVELSWWVNGKEVHSGVCTDPQPLKEQPALNDSRYCLSSRLRVSATFWQNPRNHFRCQVQFYGLSENDEWTQDRAKPVTQIVSAEAWGRADCGFTSESYQQGVLSATILYEILLGKATLYAVLVSALVLMAMVKRKDSRG

SEQ ID NO: 46087 - protein, 638 aa, synthetic construct
MALPVTALLLPLALLLHAARPLEEDLKNVFPPEVAVFEPSKAEIAHTQKATLVCLATGFYPDHVELSWWVNGKEVHSGVCTDPQPLKEQPALNDSRYCLSSRLRVSATFWQNPRNHFRCQVQFYGLSENDEWTQDRAKPVTQIVSAEAWGRADCGITSASYHQGVLSATILYEILLGKATLYAVLVSALVLMAMVKRKDSRGRAKRSGSGATNFSLLKQAGDVEENPGPTSMALPVTALLLPLALLLHAARPDIQMTQSPSSLSASVGDRVTITCKASDHINNWLAWYQQKPGKAPKLLIYGATTLETGVPSRFSGSGSGTDFTLTISSLQPEDFATYYCQQSWNTPWTFGQGTKVEIKRGGGGSGGGGSGGGGSEVQLVESGGGLVQPGGSLRLSCAASGYAFSNYWVNWVRQAPGKGLEWVAQIYPGDGDTNYNGKFKGRFTISRDNSKNTLYLQMNSLRAEDTAVYYCARSITTVVGCAMDYWGQGTLVTVSSTRIQNPDPAVYQLRDSKSSDKSVCLFTDFDSQTNVSQSKDSDVYITDKCVLDMRSMDFKSNSAVAWSNKSDFACANAFNNSIIPEDTFFPSSDVPCDVKLVEKSFETDTNLNFQNLSVIGFRILLLKVAGFNLLMTLRLWSS

SEQ ID NO: 46088 - protein, 645 aa, synthetic construct
MALPVTALLLPLALLLHAARPLEGSGDRPDPAVYQLRDSKSSDKSVCLFTDFDSQTNVSQSKDSDVYITDKCVLDMRSMDFKSNSAVAWSNKSDFACANAFNNSIIPEDTFFPSPESSCDVKLVEKSFETDTNLNFQNLSVIGFRILLLKVAGFNLLMTLRLWSSSSRAKRSGSGVKQTLNFDLLKLAGDVESNPGPTSMALPVTALLLPLALLLHAARPDIQMTQSPSSLSASVGDRVTITCKASDHINNWLAWYQQKPGKAPKLLIYGATTLETGVPSRFSGSGSGTDFTLTISSLQPEDFATYYCQQSWNTPWTFGQGTKVEIKRGGGGSGGGGSGGGGSEVQLVESGGGLVQPGGSLRLSCAASGYAFSNYWVNWVRQAPGKGLEWVAQIYPGDGDTNYNGKFKGRFTISRDNSKNTLYLQMNSLRAEDTAVYYCARSITTVVGCAMDYWGQGTLVTVSSTREDLKNVFPPEVAVFEPSEAEISHTQKATLVCLATGFYPDHVELSWWVNGKEVHSGVCTDPQPLKEQPALNDSRYCLSSRLRVSATFWQNPRNHFRCQVQFYGLSENDEWTQDRAKPVTQIVSAEAWGRADCGFTSESYQQGVLSATILYEILLGKATLYAVLVSALVLMAMVKRKDSRG

SEQ ID NO: 46089 - protein, 622 aa, synthetic construct
MALPVTALLLPLALLLHAARPDIQMTQSPSSLSASVGDRVTITCKASDHINNWLAWYQQKPGKAPKLLIYGATTLETGVPSRFSGSGSGTDFTLTISSLQPEDFATYYCQQSWNTPWTFGQGTKVEIKRLEDLKNVFPPEVAVFEPSEAEISHTQKATLVCLATGFYPDHVELSWWVNGKEVHSGVSTDPQPLKEQPALNDSRYCLSSRLRVSATFWQNPRNHFRCQVQFYGLSENDEWTQDRAKPVTQIVSAEAWGRADCGFTSESYQQGVLSATILYEILLGKATLYAVLVSALVLMAMVKRKDSRGRAKRSGSGATNFSLLKQAGDVEENPGPTSMDWIWRILFLVGAATGAHSFEEVQLVESGGGLVQPGGSLRLSCAASGYAFSNYWVNWVRQAPGKGLEWVAQIYPGDGDTNYNGKFKGRFTISRDNSKNTLYLQMNSLRAEDTAVYYCARSITTVVGCAMDYWGQGTLVTVSSTRIQNPDPAVYQLRDSKSSDKSVCLFTDFDSQTNVSQSKDSDVYITDKTVLDMRSMDFKSNSAVAWSNKSDFACANAFNNSIIPEDTFFPSPESSCDVKLVEKSFETDTNLNFQNLSVIGFRILLLKVAGFNLLMTLRLWSS

SEQ ID NO: 46090 - protein, 630 aa, synthetic construct
MALPVTALLLPLALLLHAARPDIQMTQSPSSLSASVGDRVTITCKASDHINNWLAWYQQKPGKAPKLLIYGATTLETGVPSRFSGSGSGTDFTLTISSLQPEDFATYYCQQSWNTPWTFGQGTKVEIKRLEDKQLDADVSPKPTIFLPSIAETKLQKAGTYLCLLEKFFPDVIKIHWQEKKSNTILGSQEGNTMKTNDTYMKFSWLTVPEKSLDKEHRCIVRHENNKNGVDQEIIFPPIKTDVITMDPKDNCSKDANDTLLLQLTNTSAYYMYLLLLLKSVVYFAIITCCLLRRTAFCCNGEKSRAKRSGSGATNFSLLKQAGDVEENPGPTSMDWIWRILFLVGAATGAHSFEEVQLVESGGGLVQPGGSLRLSCAASGYAFSNYWVNWVRQAPGKGLEWVAQIYPGDGDTNYNGKFKGRFTISRDNSKNTLYLQMNSLRAEDTAVYYCARSITTVVGCAMDYWGQGTLVTVSSTRSQPHTKPSVFVMKNGTNVACLVKEFYPKDIRINLVSSKKITEFDPAIVISPSGKYNAVKLGKYEDSNSVTCSVQHDNKTVHSTDFEVKTDSTDHVKPKETENTKQPSKSCHKPKAIVHTEKVNMMSLTVLGLRMLFAKTVAVNFLLTAKLFFL

SEQ ID NO: 46091 - protein, 630 aa, synthetic construct
MALPVTALLLPLALLLHAARPDIQMTQSPSSLSASVGDRVTITCKASDHINNWLAWYQQKPGKAPKLLIYGATTLETGVPSRFSGSGSGTDFTLTISSLQPEDFATYYCQQSWNTPWTFGQGTKVEIKRLESQPHTKPSVFVMKNGTNVACLVKEFYPKDIRINLVSSKKITEFDPAIVISPSGKYNAVKLGKYEDSNSVTCSVQHDNKTVHSTDFEVKTDSTDHVKPKETENTKQPSKSCHKPKAIVHTEKVNMMSLTVLGLRMLFAKTVAVNFLLTAKLFFLRAKRSGSGATNFSLLKQAGDVEENPGPTSMDWIWRILFLVGAATGAHSFEEVQLVESGGGLVQPGGSLRLSCAASGYAFSNYWVNWVRQAPGKGLEWVAQIYPGDGDTNYNGKFKGRFTISRDNSKNTLYLQMNSLRAEDTAVYYCARSITTVVGCAMDYWGQGTLVTVSSTRDKQLDADVSPKPTIFLPSIAETKLQKAGTYLCLLEKFFPDVIKIHWQEKKSNTILGSQEGNTMKTNDTYMKFSWLTVPEKSLDKEHRCIVRHENNKNGVDQEIIFPPIKTDVITMDPKDNCSKDANDTLLLQLTNTSAYYMYLLLLLKSVVYFAIITCCLLRRTAFCCNGEKS

SEQ ID NO: 46092 - protein, 645 aa, synthetic construct
MALPVTALLLPLALLLHAARPLEDKQLDADVSPKPTIFLPSIAETKLQKAGTYLCLLEKFFPDVIKIHWQEKKSNTILGSQEGNTMKTNDTYMKFSWLTVPEKSLDKEHRCIVRHENNKNGVDQEIIFPPIKTDVITMDPKDNCSKDANDTLLLQLTNTSAYYMYLLLLLKSVVYFAIITCCLLRRTAFCCNGEKSRAKRSGSGATNFSLLKQAGDVEENPGPTSMALPVTALLLPLALLLHAARPDIQMTQSPSSLSASVGDRVTITCKASDHINNWLAWYQQKPGKAPKLLIYGATTLETGVPSRFSGSGSGTDFTLTISSLQPEDFATYYCQQSWNTPWTFGQGTKVEIKRGGGGSGGGGSGGGGSEVQLVESGGGLVQPGGSLRLSCAASGYAFSNYWVNWVRQAPGKGLEWVAQIYPGDGDTNYNGKFKGRFTISRDNSKNTLYLQMNSLRAEDTAVYYCARSITTVVGCAMDYWGQGTLVTVSSTRSQPHTKPSVFVMKNGTNVACLVKEFYPKDIRINLVSSKKITEFDPAIVISPSGKYNAVKLGKYEDSNSVTCSVQHDNKTVHSTDFEVKTDSTDHVKPKETENTKQPSKSCHKPKAIVHTEKVNMMSLTVLGLRMLFAKTVAVNFLLTAKLFFL

SEQ ID NO: 46093 - protein, 799 aa, synthetic construct
MALPVTALLLPLALLLHAARPDIQMTQSPSSLSASVGDRVTITCKASDHINNWLAWYQQKPGKAPKLLIYGATTLETGVPSRFSGSGSGTDFTLTISSLQPEDFATYYCQQSWNTPWTFGQGTKVEIKRGQPKANPTVTLFPPSSEELQANKATLVCLISDFYPGAVTVAWKADGSPVKAGVETTKPSKQSNNKYAASSYLSLTPEQWKSHRSYSCQVTHEGSTVEKTVAPTECSGSQSFGLLDPKLCYLLDGILFIYGVILTALFLRVKFSRSADAPAYQQGQNQLYNELNLGRREEYDVLDKRRGRDPEMGGKPQRRKNPQEGLYNELQKDKMAEAYSEIGMKGERRRGKGHDGLYQGLSTATKDTYDALHMQALPPRRAKRSGSGATNFSLLKQAGDVEENPGPTSMDWIWRILFLVGAATGAHSFEEVQLVESGGGLVQPGGSLRLSCAASGYAFSNYWVNWVRQAPGKGLEWVAQIYPGDGDTNYNGKFKGRFTISRDNSKNTLYLQMNSLRAEDTAVYYCARSITTVVGCAMDYWGQGTLVTVSSASTKGPSVFPLAPSSKSTSGGTAALGCLVKDYFPEPVTVSWNSGALTSGVHTFPAVLQSSGLYSLSSVVTVPSSSLGTQTYICNVNHKPSNTKVDKRVEPKSCGTQSFGLLDPKLCYLLDGILFIYGVILTALFLRVKFSRSADAPAYQQGQNQLYNELNLGRREEYDVLDKRRGRDPEMGGKPQRRKNPQEGLYNELQKDKMAEAYSEIGMKGERRRGKGHDGLYQGLSTATKDTYDALHMQALPPR

SEQ ID NO: 46094 - protein, 818 aa, synthetic construct
MALPVTALLLPLALLLHAARPDIQMTQSPSSLSASVGDRVTITCKASDHINNWLAWYQQKPGKAPKLLIYGATTLETGVPSRFSGSGSGTDFTLTISSLQPEDFATYYCQQSWNTPWTFGQGTKVEIKRLEDLKNVFPPEVAVFEPSEAEISHTQKATLVCLATGFYPDHVELSWWVNGKEVHSGVSTDPQPLKEQPALNDSRYCLSSRLRVSATFWQNPRNHFRCQVQFYGLSENDEWTQDRAKPVTQIVSAEAWGRADCGSQSFGLLDPKLCYLLDGILFIYGVILTALFLRVKFSRSADAPAYQQGQNQLYNELNLGRREEYDVLDKRRGRDPEMGGKPQRRKNPQEGLYNELQKDKMAEAYSEIGMKGERRRGKGHDGLYQGLSTATKDTYDALHMQALPPRRAKRSGSGATNFSLLKQAGDVEENPGPTSMDWIWRILFLVGAATGAHSFEEVQLVESGGGLVQPGGSLRLSCAASGYAFSNYWVNWVRQAPGKGLEWVAQIYPGDGDTNYNGKFKGRFTISRDNSKNTLYLQMNSLRAEDTAVYYCARSITTVVGCAMDYWGQGTLVTVSSTRIQNPDPAVYQLRDSKSSDKSVCLFTDFDSQTNVSQSKDSDVYITDKTVLDMRSMDFKSNSAVAWSNKSDFACANAFNNSIIPEDTFFPSPESSCGTQSFGLLDPKLCYLLDGILFIYGVILTALFLRVKFSRSADAPAYQQGQNQLYNELNLGRREEYDVLDKRRGRDPEMGGKPQRRKNPQEGLYNELQKDKMAEAYSEIGMKGERRRGKGHDGLYQGLSTATKDTYDALHMQALPPR

SEQ ID NO: 46095 - protein, 860 aa, synthetic construct
MALPVTALLLPLALLLHAARPDIQMTQSPSSLSASVGDRVTITCKASDHINNWLAWYQQKPGKAPKLLIYGATTLETGVPSRFSGSGSGTDFTLTISSLQPEDFATYYCQQSWNTPWTFGQGTKVEIKRLEEDLKNVFPPEVAVFEPSEAEISHTQKATLVCLATGFYPDHVELSWWVNGKEVHSGVSTDPQPLKEQPALNDSRYCLSSRLRVSATFWQNPRNHFRCQVQFYGLSENDEWTQDRAKPVTQIVSAEAWGRADCGSQSFGLLDPKLCYLLDGILFIYGVILTALFLRVKFSRSADAPAYQQGQNQLYNELNLGRREEYDVLDKRRGRDPEMGGKPQRRKNPQEGLYNELQKDKMAEAYSEIGMKGERRRGKGHDGLYQGLSTATKDTYDALHMQALPPRRAKRSGSGATNFSLLKQAGDVEENPGPTSMDWIWRILFLVGAATGAHSFEEVQLVESGGGLVQPGGSLRLSCAASGYAFSNYWVNWVRQAPGKGLEWVAQIYPGDGDTNYNGKFKGRFTISRDNSKNTLYLQMNSLRAEDTAVYYCARSITTVVGCAMDYWGQGTLVTVSSTRIQNPDPAVYQLRDSKSSDKSVCLFTDFDSQTNVSQSKDSDVYITDKTVLDMRSMDFKSNSAVAWSNKSDFACANAFNNSIIPEDTFFPSPESSCGTQSFGLLDPKLCYLLDGILFIYGVILTALFLRSKRSRLLHSDYMNMTPRRPGPTRKHYQPYAPPRDFAAYRSRVKFSRSADAPAYQQGQNQLYNELNLGRREEYDVLDKRRGRDPEMGGKPQRRKNPQEGLYNELQKDKMAEAYSEIGMKGERRRGKGHDGLYQGLSTATKDTYDALHMQALPPR

SEQ ID NO: 46096 - protein, 903 aa, synthetic construct
MALPVTALLLPLALLLHAARPDIQMTQSPSSLSASVGDRVTITCKASDHINNWLAWYQQKPGKAPKLLIYGATTLETGVPSRFSGSGSGTDFTLTISSLQPEDFATYYCQQSWNTPWTFGQGTKVEIKRLEEDLKNVFPPEVAVFEPSEAEISHTQKATLVCLATGFYPDHVELSWWVNGKEVHSGVSTDPQPLKEQPALNDSRYCLSSRLRVSATFWQNPRNHFRCQVQFYGLSENDEWTQDRAKPVTQIVSAEAWGRADCGSQSFGLLDPKLCYLLDGILFIYGVILTALFLKRGRKKLLYIFKQPFMRPVQTTQEEDGCSCRFPEEEEGGCELRVKFSRSADAPAYQQGQNQLYNELNLGRREEYDVLDKRRGRDPEMGGKPQRRKNPQEGLYNELQKDKMAEAYSEIGMKGERRRGKGHDGLYQGLSTATKDTYDALHMQALPPRRAKRSGSGATNFSLLKQAGDVEENPGPTSMDWIWRILFLVGAATGAHSFEEVQLVESGGGLVQPGGSLRLSCAASGYAFSNYWVNWVRQAPGKGLEWVAQIYPGDGDTNYNGKFKGRFTISRDNSKNTLYLQMNSLRAEDTAVYYCARSITTVVGCAMDYWGQGTLVTVSSTRIQNPDPAVYQLRDSKSSDKSVCLFTDFDSQTNVSQSKDSDVYITDKTVLDMRSMDFKSNSAVAWSNKSDFACANAFNNSIIPEDTFFPSPESSCGTQSFGLLDPKLCYLLDGILFIYGVILTALFLKRGRKKLLYIFKQPFMRPVQTTQEEDGCSCRFPEEEEGGCELRVKFSRSADAPAYQQGQNQLYNELNLGRREEYDVLDKRRGRDPEMGGKPQRRKNPQEGLYNELQKDKMAEAYSEIGMKGERRRGKGHDGLYQGLSTATKDTYDALHMQALPPR

SEQ ID NO: 46097 - protein, 590 aa, synthetic construct
MALPVTALLLPLALLLHAARPDIQMTQSPSSLSASVGDRVTITCKASDHINNWLAWYQQKPGKAPKLLIYGATTLETGVPSRFSGSGSGTDFTLTISSLQPEDFATYYCQQSWNTPWTFGQGTKVEIKRLEQSFGLLDPKLCYLLDGILFIYGVILTALFLRVKFSRSADAPAYQQGQNQLYNELNLGRREEYDVLDKRRGRDPEMGGKPQRRKNPQEGLYNELQKDKMAEAYSEIGMKGERRRGKGHDGLYQGLSTATKDTYDALHMQALPPRRAKRSGSGATNFSLLKQAGDVEENPGPTSMDWIWRILFLVGAATGAHSFEEVQLVESGGGLVQPGGSLRLSCAASGYAFSNYWVNWVRQAPGKGLEWVAQIYPGDGDTNYNGKFKGRFTISRDNSKNTLYLQMNSLRAEDTAVYYCARSITTVVGCAMDYWGQGTLVTVSSTRQSFGLLDPKLCYLLDGILFIYGVILTALFLRVKFSRSADAPAYQQGQNQLYNELNLGRREEYDVLDKRRGRDPEMGGKPQRRKNPQEGLYNELQKDKMAEAYSEIGMKGERRRGKGHDGLYQGLSTATKDTYDALHMQALPPR

SEQ ID NO: 46098 - protein, 648 aa, synthetic construct
MALPVTALLLPLALLLHAARPDIQMTQSPSSLSASVGDRVTITCKASDHINNWLAWYQQKPGKAPKLLIYGATTLETGVPSRFSGSGSGTDFTLTISSLQPEDFATYYCQQSWNTPWTFGQGTKVEIKRLEGQPKANPTVTLFPPSSEELQANKATLVCLISDFYPGAVTVAWKADGSPVKAGVETTKPSKQSNNKYAASSYLSLTPEQWKSHRSYSCQVTHEGSTVEKTVAPTECSPIKTDVITMDPKDNCSKDANDTLLLQLTNTSAYYMYLLLLLKSVVYFAIITCCLLRRTAFCCNGEKSRAKRSGSGATNFSLLKQAGDVEENPGPTSMDWIWRILFLVGAATGAHSFEEVQLVESGGGLVQPGGSLRLSCAASGYAFSNYWVNWVRQAPGKGLEWVAQIYPGDGDTNYNGKFKGRFTISRDNSKNTLYLQMNSLRAEDTAVYYCARSITTVVGCAMDYWGQGTLVTVSSTRASTKGPSVFPLAPSSKSTSGGTAALGCLVKDYFPEPVTVSWNSGALTSGVHTFPAVLQSSGLYSLSSVVTVPSSSLGTQTYICNVNHKPSNTKVDKRVEPKSCEVKTDSTDHVKPKETENTKQPSKSCHKPKAIVHTEKVNMMSLTVLGLRMLFAKTVAVNFLLTAKLFFL

SEQ ID NO: 46099 - protein, 626 aa, synthetic construct
MALPVTALLLPLALLLHAARPDIQMTQSPSSLSASVGDRVTITCKASDHINNWLAWYQQKPGKAPKLLIYGATTLETGVPSRFSGSGSGTDFTLTISSLQPEDFATYYCQQSWNTPWTFGQGTKVEIKRLEGQPKANPTVTLFPPSSEELQANKATLVCLISDFYPGAVTVAWKADGSPVKAGVETTKPSKQSNNKYAASSYLSLTPEQWKSHRSYSCQVTHEGSTVEKTVAPTECSGRADCGITSASYHQGVLSATILYEILLGKATLYAVLVSALVLMAMVKRKDSRGRAKRSGSGATNFSLLKQAGDVEENPGPTSMDWIWRILFLVGAATGAHSFEEVQLVESGGGLVQPGGSLRLSCAASGYAFSNYWVNWVRQAPGKGLEWVAQIYPGDGDTNYNGKFKGRFTISRDNSKNTLYLQMNSLRAEDTAVYYCARSITTVVGCAMDYWGQGTLVTVSSTRASTKGPSVFPLAPSSKSTSGGTAALGCLVKDYFPEPVTVSWNSGALTSGVHTFPAVLQSSGLYSLSSVVTVPSSSLGTQTYICNVNHKPSNTKVDKRVEPKSCIPEDTFFPSSDVPCDVKLVEKSFETDTNLNFQNLSVIGFRILLLKVAGFNLLMTLRLWSS

SEQ ID NO: 46100 - protein, 626 aa, synthetic construct
MALPVTALLLPLALLLHAARPDIQMTQSPSSLSASVGDRVTITCKASDHINNWLAWYQQKPGKAPKLLIYGATTLETGVPSRFSGSGSGTDFTLTISSLQPEDFATYYCQQSWNTPWTFGQGTKVEIKRLEGQPKANPTVTLFPPSSEELQANKATLVCLISDFYPGAVTVAWKADGSPVKAGVETTKPSKQSNNKYAASSYLSLTPEQWKSHRSYSCQVTHEGSTVEKTVAPTECSGRADCGFTSESYQQGVLSATILYEILLGKATLYAVLVSALVLMAMVKRKDSRGRAKRSGSGATNFSLLKQAGDVEENPGPTSMDWIWRILFLVGAATGAHSFEEVQLVESGGGLVQPGGSLRLSCAASGYAFSNYWVNWVRQAPGKGLEWVAQIYPGDGDTNYNGKFKGRFTISRDNSKNTLYLQMNSLRAEDTAVYYCARSITTVVGCAMDYWGQGTLVTVSSTRASTKGPSVFPLAPSSKSTSGGTAALGCLVKDYFPEPVTVSWNSGALTSGVHTFPAVLQSSGLYSLSSVVTVPSSSLGTQTYICNVNHKPSNTKVDKRVEPKSCIPEDTFFPSPESSCDVKLVEKSFETDTNLNFQNLSVIGFRILLLKVAGFNLLMTLRLWSS

SEQ ID NO: 46101 - protein, 452 aa, synthetic construct
MALPVTALLLPLALLLHAARPDIQMTQSPSSLSASVGDRVTITCKASDHINNWLAWYQQKPGKAPKLLIYGATTLETGVPSRFSGSGSGTDFTLTISSLQPEDFATYYCQQSWNTPWTFGQGTKVEIKRGGGGSGGGGSGGGGSEVQLVESGGGLVQPGGSLRLSCAASGYAFSNYWVNWVRQAPGKGLEWVAQIYPGDGDTNYNGKFKGRFTISRDNSKNTLYLQMNSLRAEDTAVYYCARSITTVVGCAMDYWGQGTLVTVSSTRDGNEEMGGITQTPYKVSISGTTVILTCPQYPGSEILWQHNDKNIGGDEDDKNIGSDEDHLSLKEFSELEQSGYYVCYPRGSKPEDANFYLYLRARVCENCMEMDVMSVATIVIVDICITGGLLLLVYYWSKNRKAKAKPVTRGAGAGGRQRGQNKERPPPVPNPDYEPIRKGQRDLYSGLNQRRI

SEQ ID NO: 46102 - protein, 417 aa, synthetic construct
MALPVTALLLPLALLLHAARPDIQMTQSPSSLSASVGDRVTITCKASDHINNWLAWYQQKPGKAPKLLIYGATTLETGVPSRFSGSGSGTDFTLTISSLQPEDFATYYCQQSWNTPWTFGQGTKVEIKRGGGGSGGGGSGGGGSEVQLVESGGGLVQPGGSLRLSCAASGYAFSNYWVNWVRQAPGKGLEWVAQIYPGDGDTNYNGKFKGRFTISRDNSKNTLYLQMNSLRAEDTAVYYCARSITTVVGCAMDYWGQGTLVTVSSTRFKIPIEELEDRVFVNCNTSITWVEGTVGTLLSDITRLDLGKRILDPRGIYRCNGTDIYKDKESTVQVHYRMCQSCVELDPATVAGIIVTDVIATLLLALGVFCFAGHETGRLSGAADTQALLRNDQVYQPLRDRDDAQYSHLGGNWARNK

SEQ ID NO: 46103 - protein, 427 aa, synthetic construct
MALPVTALLLPLALLLHAARPDIQMTQSPSSLSASVGDRVTITCKASDHINNWLAWYQQKPGKAPKLLIYGATTLETGVPSRFSGSGSGTDFTLTISSLQPEDFATYYCQQSWNTPWTFGQGTKVEIKRGGGGSGGGGSGGGGSEVQLVESGGGLVQPGGSLRLSCAASGYAFSNYWVNWVRQAPGKGLEWVAQIYPGDGDTNYNGKFKGRFTISRDNSKNTLYLQMNSLRAEDTAVYYCARSITTVVGCAMDYWGQGTLVTVSSTRQSIKGNHLVKVYDYQEDGSVLLTCDAEAKNITWFKDGKMIGFLTEDKKKWNLGSNAKDPRGMYQCKGSQNKSKPLQVYYRMCQNCIELNAATISGFLFAEIVSIFVLAVGVYFIAGQDGVRQSRASDKQTLLPNDQLYQPLKDREDDQYSHLQGNQLRRN

SEQ ID NO: 46104 - protein, 410 aa, synthetic construct
MALPVTALLLPLALLLHAARPDIQMTQSPSSLSASVGDRVTITCKASDHINNWLAWYQQKPGKAPKLLIYGATTLETGVPSRFSGSGSGTDFTLTISSLQPEDFATYYCQQSWNTPWTFGQGTKVEIKRGGGGSGGGGSGGGGSEVQLVESGGGLVQPGGSLRLSCAASGYAFSNYWVNWVRQAPGKGLEWVAQIYPGDGDTNYNGKFKGRFTISRDNSKNTLYLQMNSLRAEDTAVYYCARSITTVVGCAMDYWGQGTLVTVSSTRQSFGLLDPKLCYLLDGILFIYGVILTALFLRVKFSRSADAPAYQQGQNQLYNELNLGRREEYDVLDKRRGRDPEMGGKPQRRKNPQEGLYNELQKDKMAEAYSEIGMKGERRRGKGHDGLYQGLSTATKDTYDALHMQALPPR

SEQ ID NO: 46105 - protein, 505 aa, synthetic construct
MALPVTALLLPLALLLHAARPDIQMTQSPSSLSASVGDRVTITCKASDHINNWLAWYQQKPGKAPKLLIYGATTLETGVPSRFSGSGSGTDFTLTISSLQPEDFATYYCQQSWNTPWTFGQGTKVEIKRGGGGSGGGGSGGGGSEVQLVESGGGLVQPGGSLRLSCAASGYAFSNYWVNWVRQAPGKGLEWVAQIYPGDGDTNYNGKFKGRFTISRDNSKNTLYLQMNSLRAEDTAVYYCARSITTVVGCAMDYWGQGTLVTVSSTRGMRTEDLPKAVVFLEPQWYRVLEKDSVTLKCQGAYSPEDNSTQWFHNESLISSQASSYFIDAATVDDSGEYRCQTNLSTLSDPVQLEVHIGWLLLQAPRWVFKEEDPIHLRCHSWKNTALHKVTYLQNGKGRKYFHHNSDFYIPKATLKDSGSYFCRGLVGSKNVSSETVNITITQGLAVPTISSFFPPGYQVSFCLVMVLLFAVDTGLYFSVKTNIRSSTRDWKDHKFKWRKDPQDK

SEQ ID NO: 46106 - protein, 480 aa, synthetic construct
MALPVTALLLPLALLLHAARPDIQMTQSPSSLSASVGDRVTITCKASDHINNWLAWYQQKPGKAPKLLIYGATTLETGVPSRFSGSGSGTDFTLTISSLQPEDFATYYCQQSWNTPWTFGQGTKVEIKRGGGGSGGGGSGGGGSEVQLVESGGGLVQPGGSLRLSCAASGYAFSNYWVNWVRQAPGKGLEWVAQIYPGDGDTNYNGKFKGRFTISRDNSKNTLYLQMNSLRAEDTAVYYCARSITTVVGCAMDYWGQGTLVTVSSTRGMRTEDLPKAVVFLEPQWYRVLEKDSVTLKCQGAYSPEDNSTQWFHNESLISSQASSYFIDAATVDDSGEYRCQTNLSTLSDPVQLEVHIGWLLLQAPRWVFKEEDPIHLRCHSWKNTALHKVTYLQNGKGRKYFHHNSDFYIPKATLKDSGSYFCRGLVGSKNVSSETVNITITQGLAVPTISSFFPPGYQVSFCLVMVLLFAVDTGLYFSV

SEQ ID NO: 46107 - protein, 481 aa, synthetic construct
MALPVTALLLPLALLLHAARPDIQMTQSPSSLSASVGDRVTITCKASDHINNWLAWYQQKPGKAPKLLIYGATTLETGVPSRFSGSGSGTDFTLTISSLQPEDFATYYCQQSWNTPWTFGQGTKVEIKRGGGGSGGGGSGGGGSEVQLVESGGGLVQPGGSLRLSCAASGYAFSNYWVNWVRQAPGKGLEWVAQIYPGDGDTNYNGKFKGRFTISRDNSKNTLYLQMNSLRAEDTAVYYCARSITTVVGCAMDYWGQGTLVTVSSTRGMRTEDLPKAVVFLEPQWYRVLEKDSVTLKCQGAYSPEDNSTQWFHNESLISSQASSYFIDAATVDDSGEYRCQTNLSTLSDPVQLEVHIGWLLLQAPRWVFKEEDPIHLRCHSWKNTALHKVTYLQNGKGRKYFHHNSDFYIPKATLKDSGSYFCRGLVGSKNVSSETVNITITQGLAVPTISSFFPPGYQVSFCLVMVLLFAVDTGLYFSVK

SEQ ID NO: 46108 - protein, 725 aa, synthetic construct
MALPVTALLLPLALLLHAARPDIQMTQSPSSLSASVGDRVTITCKASDHINNWLAWYQQKPGKAPKLLIYGATTLETGVPSRFSGSGSGTDFTLTISSLQPEDFATYYCQQSWNTPWTFGQGTKVEIKRLEGQPKANPTVTLFPPSSEELQANKATLVCLISDFYPGAVTVAWKADGSPVKAGVETTKPSKQSNNKYAASSYLSLTPEQWKSHRSYSCQVTHEGSTVEKTVAPTECSGSQSFGLLDPKLCYLLDGILFIYGVILTALFLRVKFSRSADAPAYQQGQNQLYNELNLGRREEYDVLDKRRGRDPEMGGKPQRRKNPQEGLYNELQKDKMAEAYSEIGMKGERRRGKGHDGLYQGLSTATKDTYDALHMQALPPRRAKRSGSGATNFSLLKQAGDVEENPGPTSMDWIWRILFLVGAATGAHSFEEVQLVESGGGLVQPGGSLRLSCAASGYAFSNYWVNWVRQAPGKGLEWVAQIYPGDGDTNYNGKFKGRFTISRDNSKNTLYLQMNSLRAEDTAVYYCARSITTVVGCAMDYWGQGTLVTVSSTRASTKGPSVFPLAPSSKSTSGGTAALGCLVKDYFPEPVTVSWNSGALTSGVHTFPAVLQSSGLYSLSSVVTVPSSSLGTQTYICNVNHKPSNTKVDKRVEPKSCGTITQGLAVSTISSFFPPGYQVSFCLVMVLLFAVDTGLYFSVKTNIRSSTRDWKDHKFKWRKDPQDK

SEQ ID NO: 46109 - protein, 740 aa, synthetic construct
MALPVTALLLPLALLLHAARPDIQMTQSPSSLSASVGDRVTITCKASDHINNWLAWYQQKPGKAPKLLIYGATTLETGVPSRFSGSGSGTDFTLTISSLQPEDFATYYCQQSWNTPWTFGQGTKVEIKRLEDLKNVFPPEVAVFEPSEAEISHTQKATLVCLATGFYPDHVELSWWVNGKEVHSGVSTDPQPLKEQPALNDSRYCLSSRLRVSATFWQNPRNHFRCQVQFYGLSENDEWTQDRAKPVTQIVSAEAWGRADCGSQSFGLLDPKLCYLLDGILFIYGVILTALFLRVKFSRSADAPAYQQGQNQLYNELNLGRREEYDVLDKRRGRDPEMGGKPQRRKNPQEGLYNELQKDKMAEAYSEIGMKGERRRGKGHDGLYQGLSTATKDTYDALHMQALPPRRAKRSGSGATNFSLLKQAGDVEENPGPTSMDWIWRILFLVGAATGAHSFEEVQLVESGGGLVQPGGSLRLSCAASGYAFSNYWVNWVRQAPGKGLEWVAQIYPGDGDTNYNGKFKGRFTISRDNSKNTLYLQMNSLRAEDTAVYYCARSITTVVGCAMDYWGQGTLVTVSSTRIQNPDPAVYQLRDSKSSDKSVCLFTDFDSQTNVSQSKDSDVYITDKTVLDMRSMDFKSNSAVAWSNKSDFACANAFNNSIIPEDTFFPSPESSCGTITQGLAVSTISSFFPPGYQVSFCLVMVLLFAVDTGLYFSVKTNIRSSTRDWKDHKFKWRKDPQDK

SEQ ID NO: 46110 - protein, 715 aa, synthetic construct
MALPVTALLLPLALLLHAARPDIQMTQSPSSLSASVGDRVTITCKASDHINNWLAWYQQKPGKAPKLLIYGATTLETGVPSRFSGSGSGTDFTLTISSLQPEDFATYYCQQSWNTPWTFGQGTKVEIKRLEDLKNVFPPEVAVFEPSEAEISHTQKATLVCLATGFYPDHVELSWWVNGKEVHSGVSTDPQPLKEQPALNDSRYCLSSRLRVSATFWQNPRNHFRCQVQFYGLSENDEWTQDRAKPVTQIVSAEAWGRADCGSQSFGLLDPKLCYLLDGILFIYGVILTALFLRVKFSRSADAPAYQQGQNQLYNELNLGRREEYDVLDKRRGRDPEMGGKPQRRKNPQEGLYNELQKDKMAEAYSEIGMKGERRRGKGHDGLYQGLSTATKDTYDALHMQALPPRRAKRSGSGATNFSLLKQAGDVEENPGPTSMDWIWRILFLVGAATGAHSFEEVQLVESGGGLVQPGGSLRLSCAASGYAFSNYWVNWVRQAPGKGLEWVAQIYPGDGDTNYNGKFKGRFTISRDNSKNTLYLQMNSLRAEDTAVYYCARSITTVVGCAMDYWGQGTLVTVSSTRIQNPDPAVYQLRDSKSSDKSVCLFTDFDSQTNVSQSKDSDVYITDKTVLDMRSMDFKSNSAVAWSNKSDFACANAFNNSIIPEDTFFPSPESSCGTITQGLAVSTISSFFPPGYQVSFCLVMVLLFAVDTGLYFSV

SEQ ID NO: 46111 - protein, 716 aa, synthetic construct
MALPVTALLLPLALLLHAARPDIQMTQSPSSLSASVGDRVTITCKASDHINNWLAWYQQKPGKAPKLLIYGATTLETGVPSRFSGSGSGTDFTLTISSLQPEDFATYYCQQSWNTPWTFGQGTKVEIKRLEDLKNVFPPEVAVFEPSEAEISHTQKATLVCLATGFYPDHVELSWWVNGKEVHSGVSTDPQPLKEQPALNDSRYCLSSRLRVSATFWQNPRNHFRCQVQFYGLSENDEWTQDRAKPVTQIVSAEAWGRADCGSQSFGLLDPKLCYLLDGILFIYGVILTALFLRVKFSRSADAPAYQQGQNQLYNELNLGRREEYDVLDKRRGRDPEMGGKPQRRKNPQEGLYNELQKDKMAEAYSEIGMKGERRRGKGHDGLYQGLSTATKDTYDALHMQALPPRRAKRSGSGATNFSLLKQAGDVEENPGPTSMDWIWRILFLVGAATGAHSFEEVQLVESGGGLVQPGGSLRLSCAASGYAFSNYWVNWVRQAPGKGLEWVAQIYPGDGDTNYNGKFKGRFTISRDNSKNTLYLQMNSLRAEDTAVYYCARSITTVVGCAMDYWGQGTLVTVSSTRIQNPDPAVYQLRDSKSSDKSVCLFTDFDSQTNVSQSKDSDVYITDKTVLDMRSMDFKSNSAVAWSNKSDFACANAFNNSIIPEDTFFPSPESSCGTITQGLAVSTISSFFPPGYQVSFCLVMVLLFAVDTGLYFSVK

SEQ ID NO: 46112 - protein, 717 aa, synthetic construct
MALPVTALLLPLALLLHAARPDIQMTQSPSSLSASVGDRVTITCKASDHINNWLAWYQQKPGKAPKLLIYGATTLETGVPSRFSGSGSGTDFTLTISSLQPEDFATYYCQQSWNTPWTFGQGTKVEIKRLEDLKNVFPPEVAVFEPSEAEISHTQKATLVCLATGFYPDHVELSWWVNGKEVHSGVSTDPQPLKEQPALNDSRYCLSSRLRVSATFWQNPRNHFRCQVQFYGLSENDEWTQDRAKPVTQIVSAEAWGRADCGSQSFGLLDPKLCYLLDGILFIYGVILTALFLRVKFSRSADAPAYQQGQNQLYNELNLGRREEYDVLDKRRGRDPEMGGKPQRRKNPQEGLYNELQKDKMAEAYSEIGMKGERRRGKGHDGLYQGLSTATKDTYDALHMQALPPRRAKRSGSGATNFSLLKQAGDVEENPGPTSMDWIWRILFLVGAATGAHSFEEVQLVESGGGLVQPGGSLRLSCAASGYAFSNYWVNWVRQAPGKGLEWVAQIYPGDGDTNYNGKFKGRFTISRDNSKNTLYLQMNSLRAEDTAVYYCARSITTVVGCAMDYWGQGTLVTVSSTRIQNPDPAVYQLRDSKSSDKSVCLFTDFDSQTNVSQSKDSDVYITDKTVLDMRSMDFKSNSAVAWSNKSDFACANAFNNSIIPEDTFFPSPESSCGTITQGLAVSTISSFFPPGYQVSFCLVMVLLFAVDTGLYFSVKT

SEQ ID NO: 46113 - protein, 653 aa, synthetic construct
MALPVTALLLPLALLLHAARPDIQMTQSPSSLSASVGDRVTITCKASDHINNWLAWYQQKPGKAPKLLIYGATTLETGVPSRFSGSGSGTDFTLTISSLQPEDFATYYCQQSWNTPWTFGQGTKVEIKRLEGQPKANPTVTLFPPSSEELQANKATLVCLISDFYPGAVTVAWKADGSPVKAGVETTKPSKQSNNKYAASSYLSLTPEQWKSHRSYSCQVTHEGSTVEKTVAPTECSGSLGEPQLCYILDAILFLYGIVLTLLYCRLKIQVRKAAITSYEKSDGVYTGLSTRNQETYETLKHEKPPQRAKRSGSGATNFSLLKQAGDVEENPGPTSMDWIWRILFLVGAATGAHSFEEVQLVESGGGLVQPGGSLRLSCAASGYAFSNYWVNWVRQAPGKGLEWVAQIYPGDGDTNYNGKFKGRFTISRDNSKNTLYLQMNSLRAEDTAVYYCARSITTVVGCAMDYWGQGTLVTVSSTRASTKGPSVFPLAPSSKSTSGGTAALGCLVKDYFPEPVTVSWNSGALTSGVHTFPAVLQSSGLYSLSSVVTVPSSSLGTQTYICNVNHKPSNTKVDKRVEPKSCGTLGEPQLCYILDAILFLYGIVLTLLYCRLKIQVRKAAITSYEKSDGVYTGLSTRNQETYETLKHEKPPQ

SEQ ID NO: 46114 - protein, 623 aa, synthetic construct
MALPVTALLLPLALLLHAARPDIQMTQSPSSLSASVGDRVTITCKASDHINNWLAWYQQKPGKAPKLLIYGATTLETGVPSRFSGSGSGTDFTLTISSLQPEDFATYYCQQSWNTPWTFGQGTKVEIKRLEDLKNVFPPEVAVFEPSEAEISHTQKATLVCLATGFYPDHVELSWWVNGKEVHSGVCTDPQPLKEQPALNDSRYCLSSRLRVSATFWQNPRNHFRCQVQFYGLSENDEWTQDRAKPVTQIVSAEAWGRADCGFTSESYQQGVLSAYYMYLLLLLKSVVYFAIITCCLLRRTAFCCNGEKSRAKRSGSGATNFSLLKQAGDVEENPGPTSMDWIWRILFLVGAATGAHSFEEVQLVESGGGLVQPGGSLRLSCAASGYAFSNYWVNWVRQAPGKGLEWVAQIYPGDGDTNYNGKFKGRFTISRDNSKNTLYLQMNSLRAEDTAVYYCARSITTVVGCAMDYWGQGTLVTVSSTRIQNPDPAVYQLRDSKSSDKSVCLFTDFDSQTNVSQSKDSDVYITDKCVLDMRSMDFKSNSAVAWSNKSDFACANAFNNSIIPEDTFFPSPESSCDVKLVEKSFETDTNLNFQNLSVIGFRILLLKVAGFNLLMTLRLWSS

SEQ ID NO: 46115 - protein, 629 aa, synthetic construct
MALPVTALLLPLALLLHAARPDIQMTQSPSSLSASVGDRVTITCKASDHINNWLAWYQQKPGKAPKLLIYGATTLETGVPSRFSGSGSGTDFTLTISSLQPEDFATYYCQQSWNTPWTFGQGTKVEIKRLEDKQLDADVSPKPTIFLPSIAETKLQKAGTYLCLLEKFFPDVIKIHWQEKKSNTILGSQEGNTMKTNDTYMKFSWLTVPEKSLDKEHRCIVRHENNKNGVDQEIIFPPIKTDVITMDPKDNCSKDANDTLLLQLTNTSAYYMYEILLGKATLYAVLVSALVLMAMVKRKDSRGRAKRSGSGATNFSLLKQAGDVEENPGPTSMDWIWRILFLVGAATGAHSFEEVQLVESGGGLVQPGGSLRLSCAASGYAFSNYWVNWVRQAPGKGLEWVAQIYPGDGDTNYNGKFKGRFTISRDNSKNTLYLQMNSLRAEDTAVYYCARSITTVVGCAMDYWGQGTLVTVSSTRSQPHTKPSVFVMKNGTNVACLVKEFYPKDIRINLVSSKKITEFDPAIVISPSGKYNAVKLGKYEDSNSVTCSVQHDNKTVHSTDFEVKTDSTDHVKPKETENTKQPSKSCHKPKAIVHTEKVNMMSLTVIGFRILLLKVAGFNLLMTLRLWSS

SEQ ID NO: 46116 - protein, 629 aa, synthetic construct
MALPVTALLLPLALLLHAARPDIQMTQSPSSLSASVGDRVTITCKASDHINNWLAWYQQKPGKAPKLLIYGATTLETGVPSRFSGSGSGTDFTLTISSLQPEDFATYYCQQSWNTPWTFGQGTKVEIKRLEDKQLDADVSPKPTIFLPSIAETKLQKAGTYLCLLEKFFPDVIKIHWQEKKSNTILGSQEGNTMKTNDTYMKFSWLTVPEKSLDKEHRCIVRHENNKNGVDQEIIFPPIKTDVITMDPKDNCSKDANDTLLLQLTNTSATILYEILLGKATLYAVLVSALVLMAMVKRKDSRGRAKRSGSGATNFSLLKQAGDVEENPGPTSMDWIWRILFLVGAATGAHSFEEVQLVESGGGLVQPGGSLRLSCAASGYAFSNYWVNWVRQAPGKGLEWVAQIYPGDGDTNYNGKFKGRFTISRDNSKNTLYLQMNSLRAEDTAVYYCARSITTVVGCAMDYWGQGTLVTVSSTRSQPHTKPSVFVMKNGTNVACLVKEFYPKDIRINLVSSKKITEFDPAIVISPSGKYNAVKLGKYEDSNSVTCSVQHDNKTVHSTDFEVKTDSTDHVKPKETENTKQPSKSCHKPKAIVHTEKVNMMSLTVIGFRILLLKVAGFNLLMTLRLWSS

SEQ ID NO: 46117 - protein, 629 aa, synthetic construct
MALPVTALLLPLALLLHAARPDIQMTQSPSSLSASVGDRVTITCKASDHINNWLAWYQQKPGKAPKLLIYGATTLETGVPSRFSGSGSGTDFTLTISSLQPEDFATYYCQQSWNTPWTFGQGTKVEIKRLEDKQLDADVSPKPTIFLPSIAETKLQKAGTYLCLLEKFFPDVIKIHWQEKKSNTILGSQEGNTMKTNDTYMKFSWLTVPEKSLDKEHRCIVRHENNKNGVDQEIIFPPIKTDVITMDPKDNCSKDANDTLLLQLTNTSAYYMYEILLGKATLYAVLVSALVLMAMVKRKDSRGRAKRSGSGATNFSLLKQAGDVEENPGPTSMDWIWRILFLVGAATGAHSFEEVQLVESGGGLVQPGGSLRLSCAASGYAFSNYWVNWVRQAPGKGLEWVAQIYPGDGDTNYNGKFKGRFTISRDNSKNTLYLQMNSLRAEDTAVYYCARSITTVVGCAMDYWGQGTLVTVSSTRSQPHTKPSVFVMKNGTNVACLVKEFYPKDIRINLVSSKKITEFDPAIVISPSGKYNAVKLGKYEDSNSVTCSVQHDNKTVHSTDFEVKTDSTDHVKPKETENTKQPSKSCHKPKAIVHTEKVNMMSLTVLGFRILLLKVAGFNLLMTLRLWSS

SEQ ID NO: 46118 - protein, 629 aa, synthetic construct
MALPVTALLLPLALLLHAARPDIQMTQSPSSLSASVGDRVTITCKASDHINNWLAWYQQKPGKAPKLLIYGATTLETGVPSRFSGSGSGTDFTLTISSLQPEDFATYYCQQSWNTPWTFGQGTKVEIKRLEDKQLDADVSPKPTIFLPSIAETKLQKAGTYLCLLEKFFPDVIKIHWQEKKSNTILGSQEGNTMKTNDTYMKFSWLTVPEKSLDKEHRCIVRHENNKNGVDQEIIFPPIKTDVITMDPKDNCSKDANDTLLLQLTNTSATILYEILLGKATLYAVLVSALVLMAMVKRKDSRGRAKRSGSGATNFSLLKQAGDVEENPGPTSMDWIWRILFLVGAATGAHSFEEVQLVESGGGLVQPGGSLRLSCAASGYAFSNYWVNWVRQAPGKGLEWVAQIYPGDGDTNYNGKFKGRFTISRDNSKNTLYLQMNSLRAEDTAVYYCARSITTVVGCAMDYWGQGTLVTVSSTRSQPHTKPSVFVMKNGTNVACLVKEFYPKDIRINLVSSKKITEFDPAIVISPSGKYNAVKLGKYEDSNSVTCSVQHDNKTVHSTDFEVKTDSTDHVKPKETENTKQPSKSCHKPKAIVHTEKVNMMSLTVLGFRILLLKVAGFNLLMTLRLWSS

SEQ ID NO: 46119 - protein, 623 aa, synthetic construct
MALPVTALLLPLALLLHAARPDIQMTQSPSSLSASVGDRVTITCKASDHINNWLAWYQQKPGKAPKLLIYGATTLETGVPSRFSGSGSGTDFTLTISSLQPEDFATYYCQQSWNTPWTFGQGTKVEIKRLEDLKNVFPPEVAVFEPSEAEISHTQKATLVCLATGFYPDHVELSWWVNGKEVHSGVCTDPQPLKEQPALNDSRYCLSSRLRVSATFWQNPRNHFRCQVQFYGLSENDEWTQDRAKPVTQIVSAEAWGRADCGFTSESYQQGVLSATILYLLLLLKSVVYFAIITCCLLRRTAFCCNGEKSRAKRSGSGATNFSLLKQAGDVEENPGPTSMDWIWRILFLVGAATGAHSFEEVQLVESGGGLVQPGGSLRLSCAASGYAFSNYWVNWVRQAPGKGLEWVAQIYPGDGDTNYNGKFKGRFTISRDNSKNTLYLQMNSLRAEDTAVYYCARSITTVVGCAMDYWGQGTLVTVSSTRIQNPDPAVYQLRDSKSSDKSVCLFTDFDSQTNVSQSKDSDVYITDKCVLDMRSMDFKSNSAVAWSNKSDFACANAFNNSIIPEDTFFPSPESSCDVKLVEKSFETDTNLNFQNLSVIGLRMLFAKTVAVNFLLTAKLFFL

SEQ ID NO: 46120 - protein, 652 aa, synthetic construct
MALPVTALLLPLALLLHAARPDIQMTQSPSSLSASVGDRVTITCKASDHINNWLAWYQQKPGKAPKLLIYGATTLETGVPSRFSGSGSGTDFTLTISSLQPEDFATYYCQQSWNTPWTFGQGTKVEIKRLEDLKNVFPPEVAVFEPSEAEISHTQKATLVCLATGFYPDHVELSWWVNGKEVHSGVSTDPQPLKEQPALNDSRYCLSSRLRVSATFWQNPRNHFRCQVQFYGLSENDEWTQDRAKPVTQIVSAEAWGRADCGSSKDANDTLLLQLTNTSAYYMYLLLLLKSVVYFAIITCCLLRRTAFCCNGEKSRAKRSGSGATNFSLLKQAGDVEENPGPTSMDWIWRILFLVGAATGAHSFEEVQLVESGGGLVQPGGSLRLSCAASGYAFSNYWVNWVRQAPGKGLEWVAQIYPGDGDTNYNGKFKGRFTISRDNSKNTLYLQMNSLRAEDTAVYYCARSITTVVGCAMDYWGQGTLVTVSSTRIQNPDPAVYQLRDSKSSDKSVCLFTDFDSQTNVSQSKDSDVYITDKTVLDMRSMDFKSNSAVAWSNKSDFACANAFNNSIIPEDTFFPSPESSCGTEVKTDSTDHVKPKETENTKQPSKSCHKPKAIVHTEKVNMMSLTVLGLRMLFAKTVAVNFLLTAKLFFL

SEQ ID NO: 46121 - protein, 622 aa, synthetic construct
MALPVTALLLPLALLLHAARPDIQMTQSPSSLSASVGDRVTITCKASDHINNWLAWYQQKPGKAPKLLIYGATTLETGVPSRFSGSGSGTDFTLTISSLQPEDFATYYCQQSWNTPWTFGQGTKVEIKRLEDLKNVFPPEVAVFEPSEAEISHTQKATLVCLATGFYPDHVELSWWVNGKEVHSGVCTDPQPLKEQPALNDSRYCLSSRLRVSATFWQNPRNHFRCQVQFYGLSENDEWTQDRAKPVTQIVSAEAWGRADCDVKLVEKSFETDTNLNFQNLSVIGFRILLLKVAGFNLLMTLRLWSSRAKRSGSGATNFSLLKQAGDVEENPGPTSMDWIWRILFLVGAATGAHSFEEVQLVESGGGLVQPGGSLRLSCAASGYAFSNYWVNWVRQAPGKGLEWVAQIYPGDGDTNYNGKFKGRFTISRDNSKNTLYLQMNSLRAEDTAVYYCARSITTVVGCAMDYWGQGTLVTVSSTRIQNPDPAVYQLRDSKSSDKSVCLFTDFDSQTNVSQSKDSDVYITDKCVLDMRSMDFKSNSAVAWSNKSDFACANAFNNSIIPEDTFFPSPESSCGFTSESYQQGVLSATILYEILLGKATLYAVLVSALVLMAMVKRKDSRG

SEQ ID NO: 46122 - protein, 622 aa, synthetic construct
MALPVTALLLPLALLLHAARPDIQMTQSPSSLSASVGDRVTITCKASDHINNWLAWYQQKPGKAPKLLIYGATTLETGVPSRFSGSGSGTDFTLTISSLQPEDFATYYCQQSWNTPWTFGQGTKVEIKRLEDLKNVFPPEVAVFEPSEAEISHTQKATLVCLATGFYPDHVELSWWVNGKEVHSGVCTDPQPLKEQPALNDSRYCLSSRLRVSATFWQNPRNHFRCQVQFYGLSENDEWTQDRAKPVTQIVSAEAWGRADCGFTSESYQQGVLSATNLSVIGFRILLLKVAGFNLLMTLRLWSSRAKRSGSGATNFSLLKQAGDVEENPGPTSMDWIWRILFLVGAATGAHSFEEVQLVESGGGLVQPGGSLRLSCAASGYAFSNYWVNWVRQAPGKGLEWVAQIYPGDGDTNYNGKFKGRFTISRDNSKNTLYLQMNSLRAEDTAVYYCARSITTVVGCAMDYWGQGTLVTVSSTRIQNPDPAVYQLRDSKSSDKSVCLFTDFDSQTNVSQSKDSDVYITDKCVLDMRSMDFKSNSAVAWSNKSDFACANAFNNSIIPEDTFFPSPESSCDVKLVEKSFETDTNLNFQILYEILLGKATLYAVLVSALVLMAMVKRKDSRG

SEQ ID NO: 46123 - protein, 622 aa, synthetic construct; identical to SEQ ID NO: 46121

SEQ ID NO: 46124 - protein, 622 aa, synthetic construct; identical to SEQ ID NO: 46122

SEQ ID NO: 46125 - protein, 622 aa, synthetic construct; identical to SEQ ID NO: 46121

SEQ ID NO: 46126 - protein, 625 aa, synthetic construct
MALPVTALLLPLALLLHAARPDIQMTQSPSSLSASVGDRVTITCKASDHINNWLAWYQQKPGKAPKLLIYGATTLETGVPSRFSGSGSGTDFTLTISSLQPEDFATYYCQQSWNTPWTFGQGTKVEIKRLEADVSPKPTIFLPSIAETKLQKAGTYLCLLEKFFPDVIKIHWQEKKSNTILGSQEGNTMKTNDTYMKFSWLTVPEKSLDKEHRCIVRHENNKNGVDQEIIFPPIKTDVITMDPKDNCSKDANDTLLLQLTNTSAYYMYLLLLLKSVVYFAIITCCLLRRTAFCCNGEKSRAKRSGSGATNFSLLKQAGDVEENPGPTSMDWIWRILFLVGAATGAHSFEEVQLVESGGGLVQPGGSLRLSCAASGYAFSNYWVNWVRQAPGKGLEWVAQIYPGDGDTNYNGKFKGRFTISRDNSKNTLYLQMNSLRAEDTAVYYCARSITTVVGCAMDYWGQGTLVTVSSTRSQPHTKPSVFVMKNGTNVACLVKEFYPKDIRINLVSSKKITEFDPAIVISPSGKYNAVKLGKYEDSNSVTCSVQHDNKTVHSTDFEVKTDSTDHVKPKETENTKQPSKSCHKPKAIVHTEKVNMMSLTVIGFRILLLKVAGFNLLMTLRLWSS

SEQ ID NO: 46127 - protein, 625 aa, synthetic construct
MALPVTALLLPLALLLHAARPDIQMTQSPSSLSASVGDRVTITCKASDHINNWLAWYQQKPGKAPKLLIYGATTLETGVPSRFSGSGSGTDFTLTISSLQPEDFATYYCQQSWNTPWTFGQGTKVEIKRLEADVSPKPTIFLPSIAETKLQKAGTYLCLLEKFFPDVIKIHWQEKKSNTILGSQEGNTMKTNDTYMKFSWLTVPEKSLDKEHRCIVRHENNKNGVDQEIIFPPIKTDVITMDPKDNCSKDANDTLLLQLTNTSAYYMYLLLLLKSVVYFAIITCCLLRRTAFCCNGEKSRAKRSGSGATNFSLLKQAGDVEENPGPTSMDWIWRILFLVGAATGAHSFEEVQLVESGGGLVQPGGSLRLSCAASGYAFSNYWVNWVRQAPGKGLEWVAQIYPGDGDTNYNGKFKGRFTISRDNSKNTLYLQMNSLRAEDTAVYYCARSITTVVGCAMDYWGQGTLVTVSSTRSQPHTKPSVFVMKNGTNVACLVKEFYPKDIRINLVSSKKITEFDPAIVISPSGKYNAVKLGKYEDSNSVTCSVQHDNKTVHSTDFEVKTDSTDHVKPKETENTKQPSKSCHKPKAIVHTEKVNMMSLTVLGFRILLLKVAGFNLLMTLRLWSS

SEQ ID NO: 46128 - protein, 622 aa, synthetic construct; identical to SEQ ID NO: 46121

SEQ ID NO: 46129 - protein, 626 aa, synthetic construct
MALPVTALLLPLALLLHAARPDIQMTQSPSSLSASVGDRVTITCKASDHINNWLAWYQQKPGKAPKLLIYGATTLETGVPSRFSGSGSGTDFTLTISSLQPEDFATYYCQQSWNTPWTFGQGTKVEIKRLEIQNPDPAVYQLRDSKSSDKSVCLFTDFDSQTNVSQSKDSDVYITDKCVLDMRSMDFKSNSAVAWSNKSDFACANAFNNSIIPEDTFFPSPESSCGFTSESYQQGVLSATILYEILLGKATLYAVLVSALVLMAMVKRKDSRGRAKRSGSGVKQTLNFDLLKLAGDVESNPGPTSMDWIWRILFLVGAATGAHSFEEVQLVESGGGLVQPGGSLRLSCAASGYAFSNYWVNWVRQAPGKGLEWVAQIYPGDGDTNYNGKFKGRFTISRDNSKNTLYLQMNSLRAEDTAVYYCARSITTVVGCAMDYWGQGTLVTVSSTREDLKNVFPPEVAVFEPSEAEISHTQKATLVCLATGFYPDHVELSWWVNGKEVHSGVCTDPQPLKEQPALNDSRYCLSSRLRVSATFWQNPRNHFRCQVQFYGLSENDEWTQDRAKPVTQIVSAEAWGRADCDVKLVEKSFETDTNLNFQNLSVIGFRILLLKVAGFNLLMTLRLWSS

SEQ ID NO: 46130 - protein, 757 aa, synthetic construct
MALPVTALLLPLALLLHAARPEVQLVESGGGLVQPGGSLRLSCAASGFSFSDFWMSWVRQAPGKGLEWVATISQAGSEKDYVDSVKGRFTISRDNAKKSLYLQMNSLRAEDTAVYYCASGVYSFDYRGQGTLVTVSSGTGGGGSGGGGSGGGGSEFDIQMTQSPSSLSASVGDRVTITCKASDHINNWLAWYQQKPGKAPKLLIYGATTLETGVPSRFSGSGSGTDFTLTISSLQPEDFATYYCQQSWNTPWTFGQGTKVEIKRLEDLKNVFPPEVAVFEPSEAEISHTQKATLVCLATGFYPDHVELSWWVNGKEVHSGVCTDPQPLKEQPALNDSRYCLSSRLRVSATFWQNPRNHFRCQVQFYGLSENDEWTQDRAKPVTQIVSAEAWGRADCDVKLVEKSFETDTNLNFQNLSVIGFRILLLKVAGFNLLMTLRLWSSRAKRSGSGATNFSLLKQAGDVEENPGPTSMDWIWRILFLVGAATGAHSFEEVQLVESGGGLVQPGGSLRLSCAASGYAFSNYWVNWVRQAPGKGLEWVAQIYPGDGDTNYNGKFKGRFTISRDNSKNTLYLQMNSLRAEDTAVYYCARSITTVVGCAMDYWGQGTLVTVSSTRIQNPDPAVYQLRDSKSSDKSVCLFTDFDSQTNVSQSKDSDVYITDKCVLDMRSMDFKSNSAVAWSNKSDFACANAFNNSIIPEDTFFPSPESSCGFTSESYQQGVLSATILYEILLGKATLYAVLVSALVLMAMVKRKDSRG

SEQ ID NO: 46131 - protein, 761 aa, synthetic construct
MALPVTALLLPLALLLHAARPEVQLVESGGGLVQPGGSLRLSCAASGFSFSDFWMSWVRQAPGKGLEWVATISQAGSEKDYVDSVKGRFTISRDNAKKSLYLQMNSLRAEDTAVYYCASGVYSFDYRGQGTLVTVSSGTGGGGSGGGGSGGGGSEFDIQMTQSPSSLSASVGDRVTITCKASDHINNWLAWYQQKPGKAPKLLIYGATTLETGVPSRFSGSGSGTDFTLTISSLQPEDFATYYCQQSWNTPWTFGQGTKVEIKRLEIQNPDPAVYQLRDSKSSDKSVCLFTDFDSQTNVSQSKDSDVYITDKCVLDMRSMDFKSNSAVAWSNKSDFACANAFNNSIIPEDTFFPSPESSCGFTSESYQQGVLSATILYEILLGKATLYAVLVSALVLMAMVKRKDSRGRAKRSGSGVKQTLNFDLLKLAGDVESNPGPTSMDWIWRILFLVGAATGAHSFEEVQLVESGGGLVQPGGSLRLSCAASGYAFSNYWVNWVRQAPGKGLEWVAQIYPGDGDTNYNGKFKGRFTISRDNSKNTLYLQMNSLRAEDTAVYYCARSITTVVGCAMDYWGQGTLVTVSSTREDLKNVFPPEVAVFEPSEAEISHTQKATLVCLATGFYPDHVELSWWVNGKEVHSGVCTDPQPLKEQPALNDSRYCLSSRLRVSATFWQNPRNHFRCQVQFYGLSENDEWTQDRAKPVTQIVSAEAWGRADCDVKLVEKSFETDTNLNFQNLSVIGFRILLLKVAGFNLLMTLRLWSS

SEQ ID NO: 46132 - protein, 894 aa, synthetic construct
MALPVTALLLPLALLLHAARPEVQLVESGGGLVQPGGSLRLSCAASGFSFSDFWMSWVRQAPGKGLEWVATISQAGSEKDYVDSVKGRFTISRDNAKKSLYLQMNSLRAEDTAVYYCASGVYSFDYRGQGTLVTVSSGTGGGGSGGGGSGGGGSEFDIQMTQSPSSLSASVGDRVTITCKASDHINNWLAWYQQKPGKAPKLLIYGATTLETGVPSRFSGSGSGTDFTLTISSLQPEDFATYYCQQSWNTPWTFGQGTKVEIKRLEDLKNVFPPEVAVFEPSEAEISHTQKATLVCLATGFYPDHVELSWWVNGKEVHSGVCTDPQPLKEQPALNDSRYCLSSRLRVSATFWQNPRNHFRCQVQFYGLSENDEWTQDRAKPVTQIVSAEAWGRADCDVKLVEKSFETDTNLNFQNLSVIGFRILLLKVAGFNLLMTLRLWSSRAKRSGSGATNFSLLKQAGDVEENPGPTSMDWIWRILFLVGAATGAHSGPQLQLQESGPGLVKPSETLSLTCTVSGDSISSGDYYWGWIRQPPGKGLEWIGHIYYSGVTYYNPSLKSRVTISVDTSRNQFSLKLSSVTAADTAVYYCTREDSSNWRSRGQGTLVTVSSGSGGGGSGGGGSGGGGSFEEVQLVESGGGLVQPGGSLRLSCAASGYAFSNYWVNWVRQAPGKGLEWVAQIYPGDGDTNYNGKFKGRFTISRDNSKNTLYLQMNSLRAEDTAVYYCARSITTVVGCAMDYWGQGTLVTVSSTRIQNPDPAVYQLRDSKSSDKSVCLFTDFDSQTNVSQSKDSDVYITDKCVLDMRSMDFKSNSAVAWSNKSDFACANAFNNSIIPEDTFFPSPESSCGFTSESYQQGVLSATILYEILLGKATLYAVLVSALVLMAMVKRKDSRG

SEQ ID NO: 46133 - protein, 898 aa, synthetic construct
MALPVTALLLPLALLLHAARPEVQLVESGGGLVQPGGSLRLSCAASGFSFSDFWMSWVRQAPGKGLEWVATISQAGSEKDYVDSVKGRFTISRDNAKKSLYLQMNSLRAEDTAVYYCASGVYSFDYRGQGTLVTVSSGTGGGGSGGGGSGGGGSEFDIQMTQSPSSLSASVGDRVTITCKASDHINNWLAWYQQKPGKAPKLLIYGATTLETGVPSRFSGSGSGTDFTLTISSLQPEDFATYYCQQSWNTPWTFGQGTKVEIKRLEIQNPDPAVYQLRDSKSSDKSVCLFTDFDSQTNVSQSKDSDVYITDKCVLDMRSMDFKSNSAVAWSNKSDFACANAFNNSIIPEDTFFPSPESSCGFTSESYQQGVLSATILYEILLGKATLYAVLVSALVLMAMVKRKDSRGRAKRSGSGVKQTLNFDLLKLAGDVESNPGPTSMDWIWRILFLVGAATGAHSGPQLQLQESGPGLVKPSETLSLTCTVSGDSISSGDYYWGWIRQPPGKGLEWIGHIYYSGVTYYNPSLKSRVTISVDTSRNQFSLKLSSVTAADTAVYYCTREDSSNWRSRGQGTLVTVSSGSGGGGSGGGGSGGGGSFEEVQLVESGGGLVQPGGSLRLSCAASGYAFSNYWVNWVRQAPGKGLEWVAQIYPGDGDTNYNGKFKGRFTISRDNSKNTLYLQMNSLRAEDTAVYYCARSITTVVGCAMDYWGQGTLVTVSSTREDLKNVFPPEVAVFEPSEAEISHTQKATLVCLATGFYPDHVELSWWVNGKEVHSGVCTDPQPLKEQPALNDSRYCLSSRLRVSATFWQNPRNHFRCQVQFYGLSENDEWTQDRAKPVTQIVSAEAWGRADCDVKLVEKSFETDTNLNFQNLSVIGFRILLLKVAGFNLLMTLRLWSS

SEQ ID NO: 46134 - protein, 692 aa, synthetic construct
MALPVTALLLPLALLLHAARPDIQMTQSPSSLSASVGDRVTITCKASDHINNWLAWYQQKPGKAPKLLIYGATTLETGVPSRFSGSGSGTDFTLTISSLQPEDFATYYCQQSWNTPWTFGQGTKVEIKRLEDLKNVFPPEVAVFEPSEAEISHTQKATLVCLATGFYPDHVELSWWVNGKEVHSGVCTDPQPLKEQPALNDSRYCLSSRLRVSATFWQNPRNHFRCQVQFYGLSENDEWTQDRAKPVTQIVSAEAWGRADCDVKLVEKSFETDTNLNFQNLSVIGFRILLLKVAGFNLLMTLRLWSSRAKRSGSGATNFSLLKQAGDVEENPGPTSMDWIWRILFLVGAATGAHSGPMDPDLEIRAAFLRQRNTALRTEVAELEQEVQRLENEVSQYETRYGPLGGGKGSGGGGSGGGGSGGGGSFEEVQLVESGGGLVQPGGSLRLSCAASGYAFSNYWVNWVRQAPGKGLEWVAQIYPGDGDTNYNGKFKGRFTISRDNSKNTLYLQMNSLRAEDTAVYYCARSITTVVGCAMDYWGQGTLVTVSSTRIQNPDPAVYQLRDSKSSDKSVCLFTDFDSQTNVSQSKDSDVYITDKCVLDMRSMDFKSNSAVAWSNKSDFACANAFNNSIIPEDTFFPSPESSCGFTSESYQQGVLSATILYEILLGKATLYAVLVSALVLMAMVKRKDSRG

SEQ ID NO: 46135 - protein, 696 aa, synthetic construct
MALPVTALLLPLALLLHAARPDIQMTQSPSSLSASVGDRVTITCKASDHINNWLAWYQQKPGKAPKLLIYGATTLETGVPSRFSGSGSGTDFTLTISSLQPEDFATYYCQQSWNTPWTFGQGTKVEIKRLEIQNPDPAVYQLRDSKSSDKSVCLFTDFDSQTNVSQSKDSDVYITDKCVLDMRSMDFKSNSAVAWSNKSDFACANAFNNSIIPEDTFFPSPESSCGFTSESYQQGVLSATILYEILLGKATLYAVLVSALVLMAMVKRKDSRGRAKRSGSGVKQTLNFDLLKLAGDVESNPGPTSMDWIWRILFLVGAATGAHSGPMDPDLEIRAAFLRQRNTALRTEVAELEQEVQRLENEVSQYETRYGPLGGGKGSGGGGSGGGGSGGGGSFEEVQLVESGGGLVQPGGSLRLSCAASGYAFSNYWVNWVRQAPGKGLEWVAQIYPGDGDTNYNGKFKGRFTISRDNSKNTLYLQMNSLRAEDTAVYYCARSITTVVGCAMDYWGQGTLVTVSSTREDLKNVFPPEVAVFEPSEAEISHTQKATLVCLATGFYPDHVELSWWVNGKEVHSGVCTDPQPLKEQPALNDSRYCLSSRLRVSATFWQNPRNHFRCQVQFYGLSENDEWTQDRAKPVTQIVSAEAWGRADCDVKLVEKSFETDTNLNFQNLSVIGFRILLLKVAGFNLLMTLRLWSS

SEQ ID NO: 46136 - protein, 669 aa, synthetic construct
MALPVTALLLPLALLLHAARPDIQMTQSPSSLSASVGDRVTITCKASDHINNWLAWYQQKPGKAPKLLIYGATTLETGVPSRFSGSGSGTDFTLTISSLQPEDFATYYCQQSWNTPWTFGQGTKVEIKRLEDLKNVFPPEVAVFEPSEAEISHTQKATLVCLATGFYPDHVELSWWVNGKEVHSGVCTDPQPLKEQPALNDSRYCLSSRLRVSATFWQNPRNHFRCQVQFYGLSENDEWTQDRAKPVTQIVSAEAWGRADCDVKLVEKSFETDTNLNFQNLSVIGFRILLLKVAGFNLLMTLRLWSSRAKRSGSGATNFSLLKQAGDVEENPGPTSMDWIWRILFLVGAATGAHSGPEVAALEKEVAALEKEVAALEKEVAALEKGSGGGGSGGGGSGGGGSFEEVQLVESGGGLVQPGGSLRLSCAASGYAFSNYWVNWVRQAPGKGLEWVAQIYPGDGDTNYNGKFKGRFTISRDNSKNTLYLQMNSLRAEDTAVYYCARSITTVVGCAMDYWGQGTLVTVSSTRIQNPDPAVYQLRDSKSSDKSVCLFTDFDSQTNVSQSKDSDVYITDKCVLDMRSMDFKSNSAVAWSNKSDFACANAFNNSIIPEDTFFPSPESSCGFTSESYQQGVLSATILYEILLGKATLYAVLVSALVLMAMVKRKDSRG

SEQ ID NO: 46137 - protein, 673 aa, synthetic construct
MALPVTALLLPLALLLHAARPDIQMTQSPSSLSASVGDRVTITCKASDHINNWLAWYQQKPGKAPKLLIYGATTLETGVPSRFSGSGSGTDFTLTISSLQPEDFATYYCQQSWNTPWTFGQGTKVEIKRLEIQNPDPAVYQLRDSKSSDKSVCLFTDFDSQTNVSQSKDSDVYITDKCVLDMRSMDFKSNSAVAWSNKSDFACANAFNNSIIPEDTFFPSPESSCGFTSESYQQGVLSATILYEILLGKATLYAVLVSALVLMAMVKRKDSRGRAKRSGSGVKQTLNFDLLKLAGDVESNPGPTSMDWIWRILFLVGAATGAHSGPEVAALEKEVAALEKEVAALEKEVAALEKGSGGGGSGGGGSGGGGSFEEVQLVESGGGLVQPGGSLRLSCAASGYAFSNYWVNWVRQAPGKGLEWVAQIYPGDGDTNYNGKFKGRFTISRDNSKNTLYLQMNSLRAEDTAVYYCARSITTVVGCAMDYWGQGTLVTVSSTREDLKNVFPPEVAVFEPSEAEISHTQKATLVCLATGFYPDHVELSWWVNGKEVHSGVCTDPQPLKEQPALNDSRYCLSSRLRVSATFWQNPRNHFRCQVQFYGLSENDEWTQDRAKPVTQIVSAEAWGRADCDVKLVEKSFETDTNLNFQNLSVIGFRILLLKVAGFNLLMTLRLWSS

SEQ ID NO: 46138 - protein, 759 aa, synthetic construct
MALPVTALLLPLALLLHAARPDIQMTQSPSSLSASVGDRVTITCKASDHINNWLAWYQQKPGKAPKLLIYGATTLETGVPSRFSGSGSGTDFTLTISSLQPEDFATYYCQQSWNTPWTFGQGTKVEIKRLEDLKNVFPPEVAVFEPSEAEISHTQKATLVCLATGFYPDHVELSWWVNGKEVHSGVCTDPQPLKEQPALNDSRYCLSSRLRVSATFWQNPRNHFRCQVQFYGLSENDEWTQDRAKPVTQIVSAEAWGRADCDVKLVEKSFETDTNLNFQNLSVIGFRILLLKVAGFNLLMTLRLWSSRAKRSGSGATNFSLLKQAGDVEENPGPTSMDWIWRILFLVGAATGAHSGPQVQLQESGGGLAQAGGSLRLSCAASGRTFSMGWFRQAPGKEREFVAAITYSGGSPYYASSVRGRFTISRDNAKNTVYLQMNSLKPEDTAVYYCAANPTYGSDWNAENWGQGTQVTVSSGSGGGGSGGGGSGGGGSFEEVQLVESGGGLVQPGGSLRLSCAASGYAFSNYWVNWVRQAPGKGLEWVAQIYPGDGDTNYNGKFKGRFTISRDNSKNTLYLQMNSLRAEDTAVYYCARSITTVVGCAMDYWGQGTLVTVSSTRIQNPDPAVYQLRDSKSSDKSVCLFTDFDSQTNVSQSKDSDVYITDKCVLDMRSMDFKSNSAVAWSNKSDFACANAFNNSIIPEDTFFPSPESSCGFTSESYQQGVLSATILYEILLGKATLYAVLVSALVLMAMVKRKDSRG

SEQ ID NO: 46139 - protein, 763 aa, synthetic construct
MALPVTALLLPLALLLHAARPDIQMTQSPSSLSASVGDRVTITCKASDHINNWLAWYQQKPGKAPKLLIYGATTLETGVPSRFSGSGSGTDFTLTISSLQPEDFATYYCQQSWNTPWTFGQGTKVEIKRLEIQNPDPAVYQLRDSKSSDKSVCLFTDFDSQTNVSQSKDSDVYITDKCVLDMRSMDFKSNSAVAWSNKSDFACANAFNNSIIPEDTFFPSPESSCGFTSESYQQGVLSATILYEILLGKATLYAVLVSALVLMAMVKRKDSRGRAKRSGSGVKQTLNFDLLKLAGDVESNPGPTSMDWIWRILFLVGAATGAHSGPQVQLQESGGGLAQAGGSLRLSCAASGRTFSMGWFRQAPGKEREFVAAITYSGGSPYYASSVRGRFTISRDNAKNTVYLQMNSLKPEDTAVYYCAANPTYGSDWNAENWGQGTQVTVSSGSGGGGSGGGGSGGGGSFEEVQLVESGGGLVQPGGSLRLSCAASGYAFSNYWVNWVRQAPGKGLEWVAQIYPGDGDTNYNGKFKGRFTISRDNSKNTLYLQMNSLRAEDTAVYYCARSITTVVGCAMDYWGQGTLVTVSSTREDLKNVFPPEVAVFEPSEAEISHTQKATLVCLATGFYPDHVELSWWVNGKEVHSGVCTDPQPLKEQPALNDSRYCLSSRLRVSATFWQNPRNHFRCQVQFYGLSENDEWTQDRAKPVTQIVSAEAWGRADCDVKLVEKSFETDTNLNFQNLSVIGFRILLLKVAGFNLLMTLRLWSS

SEQ ID NO: 46140 - protein, 765 aa, synthetic construct
MALPVTALLLPLALLLHAARPEVQLVESGGSLVQPGGSLRLSCAASGFTFDDYAMSWVRQVPGKGLEWVSSINWSGTHTDYADSVKGRFTISRNNANNTLYLQMNSLKSEDTAVYYCAKNWRDAGTTWFEKSGSAGQGTQVTVSSGTGGGGSGGGGSGGGGSEFDIQMTQSPSSLSASVGDRVTITCKASDHINNWLAWYQQKPGKAPKLLIYGATTLETGVPSRFSGSGSGTDFTLTISSLQPEDFATYYCQQSWNTPWTFGQGTKVEIKRLEDLKNVFPPEVAVFEPSEAEISHTQKATLVCLATGFYPDHVELSWWVNGKEVHSGVCTDPQPLKEQPALNDSRYCLSSRLRVSATFWQNPRNHFRCQVQFYGLSENDEWTQDRAKPVTQIVSAEAWGRADCDVKLVEKSFETDTNLNFQNLSVIGFRILLLKVAGFNLLMTLRLWSSRAKRSGSGATNFSLLKQAGDVEENPGPTSMDWIWRILFLVGAATGAHSFEEVQLVESGGGLVQPGGSLRLSCAASGYAFSNYWVNWVRQAPGKGLEWVAQIYPGDGDTNYNGKFKGRFTISRDNSKNTLYLQMNSLRAEDTAVYYCARSITTVVGCAMDYWGQGTLVTVSSTRIQNPDPAVYQLRDSKSSDKSVCLFTDFDSQTNVSQSKDSDVYITDKCVLDMRSMDFKSNSAVAWSNKSDFACANAFNNSIIPEDTFFPSPESSCGFTSESYQQGVLSATILYEILLGKATLYAVLVSALVLMAMVKRKDSRG

SEQ ID NO: 46141 - protein, 769 aa, synthetic construct
MALPVTALLLPLALLLHAARPEVQLVESGGSLVQPGGSLRLSCAASGFTFDDYAMSWVRQVPGKGLEWVSSINWSGTHTDYADSVKGRFTISRNNANNTLYLQMNSLKSEDTAVYYCAKNWRDAGTTWFEKSGSAGQGTQVTVSSGTGGGGSGGGGSGGGGSEFDIQMTQSPSSLSASVGDRVTITCKASDHINNWLAWYQQKPGKAPKLLIYGATTLETGVPSRFSGSGSGTDFTLTISSLQPEDFATYYCQQSWNTPWTFGQGTKVEIKRLEIQNPDPAVYQLRDSKSSDKSVCLFTDFDSQTNVSQSKDSDVYITDKCVLDMRSMDFKSNSAVAWSNKSDFACANAFNNSIIPEDTFFPSPESSCGFTSESYQQGVLSATILYEILLGKATLYAVLVSALVLMAMVKRKDSRGRAKRSGSGVKQTLNFDLLKLAGDVESNPGPTSMDWIWRILFLVGAATGAHSFEEVQLVESGGGLVQPGGSLRLSCAASGYAFSNYWVNWVRQAPGKGLEWVAQIYPGDGDTNYNGKFKGRFTISRDNSKNTLYLQMNSLRAEDTAVYYCARSITTVVGCAMDYWGQGTLVTVSSTREDLKNVFPPEVAVFEPSEAEISHTQKATLVCLATGFYPDHVELSWWVNGKEVHSGVCTDPQPLKEQPALNDSRYCLSSRLRVSATFWQNPRNHFRCQVQFYGLSENDEWTQDRAKPVTQIVSAEAWGRADCDVKLVEKSFETDTNLNFQNLSVIGFRILLLKVAGFNLLMTLRLWSS

SEQ ID NO: 46142 - protein, 763 aa, synthetic construct
MALPVTALLLPLALLLHAARPEVQLLESGGGLVQPGGSLRLSCAASGFIFSSYAMSWVRQAPGKGQEWVSGVSGTGVNTYYADSVKGRFTISRDNSKNTLYLQMNSLRAEDTAVYYCASGKGWDSGSWYEDYRGQGTLVTVSSGTGGGGSGGGGSGGGGSEFDIQMTQSPSSLSASVGDRVTITCKASDHINNWLAWYQQKPGKAPKLLIYGATTLETGVPSRFSGSGSGTDFTLTISSLQPEDFATYYCQQSWNTPWTFGQGTKVEIKRLEDLKNVFPPEVAVFEPSEAEISHTQKATLVCLATGFYPDHVELSWWVNGKEVHSGVCTDPQPLKEQPALNDSRYCLSSRLRVSATFWQNPRNHFRCQVQFYGLSENDEWTQDRAKPVTQIVSAEAWGRADCDVKLVEKSFETDTNLNFQNLSVIGFRILLLKVAGFNLLMTLRLWSSRAKRSGSGATNFSLLKQAGDVEENPGPTSMDWIWRILFLVGAATGAHSFEEVQLVESGGGLVQPGGSLRLSCAASGYAFSNYWVNWVRQAPGKGLEWVAQIYPGDGDTNYNGKFKGRFTISRDNSKNTLYLQMNSLRAEDTAVYYCARSITTVVGCAMDYWGQGTLVTVSSTRIQNPDPAVYQLRDSKSSDKSVCLFTDFDSQTNVSQSKDSDVYITDKCVLDMRSMDFKSNSAVAWSNKSDFACANAFNNSIIPEDTFFPSPESSCGFTSESYQQGVLSATILYEILLGKATLYAVLVSALVLMAMVKRKDSRG

SEQ ID NO: 46143 - protein, 767 aa, synthetic construct
MALPVTALLLPLALLLHAARPEVQLLESGGGLVQPGGSLRLSCAASGFIFSSYAMSWVRQAPGKGQEWVSGVSGTGVNTYYADSVKGRFTISRDNSKNTLYLQMNSLRAEDTAVYYCASGKGWDSGSWYEDYRGQGTLVTVSSGTGGGGSGGGGSGGGGSEFDIQMTQSPSSLSASVGDRVTITCKASDHINNWLAWYQQKPGKAPKLLIYGATTLETGVPSRFSGSGSGTDFTLTISSLQPEDFATYYCQQSWNTPWTFGQGTKVEIKRLEIQNPDPAVYQLRDSKSSDKSVCLFTDFDSQTNVSQSKDSDVYITDKCVLDMRSMDFKSNSAVAWSNKSDFACANAFNNSIIPEDTFFPSPESSCGFTSESYQQGVLSATILYEILLGKATLYAVLVSALVLMAMVKRKDSRGRAKRSGSGVKQTLNFDLLKLAGDVESNPGPTSMDWIWRILFLVGAATGAHSFEEVQLVESGGGLVQPGGSLRLSCAASGYAFSNYWVNWVRQAPGKGLEWVAQIYPGDGDTNYNGKFKGRFTISRDNSKNTLYLQMNSLRAEDTAVYYCARSITTVVGCAMDYWGQGTLVTVSSTREDLKNVFPPEVAVFEPSEAEISHTQKATLVCLATGFYPDHVELSWWVNGKEVHSGVCTDPQPLKEQPALNDSRYCLSSRLRVSATFWQNPRNHFRCQVQFYGLSENDEWTQDRAKPVTQIVSAEAWGRADCDVKLVEKSFETDTNLNFQNLSVIGFRILLLKVAGFNLLMTLRLWSS

SEQ ID NO: 46144 - protein, 731 aa, synthetic construct
MALPVTALLLPLALLLHAARPMLPAPKNLVVSRITEDSARLSWTAPDAAFDSFPIRYIETLIWGEAIWLDVPGSERSYDLTGLKPGTEYAVVITGVKGGRFSSPLVASFTTGTGGGGSGGGGSGGGGSEFDIQMTQSPSSLSASVGDRVTITCKASDHINNWLAWYQQKPGKAPKLLIYGATTLETGVPSRFSGSGSGTDFTLTISSLQPEDFATYYCQQSWNTPWTFGQGTKVEIKRLEDLKNVFPPEVAVFEPSEAEISHTQKATLVCLATGFYPDHVELSWWVNGKEVHSGVCTDPQPLKEQPALNDSRYCLSSRLRVSATFWQNPRNHFRCQVQFYGLSENDEWTQDRAKPVTQIVSAEAWGRADCDVKLVEKSFETDTNLNFQNLSVIGFRILLLKVAGFNLLMTLRLWSSRAKRSGSGATNFSLLKQAGDVEENPGPTSMDWIWRILFLVGAATGAHSFEEVQLVESGGGLVQPGGSLRLSCAASGYAFSNYWVNWVRQAPGKGLEWVAQIYPGDGDTNYNGKFKGRFTISRDNSKNTLYLQMNSLRAEDTAVYYCARSITTVVGCAMDYWGQGTLVTVSSTRIQNPDPAVYQLRDSKSSDKSVCLFTDFDSQTNVSQSKDSDVYITDKCVLDMRSMDFKSNSAVAWSNKSDFACANAFNNSIIPEDTFFPSPESSCGFTSESYQQGVLSATILYEILLGKATLYAVLVSALVLMAMVKRKDSRG

SEQ ID NO: 46145 - protein, 735 aa, synthetic construct
MALPVTALLLPLALLLHAARPMLPAPKNLVVSRITEDSARLSWTAPDAAFDSFPIRYIETLIWGEAIWLDVPGSERSYDLTGLKPGTEYAVVITGVKGGRFSSPLVASFTTGTGGGGSGGGGSGGGGSEFDIQMTQSPSSLSASVGDRVTITCKASDHINNWLAWYQQKPGKAPKLLIYGATTLETGVPSRFSGSGSGTDFTLTISSLQPEDFATYYCQQSWNTPWTFGQGTKVEIKRLEIQNPDPAVYQLRDSKSSDKSVCLFTDFDSQTNVSQSKDSDVYITDKCVLDMRSMDFKSNSAVAWSNKSDFACANAFNNSIIPEDTFFPSPESSCGFTSESYQQGVLSATILYEILLGKATLYAVLVSALVLMAMVKRKDSRGRAKRSGSGVKQTLNFDLLKLAGDVESNPGPTSMDWIWRILFLVGAATGAHSFEEVQLVESGGGLVQPGGSLRLSCAASGYAFSNYWVNWVRQAPGKGLEWVAQIYPGDGDTNYNGKFKGRFTISRDNSKNTLYLQMNSLRAEDTAVYYCARSITTVVGCAMDYWGQGTLVTVSSTREDLKNVFPPEVAVFEPSEAEISHTQKATLVCLATGFYPDHVELSWWVNGKEVHSGVCTDPQPLKEQPALNDSRYCLSSRLRVSATFWQNPRNHFRCQVQFYGLSENDEWTQDRAKPVTQIVSAEAWGRADCDVKLVEKSFETDTNLNFQNLSVIGFRILLLKVAGFNLLMTLRLWSS

SEQ ID NO: 46146 - protein, 760 aa, synthetic construct
MALPVTALLLPLALLLHAARPEVQLVESGGGLVQPGGSLRLSCAASGFNIKDTCIGWVRRAPGKEEELVAKICKYSGHTRYADSVKGRFTISADTSKNTAYLQMNSLRAEDTAVYYCAAVSVRDGHYNYWGQGTTVTVSSGTGGGGSGGGGSGGGGSEFDIQMTQSPSSLSASVGDRVTITCKASDHINNWLAWYQQKPGKAPKLLIYGATTLETGVPSRFSGSGSGTDFTLTISSLQPEDFATYYCQQSWNTPWTFGQGTKVEIKRLEDLKNVFPPEVAVFEPSEAEISHTQKATLVCLATGFYPDHVELSWWVNGKEVHSGVCTDPQPLKEQPALNDSRYCLSSRLRVSATFWQNPRNHFRCQVQFYGLSENDEWTQDRAKPVTQIVSAEAWGRADCDVKLVEKSFETDTNLNFQNLSVIGFRILLLKVAGFNLLMTLRLWSSRAKRSGSGATNFSLLKQAGDVEENPGPTSMDWIWRILFLVGAATGAHSFEEVQLVESGGGLVQPGGSLRLSCAASGYAFSNYWVNWVRQAPGKGLEWVAQIYPGDGDTNYNGKFKGRFTISRDNSKNTLYLQMNSLRAEDTAVYYCARSITTVVGCAMDYWGQGTLVTVSSTRIQNPDPAVYQLRDSKSSDKSVCLFTDFDSQTNVSQSKDSDVYITDKCVLDMRSMDFKSNSAVAWSNKSDFACANAFNNSIIPEDTFFPSPESSCGFTSESYQQGVLSATILYEILLGKATLYAVLVSALVLMAMVKRKDSRG

SEQ ID NO: 46147 - protein, 764 aa, synthetic construct
MALPVTALLLPLALLLHAARPEVQLVESGGGLVQPGGSLRLSCAASGFNIKDTCIGWVRRAPGKEEELVAKICKYSGHTRYADSVKGRFTISADTSKNTAYLQMNSLRAEDTAVYYCAAVSVRDGHYNYWGQGTTVTVSSGTGGGGSGGGGSGGGGSEFDIQMTQSPSSLSASVGDRVTITCKASDHINNWLAWYQQKPGKAPKLLIYGATTLETGVPSRFSGSGSGTDFTLTISSLQPEDFATYYCQQSWNTPWTFGQGTKVEIKRLEIQNPDPAVYQLRDSKSSDKSVCLFTDFDSQTNVSQSKDSDVYITDKCVLDMRSMDFKSNSAVAWSNKSDFACANAFNNSIIPEDTFFPSPESSCGFTSESYQQGVLSATILYEILLGKATLYAVLVSALVLMAMVKRKDSRGRAKRSGSGVKQTLNFDLLKLAGDVESNPGPTSMDWIWRILFLVGAATGAHSFEEVQLVESGGGLVQPGGSLRLSCAASGYAFSNYWVNWVRQAPGKGLEWVAQIYPGDGDTNYNGKFKGRFTISRDNSKNTLYLQMNSLRAEDTAVYYCARSITTVVGCAMDYWGQGTLVTVSSTREDLKNVFPPEVAVFEPSEAEISHTQKATLVCLATGFYPDHVELSWWVNGKEVHSGVCTDPQPLKEQPALNDSRYCLSSRLRVSATFWQNPRNHFRCQVQFYGLSENDEWTQDRAKPVTQIVSAEAWGRADCDVKLVEKSFETDTNLNFQNLSVIGFRILLLKVAGFNLLMTLRLWSS

SEQ ID NO: 46148 - protein, 1131 aa, synthetic construct
MALPVTALLLPLALLLHAARPEVQLVESGGGLVQAGGSLRLSCAASGRTFSMGWFRQAPGKEREFVAAITYSGGSPYYADSVKGRFTISRDNAKNTVYLQMNSLKPEDTAVYYCAANPTYGSDWNAENWGQGTQVTVSSGTGGGGSGGGGSGGGGSEFDIQMTQSPSSLSASVGDRVTITCKASDHINNWLAWYQQKPGKAPKLLIYGATTLETGVPSRFSGSGSGTDFTLTISSLQPEDFATYYCQQSWNTPWTFGQGTKVEIKRLEDLKNVFPPEVAVFEPSEAEISHTQKATLVCLATGFYPDHVELSWWVNGKEVHSGVCTDPQPLKEQPALNDSRYCLSSRLRVSATFWQNPRNHFRCQVQFYGLSENDEWTQDRAKPVTQIVSAEAWGRADCDVKLVEKSFETDTNLNFQNLSVIGFRILLLKVAGFNLLMTLRLWSSRAKRSGSGATNFSLLKQAGDVEENPGPTSATMDWIWRILFLVGAATGAHSGPEVQLVESGGGLVQAGGSLRLSCAASGRTFTMGWFRQAPGKEREFVAAISLSPTLAYYADSVKGRFTISRDNAKNTVVLQMNSLKPEDTALYYCAADRKSVMSIRPDYWGQGTQVTVSSGSGGGGSGGGGSGGGGSFEEVQLVESGGGLVQPGGSLRLSCAASGYAFSNYWVNWVRQAPGKGLEWVAQIYPGDGDTNYNGKFKGRFTISRDNSKNTLYLQMNSLRAEDTAVYYCARSITTVVGCAMDYWGQGTLVTVSSTRIQNPDPAVYQLRDSKSSDKSVCLFTDFDSQTNVSQSKDSDVYITDKCVLDMRSMDFKSNSAVAWSNKSDFACANAFNNSIIPEDTFFPSPESSCGFTSESYQQGVLSATILYEILLGKATLYAVLVSALVLMAMVKRKDSRGRAKRSGSGVKQTLNFDLLKLAGDVESNPGPSRGHMTEYKPTVRLATRDDVPRAVRTLAAAFADYPATRHTVDPDRHIERVTELQELFLTRVGLDIGKVWVADDGAAVAVWTTPESVEAGAVFAEIGPRMAELSGSRLAAQQQMEGLLAPHRPKEPAWFLATVGVSPDHQGKGLGSAVVLPGVEAAERAGVPAFLETSAPRNLPFYERLGFTVTADVEVPEGPRTWCMTRKPGA

SEQ ID NO: 46149 - protein, 769 aa, synthetic construct
MALPVTALLLPLALLLHAARPEVQLVESGGGLVQPGGSLRLSCAASGFASDYYIIGWFRQAPGKEREGVSCISSRYANTNYADSVKGRFTISRDNAKNTVYLQMNSLKPEDTAVYYCAADTRRYTCPDIATMHRNFDSWGQGTLVTVSSGTGGGGSGGGGSGGGGSEFDIQMTQSPSSLSASVGDRVTITCKASDHINNWLAWYQQKPGKAPKLLIYGATTLETGVPSRFSGSGSGTDFTLTISSLQPEDFATYYCQQSWNTPWTFGQGTKVEIKRLEDLKNVFPPEVAVFEPSEAEISHTQKATLVCLATGFYPDHVELSWWVNGKEVHSGVCTDPQPLKEQPALNDSRYCLSSRLRVSATFWQNPRNHFRCQVQFYGLSENDEWTQDRAKPVTQIVSAEAWGRADCDVKLVEKSFETDTNLNFQNLSVIGFRILLLKVAGFNLLMTLRLWSSRAKRSGSGATNFSLLKQAGDVEENPGPTSMDWIWRILFLVGAATGAHSFEEVQLVESGGGLVQPGGSLRLSCAASGYAFSNYWVNWVRQAPGKGLEWVAQIYPGDGDTNYNGKFKGRFTISRDNSKNTLYLQMNSLRAEDTAVYYCARSITTVVGCAMDYWGQGTLVTVSSTRIQNPDPAVYQLRDSKSSDKSVCLFTDFDSQTNVSQSKDSDVYITDKCVLDMRSMDFKSNSAVAWSNKSDFACANAFNNSIIPEDTFFPSPESSCGFTSESYQQGVLSATILYEILLGKATLYAVLVSALVLMAMVKRKDSRG

SEQ ID NO: 46150 - protein, 769 aa, synthetic construct
MALPVTALLLPLALLLHAARPEVQLVESGGGLVQPGGSLRLSCEASGFASDDYIIGWFRQAPGKEREGVSCISSKYANTVYTDSVKGRFRLSRGTAKNTVYLQMSALKPEDTAVYYCAMDSRRVTCPEISTMHRNFDSWGQGTLVTVSSGTGGGGSGGGGSGGGGSEFDIQMTQSPSSLSASVGDRVTITCKASDHINNWLAWYQQKPGKAPKLLIYGATTLETGVPSRFSGSGSGTDFTLTISSLQPEDFATYYCQQSWNTPWTFGQGTKVEIKRLEDLKNVFPPEVAVFEPSEAEISHTQKATLVCLATGFYPDHVELSWWVNGKEVHSGVCTDPQPLKEQPALNDSRYCLSSRLRVSATFWQNPRNHFRCQVQFYGLSENDEWTQDRAKPVTQIVSAEAWGRADCDVKLVEKSFETDTNLNFQNLSVIGFRILLLKVAGFNLLMTLRLWSSRAKRSGSGATNFSLLKQAGDVEENPGPTSMDWIWRILFLVGAATGAHSFEEVQLVESGGGLVQPGGSLRLSCAASGYAFSNYWVNWVRQAPGKGLEWVAQIYPGDGDTNYNGKFKGRFTISRDNSKNTLYLQMNSLRAEDTAVYYCARSITTVVGCAMDYWGQGTLVTVSSTRIQNPDPAVYQLRDSKSSDKSVCLFTDFDSQTNVSQSKDSDVYITDKCVLDMRSMDFKSNSAVAWSNKSDFACANAFNNSIIPEDTFFPSPESSCGFTSESYQQGVLSATILYEILLGKATLYAVLVSALVLMAMVKRKDSRG

SEQ ID NO: 46151 - protein, 769 aa, synthetic construct
MALPVTALLLPLALLLHAARPEVQLVESGGGLVQPGGSLRLSCAASGFASDYYIIGWFRQAPGKEREGVSCISSRYANTNYADSVKGRFTISRDNAKNTVYLQMNSLKPEDTAVYYCAADTRRYTCPDIATMHRNFDSWGQGTLVTVSSGTGGGGSGGGGSGGGGSEFDIQMTQSPSSLSASVGDRVTITCKASDHINNWLAWYQQKPGKAPKLLIYGATTLETGVPSRFSGSGSGTDFTLTISSLQPEDFATYYCQQSWNTPWTFGQGTKVEIKRLEIQNPDPAVYQLRDSKSSDKSVCLFTDFDSQTNVSQSKDSDVYITDKCVLDMRSMDFKSNSAVAWSNKSDFACANAFNNSIIPEDTFFPSPESSCGFTSESYQQGVLSATILYEILLGKATLYAVLVSALVLMAMVKRKDSRGRAKRSGSGATNFSLLKQAGDVEENPGPTSMDWIWRILFLVGAATGAHSFEEVQLVESGGGLVQPGGSLRLSCAASGYAFSNYWVNWVRQAPGKGLEWVAQIYPGDGDTNYNGKFKGRFTISRDNSKNTLYLQMNSLRAEDTAVYYCARSITTVVGCAMDYWGQGTLVTVSSTRDLKNVFPPEVAVFEPSEAEISHTQKATLVCLATGFYPDHVELSWWVNGKEVHSGVCTDPQPLKEQPALNDSRYCLSSRLRVSATFWQNPRNHFRCQVQFYGLSENDEWTQDRAKPVTQIVSAEAWGRADCDVKLVEKSFETDTNLNFQNLSVIGFRILLLKVAGFNLLMTLRLWSS

SEQ ID NO: 46152 - protein, 769 aa, synthetic construct
MALPVTALLLPLALLLHAARPEVQLVESGGGLVQPGGSLRLSCEASGFASDDYIIGWFRQAPGKEREGVSCISSKYANTVYTDSVKGRFRLSRGTAKNTVYLQMSALKPEDTAVYYCAMDSRRVTCPEISTMHRNFDSWGQGTLVTVSSGTGGGGSGGGGSGGGGSEFDIQMTQSPSSLSASVGDRVTITCKASDHINNWLAWYQQKPGKAPKLLIYGATTLETGVPSRFSGSGSGTDFTLTISSLQPEDFATYYCQQSWNTPWTFGQGTKVEIKRLEIQNPDPAVYQLRDSKSSDKSVCLFTDFDSQTNVSQSKDSDVYITDKCVLDMRSMDFKSNSAVAWSNKSDFACANAFNNSIIPEDTFFPSPESSCGFTSESYQQGVLSATILYEILLGKATLYAVLVSALVLMAMVKRKDSRGRAKRSGSGATNFSLLKQAGDVEENPGPTSMDWIWRILFLVGAATGAHSFEEVQLVESGGGLVQPGGSLRLSCAASGYAFSNYWVNWVRQAPGKGLEWVAQIYPGDGDTNYNGKFKGRFTISRDNSKNTLYLQMNSLRAEDTAVYYCARSITTVVGCAMDYWGQGTLVTVSSTRDLKNVFPPEVAVFEPSEAEISHTQKATLVCLATGFYPDHVELSWWVNGKEVHSGVCTDPQPLKEQPALNDSRYCLSSRLRVSATFWQNPRNHFRCQVQFYGLSENDEWTQDRAKPVTQIVSAEAWGRADCDVKLVEKSFETDTNLNFQNLSVIGFRILLLKVAGFNLLMTLRLWSS

SEQ ID NO: 46153 - protein, 760 aa, synthetic construct
MALPVTALLLPLALLLHAARPQVKLEESGGGLVQPGESLRLSCSASGSIFKVFRVFAMSWYRQGPGKQRELVASISSGETTTYAESVKGRFTISRDNAKNTAYLQMDSLKPEDTAVYYCNADHTFTGDFWGQGTQVTVSSGTGGGGSGGGGSGGGGSEFDIQMTQSPSSLSASVGDRVTITCKASDHINNWLAWYQQKPGKAPKLLIYGATTLETGVPSRFSGSGSGTDFTLTISSLQPEDFATYYCQQSWNTPWTFGQGTKVEIKRLEIQNPDPAVYQLRDSKSSDKSVCLFTDFDSQTNVSQSKDSDVYITDKCVLDMRSMDFKSNSAVAWSNKSDFACANAFNNSIIPEDTFFPSPESSCGFTSESYQQGVLSATILYEILLGKATLYAVLVSALVLMAMVKRKDSRGRAKRSGSGATNFSLLKQAGDVEENPGPTSMDWIWRILFLVGAATGAHSFEEVQLVESGGGLVQPGGSLRLSCAASGYAFSNYWVNWVRQAPGKGLEWVAQIYPGDGDTNYNGKFKGRFTISRDNSKNTLYLQMNSLRAEDTAVYYCARSITTVVGCAMDYWGQGTLVTVSSTRDLKNVFPPEVAVFEPSEAEISHTQKATLVCLATGFYPDHVELSWWVNGKEVHSGVCTDPQPLKEQPALNDSRYCLSSRLRVSATFWQNPRNHFRCQVQFYGLSENDEWTQDRAKPVTQIVSAEAWGRADCDVKLVEKSFETDTNLNFQNLSVIGFRILLLKVAGFNLLMTLRLWSS

SEQ ID NO: 46154 - protein, 761 aa, synthetic construct
MALPVTALLLPLALLLHAARPDIQMTQSPSSLSASVGDRVTITCKASDHINNWLAWYQQKPGKAPKLLIYGATTLETGVPSRFSGSGSGTDFTLTISSLQPEDFATYYCQQSWNTPWTFGQGTKVEIKRLEDLKNVFPPEVAVFEPSEAEISHTQKATLVCLATGFYPDHVELSWWVNGKEVHSGVCTDPQPLKEQPALNDSRYCLSSRLRVSATFWQNPRNHFRCQVQFYGLSENDEWTQDRAKPVTQIVSAEAWGRADCDVKLVEKSFETDTNLNFQNLSVIGFRILLLKVAGFNLLMTLRLWSSRAKRSGSGATNFSLLKQAGDVEENPGPTSATMDWIWRILFLVGAATGAHSGPEVQLVESGGGLVQAGGSLRLSCAASGRTFSMGWFRQAPGKEREFVAAITYSGGSPYYADSVKGRFTISRDNAKNTVYLQMNSLKPEDTAVYYCAANPTYGSDWNAENWGQGTQVTVSSGSGGGGSGGGGSGGGGSFEEVQLVESGGGLVQPGGSLRLSCAASGYAFSNYWVNWVRQAPGKGLEWVAQIYPGDGDTNYNGKFKGRFTISRDNSKNTLYLQMNSLRAEDTAVYYCARSITTVVGCAMDYWGQGTLVTVSSTRIQNPDPAVYQLRDSKSSDKSVCLFTDFDSQTNVSQSKDSDVYITDKCVLDMRSMDFKSNSAVAWSNKSDFACANAFNNSIIPEDTFFPSPESSCGFTSESYQQGVLSATILYEILLGKATLYAVLVSALVLMAMVKRKDSRG

SEQ ID NO: 46155 - protein, 762 aa, synthetic construct
MALPVTALLLPLALLLHAARPDIQMTQSPSSLSASVGDRVTITCKASDHINNWLAWYQQKPGKAPKLLIYGATTLETGVPSRFSGSGSGTDFTLTISSLQPEDFATYYCQQSWNTPWTFGQGTKVEIKRLEDLKNVFPPEVAVFEPSEAEISHTQKATLVCLATGFYPDHVELSWWVNGKEVHSGVCTDPQPLKEQPALNDSRYCLSSRLRVSATFWQNPRNHFRCQVQFYGLSENDEWTQDRAKPVTQIVSAEAWGRADCDVKLVEKSFETDTNLNFQNLSVIGFRILLLKVAGFNLLMTLRLWSSRAKRSGSGATNFSLLKQAGDVEENPGPTSATMDWIWRILFLVGAATGAHSGPEVQLVESGGGLVQPGGSLRLSCAASGSIFGFNDMAWYRQAPGKQRELVALISRVGVTSSADSVKGRFTISRVNAKDTVYLQMNSLKPEDTAVYYCYMDQRLDGSTLAYWGQGTQVTVSSGSGGGGSGGGGSGGGGSFEEVQLVESGGGLVQPGGSLRLSCAASGYAFSNYWVNWVRQAPGKGLEWVAQIYPGDGDTNYNGKFKGRFTISRDNSKNTLYLQMNSLRAEDTAVYYCARSITTVVGCAMDYWGQGTLVTVSSTRIQNPDPAVYQLRDSKSSDKSVCLFTDFDSQTNVSQSKDSDVYITDKCVLDMRSMDFKSNSAVAWSNKSDFACANAFNNSIIPEDTFFPSPESSCGFTSESYQQGVLSATILYEILLGKATLYAVLVSALVLMAMVKRKDSRG

SEQ ID NO: 46156 - protein, 758 aa, synthetic construct
MALPVTALLLPLALLLHAARPDIQMTQSPSSLSASVGDRVTITCKASDHINNWLAWYQQKPGKAPKLLIYGATTLETGVPSRFSGSGSGTDFTLTISSLQPEDFATYYCQQSWNTPWTFGQGTKVEIKRLEDLKNVFPPEVAVFEPSEAEISHTQKATLVCLATGFYPDHVELSWWVNGKEVHSGVCTDPQPLKEQPALNDSRYCLSSRLRVSATFWQNPRNHFRCQVQFYGLSENDEWTQDRAKPVTQIVSAEAWGRADCDVKLVEKSFETDTNLNFQNLSVIGFRILLLKVAGFNLLMTLRLWSSRAKRSGSGATNFSLLKQAGDVEENPGPTSATMDWIWRILFLVGAATGAHSGPEVQLVESGGGLVQAGGSLRLSCAASGSVFSGNVMGWYRQAPGKEREWVAAIASGGSIYYRDSVKGRFTISRDNAKNTVYLQMNSLKPEDTAVYYCNSHPPTLPYWGLGTQVTVSSGSGGGGSGGGGSGGGGSFEEVQLVESGGGLVQPGGSLRLSCAASGYAFSNYWVNWVRQAPGKGLEWVAQIYPGDGDTNYNGKFKGRFTISRDNSKNTLYLQMNSLRAEDTAVYYCARSITTVVGCAMDYWGQGTLVTVSSTRIQNPDPAVYQLRDSKSSDKSVCLFTDFDSQTNVSQSKDSDVYITDKCVLDMRSMDFKSNSAVAWSNKSDFACANAFNNSIIPEDTFFPSPESSCGFTSESYQQGVLSATILYEILLGKATLYAVLVSALVLMAMVKRKDSRG

SEQ ID NO: 46157 - protein, 756 aa, synthetic construct
MALPVTALLLPLALLLHAARPDIQMTQSPSSLSASVGDRVTITCKASDHINNWLAWYQQKPGKAPKLLIYGATTLETGVPSRFSGSGSGTDFTLTISSLQPEDFATYYCQQSWNTPWTFGQGTKVEIKRLEDLKNVFPPEVAVFEPSEAEISHTQKATLVCLATGFYPDHVELSWWVNGKEVHSGVCTDPQPLKEQPALNDSRYCLSSRLRVSATFWQNPRNHFRCQVQFYGLSENDEWTQDRAKPVTQIVSAEAWGRADCDVKLVEKSFETDTNLNFQNLSVIGFRILLLKVAGFNLLMTLRLWSSRAKRSGSGATNFSLLKQAGDVEENPGPTSATMDWIWRILFLVGAATGAHSGPEVQLLESGGGLVQPGGSLRLSCAASGFSFSSYALSWVRQAPGKGLEWVSSIGENDGTTDYADAVKGRFTISRDNSKNTLYLQMNSLRVEDTAVYYCVKDGIHWGQGTLVTVSSGSGGGGSGGGGSGGGGSFEEVQLVESGGGLVQPGGSLRLSCAASGYAFSNYWVNWVRQAPGKGLEWVAQIYPGDGDTNYNGKFKGRFTISRDNSKNTLYLQMNSLRAEDTAVYYCARSITTVVGCAMDYWGQGTLVTVSSTRIQNPDPAVYQLRDSKSSDKSVCLFTDFDSQTNVSQSKDSDVYITDKCVLDMRSMDFKSNSAVAWSNKSDFACANAFNNSIIPEDTFFPSPESSCGFTSESYQQGVLSATILYEILLGKATLYAVLVSALVLMAMVKRKDSRG

SEQ ID NO: 46158 - protein, 1125 aa, synthetic construct
MGPRLLFWALLCLLGTGPVEAGVTQSPTHLIKTRGQQATLRCSPISGHTSVYWYQQALGLGLQFLLWYDEGEERNRGNFPPRFSGRQFPNYSSELNVNALELEDSALYLCASSLGGPRGLAGLRGDEQFFGPGTRLTVLEGTGGGGSGGGEFDIQMTQSPSSLSASVGDRVTITCKASDHINNWLAWYQQKPGKAPKLLIYGATTLETGVPSRFSGSGSGTDFTLTISSLQPEDFATYYCQQSWNTPWTFGQGTKVEIKRLEDLKNVFPPEVAVFEPSEAEISHTQKATLVCLATGFYPDHVELSWWVNGKEVHSGVCTDPQPLKEQPALNDSRYCLSSRLRVSATFWQNPRNHFRCQVQFYGLSENDEWTQDRAKPVTQIVSAEAWGRADCDVKLVEKSFETDTNLNFQNLSVIGFRILLLKVAGFNLLMTLRLWSSRAKRSGSGATNFSLLKQAGDVEENPGPTSATMDWIWRILFLVGAATGAHSGPEVQLVESGGGLVQAGGSLRLSCAASGRTFSMGWFRQAPGKEREFVAAITYSGGSPYYADSVKGRFTISRDNAKNTVYLQMNSLKPEDTAVYYCAANPTYGSDWNAENWGQGTQVTVSSGSGGGGSGGGGSGGGGSFEEVQLVESGGGLVQPGGSLRLSCAASGYAFSNYWVNWVRQAPGKGLEWVAQIYPGDGDTNYNGKFKGRFTISRDNSKNTLYLQMNSLRAEDTAVYYCARSITTVVGCAMDYWGQGTLVTVSSTRIQNPDPAVYQLRDSKSSDKSVCLFTDFDSQTNVSQSKDSDVYITDKCVLDMRSMDFKSNSAVAWSNKSDFACANAFNNSIIPEDTFFPSPESSCGFTSESYQQGVLSATILYEILLGKATLYAVLVSALVLMAMVKRKDSRGRAKRSGSGVKQTLNFDLLKLAGDVESNPGPSRGHMTEYKPTVRLATRDDVPRAVRTLAAAFADYPATRHTVDPDRHIERVTELQELFLTRVGLDIGKVWVADDGAAVAVWTTPESVEAGAVFAEIGPRMAELSGSRLAAQQQMEGLLAPHRPKEPAWFLATVGVSPDHQGKGLGSAVVLPGVEAAERAGVPAFLETSAPRNLPFYERLGFTVTADVEVPEGPRTWCMTRKPGA

SEQ ID NO: 46159 - protein, 1124 aa, synthetic construct
MGPRLLFWALLCLLGTGPVEAGVTQSPTHLIKTRGQQATLRCSPISGHTSVYWYQQALGLGLQFLLWYDEGEERNRGNFPPRFSGRQFPNYSSELNVNALELEDSALYLCASSLGGDELGADGNEQFFGPGTRLTVLEGTGGGGSGGGSEFDIQMTQSPSSLSASVGDRVTITCKASDHINNWLAWYQQKPGKAPKLLIYGATTLETGVPSRFSGSGSGTDFTLTISSLQPEDFATYYCQQSWNTPWTFGQGTKVEIKRLEDLKNVFPPEVAVFEPSEAEISHTQKATLVCLATGFYPDHVELSWWVNGKEVHSGVCTDPQPLKEQPALNDSRYCLSSRLRVSATFWQNPRNHFRCQVQFYGLSENDEWTQDRAKPVTQIVSAEAWGRADCDVKLVEKSFETDTNLNFQNLSVIGFRILLLKVAGFNLLMTLRLWSSRAKRSGSGATNFSLLKQAGDVEENPGPTSATMDWIWRILFLVGAATGAHSGPEVQLVESGGGLVQAGGSLRLSCAASGRTFSMGWFRQAPGKEREFVAAITYSGGSPYYADSVKGRFTISRDNAKNTVYLQMNSLKPEDTAVYYCAANPTYGSDWNAENWGQGTQVTVSSGSGGGGSGGGGSGGGGSFEEVQLVESGGGLVQPGGSLRLSCAASGYAFSNYWVNWVRQAPGKGLEWVAQIYPGDGDTNYNGKFKGRFTISRDNSKNTLYLQMNSLRAEDTAVYYCARSITTVVGCAMDYWGQGTLVTVSSTRIQNPDPAVYQLRDSKSSDKSVCLFTDFDSQTNVSQSKDSDVYITDKCVLDMRSMDFKSNSAVAWSNKSDFACANAFNNSIIPEDTFFPSPESSCGFTSESYQQGVLSATILYEILLGKATLYAVLVSALVLMAMVKRKDSRGRAKRSGSGVKQTLNFDLLKLAGDVESNPGPSRGHMTEYKPTVRLATRDDVPRAVRTLAAAFADYPATRHTVDPDRHIERVTELQELFLTRVGLDIGKVWVADDGAAVAVWTTPESVEAGAVFAEIGPRMAELSGSRLAAQQQMEGLLAPHRPKEPAWFLATVGVSPDHQGKGLGSAVVLPGVEAAERAGVPAFLETSAPRNLPFYERLGFTVTADVEVPEGPRTWCMTRKPGA

SEQ ID NO: 46160 - protein, 949 aa, synthetic construct
MALPVTALLLPLALLLHAARPDIQMTQSPSSLSASVGDRVTITCKASDHINNWLAWYQQKPGKAPKLLIYGATTLETGVPSRFSGSGSGTDFTLTISSLQPEDFATYYCQQSWNTPWTFGQGTKVEIKRLEDLKNVFPPEVAVFEPSEAEISHTQKATLVCLATGFYPDHVELSWWVNGKEVHSGVCTDPQPLKEQPALNDSRYCLSSRLRVSATFWQNPRNHFRCQVQFYGLSENDEWTQDRAKPVTQIVSAEAWGRADCDVKLVEKSFETDTNLNFQNLSVIGFRILLLKVAGFNLLMTLRLWSSRAKRSGSGATNFSLLKQAGDVEENPGPTSATMDWIWRILFLVGAATGAHSGPMGSWLEFYHRLNAIDSRLWALGGSEAELAAFEKEIAAFESELQAYKGKGNPEVESLRDHAAHIREWLQAYRHNGSGGGGSGGGGSGGGGSFEEVQLVESGGGLVQPGGSLRLSCAASGYAFSNYWVNWVRQAPGKGLEWVAQIYPGDGDTNYNGKFKGRFTISRDNSKNTLYLQMNSLRAEDTAVYYCARSITTVVGCAMDYWGQGTLVTVSSTRIQNPDPAVYQLRDSKSSDKSVCLFTDFDSQTNVSQSKDSDVYITDKCVLDMRSMDFKSNSAVAWSNKSDFACANAFNNSIIPEDTFFPSPESSCGFTSESYQQGVLSATILYEILLGKATLYAVLVSALVLMAMVKRKDSRGRAKRSGSGVKQTLNFDLLKLAGDVESNPGPSRGHMTEYKPTVRLATRDDVPRAVRTLAAAFADYPATRHTVDPDRHIERVTELQELFLTRVGLDIGKVWVADDGAAVAVWTTPESVEAGAVFAEIGPRMAELSGSRLAAQQQMEGLLAPHRPKEPAWFLATVGVSPDHQGKGLGSAVVLPGVEAAERAGVPAFLETSAPRNLPFYERLGFTVTADVEVPEGPRTWCMTRKPGA

SEQ ID NO: 46161 - protein, 949 aa, synthetic construct
MALPVTALLLPLALLLHAARPACMGSWFEFYDRLNAIDARLWALGGSEAELAAFEKEIAAFESELQAYKGKGNPEVENLRVHAAAIREWLQAYRHNGTGGGGSGGGGSGGGGSEFDIQMTQSPSSLSASVGDRVTITCKASDHINNWLAWYQQKPGKAPKLLIYGATTLETGVPSRFSGSGSGTDFTLTISSLQPEDFATYYCQQSWNTPWTFGQGTKVEIKRLEDLKNVFPPEVAVFEPSEAEISHTQKATLVCLATGFYPDHVELSWWVNGKEVHSGVCTDPQPLKEQPALNDSRYCLSSRLRVSATFWQNPRNHFRCQVQFYGLSENDEWTQDRAKPVTQIVSAEAWGRADCDVKLVEKSFETDTNLNFQNLSVIGFRILLLKVAGFNLLMTLRLWSSRAKRSGSGATNFSLLKQAGDVEENPGPTSMDWIWRILFLVGAATGAHSFEEVQLVESGGGLVQPGGSLRLSCAASGYAFSNYWVNWVRQAPGKGLEWVAQIYPGDGDTNYNGKFKGRFTISRDNSKNTLYLQMNSLRAEDTAVYYCARSITTVVGCAMDYWGQGTLVTVSSTRIQNPDPAVYQLRDSKSSDKSVCLFTDFDSQTNVSQSKDSDVYITDKCVLDMRSMDFKSNSAVAWSNKSDFACANAFNNSIIPEDTFFPSPESSCGFTSESYQQGVLSATILYEILLGKATLYAVLVSALVLMAMVKRKDSRGRAKRSGSGVKQTLNFDLLKLAGDVESNPGPSRGHMTEYKPTVRLATRDDVPRAVRTLAAAFADYPATRHTVDPDRHIERVTELQELFLTRVGLDIGKVWVADDGAAVAVWTTPESVEAGAVFAEIGPRMAELSGSRLAAQQQMEGLLAPHRPKEPAWFLATVGVSPDHQGKGLGSAVVLPGVEAAERAGVPAFLETSAPRNLPFYERLGFTVTADVEVPEGPRTWCMTRKPGA

SEQ ID NO: 46162 - protein, 1066 aa, synthetic construct
MALPVTALLLPLALLLHAARPACMDPDLEIRAAFLRQRNTALRTEVAELEQEVQRLENEVSQYETRYGPLGGGKGTGGGGSGGGGSGGGGSEFDIQMTQSPSSLSASVGDRVTITCKASDHINNWLAWYQQKPGKAPKLLIYGATTLETGVPSRFSGSGSGTDFTLTISSLQPEDFATYYCQQSWNTPWTFGQGTKVEIKRLEDLKNVFPPEVAVFEPSEAEISHTQKATLVCLATGFYPDHVELSWWVNGKEVHSGVCTDPQPLKEQPALNDSRYCLSSRLRVSATFWQNPRNHFRCQVQFYGLSENDEWTQDRAKPVTQIVSAEAWGRADCDVKLVEKSFETDTNLNFQNLSVIGFRILLLKVAGFNLLMTLRLWSSRAKRSGSGATNFSLLKQAGDVEENPGPTSATMDWIWRILFLVGAATGAHSGPEVQLVESGGGLVQAGGSLRLSCAASGRTFSMGWFRQAPGKEREFVAAITYSGGSPYYADSVKGRFTISRDNAKNTVYLQMNSLKPEDTAVYYCAANPTYGSDWNAENWGQGTQVTVSSGSGGGGSGGGGSGGGGSFEEVQLVESGGGLVQPGGSLRLSCAASGYAFSNYWVNWVRQAPGKGLEWVAQIYPGDGDTNYNGKFKGRFTISRDNSKNTLYLQMNSLRAEDTAVYYCARSITTVVGCAMDYWGQGTLVTVSSTRIQNPDPAVYQLRDSKSSDKSVCLFTDFDSQTNVSQSKDSDVYITDKCVLDMRSMDFKSNSAVAWSNKSDFACANAFNNSIIPEDTFFPSPESSCGFTSESYQQGVLSATILYEILLGKATLYAVLVSALVLMAMVKRKDSRGRAKRSGSGVKQTLNFDLLKLAGDVESNPGPSRGHMTEYKPTVRLATRDDVPRAVRTLAAAFADYPATRHTVDPDRHIERVTELQELFLTRVGLDIGKVWVADDGAAVAVWTTPESVEAGAVFAEIGPRMAELSGSRLAAQQQMEGLLAPHRPKEPAWFLATVGVSPDHQGKGLGSAVVLPGVEAAERAGVPAFLETSAPRNLPFYERLGFTVTADVEVPEGPRTWCMTRKPGA

SEQ ID NO: 46163 - protein, 949 aa, synthetic construct
MALPVTALLLPLALLLHAARPDIQMTQSPSSLSASVGDRVTITCKASDHINNWLAWYQQKPGKAPKLLIYGATTLETGVPSRFSGSGSGTDFTLTISSLQPEDFATYYCQQSWNTPWTFGQGTKVEIKRLEDLKNVFPPEVAVFEPSEAEISHTQKATLVCLATGFYPDHVELSWWVNGKEVHSGVCTDPQPLKEQPALNDSRYCLSSRLRVSATFWQNPRNHFRCQVQFYGLSENDEWTQDRAKPVTQIVSAEAWGRADCDVKLVEKSFETDTNLNFQNLSVIGFRILLLKVAGFNLLMTLRLWSSRAKRSGSGATNFSLLKQAGDVEENPGPTSATMDWIWRILFLVGAATGAHSGPMGSWSEFYDRLHAIHHRLYALGGSEAELAAFEKEIAAFESELQAYKGKGNPEVEALRDTAAFIRTRLQAYRHNGSGGGGSGGGGSGGGGSFEEVQLVESGGGLVQPGGSLRLSCAASGYAFSNYWVNWVRQAPGKGLEWVAQIYPGDGDTNYNGKFKGRFTISRDNSKNTLYLQMNSLRAEDTAVYYCARSITTVVGCAMDYWGQGTLVTVSSTRIQNPDPAVYQLRDSKSSDKSVCLFTDFDSQTNVSQSKDSDVYITDKCVLDMRSMDFKSNSAVAWSNKSDFACANAFNNSIIPEDTFFPSPESSCGFTSESYQQGVLSATILYEILLGKATLYAVLVSALVLMAMVKRKDSRGRAKRSGSGVKQTLNFDLLKLAGDVESNPGPSRGHMTEYKPTVRLATRDDVPRAVRTLAAAFADYPATRHTVDPDRHIERVTELQELFLTRVGLDIGKVWVADDGAAVAVWTTPESVEAGAVFAEIGPRMAELSGSRLAAQQQMEGLLAPHRPKEPAWFLATVGVSPDHQGKGLGSAVVLPGVEAAERAGVPAFLETSAPRNLPFYERLGFTVTADVEVPEGPRTWCMTRKPGA

SEQ ID NO: 46164 - protein, 1159 aa, synthetic construct
MALPVTALLLPLALLLHAARPDIQMTQSPSSLSASVGDRVTITCKASDHINNWLAWYQQKPGKAPKLLIYGATTLETGVPSRFSGSGSGTDFTLTISSLQPEDFATYYCQQSWNTPWTFGQGTKVEIKRLEDLKNVFPPEVAVFEPSEAEISHTQKATLVCLATGFYPDHVELSWWVNGKEVHSGVCTDPQPLKEQPALNDSRYCLSSRLRVSATFWQNPRNHFRCQVQFYGLSENDEWTQDRAKPVTQIVSAEAWGRADCDVKLVEKSFETDTNLNFQNLSVIGFRILLLKVAGFNLLMTLRLWSSRAKRSGSGATNFSLLKQAGDVEENPGPTSTMDWIWRILFLVGAATGAHSLFNQEVQIPLTESYCGPCPKNWICYKNNCYQFFDESKNWYESQASCMSQNASLLKVYSKEDQDLLKLVKSAHWMGLVHIPTNGSWQWEDGSILSPNLLTIIEMQKGDCALYASSFKGYIENCSTPNTYICMQRTVSGGGGSGGGGSGGGGDLFNQEVQIPLTESYCGPCPKNWICYKNNCYQFFDESKNWYESQASCMSQNASLLKVYSKEDQDLLKLVKSAHWMGLVHIPTNGSWQWEDGSILSPNLLTIIEMQKGDCALYASSFKGYIENCSTPNTYICMQRTVGSGGGGSGGGGSGGGGSFEEVQLVESGGGLVQPGGSLRLSCAASGYAFSNYWVNWVRQAPGKGLEWVAQIYPGDGDTNYNGKFKGRFTISRDNSKNTLYLQMNSLRAEDTAVYYCARSITTVVGCAMDYWGQGTLVTVSSTRIQNPDPAVYQLRDSKSSDKSVCLFTDFDSQTNVSQSKDSDVYITDKCVLDMRSMDFKSNSAVAWSNKSDFACANAFNNSIIPEDTFFPSPESSCGFTSESYQQGVLSATILYEILLGKATLYAVLVSALVLMAMVKRKDSRGRAKRSGSGVKQTLNFDLLKLAGDVESNPGPSRGHMTEYKPTVRLATRDDVPRAVRTLAAAFADYPATRHTVDPDRHIERVTELQELFLTRVGLDIGKVWVADDGAAVAVWTTPESVEAGAVFAEIGPRMAELSGSRLAAQQQMEGLLAPHRPKEPAWFLATVGVSPDHQGKGLGSAVVLPGVEAAERAGVPAFLETSAPRNLPFYERLGFTVTADVEVPEGPRTWCMTRKPGA

SEQ ID NO: 46165 - protein, 622 aa, synthetic construct; identical to SEQ ID NO: 46122

SEQ ID NO: 46166 - protein, 626 aa, synthetic construct
MALPVTALLLPLALLLHAARPDIQMTQSPSSLSASVGDRVTITCKASDHINNWLAWYQQKPGKAPKLLIYGATTLETGVPSRFSGSGSGTDFTLTISSLQPEDFATYYCQQSWNTPWTFGQGTKVEIKRLEIQNPDPAVYQLRDSKSSDKSVCLFTDFDSQTNVSQSKDSDVYITDKCVLDMRSMDFKSNSAVAWSNKSDFACANAFNNSIIPEDTFFPSPESSCDVKLVEKSFETDTNLNFQILYEILLGKATLYAVLVSALVLMAMVKRKDSRGRAKRSGSGVKQTLNFDLLKLAGDVESNPGPTSMDWIWRILFLVGAATGAHSFEEVQLVESGGGLVQPGGSLRLSCAASGYAFSNYWVNWVRQAPGKGLEWVAQIYPGDGDTNYNGKFKGRFTISRDNSKNTLYLQMNSLRAEDTAVYYCARSITTVVGCAMDYWGQGTLVTVSSTREDLKNVFPPEVAVFEPSEAEISHTQKATLVCLATGFYPDHVELSWWVNGKEVHSGVCTDPQPLKEQPALNDSRYCLSSRLRVSATFWQNPRNHFRCQVQFYGLSENDEWTQDRAKPVTQIVSAEAWGRADCGFTSESYQQGVLSATNLSVIGFRILLLKVAGFNLLMTLRLWSS

SEQ ID NO: 46167 - protein, 757 aa, synthetic construct
MALPVTALLLPLALLLHAARPEVQLVESGGGLVQPGGSLRLSCAASGFSFSDFWMSWVRQAPGKGLEWVATISQAGSEKDYVDSVKGRFTISRDNAKKSLYLQMNSLRAEDTAVYYCASGVYSFDYRGQGTLVTVSSGTGGGGSGGGGSGGGGSEFDIQMTQSPSSLSASVGDRVTITCKASDHINNWLAWYQQKPGKAPKLLIYGATTLETGVPSRFSGSGSGTDFTLTISSLQPEDFATYYCQQSWNTPWTFGQGTKVEIKRLEDLKNVFPPEVAVFEPSEAEISHTQKATLVCLATGFYPDHVELSWWVNGKEVHSGVCTDPQPLKEQPALNDSRYCLSSRLRVSATFWQNPRNHFRCQVQFYGLSENDEWTQDRAKPVTQIVSAEAWGRADCGFTSESYQQGVLSATNLSVIGFRILLLKVAGFNLLMTLRLWSSRAKRSGSGATNFSLLKQAGDVEENPGPTSMDWIWRILFLVGAATGAHSFEEVQLVESGGGLVQPGGSLRLSCAASGYAFSNYWVNWVRQAPGKGLEWVAQIYPGDGDTNYNGKFKGRFTISRDNSKNTLYLQMNSLRAEDTAVYYCARSITTVVGCAMDYWGQGTLVTVSSTRIQNPDPAVYQLRDSKSSDKSVCLFTDFDSQTNVSQSKDSDVYITDKCVLDMRSMDFKSNSAVAWSNKSDFACANAFNNSIIPEDTFFPSPESSCDVKLVEKSFETDTNLNFQILYEILLGKATLYAVLVSALVLMAMVKRKDSRG

SEQ ID NO: 46168 - protein, 761 aa, synthetic construct
MALPVTALLLPLALLLHAARPEVQLVESGGGLVQPGGSLRLSCAASGFSFSDFWMSWVRQAPGKGLEWVATISQAGSEKDYVDSVKGRFTISRDNAKKSLYLQMNSLRAEDTAVYYCASGVYSFDYRGQGTLVTVSSGTGGGGSGGGGSGGGGSEFDIQMTQSPSSLSASVGDRVTITCKASDHINNWLAWYQQKPGKAPKLLIYGATTLETGVPSRFSGSGSGTDFTLTISSLQPEDFATYYCQQSWNTPWTFGQGTKVEIKRLEIQNPDPAVYQLRDSKSSDKSVCLFTDFDSQTNVSQSKDSDVYITDKCVLDMRSMDFKSNSAVAWSNKSDFACANAFNNSIIPEDTFFPSPESSCDVKLVEKSFETDTNLNFQILYEILLGKATLYAVLVSALVLMAMVKRKDSRGRAKRSGSGVKQTLNFDLLKLAGDVESNPGPTSMDWIWRILFLVGAATGAHSFEEVQLVESGGGLVQPGGSLRLSCAASGYAFSNYWVNWVRQAPGKGLEWVAQIYPGDGDTNYNGKFKGRFTISRDNSKNTLYLQMNSLRAEDTAVYYCARSITTVVGCAMDYWGQGTLVTVSSTREDLKNVFPPEVAVFEPSEAEISHTQKATLVCLATGFYPDHVELSWWVNGKEVHSGVCTDPQPLKEQPALNDSRYCLSSRLRVSATFWQNPRNHFRCQVQFYGLSENDEWTQDRAKPVTQIVSAEAWGRADCGFTSESYQQGVLSATNLSVIGFRILLLKVAGFNLLMTLRLWSS

SEQ ID NO: 46169 - protein, 894 aa, synthetic construct
MALPVTALLLPLALLLHAARPEVQLVESGGGLVQPGGSLRLSCAASGFSFSDFWMSWVRQAPGKGLEWVATISQAGSEKDYVDSVKGRFTISRDNAKKSLYLQMNSLRAEDTAVYYCASGVYSFDYRGQGTLVTVSSGTGGGGSGGGGSGGGGSEFDIQMTQSPSSLSASVGDRVTITCKASDHINNWLAWYQQKPGKAPKLLIYGATTLETGVPSRFSGSGSGTDFTLTISSLQPEDFATYYCQQSWNTPWTFGQGTKVEIKRLEDLKNVFPPEVAVFEPSEAEISHTQKATLVCLATGFYPDHVELSWWVNGKEVHSGVCTDPQPLKEQPALNDSRYCLSSRLRVSATFWQNPRNHFRCQVQFYGLSENDEWTQDRAKPVTQIVSAEAWGRADCGFTSESYQQGVLSATNLSVIGFRILLLKVAGFNLLMTLRLWSSRAKRSGSGATNFSLLKQAGDVEENPGPTSMDWIWRILFLVGAATGAHSGPQLQLQESGPGLVKPSETLSLTCTVSGDSISSGDYYWGWIRQPPGKGLEWIGHIYYSGVTYYNPSLKSRVTISVDTSRNQFSLKLSSVTAADTAVYYCTREDSSNWRSRGQGTLVTVSSGSGGGGSGGGGSGGGGSFEEVQLVESGGGLVQPGGSLRLSCAASGYAFSNYWVNWVRQAPGKGLEWVAQIYPGDGDTNYNGKFKGRFTISRDNSKNTLYLQMNSLRAEDTAVYYCARSITTVVGCAMDYWGQGTLVTVSSTRIQNPDPAVYQLRDSKSSDKSVCLFTDFDSQTNVSQSKDSDVYITDKCVLDMRSMDFKSNSAVAWSNKSDFACANAFNNSIIPEDTFFPSPESSCDVKLVEKSFETDTNLNFQILYEILLGKATLYAVLVSALVLMAMVKRKDSRG

SEQ ID NO: 46170 - protein, 898 aa, synthetic construct
MALPVTALLLPLALLLHAARPEVQLVESGGGLVQPGGSLRLSCAASGFSFSDFWMSWVRQAPGKGLEWVATISQAGSEKDYVDSVKGRFTISRDNAKKSLYLQMNSLRAEDTAVYYCASGVYSFDYRGQGTLVTVSSGTGGGGSGGGGSGGGGSEFDIQMTQSPSSLSASVGDRVTITCKASDHINNWLAWYQQKPGKAPKLLIYGATTLETGVPSRFSGSGSGTDFTLTISSLQPEDFATYYCQQSWNTPWTFGQGTKVEIKRLEIQNPDPAVYQLRDSKSSDKSVCLFTDFDSQTNVSQSKDSDVYITDKCVLDMRSMDFKSNSAVAWSNKSDFACANAFNNSIIPEDTFFPSPESSCDVKLVEKSFETDTNLNFQILYEILLGKATLYAVLVSALVLMAMVKRKDSRGRAKRSGSGVKQTLNFDLLKLAGDVESNPGPTSMDWIWRILFLVGAATGAHSGPQLQLQESGPGLVKPSETLSLTCTVSGDSISSGDYYWGWIRQPPGKGLEWIGHIYYSGVTYYNPSLKSRVTISVDTSRNQFSLKLSSVTAADTAVYYCTREDSSNWRSRGQGTLVTVSSGSGGGGSGGGGSGGGGSFEEVQLVESGGGLVQPGGSLRLSCAASGYAFSNYWVNWVRQAPGKGLEWVAQIYPGDGDTNYNGKFKGRFTISRDNSKNTLYLQMNSLRAEDTAVYYCARSITTVVGCAMDYWGQGTLVTVSSTREDLKNVFPPEVAVFEPSEAEISHTQKATLVCLATGFYPDHVELSWWVNGKEVHSGVCTDPQPLKEQPALNDSRYCLSSRLRVSATFWQNPRNHFRCQVQFYGLSENDEWTQDRAKPVTQIVSAEAWGRADCGFTSESYQQGVLSATNLSVIGFRILLLKVAGFNLLMTLRLWSS

SEQ ID NO: 46171 - protein, 726 aa, synthetic construct
MALPVTALLLPLALLLHAARPDIQMTQSPSSLSASVGDRVTITCKASDHINNWLAWYQQKPGKAPKLLIYGATTLETGVPSRFSGSGSGTDFTLTISSLQPEDFATYYCQQSWNTPWTFGQGTKVEIKRLEDLKNVFPPEVAVFEPSEAEISHTQKATLVCLATGFYPDHVELSWWVNGKEVHSGVCTDPQPLKEQPALNDSRYCLSSRLRVSATFWQNPRNHFRCQVQFYGLSENDEWTQDRAKPVTQIVSAEAWGRADDVIKIHWQEKKSNTILGSQEGNTMKTNDTYMKFSWLTVPEKSLDKEHRCIVRHENNKNGVDQEIIFPPIKTDVITMDPKDNCSKDANDTLLLQLTNTSAYYMYLLLLLKSVVYFAIITCCLLMAMVKRKDSRGRAKRSGSGATNFSLLKQAGDVEENPGPTSMDWIWRILFLVGAATGAHSFEEVQLVESGGGLVQPGGSLRLSCAASGYAFSNYWVNWVRQAPGKGLEWVAQIYPGDGDTNYNGKFKGRFTISRDNSKNTLYLQMNSLRAEDTAVYYCARSITTVVGCAMDYWGQGTLVTVSSTRIQNPDPAVYQLRDSKSSDKSVCLFTDFDSQTNVSQSKDSDVYITDKCVLDMRSMDFKSNSAVAWSNKSDFACANAFNNSIIPEDTFFPSPESSDSTDHVKPKETENTKQPSKSCHKPKAIVHTEKVNMMSLTVLGLRMLFAKTVAVNFLLTAKLFFLLTA

SEQ ID NO: 46172 - protein, 730 aa, synthetic construct
MALPVTALLLPLALLLHAARPDIQMTQSPSSLSASVGDRVTITCKASDHINNWLAWYQQKPGKAPKLLIYGATTLETGVPSRFSGSGSGTDFTLTISSLQPEDFATYYCQQSWNTPWTFGQGTKVEIKRLEIQNPDPAVYQLRDSKSSDKSVCLFTDFDSQTNVSQSKDSDVYITDKCVLDMRSMDFKSNSAVAWSNKSDFACANAFNNSIIPEDTFFPSPESSDSTDHVKPKETENTKQPSKSCHKPKAIVHTEKVNMMSLTVLGLRMLFAKTVAVNFLLTAKLFFLLTARAKRSGSGVKQTLNFDLLKLAGDVESNPGPTSMDWIWRILFLVGAATGAHSFEEVQLVESGGGLVQPGGSLRLSCAASGYAFSNYWVNWVRQAPGKGLEWVAQIYPGDGDTNYNGKFKGRFTISRDNSKNTLYLQMNSLRAEDTAVYYCARSITTVVGCAMDYWGQGTLVTVSSTREDLKNVFPPEVAVFEPSEAEISHTQKATLVCLATGFYPDHVELSWWVNGKEVHSGVCTDPQPLKEQPALNDSRYCLSSRLRVSATFWQNPRNHFRCQVQFYGLSENDEWTQDRAKPVTQIVSAEAWGRADDVIKIHWQEKKSNTILGSQEGNTMKTNDTYMKFSWLTVPEKSLDKEHRCIVRHENNKNGVDQEIIFPPIKTDVITMDPKDNCSKDANDTLLLQLTNTSAYYMYLLLLLKSVVYFAIITCCLLMAMVKRKDSRG

SEQ ID NO: 46173 - protein, 861 aa, synthetic construct
MALPVTALLLPLALLLHAARPEVQLVESGGGLVQPGGSLRLSCAASGFSFSDFWMSWVRQAPGKGLEWVATISQAGSEKDYVDSVKGRFTISRDNAKKSLYLQMNSLRAEDTAVYYCASGVYSFDYRGQGTLVTVSSGTGGGGSGGGGSGGGGSEFDIQMTQSPSSLSASVGDRVTITCKASDHINNWLAWYQQKPGKAPKLLIYGATTLETGVPSRFSGSGSGTDFTLTISSLQPEDFATYYCQQSWNTPWTFGQGTKVEIKRLEDLKNVFPPEVAVFEPSEAEISHTQKATLVCLATGFYPDHVELSWWVNGKEVHSGVCTDPQPLKEQPALNDSRYCLSSRLRVSATFWQNPRNHFRCQVQFYGLSENDEWTQDRAKPVTQIVSAEAWGRADDVIKIHWQEKKSNTILGSQEGNTMKTNDTYMKFSWLTVPEKSLDKEHRCIVRHENNKNGVDQEIIFPPIKTDVITMDPKDNCSKDANDTLLLQLTNTSAYYMYLLLLLKSVVYFAIITCCLLMAMVKRKDSRGRAKRSGSGATNFSLLKQAGDVEENPGPTSMDWIWRILFLVGAATGAHSFEEVQLVESGGGLVQPGGSLRLSCAASGYAFSNYWVNWVRQAPGKGLEWVAQIYPGDGDTNYNGKFKGRFTISRDNSKNTLYLQMNSLRAEDTAVYYCARSITTVVGCAMDYWGQGTLVTVSSTRIQNPDPAVYQLRDSKSSDKSVCLFTDFDSQTNVSQSKDSDVYITDKCVLDMRSMDFKSNSAVAWSNKSDFACANAFNNSIIPEDTFFPSPESSDSTDHVKPKETENTKQPSKSCHKPKAIVHTEKVNMMSLTVLGLRMLFAKTVAVNFLLTAKLFFLLTA

SEQ ID NO: 46174 - protein, 865 aa, synthetic construct
MALPVTALLLPLALLLHAARPEVQLVESGGGLVQPGGSLRLSCAASGFSFSDFWMSWVRQAPGKGLEWVATISQAGSEKDYVDSVKGRFTISRDNAKKSLYLQMNSLRAEDTAVYYCASGVYSFDYRGQGTLVTVSSGTGGGGSGGGGSGGGGSEFDIQMTQSPSSLSASVGDRVTITCKASDHINNWLAWYQQKPGKAPKLLIYGATTLETGVPSRFSGSGSGTDFTLTISSLQPEDFATYYCQQSWNTPWTFGQGTKVEIKRLEIQNPDPAVYQLRDSKSSDKSVCLFTDFDSQTNVSQSKDSDVYITDKCVLDMRSMDFKSNSAVAWSNKSDFACANAFNNSIIPEDTFFPSPESSDSTDHVKPKETENTKQPSKSCHKPKAIVHTEKVNMMSLTVLGLRMLFAKTVAVNFLLTAKLFFLLTARAKRSGSGVKQTLNFDLLKLAGDVESNPGPTSMDWIWRILFLVGAATGAHSFEEVQLVESGGGLVQPGGSLRLSCAASGYAFSNYWVNWVRQAPGKGLEWVAQIYPGDGDTNYNGKFKGRFTISRDNSKNTLYLQMNSLRAEDTAVYYCARSITTVVGCAMDYWGQGTLVTVSSTREDLKNVFPPEVAVFEPSEAEISHTQKATLVCLATGFYPDHVELSWWVNGKEVHSGVCTDPQPLKEQPALNDSRYCLSSRLRVSATFWQNPRNHFRCQVQFYGLSENDEWTQDRAKPVTQIVSAEAWGRADDVIKIHWQEKKSNTILGSQEGNTMKTNDTYMKFSWLTVPEKSLDKEHRCIVRHENNKNGVDQEIIFPPIKTDVITMDPKDNCSKDANDTLLLQLTNTSAYYMYLLLLLKSVVYFAIITCCLLMAMVKRKDSRG

SEQ ID NO: 46175 - protein, 998 aa, synthetic construct
MALPVTALLLPLALLLHAARPEVQLVESGGGLVQPGGSLRLSCAASGFSFSDFWMSWVRQAPGKGLEWVATISQAGSEKDYVDSVKGRFTISRDNAKKSLYLQMNSLRAEDTAVYYCASGVYSFDYRGQGTLVTVSSGTGGGGSGGGGSGGGGSEFDIQMTQSPSSLSASVGDRVTITCKASDHINNWLAWYQQKPGKAPKLLIYGATTLETGVPSRFSGSGSGTDFTLTISSLQPEDFATYYCQQSWNTPWTFGQGTKVEIKRLEDLKNVFPPEVAVFEPSEAEISHTQKATLVCLATGFYPDHVELSWWVNGKEVHSGVCTDPQPLKEQPALNDSRYCLSSRLRVSATFWQNPRNHFRCQVQFYGLSENDEWTQDRAKPVTQIVSAEAWGRADDVIKIHWQEKKSNTILGSQEGNTMKTNDTYMKFSWLTVPEKSLDKEHRCIVRHENNKNGVDQEIIFPPIKTDVITMDPKDNCSKDANDTLLLQLTNTSAYYMYLLLLLKSVVYFAIITCCLLMAMVKRKDSRGRAKRSGSGATNFSLLKQAGDVEENPGPTSMDWIWRILFLVGAATGAHSGPQLQLQESGPGLVKPSETLSLTCTVSGDSISSGDYYWGWIRQPPGKGLEWIGHIYYSGVTYYNPSLKSRVTISVDTSRNQFSLKLSSVTAADTAVYYCTREDSSNWRSRGQGTLVTVSSGSGGGGSGGGGSGGGGSFEEVQLVESGGGLVQPGGSLRLSCAASGYAFSNYWVNWVRQAPGKGLEWVAQIYPGDGDTNYNGKFKGRFTISRDNSKNTLYLQMNSLRAEDTAVYYCARSITTVVGCAMDYWGQGTLVTVSSTRIQNPDPAVYQLRDSKSSDKSVCLFTDFDSQTNVSQSKDSDVYITDKCVLDMRSMDFKSNSAVAWSNKSDFACANAFNNSIIPEDTFFPSPESSDSTDHVKPKETENTKQPSKSCHKPKAIVHTEKVNMMSLTVLGLRMLFAKTVAVNFLLTAKLFFLLTA

SEQ ID NO: 46176 - protein, 1002 aa, synthetic construct
MALPVTALLLPLALLLHAARPEVQLVESGGGLVQPGGSLRLSCAASGFSFSDFWMSWVRQAPGKGLEWVATISQAGSEKDYVDSVKGRFTISRDNAKKSLYLQMNSLRAEDTAVYYCASGVYSFDYRGQGTLVTVSSGTGGGGSGGGGSGGGGSEFDIQMTQSPSSLSASVGDRVTITCKASDHINNWLAWYQQKPGKAPKLLIYGATTLETGVPSRFSGSGSGTDFTLTISSLQPEDFATYYCQQSWNTPWTFGQGTKVEIKRLEIQNPDPAVYQLRDSKSSDKSVCLFTDFDSQTNVSQSKDSDVYITDKCVLDMRSMDFKSNSAVAWSNKSDFACANAFNNSIIPEDTFFPSPESSDSTDHVKPKETENTKQPSKSCHKPKAIVHTEKVNMMSLTVLGLRMLFAKTVAVNFLLTAKLFFLLTARAKRSGSGVKQTLNFDLLKLAGDVESNPGPTSMDWIWRILFLVGAATGAHSGPQLQLQESGPGLVKPSETLSLTCTVSGDSISSGDYYWGWIRQPPGKGLEWIGHIYYSGVTYYNPSLKSRVTISVDTSRNQFSLKLSSVTAADTAVYYCTREDSSNWRSRGQGTLVTVSSGSGGGGSGGGGSGGGGSFEEVQLVESGGGLVQPGGSLRLSCAASGYAFSNYWVNWVRQAPGKGLEWVAQIYPGDGDTNYNGKFKGRFTISRDNSKNTLYLQMNSLRAEDTAVYYCARSITTVVGCAMDYWGQGTLVTVSSTREDLKNVFPPEVAVFEPSEAEISHTQKATLVCLATGFYPDHVELSWWVNGKEVHSGVCTDPQPLKEQPALNDSRYCLSSRLRVSATFWQNPRNHFRCQVQFYGLSENDEWTQDRAKPVTQIVSAEAWGRADDVIKIHWQEKKSNTILGSQEGNTMKTNDTYMKFSWLTVPEKSLDKEHRCIVRHENNKNGVDQEIIFPPIKTDVITMDPKDNCSKDANDTLLLQLTNTSAYYMYLLLLLKSVVYFAIITCCLLMAMVKRKDSRG

SEQ ID NO: 46177 - protein, 724 aa, synthetic construct
MALPVTALLLPLALLLHAARPDIQMTQSPSSLSASVGDRVTITCKASDHINNWLAWYQQKPGKAPKLLIYGATTLETGVPSRFSGSGSGTDFTLTISSLQPEDFATYYCQQSWNTPWTFGQGTKVEIKRLEDLKNVFPPEVAVFEPSEAEISHTQKATLVCLATGFYPDHVELSWWVNGKEVHSGVCTDPQPLKEQPALNDSRYCLSSRLRVSATFWQNPRNHFRCQVQFYGLSENDEWTQDRAKPVTQIVSAEAWGRADDVIKIHWQEKKSNTILGSQEGNTMKTNDTYMKFSWLTVPEKSLDKEHRCIVRHENNKNGVDQEIIFPPIKTDVITMDPKDNCSKDANDTLLLQLTNTSAYYMYLLLLLKSVVYFAIITCCLLRRTAFCCNGEKSRAKRSGSGATNFSLLKQAGDVEENPGPTSMDWIWRILFLVGAATGAHSFEEVQLVESGGGLVQPGGSLRLSCAASGYAFSNYWVNWVRQAPGKGLEWVAQIYPGDGDTNYNGKFKGRFTISRDNSKNTLYLQMNSLRAEDTAVYYCARSITTVVGCAMDYWGQGTLVTVSSTRIQNPDPAVYQLRDSKSSDKSVCLFTDFDSQTNVSQSKDSDVYITDKCVLDMRSMDFKSNSAVAWSNKSDFACANAFNNSIIPEDTFFPSPESSDSTDHVKPKETENTKQPSKSCHKPKAIVHTEKVNMMSLTVLGLRMLFAKTVAVNFLLTAKLFFL

SEQ ID NO: 46178 - protein, 728 aa, synthetic construct
MALPVTALLLPLALLLHAARPDIQMTQSPSSLSASVGDRVTITCKASDHINNWLAWYQQKPGKAPKLLIYGATTLETGVPSRFSGSGSGTDFTLTISSLQPEDFATYYCQQSWNTPWTFGQGTKVEIKRLEIQNPDPAVYQLRDSKSSDKSVCLFTDFDSQTNVSQSKDSDVYITDKCVLDMRSMDFKSNSAVAWSNKSDFACANAFNNSIIPEDTFFPSPESSDSTDHVKPKETENTKQPSKSCHKPKAIVHTEKVNMMSLTVLGLRMLFAKTVAVNFLLTAKLFFLRAKRSGSGVKQTLNFDLLKLAGDVESNPGPTSMDWIWRILFLVGAATGAHSFEEVQLVESGGGLVQPGGSLRLSCAASGYAFSNYWVNWVRQAPGKGLEWVAQIYPGDGDTNYNGKFKGRFTISRDNSKNTLYLQMNSLRAEDTAVYYCARSITTVVGCAMDYWGQGTLVTVSSTREDLKNVFPPEVAVFEPSEAEISHTQKATLVCLATGFYPDHVELSWWVNGKEVHSGVCTDPQPLKEQPALNDSRYCLSSRLRVSATFWQNPRNHFRCQVQFYGLSENDEWTQDRAKPVTQIVSAEAWGRADDVIKIHWQEKKSNTILGSQEGNTMKTNDTYMKFSWLTVPEKSLDKEHRCIVRHENNKNGVDQEIIFPPIKTDVITMDPKDNCSKDANDTLLLQLTNTSAYYMYLLLLLKSVVYFAIITCCLLRRTAFCCNGEKS

SEQ ID NO: 46179 - protein, 859 aa, synthetic construct
MALPVTALLLPLALLLHAARPEVQLVESGGGLVQPGGSLRLSCAASGFSFSDFWMSWVRQAPGKGLEWVATISQAGSEKDYVDSVKGRFTISRDNAKKSLYLQMNSLRAEDTAVYYCASGVYSFDYRGQGTLVTVSSGTGGGGSGGGGSGGGGSEFDIQMTQSPSSLSASVGDRVTITCKASDHINNWLAWYQQKPGKAPKLLIYGATTLETGVPSRFSGSGSGTDFTLTISSLQPEDFATYYCQQSWNTPWTFGQGTKVEIKRLEDLKNVFPPEVAVFEPSEAEISHTQKATLVCLATGFYPDHVELSWWVNGKEVHSGVCTDPQPLKEQPALNDSRYCLSSRLRVSATFWQNPRNHFRCQVQFYGLSENDEWTQDRAKPVTQIVSAEAWGRADDVIKIHWQEKKSNTILGSQEGNTMKTNDTYMKFSWLTVPEKSLDKEHRCIVRHENNKNGVDQEIIFPPIKTDVITMDPKDNCSKDANDTLLLQLTNTSAYYMYLLLLLKSVVYFAIITCCLLRRTAFCCNGEKSRAKRSGSGATNFSLLKQAGDVEENPGPTSMDWIWRILFLVGAATGAHSFEEVQLVESGGGLVQPGGSLRLSCAASGYAFSNYWVNWVRQAPGKGLEWVAQIYPGDGDTNYNGKFKGRFTISRDNSKNTLYLQMNSLRAEDTAVYYCARSITTVVGCAMDYWGQGTLVTVSSTRIQNPDPAVYQLRDSKSSDKSVCLFTDFDSQTNVSQSKDSDVYITDKCVLDMRSMDFKSNSAVAWSNKSDFACANAFNNSIIPEDTFFPSPESSDSTDHVKPKETENTKQPSKSCHKPKAIVHTEKVNMMSLTVLGLRMLFAKTVAVNFLLTAKLFFL

SEQ ID NO: 46180 - protein, 996 aa, synthetic construct
MALPVTALLLPLALLLHAARPEVQLVESGGGLVQPGGSLRLSCAASGFSFSDFWMSWVRQAPGKGLEWVATISQAGSEKDYVDSVKGRFTISRDNAKKSLYLQMNSLRAEDTAVYYCASGVYSFDYRGQGTLVTVSSGTGGGGSGGGGSGGGGSEFDIQMTQSPSSLSASVGDRVTITCKASDHINNWLAWYQQKPGKAPKLLIYGATTLETGVPSRFSGSGSGTDFTLTISSLQPEDFATYYCQQSWNTPWTFGQGTKVEIKRLEDLKNVFPPEVAVFEPSEAEISHTQKATLVCLATGFYPDHVELSWWVNGKEVHSGVCTDPQPLKEQPALNDSRYCLSSRLRVSATFWQNPRNHFRCQVQFYGLSENDEWTQDRAKPVTQIVSAEAWGRADDVIKIHWQEKKSNTILGSQEGNTMKTNDTYMKFSWLTVPEKSLDKEHRCIVRHENNKNGVDQEIIFPPIKTDVITMDPKDNCSKDANDTLLLQLTNTSAYYMYLLLLLKSVVYFAIITCCLLRRTAFCCNGEKSRAKRSGSGATNFSLLKQAGDVEENPGPTSMDWIWRILFLVGAATGAHSGPQLQLQESGPGLVKPSETLSLTCTVSGDSISSGDYYWGWIRQPPGKGLEWIGHIYYSGVTYYNPSLKSRVTISVDTSRNQFSLKLSSVTAADTAVYYCTREDSSNWRSRGQGTLVTVSSGSGGGGSGGGGSGGGGSFEEVQLVESGGGLVQPGGSLRLSCAASGYAFSNYWVNWVRQAPGKGLEWVAQIYPGDGDTNYNGKFKGRFTISRDNSKNTLYLQMNSLRAEDTAVYYCARSITTVVGCAMDYWGQGTLVTVSSTRIQNPDPAVYQLRDSKSSDKSVCLFTDFDSQTNVSQSKDSDVYITDKCVLDMRSMDFKSNSAVAWSNKSDFACANAFNNSIIPEDTFFPSPESSDSTDHVKPKETENTKQPSKSCHKPKAIVHTEKVNMMSLTVLGLRMLFAKTVAVNFLLTAKLFFL

SEQ ID NO: 46181 - protein, 622 aa, synthetic construct
MALPVTALLLPLALLLHAARPDIQMTQSPSSLSASVGDRVTITCKASDHINNWLAWYQQKPGKAPKLLIYGATTLETGVPSRFSGSGSGTDFTLTISSLQPEDFATYYCQQSWNTPWTFGQGTKVEIKRLEDLKNVFPPEVAVFEPSEAEISHTQKATLVCLATGFYPDHVELSWWVNGKEVHSGVSTDPQPLKEQPALNDSRYCLSSRLRVSATFWQNPRNHFRCQVQFYGLSENDEWTQDRAKPVTQIVSAEAWGRADCDVKLVEKSFETDTNLNFQNLSVIGFRILLLKVAGFNLLMTLRLWSSRAKRSGSGATNFSLLKQAGDVEENPGPTSMDWIWRILFLVGAATGAHSFEEVQLVESGGGLVQPGGSLRLSCAASGYAFSNYWVNWVRQAPGKGLEWVAQIYPGDGDTNYNGKFKGRFTISRDNSKNTLYLQMNSLRAEDTAVYYCARSITTVVGCAMDYWGQGTLVTVSSTRIQNPDPAVYQLRDSKSSDKSVCLFTDFDSQTNVSQSKDSDVYITDKTVLDMRSMDFKSNSAVAWSNKSDFACANAFNNSIIPEDTFFPSPESSCGFTSESYQQGVLSATILYEILLGKATLYAVLVSALVLMAMVKRKDSRG

SEQ ID NO: 46182 - protein, 622 aa, synthetic construct
MALPVTALLLPLALLLHAARPDIQMTQSPSSLSASVGDRVTITCKASDHINNWLAWYQQKPGKAPKLLIYGATTLETGVPSRFSGSGSGTDFTLTISSLQPEDFATYYCQQSWNTPWTFGQGTKVEIKRLEDLKNVFPPEVAVFEPSEAEISHTQKATLVCLATGFYPDHVELSWWVNGKEVHSGVSTDPQPLKEQPALNDSRYCLSSRLRVSATFWQNPRNHFRCQVQFYGLSENDEWTQDRAKPVTQIVSAEAWGRADCGFTSESYQQGVLSATNLSVIGFRILLLKVAGFNLLMTLRLWSSRAKRSGSGATNFSLLKQAGDVEENPGPTSMDWIWRILFLVGAATGAHSFEEVQLVESGGGLVQPGGSLRLSCAASGYAFSNYWVNWVRQAPGKGLEWVAQIYPGDGDTNYNGKFKGRFTISRDNSKNTLYLQMNSLRAEDTAVYYCARSITTVVGCAMDYWGQGTLVTVSSTRIQNPDPAVYQLRDSKSSDKSVCLFTDFDSQTNVSQSKDSDVYITDKTVLDMRSMDFKSNSAVAWSNKSDFACANAFNNSIIPEDTFFPSPESSCDVKLVEKSFETDTNLNFQILYEILLGKATLYAVLVSALVLMAMVKRKDSRG

SEQ ID NO: 46183 - protein, 726 aa, synthetic construct
MALPVTALLLPLALLLHAARPDIQMTQSPSSLSASVGDRVTITCKASDHINNWLAWYQQKPGKAPKLLIYGATTLETGVPSRFSGSGSGTDFTLTISSLQPEDFATYYCQQSWNTPWTFGQGTKVEIKRLEDLKNVFPPEVAVFEPSEAEISHTQKATLVCLATGFYPDHVELSWWVNGKEVHSGVSTDPQPLKEQPALNDSRYCLSSRLRVSATFWQNPRNHFRCQVQFYGLSENDEWTQDRAKPVTQIVSAEAWGRADDVIKIHWQEKKSNTILGSQEGNTMKTNDTYMKFSWLTVPEKSLDKEHRCIVRHENNKNGVDQEIIFPPIKTDVITMDPKDNCSKDANDTLLLQLTNTSAYYMYLLLLLKSVVYFAIITCCLLMAMVKRKDSRGRAKRSGSGATNFSLLKQAGDVEENPGPTSMDWIWRILFLVGAATGAHSFEEVQLVESGGGLVQPGGSLRLSCAASGYAFSNYWVNWVRQAPGKGLEWVAQIYPGDGDTNYNGKFKGRFTISRDNSKNTLYLQMNSLRAEDTAVYYCARSITTVVGCAMDYWGQGTLVTVSSTRIQNPDPAVYQLRDSKSSDKSVCLFTDFDSQTNVSQSKDSDVYITDKTVLDMRSMDFKSNSAVAWSNKSDFACANAFNNSIIPEDTFFPSPESSDSTDHVKPKETENTKQPSKSCHKPKAIVHTEKVNMMSLTVLGLRMLFAKTVAVNFLLTAKLFFLLTA

SEQ ID NO: 46184 - protein, 724 aa, synthetic construct
MALPVTALLLPLALLLHAARPDIQMTQSPSSLSASVGDRVTITCKASDHINNWLAWYQQKPGKAPKLLIYGATTLETGVPSRFSGSGSGTDFTLTISSLQPEDFATYYCQQSWNTPWTFGQGTKVEIKRLEDLKNVFPPEVAVFEPSEAEISHTQKATLVCLATGFYPDHVELSWWVNGKEVHSGVSTDPQPLKEQPALNDSRYCLSSRLRVSATFWQNPRNHFRCQVQFYGLSENDEWTQDRAKPVTQIVSAEAWGRADDVIKIHWQEKKSNTILGSQEGNTMKTNDTYMKFSWLTVPEKSLDKEHRCIVRHENNKNGVDQEIIFPPIKTDVITMDPKDNCSKDANDTLLLQLTNTSAYYMYLLLLLKSVVYFAIITCCLLRRTAFCCNGEKSRAKRSGSGATNFSLLKQAGDVEENPGPTSMDWIWRILFLVGAATGAHSFEEVQLVESGGGLVQPGGSLRLSCAASGYAFSNYWVNWVRQAPGKGLEWVAQIYPGDGDTNYNGKFKGRFTISRDNSKNTLYLQMNSLRAEDTAVYYCARSITTVVGCAMDYWGQGTLVTVSSTRIQNPDPAVYQLRDSKSSDKSVCLFTDFDSQTNVSQSKDSDVYITDKTVLDMRSMDFKSNSAVAWSNKSDFACANAFNNSIIPEDTFFPSPESSDSTDHVKPKETENTKQPSKSCHKPKAIVHTEKVNMMSLTVLGLRMLFAKTVAVNFLLTAKLFFL

SEQ ID NO: 46185 - protein, 867 aa, synthetic construct
MALPVTALLLPLALLLHAARPLEEDLKNVFPPEVAVFEPSEAEISHTQKATLVCLATGFYPDHVELSWWVNGKEVHSGVCTDPQPLKEQPALNDSRYCLSSRLRVSATFWQNPRNHFRCQVQFYGLSENDEWTQDRAKPVTQIVSAEAWGRADCGFTSESYQQGVLSATNLSVIGFRILLLKVAGFNLLMTLRLWSSRAKRSGSGATNFSLLKQAGDVEENPGPTSMALPVTALLLPLALLLHAARPDIQMTQSPSSLSASVGDRVTITCKASDHINNWLAWYQQKPGKAPKLLIYGATTLETGVPSRFSGSGSGTDFTLTISSLQPEDFATYYCQQSWNTPWTFGQGTKVEIKRGGGGSGGGGSGGGGSEVQLVESGGGLVQPGGSLRLSCAASGYAFSNYWVNWVRQAPGKGLEWVAQIYPGDGDTNYNGKFKGRFTISRDNSKNTLYLQMNSLRAEDTAVYYCARSITTVVGCAMDYWGQGTLVTVSSTRIQNPDPAVYQLRDSKSSDKSVCLFTDFDSQTNVSQSKDSDVYITDKCVLDMRSMDFKSNSAVAWSNKSDFACANAFNNSIIPEDTFFPSPESSCDVKLVEKSFETDTNLNFQILYEVIGFRILLLKVAGFNLLMTLRLWSSRAKRSGSGVKQTLNFDLLKLAGDVESNPGPSRGHMTEYKPTVRLATRDDVPRAVRTLAAAFADYPATRHTVDPDRHIERVTELQELFLTRVGLDIGKVWVADDGAAVAVWTTPESVEAGAVFAEIGPRMAELSGSRLAAQQQMEGLLAPHRPKEPAWFLATVGVSPDHQGKGLGSAVVLPGVEAAERAGVPAFLETSAPRNLPFYERLGFTVTADVEVPEGPRTWCMTRKPGA

SEQ ID NO: 46186 - protein, 867 aa, synthetic construct
MALPVTALLLPLALLLHAARPLEIQNPDPAVYQLRDSKSSDKSVCLFTDFDSQTNVSQSKDSDVYITDKCVLDMRSMDFKSNSAVAWSNKSDFACANAFNNSIIPEDTFFPSPESSCDVKLVEKSFETDTNLNFQILYEVIGFRILLLKVAGFNLLMTLRLWSSRAKRSGSGATNFSLLKQAGDVEENPGPTSMALPVTALLLPLALLLHAARPDIQMTQSPSSLSASVGDRVTITCKASDHINNWLAWYQQKPGKAPKLLIYGATTLETGVPSRFSGSGSGTDFTLTISSLQPEDFATYYCQQSWNTPWTFGQGTKVEIKRGGGGSGGGGSGGGGSEVQLVESGGGLVQPGGSLRLSCAASGYAFSNYWVNWVRQAPGKGLEWVAQIYPGDGDTNYNGKFKGRFTISRDNSKNTLYLQMNSLRAEDTAVYYCARSITTVVGCAMDYWGQGTLVTVSSTREDLKNVFPPEVAVFEPSEAEISHTQKATLVCLATGFYPDHVELSWWVNGKEVHSGVCTDPQPLKEQPALNDSRYCLSSRLRVSATFWQNPRNHFRCQVQFYGLSENDEWTQDRAKPVTQIVSAEAWGRADCGFTSESYQQGVLSATNLSVIGFRILLLKVAGFNLLMTLRLWSSRAKRSGSGVKQTLNFDLLKLAGDVESNPGPSRGHMTEYKPTVRLATRDDVPRAVRTLAAAFADYPATRHTVDPDRHIERVTELQELFLTRVGLDIGKVWVADDGAAVAVWTTPESVEAGAVFAEIGPRMAELSGSRLAAQQQMEGLLAPHRPKEPAWFLATVGVSPDHQGKGLGSAVVLPGVEAAERAGVPAFLETSAPRNLPFYERLGFTVTADVEVPEGPRTWCMTRKPGA

SEQ ID NO: 46187 - protein, 867 aa, synthetic construct; identical to SEQ ID NO: 46185

SEQ ID NO: 46188 - protein, 975 aa, synthetic construct
MALPVTALLLPLALLLHAARPLEEDLKNVFPPEVAVFEPSEAEISHTQKATLVCLATGFYPDHVELSWWVNGKEVHSGVSTDPQPLKEQPALNDSRYCLSSRLRVSATFWQNPRNHFRCQVQFYGLSENDEWTQDRAKPVTQIVSAEAWGRADDVIKIHWQEKKSNTILGSQEGNTMKTNDTYMKFSWLTVPEKSLDKEHRCIVRHENNKNGVDQEIIFPPIKTDVITMDPKDNCSKDANDTLLLQLTNTSAYYMYLLLLLKSVVYFAIITCCLLMAMVKRKDSRGRAKRSGSGATNFSLLKQAGDVEENPGPTSMALPVTALLLPLALLLHAARPDIQMTQSPSSLSASVGDRVTITCKASDHINNWLAWYQQKPGKAPKLLIYGATTLETGVPSRFSGSGSGTDFTLTISSLQPEDFATYYCQQSWNTPWTFGQGTKVEIKRGGGGSGGGGSGGGGSEVQLVESGGGLVQPGGSLRLSCAASGYAFSNYWVNWVRQAPGKGLEWVAQIYPGDGDTNYNGKFKGRFTISRDNSKNTLYLQMNSLRAEDTAVYYCARSITTVVGCAMDYWGQGTLVTVSSTRIQNPDPAVYQLRDSKSSDKSVCLFTDFDSQTNVSQSKDSDVYITDKTVLDMRSMDFKSNSAVAWSNKSDFACANAFNNSIIPEDTFFPSPESSDSTDHVKPKETENTKQPSKSCHKPKAIVHTEKVNMMSLTVLGLRMLFAKTVAVNFLLTAKLFFLLTARAKRSGSGVKQTLNFDLLKLAGDVESNPGPSRGHMTEYKPTVRLATRDDVPRAVRTLAAAFADYPATRHTVDPDRHIERVTELQELFLTRVGLDIGKVWVADDGAAVAVWTTPESVEAGAVFAEIGPRMAELSGSRLAAQQQMEGLLAPHRPKEPAWFLATVGVSPDHQGKGLGSAVVLPGVEAAERAGVPAFLETSAPRNLPFYERLGFTVTADVEVPEGPRTWCMTRKPGA

SEQ ID NO: 46189 - protein, 975 aa, synthetic construct
MALPVTALLLPLALLLHAARPLEIQNPDPAVYQLRDSKSSDKSVCLFTDFDSQTNVSQSKDSDVYITDKTVLDMRSMDFKSNSAVAWSNKSDFACANAFNNSIIPEDTFFPSPESSDSTDHVKPKETENTKQPSKSCHKPKAIVHTEKVNMMSLTVLGLRMLFAKTVAVNFLLTAKLFFLLTARAKRSGSGATNFSLLKQAGDVEENPGPTSMALPVTALLLPLALLLHAARPDIQMTQSPSSLSASVGDRVTITCKASDHINNWLAWYQQKPGKAPKLLIYGATTLETGVPSRFSGSGSGTDFTLTISSLQPEDFATYYCQQSWNTPWTFGQGTKVEIKRGGGGSGGGGSGGGGSEVQLVESGGGLVQPGGSLRLSCAASGYAFSNYWVNWVRQAPGKGLEWVAQIYPGDGDTNYNGKFKGRFTISRDNSKNTLYLQMNSLRAEDTAVYYCARSITTVVGCAMDYWGQGTLVTVSSTREDLKNVFPPEVAVFEPSEAEISHTQKATLVCLATGFYPDHVELSWWVNGKEVHSGVSTDPQPLKEQPALNDSRYCLSSRLRVSATFWQNPRNHFRCQVQFYGLSENDEWTQDRAKPVTQIVSAEAWGRADDVIKIHWQEKKSNTILGSQEGNTMKTNDTYMKFSWLTVPEKSLDKEHRCIVRHENNKNGVDQEIIFPPIKTDVITMDPKDNCSKDANDTLLLQLTNTSAYYMYLLLLLKSVVYFAIITCCLLMAMVKRKDSRGRAKRSGSGVKQTLNFDLLKLAGDVESNPGPSRGHMTEYKPTVRLATRDDVPRAVRTLAAAFADYPATRHTVDPDRHIERVTELQELFLTRVGLDIGKVWVADDGAAVAVWTTPESVEAGAVFAEIGPRMAELSGSRLAAQQQMEGLLAPHRPKEPAWFLATVGVSPDHQGKGLGSAVVLPGVEAAERAGVPAFLETSAPRNLPFYERLGFTVTADVEVPEGPRTWCMTRKPGA

SEQ ID NO: 46190 - protein, 973 aa, synthetic construct
MALPVTALLLPLALLLHAARPLEEDLKNVFPPEVAVFEPSEAEISHTQKATLVCLATGFYPDHVELSWWVNGKEVHSGVCTDPQPLKEQPALNDSRYCLSSRLRVSATFWQNPRNHFRCQVQFYGLSENDEWTQDRAKPVTQIVSAEAWGRADDVIKIHWQEKKSNTILGSQEGNTMKTNDTYMKFSWLTVPEKSLDKEHRCIVRHENNKNGVDQEIIFPPIKTDVITMDPKDNCSKDANDTLLLQLTNTSAYYMYLLLLLKSVVYFAIITCCLLRRTAFCCNGEKSRAKRSGSGATNFSLLKQAGDVEENPGPTSMALPVTALLLPLALLLHAARPDIQMTQSPSSLSASVGDRVTITCKASDHINNWLAWYQQKPGKAPKLLIYGATTLETGVPSRFSGSGSGTDFTLTISSLQPEDFATYYCQQSWNTPWTFGQGTKVEIKRGGGGSGGGGSGGGGSEVQLVESGGGLVQPGGSLRLSCAASGYAFSNYWVNWVRQAPGKGLEWVAQIYPGDGDTNYNGKFKGRFTISRDNSKNTLYLQMNSLRAEDTAVYYCARSITTVVGCAMDYWGQGTLVTVSSTRIQNPDPAVYQLRDSKSSDKSVCLFTDFDSQTNVSQSKDSDVYITDKCVLDMRSMDFKSNSAVAWSNKSDFACANAFNNSIIPEDTFFPSPESSDSTDHVKPKETENTKQPSKSCHKPKAIVHTEKVNMMSLTVLGLRMLFAKTVAVNFLLTAKLFFLRAKRSGSGVKQTLNFDLLKLAGDVESNPGPSRGHMTEYKPTVRLATRDDVPRAVRTLAAAFADYPATRHTVDPDRHIERVTELQELFLTRVGLDIGKVWVADDGAAVAVWTTPESVEAGAVFAEIGPRMAELSGSRLAAQQQMEGLLAPHRPKEPAWFLATVGVSPDHQGKGLGSAVVLPGVEAAERAGVPAFLETSAPRNLPFYERLGFTVTADVEVPEGPRTWCMTRKPGA

SEQ ID NO: 46191 - protein, 973 aa, synthetic construct
MALPVTALLLPLALLLHAARPLEIQNPDPAVYQLRDSKSSDKSVCLFTDFDSQTNVSQSKDSDVYITDKCVLDMRSMDFKSNSAVAWSNKSDFACANAFNNSIIPEDTFFPSPESSDSTDHVKPKETENTKQPSKSCHKPKAIVHTEKVNMMSLTVLGLRMLFAKTVAVNFLLTAKLFFLRAKRSGSGATNFSLLKQAGDVEENPGPTSMALPVTALLLPLALLLHAARPDIQMTQSPSSLSASVGDRVTITCKASDHINNWLAWYQQKPGKAPKLLIYGATTLETGVPSRFSGSGSGTDFTLTISSLQPEDFATYYCQQSWNTPWTFGQGTKVEIKRGGGGSGGGGSGGGGSEVQLVESGGGLVQPGGSLRLSCAASGYAFSNYWVNWVRQAPGKGLEWVAQIYPGDGDTNYNGKFKGRFTISRDNSKNTLYLQMNSLRAEDTAVYYCARSITTVVGCAMDYWGQGTLVTVSSTREDLKNVFPPEVAVFEPSEAEISHTQKATLVCLATGFYPDHVELSWWVNGKEVHSGVCTDPQPLKEQPALNDSRYCLSSRLRVSATFWQNPRNHFRCQVQFYGLSENDEWTQDRAKPVTQIVSAEAWGRADDVIKIHWQEKKSNTILGSQEGNTMKTNDTYMKFSWLTVPEKSLDKEHRCIVRHENNKNGVDQEIIFPPIKTDVITMDPKDNCSKDANDTLLLQLTNTSAYYMYLLLLLKSVVYFAIITCCLLRRTAFCCNGEKSRAKRSGSGVKQTLNFDLLKLAGDVESNPGPSRGHMTEYKPTVRLATRDDVPRAVRTLAAAFADYPATRHTVDPDRHIERVTELQELFLTRVGLDIGKVWVADDGAAVAVWTTPESVEAGAVFAEIGPRMAELSGSRLAAQQQMEGLLAPHRPKEPAWFLATVGVSPDHQGKGLGSAVVLPGVEAAERAGVPAFLETSAPRNLPFYERLGFTVTADVEVPEGPRTWCMTRKPGA

SEQ ID NO: 46192 - protein, 973 aa, synthetic construct
MALPVTALLLPLALLLHAARPLEEDLKNVFPPEVAVFEPSEAEISHTQKATLVCLATGFYPDHVELSWWVNGKEVHSGVSTDPQPLKEQPALNDSRYCLSSRLRVSATFWQNPRNHFRCQVQFYGLSENDEWTQDRAKPVTQIVSAEAWGRADDVIKIHWQEKKSNTILGSQEGNTMKTNDTYMKFSWLTVPEKSLDKEHRCIVRHENNKNGVDQEIIFPPIKTDVITMDPKDNCSKDANDTLLLQLTNTSAYYMYLLLLLKSVVYFAIITCCLLRRTAFCCNGEKSRAKRSGSGATNFSLLKQAGDVEENPGPTSMALPVTALLLPLALLLHAARPDIQMTQSPSSLSASVGDRVTITCKASDHINNWLAWYQQKPGKAPKLLIYGATTLETGVPSRFSGSGSGTDFTLTISSLQPEDFATYYCQQSWNTPWTFGQGTKVEIKRGGGGSGGGGSGGGGSEVQLVESGGGLVQPGGSLRLSCAASGYAFSNYWVNWVRQAPGKGLEWVAQIYPGDGDTNYNGKFKGRFTISRDNSKNTLYLQMNSLRAEDTAVYYCARSITTVVGCAMDYWGQGTLVTVSSTRIQNPDPAVYQLRDSKSSDKSVCLFTDFDSQTNVSQSKDSDVYITDKTVLDMRSMDFKSNSAVAWSNKSDFACANAFNNSIIPEDTFFPSPESSDSTDHVKPKETENTKQPSKSCHKPKAIVHTEKVNMMSLTVLGLRMLFAKTVAVNFLLTAKLFFLRAKRSGSGVKQTLNFDLLKLAGDVESNPGPSRGHMTEYKPTVRLATRDDVPRAVRTLAAAFADYPATRHTVDPDRHIERVTELQELFLTRVGLDIGKVWVADDGAAVAVWTTPESVEAGAVFAEIGPRMAELSGSRLAAQQQMEGLLAPHRPKEPAWFLATVGVSPDHQGKGLGSAVVLPGVEAAERAGVPAFLETSAPRNLPFYERLGFTVTADVEVPEGPRTWCMTRKPGA

SEQ ID NO: 46193 - protein, 973 aa, synthetic construct
MALPVTALLLPLALLLHAARPLEIQNPDPAVYQLRDSKSSDKSVCLFTDFDSQTNVSQSKDSDVYITDKTVLDMRSMDFKSNSAVAWSNKSDFACANAFNNSIIPEDTFFPSPESSDSTDHVKPKETENTKQPSKSCHKPKAIVHTEKVNMMSLTVLGLRMLFAKTVAVNFLLTAKLFFLRAKRSGSGATNFSLLKQAGDVEENPGPTSMALPVTALLLPLALLLHAARPDIQMTQSPSSLSASVGDRVTITCKASDHINNWLAWYQQKPGKAPKLLIYGATTLETGVPSRFSGSGSGTDFTLTISSLQPEDFATYYCQQSWNTPWTFGQGTKVEIKRGGGGSGGGGSGGGGSEVQLVESGGGLVQPGGSLRLSCAASGYAFSNYWVNWVRQAPGKGLEWVAQIYPGDGDTNYNGKFKGRFTISRDNSKNTLYLQMNSLRAEDTAVYYCARSITTVVGCAMDYWGQGTLVTVSSTREDLKNVFPPEVAVFEPSEAEISHTQKATLVCLATGFYPDHVELSWWVNGKEVHSGVSTDPQPLKEQPALNDSRYCLSSRLRVSATFWQNPRNHFRCQVQFYGLSENDEWTQDRAKPVTQIVSAEAWGRADDVIKIHWQEKKSNTILGSQEGNTMKTNDTYMKFSWLTVPEKSLDKEHRCIVRHENNKNGVDQEIIFPPIKTDVITMDPKDNCSKDANDTLLLQLTNTSAYYMYLLLLLKSVVYFAIITCCLLRRTAFCCNGEKSRAKRSGSGVKQTLNFDLLKLAGDVESNPGPSRGHMTEYKPTVRLATRDDVPRAVRTLAAAFADYPATRHTVDPDRHIERVTELQELFLTRVGLDIGKVWVADDGAAVAVWTTPESVEAGAVFAEIGPRMAELSGSRLAAQQQMEGLLAPHRPKEPAWFLATVGVSPDHQGKGLGSAVVLPGVEAAERAGVPAFLETSAPRNLPFYERLGFTVTADVEVPEGPRTWCMTRKPGA

SEQ ID NO: 46194 - protein, 871 aa, synthetic construct
MALPVTALLLPLALLLHAARPLEEDLKNVFPPEVAVFEPSKAEIAHTQKATLVCLATGFYPDHVELSWWVNGKEVHSGVCTDPQPLKEQPALNDSRYCLSSRLRVSATFWQNPRNHFRCQVQFYGLSENDEWTQDRAKPVTQIVSAEAWGRADCGITSASYHQGVLSATILYEILLGKATLYAVLVSALVLMAMVKRKDSRGRAKRSGSGATNFSLLKQAGDVEENPGPTSMALPVTALLLPLALLLHAARPDIQMTQSPSSLSASVGDRVTITCKASDHINNWLAWYQQKPGKAPKLLIYGATTLETGVPSRFSGSGSGTDFTLTISSLQPEDFATYYCQQSWNTPWTFGQGTKVEIKRGGGGSGGGGSGGGGSEVQLVESGGGLVQPGGSLRLSCAASGYAFSNYWVNWVRQAPGKGLEWVAQIYPGDGDTNYNGKFKGRFTISRDNSKNTLYLQMNSLRAEDTAVYYCARSITTVVGCAMDYWGQGTLVTVSSTRIQNPDPAVYQLRDSKSSDKSVCLFTDFDSQTNVSQSKDSDVYITDKCVLDMRSMDFKSNSAVAWSNKSDFACANAFNNSIIPEDTFFPSSDVPCDVKLVEKSFETDTNLNFQNLSVIGFRILLLKVAGFNLLMTLRLWSSRAKRSGSGVKQTLNFDLLKLAGDVESNPGPSRGHMTEYKPTVRLATRDDVPRAVRTLAAAFADYPATRHTVDPDRHIERVTELQELFLTRVGLDIGKVWVADDGAAVAVWTTPESVEAGAVFAEIGPRMAELSGSRLAAQQQMEGLLAPHRPKEPAWFLATVGVSPDHQGKGLGSAVVLPGVEAAERAGVPAFLETSAPRNLPFYERLGFTVTADVEVPEGPRTWCMTRKPGA

SEQ ID NO: 46195 - protein, 871 aa, synthetic construct
MALPVTALLLPLALLLHAARPLEIQNPDPAVYQLRDSKSSDKSVCLFTDFDSQTNVSQSKDSDVYITDKCVLDMRSMDFKSNSAVAWSNKSDFACANAFNNSIIPEDTFFPSSDVPCDVKLVEKSFETDTNLNFQNLSVIGFRILLLKVAGFNLLMTLRLWSSRAKRSGSGATNFSLLKQAGDVEENPGPTSMALPVTALLLPLALLLHAARPDIQMTQSPSSLSASVGDRVTITCKASDHINNWLAWYQQKPGKAPKLLIYGATTLETGVPSRFSGSGSGTDFTLTISSLQPEDFATYYCQQSWNTPWTFGQGTKVEIKRGGGGSGGGGSGGGGSEVQLVESGGGLVQPGGSLRLSCAASGYAFSNYWVNWVRQAPGKGLEWVAQIYPGDGDTNYNGKFKGRFTISRDNSKNTLYLQMNSLRAEDTAVYYCARSITTVVGCAMDYWGQGTLVTVSSTREDLKNVFPPEVAVFEPSKAEIAHTQKATLVCLATGFYPDHVELSWWVNGKEVHSGVCTDPQPLKEQPALNDSRYCLSSRLRVSATFWQNPRNHFRCQVQFYGLSENDEWTQDRAKPVTQIVSAEAWGRADCGITSASYHQGVLSATILYEILLGKATLYAVLVSALVLMAMVKRKDSRGRAKRSGSGVKQTLNFDLLKLAGDVESNPGPSRGHMTEYKPTVRLATRDDVPRAVRTLAAAFADYPATRHTVDPDRHIERVTELQELFLTRVGLDIGKVWVADDGAAVAVWTTPESVEAGAVFAEIGPRMAELSGSRLAAQQQMEGLLAPHRPKEPAWFLATVGVSPDHQGKGLGSAVVLPGVEAAERAGVPAFLETSAPRNLPFYERLGFTVTADVEVPEGPRTWCMTRKPGA

SEQ ID NO: 46196 - protein, 764 aa, synthetic construct
MALPVTALLLPLALLLHAARPLEQSFGLLDPKLCYLLDGILFIYGVILTALFLRVKFSRSADAPAYQQGQNQLYNELNLGRREEYDVLDKRRGRDPEMGGKPQRRKNPQEGLYNELQKDKMAEAYSEIGMKGERRRGKGHDGLYQGLSTATKDTYDALHMQALPPRRAKRSGSGATNFSLLKQAGDVEENPGPTSMALPVTALLLPLALLLHAARPDIQMTQSPSSLSASVGDRVTITCKASDHINNWLAWYQQKPGKAPKLLIYGATTLETGVPSRFSGSGSGTDFTLTISSLQPEDFATYYCQQSWNTPWTFGQGTKVEIKRGGGGSGGGGSGGGGSEVQLVESGGGLVQPGGSLRLSCAASGYAFSNYWVNWVRQAPGKGLEWVAQIYPGDGDTNYNGKFKGRFTISRDNSKNTLYLQMNSLRAEDTAVYYCARSITTVVGCAMDYWGQGTLVTVSSTRELGEPQLCYILDAILFLYGIVLTLLYCRLKIQVRKAAITSYEKSDGVYTGLSTRNQETYETLKHEKPPQRAKRSGSGVKQTLNFDLLKLAGDVESNPGPSRGHMTEYKPTVRLATRDDVPRAVRTLAAAFADYPATRHTVDPDRHIERVTELQELFLTRVGLDIGKVWVADDGAAVAVWTTPESVEAGAVFAEIGPRMAELSGSRLAAQQQMEGLLAPHRPKEPAWFLATVGVSPDHQGKGLGSAVVLPGVEAAERAGVPAFLETSAPRNLPFYERLGFTVTADVEVPEGPRTWCMTRKPGA

SEQ ID NO: 46197 - protein, 975 aa, synthetic construct; identical to SEQ ID NO: 46188

SEQ ID NO: 46198 - protein, 975 aa, synthetic construct; identical to SEQ ID NO: 46189

SEQ ID NO: 46199 - protein, 974 aa, synthetic construct
MALPVTALLLPLALLLHAARPLEEEDLKNVFPPEVAVFEPSEAEISHTQKATLVCLATGFYPDHVELSWWVNGKEVHSGVCTDPQPLKEQPALNDSRYCLSSRLRVSATFWQNPRNHFRCQVQFYGLSENDEWTQDRAKPVTQIVSAEAWGRADDVIKIHWQEKKSNTILGSQEGNTMKTNDTYMKFSWLTVPEKSLDKEHRCIVRHENNKNGVDQEIIFPPIKTDVITMDPKDNCSKDANDTLLLQLTNTSAYYMYLLLLLKSVVYFAIITCCLLRRTAFCCNGEKSRAKRSGSGATNFSLLKQAGDVEENPGPTSMALPVTALLLPLALLLHAARPDIQMTQSPSSLSASVGDRVTITCKASDHINNWLAWYQQKPGKAPKLLIYGATTLETGVPSRFSGSGSGTDFTLTISSLQPEDFATYYCQQSWNTPWTFGQGTKVEIKRGGGGSGGGGSGGGGSEVQLVESGGGLVQPGGSLRLSCAASGYAFSNYWVNWVRQAPGKGLEWVAQIYPGDGDTNYNGKFKGRFTISRDNSKNTLYLQMNSLRAEDTAVYYCARSITTVVGCAMDYWGQGTLVTVSSTRIQNPDPAVYQLRDSKSSDKSVCLFTDFDSQTNVSQSKDSDVYITDKCVLDMRSMDFKSNSAVAWSNKSDFACANAFNNSIIPEDTFFPSPESSDSTDHVKPKETENTKQPSKSCHKPKAIVHTEKVNMMSLTVLGLRMLFAKTVAVNFLLTAKLFFLRAKRSGSGVKQTLNFDLLKLAGDVESNPGPSRGHMTEYKPTVRLATRDDVPRAVRTLAAAFADYPATRHTVDPDRHIERVTELQELFLTRVGLDIGKVWVADDGAAVAVWTTPESVEAGAVFAEIGPRMAELSGSRLAAQQQMEGLLAPHRPKEPAWFLATVGVSPDHQGKGLGSAVVLPGVEAAERAGVPAFLETSAPRNLPFYERLGFTVTADVEVPEGPRTWCMTRKPGA

SEQ ID NO: 46200 - protein, 974 aa, synthetic construct
MALPVTALLLPLALLLHAARPLEIQNPDPAVYQLRDSKSSDKSVCLFTDFDSQTNVSQSKDSDVYITDKCVLDMRSMDFKSNSAVAWSNKSDFACANAFNNSIIPEDTFFPSPESSDSTDHVKPKETENTKQPSKSCHKPKAIVHTEKVNMMSLTVLGLRMLFAKTVAVNFLLTAKLFFLRAKRSGSGATNFSLLKQAGDVEENPGPTSMALPVTALLLPLALLLHAARPDIQMTQSPSSLSASVGDRVTITCKASDHINNWLAWYQQKPGKAPKLLIYGATTLETGVPSRFSGSGSGTDFTLTISSLQPEDFATYYCQQSWNTPWTFGQGTKVEIKRGGGGSGGGGSGGGGSEVQLVESGGGLVQPGGSLRLSCAASGYAFSNYWVNWVRQAPGKGLEWVAQIYPGDGDTNYNGKFKGRFTISRDNSKNTLYLQMNSLRAEDTAVYYCARSITTVVGCAMDYWGQGTLVTVSSTREEDLKNVFPPEVAVFEPSEAEISHTQKATLVCLATGFYPDHVELSWWVNGKEVHSGVCTDPQPLKEQPALNDSRYCLSSRLRVSATFWQNPRNHFRCQVQFYGLSENDEWTQDRAKPVTQIVSAEAWGRADDVIKIHWQEKKSNTILGSQEGNTMKTNDTYMKFSWLTVPEKSLDKEHRCIVRHENNKNGVDQEIIFPPIKTDVITMDPKDNCSKDANDTLLLQLTNTSAYYMYLLLLLKSVVYFAIITCCLLRRTAFCCNGEKSRAKRSGSGVKQTLNFDLLKLAGDVESNPGPSRGHMTEYKPTVRLATRDDVPRAVRTLAAAFADYPATRHTVDPDRHIERVTELQELFLTRVGLDIGKVWVADDGAAVAVWTTPESVEAGAVFAEIGPRMAELSGSRLAAQQQMEGLLAPHRPKEPAWFLATVGVSPDHQGKGLGSAVVLPGVEAAERAGVPAFLETSAPRNLPFYERLGFTVTADVEVPEGPRTWCMTRKPGA

SEQ ID NO: 46201 - protein, 871 aa, synthetic construct
MALPVTALLLPLALLLHAARPLEEDLKNVFPPEVAVFEPSEAEISHTQKATLVCLATGFYPDHVELSWWVNGKEVHSGVSTDPQPLKEQPALNDSRYCLSSRLRVSATFWQNPRNHFRCQVQFYGLSENDEWTQDRAKPVTQIVSAEAWGRADCGFTSESYQQGVLSATNLSVIGFRILLLKVAGFNLLMTLRLWSSRAKRSGSGATNFSLLKQAGDVEENPGPTSMALPVTALLLPLALLLHAARPDIQMTQSPSSLSASVGDRVTITCKASDHINNWLAWYQQKPGKAPKLLIYGATTLETGVPSRFSGSGSGTDFTLTISSLQPEDFATYYCQQSWNTPWTFGQGTKVEIKRGGGGSGGGGSGGGGSEVQLVESGGGLVQPGGSLRLSCAASGYAFSNYWVNWVRQAPGKGLEWVAQIYPGDGDTNYNGKFKGRFTISRDNSKNTLYLQMNSLRAEDTAVYYCARSITTVVGCAMDYWGQGTLVTVSSTRIQNPDPAVYQLRDSKSSDKSVCLFTDFDSQTNVSQSKDSDVYITDKTVLDMRSMDFKSNSAVAWSNKSDFACANAFNNSIIPEDTFFPSPESSCDVKLVEKSFETDTNLNFQILYEILLGKATLYAVLVSALVLMAMVKRKDSRGRAKRSGSGVKQTLNFDLLKLAGDVESNPGPSRGHMTEYKPTVRLATRDDVPRAVRTLAAAFADYPATRHTVDPDRHIERVTELQELFLTRVGLDIGKVWVADDGAAVAVWTTPESVEAGAVFAEIGPRMAELSGSRLAAQQQMEGLLAPHRPKEPAWFLATVGVSPDHQGKGLGSAVVLPGVEAAERAGVPAFLETSAPRNLPFYERLGFTVTADVEVPEGPRTWCMTRKPGA

SEQ ID NO: 46202 - protein, 871 aa, synthetic construct
MALPVTALLLPLALLLHAARPLEIQNPDPAVYQLRDSKSSDKSVCLFTDFDSQTNVSQSKDSDVYITDKTVLDMRSMDFKSNSAVAWSNKSDFACANAFNNSIIPEDTFFPSPESSCDVKLVEKSFETDTNLNFQILYEILLGKATLYAVLVSALVLMAMVKRKDSRGRAKRSGSGATNFSLLKQAGDVEENPGPTSMALPVTALLLPLALLLHAARPDIQMTQSPSSLSASVGDRVTITCKASDHINNWLAWYQQKPGKAPKLLIYGATTLETGVPSRFSGSGSGTDFTLTISSLQPEDFATYYCQQSWNTPWTFGQGTKVEIKRGGGGSGGGGSGGGGSEVQLVESGGGLVQPGGSLRLSCAASGYAFSNYWVNWVRQAPGKGLEWVAQIYPGDGDTNYNGKFKGRFTISRDNSKNTLYLQMNSLRAEDTAVYYCARSITTVVGCAMDYWGQGTLVTVSSTREDLKNVFPPEVAVFEPSEAEISHTQKATLVCLATGFYPDHVELSWWVNGKEVHSGVSTDPQPLKEQPALNDSRYCLSSRLRVSATFWQNPRNHFRCQVQFYGLSENDEWTQDRAKPVTQIVSAEAWGRADCGFTSESYQQGVLSATNLSVIGFRILLLKVAGFNLLMTLRLWSSRAKRSGSGVKQTLNFDLLKLAGDVESNPGPSRGHMTEYKPTVRLATRDDVPRAVRTLAAAFADYPATRHTVDPDRHIERVTELQELFLTRVGLDIGKVWVADDGAAVAVWTTPESVEAGAVFAEIGPRMAELSGSRLAAQQQMEGLLAPHRPKEPAWFLATVGVSPDHQGKGLGSAVVLPGVEAAERAGVPAFLETSAPRNLPFYERLGFTVTADVEVPEGPRTWCMTRKPGA

SEQ ID NO: 46203 - protein, 871 aa, synthetic construct
MALPVTALLLPLALLLHAARPLEEDLKNVFPPEVAVFEPSEAEISHTQKATLVCLATGFYPDHVELSWWVNGKEVHSGVCTDPQPLKEQPALNDSRYCLSSRLRVSATFWQNPRNHFRCQVQFYGLSENDEWTQDRAKPVTQIVSAEAWGRADCDVKLVEKSFETDTNLNFQNLSVIGFRILLLKVAGFNLLMTLRLWSSRAKRSGSGATNFSLLKQAGDVEENPGPTSMALPVTALLLPLALLLHAARPDIQMTQSPSSLSASVGDRVTITCKASDHINNWLAWYQQKPGKAPKLLIYGATTLETGVPSRFSGSGSGTDFTLTISSLQPEDFATYYCQQSWNTPWTFGQGTKVEIKRGGGGSGGGGSGGGGSEVQLVESGGGLVQPGGSLRLSCAASGYAFSNYWVNWVRQAPGKGLEWVAQIYPGDGDTNYNGKFKGRFTISRDNSKNTLYLQMNSLRAEDTAVYYCARSITTVVGCAMDYWGQGTLVTVSSTRIQNPDPAVYQLRDSKSSDKSVCLFTDFDSQTNVSQSKDSDVYITDKCVLDMRSMDFKSNSAVAWSNKSDFACANAFNNSIIPEDTFFPSPESSCGFTSESYQQGVLSATILYEILLGKATLYAVLVSALVLMAMVKRKDSRGRAKRSGSGVKQTLNFDLLKLAGDVESNPGPSRGHMTEYKPTVRLATRDDVPRAVRTLAAAFADYPATRHTVDPDRHIERVTELQELFLTRVGLDIGKVWVADDGAAVAVWTTPESVEAGAVFAEIGPRMAELSGSRLAAQQQMEGLLAPHRPKEPAWFLATVGVSPDHQGKGLGSAVVLPGVEAAERAGVPAFLETSAPRNLPFYERLGFTVTADVEVPEGPRTWCMTRKPGA

SEQ ID NO: 46204 - protein, 871 aa, synthetic construct
MALPVTALLLPLALLLHAARPLEEDLKNVFPPEVAVFEPSEAEISHTQKATLVCLATGFYPDHVELSWWVNGKEVHSGVSTDPQPLKEQPALNDSRYCLSSRLRVSATFWQNPRNHFRCQVQFYGLSENDEWTQDRAKPVTQIVSAEAWGRADCDVKLVEKSFETDTNLNFQNLSVIGFRILLLKVAGFNLLMTLRLWSSRAKRSGSGATNFSLLKQAGDVEENPGPTSMALPVTALLLPLALLLHAARPDIQMTQSPSSLSASVGDRVTITCKASDHINNWLAWYQQKPGKAPKLLIYGATTLETGVPSRFSGSGSGTDFTLTISSLQPEDFATYYCQQSWNTPWTFGQGTKVEIKRGGGGSGGGGSGGGGSEVQLVESGGGLVQPGGSLRLSCAASGYAFSNYWVNWVRQAPGKGLEWVAQIYPGDGDTNYNGKFKGRFTISRDNSKNTLYLQMNSLRAEDTAVYYCARSITTVVGCAMDYWGQGTLVTVSSTRIQNPDPAVYQLRDSKSSDKSVCLFTDFDSQTNVSQSKDSDVYITDKTVLDMRSMDFKSNSAVAWSNKSDFACANAFNNSIIPEDTFFPSPESSCGFTSESYQQGVLSATILYEILLGKATLYAVLVSALVLMAMVKRKDSRGRAKRSGSGVKQTLNFDLLKLAGDVESNPGPSRGHMTEYKPTVRLATRDDVPRAVRTLAAAFADYPATRHTVDPDRHIERVTELQELFLTRVGLDIGKVWVADDGAAVAVWTTPESVEAGAVFAEIGPRMAELSGSRLAAQQQMEGLLAPHRPKEPAWFLATVGVSPDHQGKGLGSAVVLPGVEAAERAGVPAFLETSAPRNLPFYERLGFTVTADVEVPEGPRTWCMTRKPGA

SEQ ID NO: 46205 - protein, 974 aa, synthetic construct
MALPVTALLLPLALLLHAARPLEEEDLKNVFPPEVAVFEPSEAEISHTQKATLVCLATGFYPDHVELSWWVNGKEVHSGVSTDPQPLKEQPALNDSRYCLSSRLRVSATFWQNPRNHFRCQVQFYGLSENDEWTQDRAKPVTQIVSAEAWGRADDVIKIHWQEKKSNTILGSQEGNTMKTNDTYMKFSWLTVPEKSLDKEHRCIVRHENNKNGVDQEIIFPPIKTDVITMDPKDNCSKDANDTLLLQLTNTSAYYMYLLLLLKSVVYFAIITCCLLRRTAFCCNGEKSRAKRSGSGATNFSLLKQAGDVEENPGPTSMALPVTALLLPLALLLHAARPDIQMTQSPSSLSASVGDRVTITCKASDHINNWLAWYQQKPGKAPKLLIYGATTLETGVPSRFSGSGSGTDFTLTISSLQPEDFATYYCQQSWNTPWTFGQGTKVEIKRGGGGSGGGGSGGGGSEVQLVESGGGLVQPGGSLRLSCAASGYAFSNYWVNWVRQAPGKGLEWVAQIYPGDGDTNYNGKFKGRFTISRDNSKNTLYLQMNSLRAEDTAVYYCARSITTVVGCAMDYWGQGTLVTVSSTRIQNPDPAVYQLRDSKSSDKSVCLFTDFDSQTNVSQSKDSDVYITDKTVLDMRSMDFKSNSAVAWSNKSDFACANAFNNSIIPEDTFFPSPESSDSTDHVKPKETENTKQPSKSCHKPKAIVHTEKVNMMSLTVLGLRMLFAKTVAVNFLLTAKLFFLRAKRSGSGVKQTLNFDLLKLAGDVESNPGPSRGHMTEYKPTVRLATRDDVPRAVRTLAAAFADYPATRHTVDPDRHIERVTELQELFLTRVGLDIGKVWVADDGAAVAVWTTPESVEAGAVFAEIGPRMAELSGSRLAAQQQMEGLLAPHRPKEPAWFLATVGVSPDHQGKGLGSAVVLPGVEAAERAGVPAFLETSAPRNLPFYERLGFTVTADVEVPEGPRTWCMTRKPGA

SEQ ID NO: 46206 - protein, 871 aa, synthetic construct
MALPVTALLLPLALLLHAARPLEEDLKNVFPPEVAVFEPSEAEISHTQKATLVCLATGFYPDHVELSWWVNGKEVHSGVCTDPQPLKEQPALNDSRYCLSSRLRVSATFWQNPRNHFRCQVQFYGLSENDEWTQDRAKPVTQIVSAEAWGRADCGFTSESYQQGVLSATNLSVIGFRILLLKVAGFNLLMTLRLWSSRAKRSGSGATNFSLLKQAGDVEENPGPTSMALPVTALLLPLALLLHAARPDIQMTQSPSSLSASVGDRVTITCKASDHINNWLAWYQQKPGKAPKLLIYGATTLETGVPSRFSGSGSGTDFTLTISSLQPEDFATYYCQQSWNTPWTFGQGTKVEIKRGGGGSGGGGSGGGGSEVQLVESGGGLVQPGGSLRLSCAASGYAFSNYWVNWVRQAPGKGLEWVAQIYPGDGDTNYNGKFKGRFTISRDNSKNTLYLQMNSLRAEDTAVYYCARSITTVVGCAMDYWGQGTLVTVSSTRIQNPDPAVYQLRDSKSSDKSVCLFTDFDSQTNVSQSKDSDVYITDKCVLDMRSMDFKSNSAVAWSNKSDFACANAFNNSIIPEDTFFPSPESSCDVKLVEKSFETDTNLNFQILYEILLGKATLYAVLVSALVLMAMVKRKDSRGRAKRSGSGVKQTLNFDLLKLAGDVESNPGPSRGHMTEYKPTVRLATRDDVPRAVRTLAAAFADYPATRHTVDPDRHIERVTELQELFLTRVGLDIGKVWVADDGAAVAVWTTPESVEAGAVFAEIGPRMAELSGSRLAAQQQMEGLLAPHRPKEPAWFLATVGVSPDHQGKGLGSAVVLPGVEAAERAGVPAFLETSAPRNLPFYERLGFTVTADVEVPEGPRTWCMTRKPGA

SEQ ID NO: 46207 - protein, 900 aa, synthetic construct
MALPVTALLLPLALLLHAARPLEEEDLKNVFPPEVAVFEPSEAEISHTQKATLVCLATGFYPDHVELSWWVNGKEVHSGVCTDPQPLKEQPALNDSRYCLSSRLRVSATFWQNPRNHFRCQVQFYGLSENDEWTQDRAKPVTQIVSAEAWGRADCGFTSESYQQGVLSATNLSVIGFRILLLKVAGFNLLMTLRLWSSRAKRSGSGATNFSLLKQAGDVEENPGPTSMALPVTALLLPLALLLHAARPDIQMTQSPSSLSASVGDRVTITCKASDHINNWLAWYQQKPGKAPKLLIYGATTLETGVPSRFSGSGSGTDFTLTISSLQPEDFATYYCQQSWNTPWTFGQGTKVEIKRGGGGSGGGGSGGGGSEVQLVESGGGLVQPGGSLRLSCAASGYAFSNYWVNWVRQAPGKGLEWVAQIYPGDGDTNYNGKFKGRFTISRDNSKNTLYLQMNSLRAEDTAVYYCARSITTVVGCAMDYWGQGTLVTVSSTRGQPKANPTVTLFPPSSEELQANKATLVCLISDFYPGAVTVAWKADGSPVKAGVETTKPSKQSNNKYAASSYLSLTPEQWKSHRSYSCQVTHEGSTVEKTVAPTECSPIKTDVITMDPKDNCSKDANDTLLLQLTNTSAYYMYLLLLLKSVVYFAIITCCLLRRTAFCCNGEKSRAKRSGSGVKQTLNFDLLKLAGDVESNPGPSRGHMTEYKPTVRLATRDDVPRAVRTLAAAFADYPATRHTVDPDRHIERVTELQELFLTRVGLDIGKVWVADDGAAVAVWTTPESVEAGAVFAEIGPRMAELSGSRLAAQQQMEGLLAPHRPKEPAWFLATVGVSPDHQGKGLGSAVVLPGVEAAERAGVPAFLETSAPRNLPFYERLGFTVTADVEVPEGPRTWCMTRKPGA

SEQ ID NO: 46208 - protein, 900 aa, synthetic construct
MALPVTALLLPLALLLHAARPLEGQPKANPTVTLFPPSSEELQANKATLVCLISDFYPGAVTVAWKADGSPVKAGVETTKPSKQSNNKYAASSYLSLTPEQWKSHRSYSCQVTHEGSTVEKTVAPTECSPIKTDVITMDPKDNCSKDANDTLLLQLTNTSAYYMYLLLLLKSVVYFAIITCCLLRRTAFCCNGEKSRAKRSGSGATNFSLLKQAGDVEENPGPTSMALPVTALLLPLALLLHAARPDIQMTQSPSSLSASVGDRVTITCKASDHINNWLAWYQQKPGKAPKLLIYGATTLETGVPSRFSGSGSGTDFTLTISSLQPEDFATYYCQQSWNTPWTFGQGTKVEIKRGGGGSGGGGSGGGGSEVQLVESGGGLVQPGGSLRLSCAASGYAFSNYWVNWVRQAPGKGLEWVAQIYPGDGDTNYNGKFKGRFTISRDNSKNTLYLQMNSLRAEDTAVYYCARSITTVVGCAMDYWGQGTLVTVSSTREEDLKNVFPPEVAVFEPSEAEISHTQKATLVCLATGFYPDHVELSWWVNGKEVHSGVCTDPQPLKEQPALNDSRYCLSSRLRVSATFWQNPRNHFRCQVQFYGLSENDEWTQDRAKPVTQIVSAEAWGRADCGFTSESYQQGVLSATNLSVIGFRILLLKVAGFNLLMTLRLWSSRAKRSGSGVKQTLNFDLLKLAGDVESNPGPSRGHMTEYKPTVRLATRDDVPRAVRTLAAAFADYPATRHTVDPDRHIERVTELQELFLTRVGLDIGKVWVADDGAAVAVWTTPESVEAGAVFAEIGPRMAELSGSRLAAQQQMEGLLAPHRPKEPAWFLATVGVSPDHQGKGLGSAVVLPGVEAAERAGVPAFLETSAPRNLPFYERLGFTVTADVEVPEGPRTWCMTRKPGA

SEQ ID NO: 46209 - protein, 897 aa, synthetic construct
MALPVTALLLPLALLLHAARPLEEASTKGPSVFPLAPSSKSTSGGTAALGCLVKDYFPEPVTVSWNSGALTSGVHTFPAVLQSSGLYSLSSVVTVPSSSLGTQTYICNVNHKPSNTKVDKRVEPKSCPIKTDVITMDPKDNCSKDANDTLLLQLTNTSAYYMYLLLLLKSVVYFAIITCCLLRRTAFCCNGEKSRAKRSGSGATNFSLLKQAGDVEENPGPTSMALPVTALLLPLALLLHAARPDIQMTQSPSSLSASVGDRVTITCKASDHINNWLAWYQQKPGKAPKLLIYGATTLETGVPSRFSGSGSGTDFTLTISSLQPEDFATYYCQQSWNTPWTFGQGTKVEIKRGGGGSGGGGSGGGGSEVQLVESGGGLVQPGGSLRLSCAASGYAFSNYWVNWVRQAPGKGLEWVAQIYPGDGDTNYNGKFKGRFTISRDNSKNTLYLQMNSLRAEDTAVYYCARSITTVVGCAMDYWGQGTLVTVSSTRGQPKANPTVTLFPPSSEELQANKATLVCLISDFYPGAVTVAWKADGSPVKAGVETTKPSKQSNNKYAASSYLSLTPEQWKSHRSYSCQVTHEGSTVEKTVAPTECSEVKTDSTDHVKPKETENTKQPSKSCHKPKAIVHTEKVNMMSLTVLGLRMLFAKTVAVNFLLTAKLFFLRAKRSGSGVKQTLNFDLLKLAGDVESNPGPSRGHMTEYKPTVRLATRDDVPRAVRTLAAAFADYPATRHTVDPDRHIERVTELQELFLTRVGLDIGKVWVADDGAAVAVWTTPESVEAGAVFAEIGPRMAELSGSRLAAQQQMEGLLAPHRPKEPAWFLATVGVSPDHQGKGLGSAVVLPGVEAAERAGVPAFLETSAPRNLPFYERLGFTVTADVEVPEGPRTWCMTRKPGA

SEQ ID NO: 46210 - protein, 875 aa, synthetic construct
MALPVTALLLPLALLLHAARPLEEASTKGPSVFPLAPSSKSTSGGTAALGCLVKDYFPEPVTVSWNSGALTSGVHTFPAVLQSSGLYSLSSVVTVPSSSLGTQTYICNVNHKPSNTKVDKRVEPKSCGRADCGFTSESYQQGVLSATILYEILLGKATLYAVLVSALVLMAMVKRKDSRGRAKRSGSGATNFSLLKQAGDVEENPGPTSMALPVTALLLPLALLLHAARPDIQMTQSPSSLSASVGDRVTITCKASDHINNWLAWYQQKPGKAPKLLIYGATTLETGVPSRFSGSGSGTDFTLTISSLQPEDFATYYCQQSWNTPWTFGQGTKVEIKRGGGGSGGGGSGGGGSEVQLVESGGGLVQPGGSLRLSCAASGYAFSNYWVNWVRQAPGKGLEWVAQIYPGDGDTNYNGKFKGRFTISRDNSKNTLYLQMNSLRAEDTAVYYCARSITTVVGCAMDYWGQGTLVTVSSTRGQPKANPTVTLFPPSSEELQANKATLVCLISDFYPGAVTVAWKADGSPVKAGVETTKPSKQSNNKYAASSYLSLTPEQWKSHRSYSCQVTHEGSTVEKTVAPTECSIPEDTFFPSPESSCDVKLVEKSFETDTNLNFQNLSVIGFRILLLKVAGFNLLMTLRLWSSRAKRSGSGVKQTLNFDLLKLAGDVESNPGPSRGHMTEYKPTVRLATRDDVPRAVRTLAAAFADYPATRHTVDPDRHIERVTELQELFLTRVGLDIGKVWVADDGAAVAVWTTPESVEAGAVFAEIGPRMAELSGSRLAAQQQMEGLLAPHRPKEPAWFLATVGVSPDHQGKGLGSAVVLPGVEAAERAGVPAFLETSAPRNLPFYERLGFTVTADVEVPEGPRTWCMTRKPGA

SEQ ID NO: 46211 - protein, 875 aa, synthetic construct
MALPVTALLLPLALLLHAARPLEEASTKGPSVFPLAPSSKSTSGGTAALGCLVKDYFPEPVTVSWNSGALTSGVHTFPAVLQSSGLYSLSSVVTVPSSSLGTQTYICNVNHKPSNTKVDKRVEPKSCIPEDTFFPSPESSCDVKLVEKSFETDTNLNFQNLSVIGFRILLLKVAGFNLLMTLRLWSSRAKRSGSGATNFSLLKQAGDVEENPGPTSMALPVTALLLPLALLLHAARPDIQMTQSPSSLSASVGDRVTITCKASDHINNWLAWYQQKPGKAPKLLIYGATTLETGVPSRFSGSGSGTDFTLTISSLQPEDFATYYCQQSWNTPWTFGQGTKVEIKRGGGGSGGGGSGGGGSEVQLVESGGGLVQPGGSLRLSCAASGYAFSNYWVNWVRQAPGKGLEWVAQIYPGDGDTNYNGKFKGRFTISRDNSKNTLYLQMNSLRAEDTAVYYCARSITTVVGCAMDYWGQGTLVTVSSTRGQPKANPTVTLFPPSSEELQANKATLVCLISDFYPGAVTVAWKADGSPVKAGVETTKPSKQSNNKYAASSYLSLTPEQWKSHRSYSCQVTHEGSTVEKTVAPTECSGRADCGFTSESYQQGVLSATILYEILLGKATLYAVLVSALVLMAMVKRKDSRGRAKRSGSGVKQTLNFDLLKLAGDVESNPGPSRGHMTEYKPTVRLATRDDVPRAVRTLAAAFADYPATRHTVDPDRHIERVTELQELFLTRVGLDIGKVWVADDGAAVAVWTTPESVEAGAVFAEIGPRMAELSGSRLAAQQQMEGLLAPHRPKEPAWFLATVGVSPDHQGKGLGSAVVLPGVEAAERAGVPAFLETSAPRNLPFYERLGFTVTADVEVPEGPRTWCMTRKPGA

SEQ ID NO: 46212 - protein, 622 aa, synthetic construct
MALPVTALLLPLALLLHAARPDIQMTQSPSSLSASVGDRVTITCKASDHINNWLAWYQQKPGKAPKLLIYGATTLETGVPSRFSGSGSGTDFTLTISSLQPEDFATYYCQQSWNTPWTFGQGTKVEIKRLEDLKNVFPPEVAVFEPSEAEISHTQKATLVCLATGFYPDHVELSWWVNGKEVHSGVCTDPQPLKEQPALNDSRYCLSSRLRVSATFWQNPRNHFRCQVQFYGLSENDEWTQDRAKPVTQIVSAEAWGRADSGFTSESYQQGVLSATILYEILLGKATLYAVLVSALVLMAMVKRKDSRGRAKRSGSGATNFSLLKQAGDVEENPGPTSMDWIWRILFLVGAATGAHSFEEVQLVESGGGLVQPGGSLRLSCAASGYAFSNYWVNWVRQAPGKGLEWVAQIYPGDGDTNYNGKFKGRFTISRDNSKNTLYLQMNSLRAEDTAVYYCARSITTVVGCAMDYWGQGTLVTVSSTRIQNPDPAVYQLRDSKSSDKSVCLFTDFDSQTNVSQSKDSDVYITDKCVLDMRSMDFKSNSAVAWSNKSDFACANAFNNSIIPEDTFFPSPESSSDVKLVEKSFETDTNLNFQNLSVIGFRILLLKVAGFNLLMTLRLWSS

SEQ ID NO: 46213 - protein, 901 aa, synthetic construct
MALPVTALLLPLALLLHAARPEVQLLESGGGLVQPGGSLRLSCAASGRTFSMGWYRQAPGKGLEFVSAITYSGGSPYYADSVKGRFTISRDNSKNTVYLQMNSLRAEDTAVYYCAANPTYGSDWNAENWGQGTLVTVSSGTGGGGSGGGGSGGGGSEFDIQMTQSPSSLSASVGDRVTITCKASDHINNWLAWYQQKPGKAPKLLIYGATTLETGVPSRFSGSGSGTDFTLTISSLQPEDFATYYCQQSWNTPWTFGQGTKVEIKRLEIQNPDPAVYQLRDSKSSDKSVCLFTDFDSQTNVSQSKDSDVYITDKCVLDMRSMDFKSNSAVAWSNKSDFACANAFNNSIIPEDTFFPSSDVPCDVKLVEKSFETDTNLNFQNLSVIGFRILLLKVAGFNLLMTLRLWSSRAKRSGSGVKQTLNFDLLKLAGDVESNPGPTSTMDWIWRILFLVGAATGTHSGPEVQLVESGGGLVQPGGSLRLSCAASGRTFTMGWYRQAPGKEREFVAAISLSPTLAYYADSVKGRFTISRDNSKNTVVLQMNSLRAEDTALYYCAADRKSVMSIRPDYWGQGTLVTVSSGSGGGGSGGGGSGGGGSFEEVQLVESGGGLVQPGGSLRLSCAASGYAFSNYWVNWVRQAPGKGLEWVAQIYPGDGDTNYNGKFKGRFTISRDNSKNTLYLQMNSLRAEDTAVYYCARSITTVVGCAMDYWGQGTLVTVSSTREDLKNVFPPEVAVFEPSKAEIAHTQKATLVCLATGFYPDHVELSWWVNGKEVHSGVCTDPQPLKEQPALNDSRYCLSSRLRVSATFWQNPRNHFRCQVQFYGLSENDEWTQDRAKPVTQIVSAEAWGRADCGITSASYHQGVLSATILYEILLGKATLYAVLVSALVLMAMVKRKDSRG

SEQ ID NO: 46214 - protein, 901 aa, synthetic construct
MALPVTALLLPLALLLHAARPEVQLVESGGGLVQAGGSLRLSCAASGRTFSMGWFRQAPGKEREFVAAITYSGGSPYYADSVKGRFTISRDNAKNTVYLQMNSLKPEDTAVYYCAANPTYGSDWNAENWGQGTQVTVSSGTGGGGSGGGGSGGGGSEFDIQMTQSPSSLSASVGDRVTITCKASDHINNWLAWYQQKPGKAPKLLIYGATTLETGVPSRFSGSGSGTDFTLTISSLQPEDFATYYCQQSWNTPWTFGQGTKVEIKRLEIQNPDPAVYQLRDSKSSDKSVCLFTDFDSQTNVSQSKDSDVYITDKCVLDMRSMDFKSNSAVAWSNKSDFACANAFNNSIIPEDTFFPSSDVPCDVKLVEKSFETDTNLNFQNLSVIGFRILLLKVAGFNLLMTLRLWSSRAKRSGSGVKQTLNFDLLKLAGDVESNPGPTSTMDWIWRILFLVGAATGAHSGPEVQLVESGGGLVQPGGSLRLSCAASGRTFTMGWYRQAPGKEREFVAAISLSPTLAYYADSVKGRFTISRDNSKNTVVLQMNSLRAEDTALYYCAADRKSVMSIRPDYWGQGTLVTVSSGSGGGGSGGGGSGGGGSFEEVQLVESGGGLVQPGGSLRLSCAASGYAFSNYWVNWVRQAPGKGLEWVAQIYPGDGDTNYNGKFKGRFTISRDNSKNTLYLQMNSLRAEDTAVYYCARSITTVVGCAMDYWGQGTLVTVSSTREDLKNVFPPEVAVFEPSKAEIAHTQKATLVCLATGFYPDHVELSWWVNGKEVHSGVCTDPQPLKEQPALNDSRYCLSSRLRVSATFWQNPRNHFRCQVQFYGLSENDEWTQDRAKPVTQIVSAEAWGRADCGITSASYHQGVLSATILYEILLGKATLYAVLVSALVLMAMVKRKDSRG

SEQ ID NO: 46215 - protein, 898 aa, synthetic construct
MALPVTALLLPLALLLHAARPEVQLVESGGGLVQAGGSLRLSCAASGRTFSMGWFRQAPGKEREFVAAITYSGGSPYYADSVKGRFTISRDNAKNTVYLQMNSLKPEDTAVYYCAANPTYGSDWNAENWGQGTQVTVSSGTGGGGSGGGGSGGGGSEFDIQMTQSPSSLSASVGDRVTITCKASDHINNWLAWYQQKPGKAPKLLIYGATTLETGVPSRFSGSGSGTDFTLTISSLQPEDFATYYCQQSWNTPWTFGQGTKVEIKRLEDLKNVFPPEVAVFEPSEAEISHTQKATLVCLATGFYPDHVELSWWVNGKEVHSGVCTDPQPLKEQPALNDSRYCLSSRLRVSATFWQNPRNHFRCQVQFYGLSENDEWTQDRAKPVTQIVSAEAWGRADCGFTSESYQQGVLSATILYEILLGKATLYAVLVSALVLMAMVKRKDSRGRAKRSGSGATNFSLLKQAGDVEENPGPTSATMDWIWRILFLVGAATGAHSGPEVQLVESGGGLVQAGGSLRLSCAASGRTFTMGWFRQAPGKEREFVAAISLSPTLAYYADSVKGRFTISRDNAKNTVVLQMNSLKPEDTALYYCAADRKSVMSIRPDYWGQGTQVTVSSGSGGGGSGGGGSGGGGSFEEVQLVESGGGLVQPGGSLRLSCAASGYAFSNYWVNWVRQAPGKGLEWVAQIYPGDGDTNYNGKFKGRFTISRDNSKNTLYLQMNSLRAEDTAVYYCARSITTVVGCAMDYWGQGTLVTVSSTRIQNPDPAVYQLRDSKSSDKSVCLFTDFDSQTNVSQSKDSDVYITDKCVLDMRSMDFKSNSAVAWSNKSDFACANAFNNSIIPEDTFFPSPESSCDVKLVEKSFETDTNLNFQNLSVIGFRILLLKVAGFNLLMTLRLWSS

SEQ ID NO: 46216 - protein, 769 aa, synthetic construct
MALPVTALLLPLALLLHAARPEVQLVESGGGLVQPGGSLRLSCEASGFASDDYIIGWFRQAPGKEREGVSCISSKYANTVYTDSVKGRFRLSRGTAKNTVYLQMSALKPEDTAVYYCAMDSRRVTCPEISTMHRNFDSWGQGTLVTVSSGTGGGGSGGGGSGGGGSEFDIQMTQSPSSLSASVGDRVTITCKASDHINNWLAWYQQKPGKAPKLLIYGATTLETGVPSRFSGSGSGTDFTLTISSLQPEDFATYYCQQSWNTPWTFGQGTKVEIKRLEDLKNVFPPEVAVFEPSKAEIAHTQKATLVCLATGFYPDHVELSWWVNGKEVHSGVCTDPQPLKEQPALNDSRYCLSSRLRVSATFWQNPRNHFRCQVQFYGLSENDEWTQDRAKPVTQIVSAEAWGRADCGITSASYHQGVLSATILYEILLGKATLYAVLVSALVLMAMVKRKDSRGRAKRSGSGATNFSLLKQAGDVEENPGPTSMDWIWRILFLVGAATGAHSFEEVQLVESGGGLVQPGGSLRLSCAASGYAFSNYWVNWVRQAPGKGLEWVAQIYPGDGDTNYNGKFKGRFTISRDNSKNTLYLQMNSLRAEDTAVYYCARSITTVVGCAMDYWGQGTLVTVSSTRIQNPDPAVYQLRDSKSSDKSVCLFTDFDSQTNVSQSKDSDVYITDKCVLDMRSMDFKSNSAVAWSNKSDFACANAFNNSIIPEDTFFPSSDVPCDVKLVEKSFETDTNLNFQNLSVIGFRILLLKVAGFNLLMTLRLWSS

SEQ ID NO: 46217 - protein, 760 aa, synthetic construct
MALPVTALLLPLALLLHAARPDIQMTQSPSSLSASVGDRVTITCKASDHINNWLAWYQQKPGKAPKLLIYGATTLETGVPSRFSGSGSGTDFTLTISSLQPEDFATYYCQQSWNTPWTFGQGTKVEIKRLEDLKNVFPPEVAVFEPSEAEISHTQKATLVCLATGFYPDHVELSWWVNGKEVHSGVCTDPQPLKEQPALNDSRYCLSSRLRVSATFWQNPRNHFRCQVQFYGLSENDEWTQDRAKPVTQIVSAEAWGRADCGFTSESYQQGVLSATILYEILLGKATLYAVLVSALVLMAMVKRKDSRGRAKRSGSGATNFSLLKQAGDVEENPGPTSTMDWIWRILFLVGAATGAHSGPEVQLVESGGGLVQPGGSLRLSCAASGRTFTMGWYRQAPGKEREFVAAISLSPTLAYYADSVKGRFTISRDNSKNTVVLQMNSLRAEDTALYYCAADRKSVMSIRPDYWGQGTLVTVSSGSGGGGSGGGGSGGGGSFEEVQLVESGGGLVQPGGSLRLSCAASGYAFSNYWVNWVRQAPGKGLEWVAQIYPGDGDTNYNGKFKGRFTISRDNSKNTLYLQMNSLRAEDTAVYYCARSITTVVGCAMDYWGQGTLVTVSSTRIQNPDPAVYQLRDSKSSDKSVCLFTDFDSQTNVSQSKDSDVYITDKCVLDMRSMDFKSNSAVAWSNKSDFACANAFNNSIIPEDTFFPSPESSCDVKLVEKSFETDTNLNFQNLSVIGFRILLLKVAGFNLLMTLRLWSS

SEQ ID NO: 46218 - protein, 767 aa, synthetic construct
MALPVTALLLPLALLLHAARPDIQMTQSPSSLSASVGDRVTITCKASDHINNWLAWYQQKPGKAPKLLIYGATTLETGVPSRFSGSGSGTDFTLTISSLQPEDFATYYCQQSWNTPWTFGQGTKVEIKRLEDLKNVFPPEVAVFEPSEAEISHTQKATLVCLATGFYPDHVELSWWVNGKEVHSGVCTDPQPLKEQPALNDSRYCLSSRLRVSATFWQNPRNHFRCQVQFYGLSENDEWTQDRAKPVTQIVSAEAWGRADCGFTSESYQQGVLSATILYEILLGKATLYAVLVSALVLMAMVKRKDSRGRAKRSGSGATNFSLLKQAGDVEENPGPTSTMDWIWRILFLVGAATGAHSGPQVQLVESGGGLVQPGGSLRLSCAASGNINSRNCMGWFRQAPGKGREGVAAIGQVTGRTYYVDSVKGRFTISLDNSKNTLYLQMNSLRAEDTAVYYCAAAPGCLLSALRSADYRNWGQGTLVTVSSGSGGGGSGGGGSGGGGSFEEVQLVESGGGLVQPGGSLRLSCAASGYAFSNYWVNWVRQAPGKGLEWVAQIYPGDGDTNYNGKFKGRFTISRDNSKNTLYLQMNSLRAEDTAVYYCARSITTVVGCAMDYWGQGTLVTVSSTRIQNPDPAVYQLRDSKSSDKSVCLFTDFDSQTNVSQSKDSDVYITDKCVLDMRSMDFKSNSAVAWSNKSDFACANAFNNSIIPEDTFFPSPESSCDVKLVEKSFETDTNLNFQNLSVIGFRILLLKVAGFNLLMTLRLWSS

SEQ ID NO: 46219 - protein, 767 aa, synthetic construct
MALPVTALLLPLALLLHAARPDIQMTQSPSSLSASVGDRVTITCKASDHINNWLAWYQQKPGKAPKLLIYGATTLETGVPSRFSGSGSGTDFTLTISSLQPEDFATYYCQQSWNTPWTFGQGTKVEIKRLEDLKNVFPPEVAVFEPSEAEISHTQKATLVCLATGFYPDHVELSWWVNGKEVHSGVCTDPQPLKEQPALNDSRYCLSSRLRVSATFWQNPRNHFRCQVQFYGLSENDEWTQDRAKPVTQIVSAEAWGRADCGFTSESYQQGVLSATILYEILLGKATLYAVLVSALVLMAMVKRKDSRGRAKRSGSGATNFSLLKQAGDVEENPGPTSTMDWIWRILFLVGAATGAHSGPQVQLVESGGGSVQAGGSLRLSCGASGNISSRNCMGWFRQAPGKEREGVAAIGQVTGRSYYVDSVKGRFTISLDNAKNTLYLQMNTLKPEDTAMYYCAAAPGCLLSALRSADYRNWGQGTQVTVSSGSGGGGSGGGGSGGGGSFEEVQLVESGGGLVQPGGSLRLSCAASGYAFSNYWVNWVRQAPGKGLEWVAQIYPGDGDTNYNGKFKGRFTISRDNSKNTLYLQMNSLRAEDTAVYYCARSITTVVGCAMDYWGQGTLVTVSSTRIQNPDPAVYQLRDSKSSDKSVCLFTDFDSQTNVSQSKDSDVYITDKCVLDMRSMDFKSNSAVAWSNKSDFACANAFNNSIIPEDTFFPSPESSCDVKLVEKSFETDTNLNFQNLSVIGFRILLLKVAGFNLLMTLRLWSS

SEQ ID NO: 46220 - protein, 908 aa, synthetic construct
MALPVTALLLPLALLLHAARPEVQLVESGGGLVQAGGSLRLSCAASGRTFSMGWFRQAPGKEREFVAAITYSGGSPYYADSVKGRFTISRDNAKNTVYLQMNSLKPEDTAVYYCAANPTYGSDWNAENWGQGTQVTVSSGTGGGGSGGGGSGGGGSEFDIQMTQSPSSLSASVGDRVTITCKASDHINNWLAWYQQKPGKAPKLLIYGATTLETGVPSRFSGSGSGTDFTLTISSLQPEDFATYYCQQSWNTPWTFGQGTKVEIKRLEIQNPDPAVYQLRDSKSSDKSVCLFTDFDSQTNVSQSKDSDVYITDKCVLDMRSMDFKSNSAVAWSNKSDFACANAFNNSIIPEDTFFPSSDVPCDVKLVEKSFETDTNLNFQNLSVIGFRILLLKVAGFNLLMTLRLWSSRAKRSGSGVKQTLNFDLLKLAGDVESNPGPTSTMDWIWRILFLVGAATGAHSGPQVQLVESGGGSVQAGGSLRLSCGASGNISSRNCMGWFRQAPGKEREGVAAIGQVTGRSYYVDSVKGRFTISLDNAKNTLYLQMNTLKPEDTAMYYCAAAPGCLLSALRSADYRNWGQGTQVTVSSGSGGGGSGGGGSGGGGSFEEVQLVESGGGLVQPGGSLRLSCAASGYAFSNYWVNWVRQAPGKGLEWVAQIYPGDGDTNYNGKFKGRFTISRDNSKNTLYLQMNSLRAEDTAVYYCARSITTVVGCAMDYWGQGTLVTVSSTREDLKNVFPPEVAVFEPSKAEIAHTQKATLVCLATGFYPDHVELSWWVNGKEVHSGVCTDPQPLKEQPALNDSRYCLSSRLRVSATFWQNPRNHFRCQVQFYGLSENDEWTQDRAKPVTQIVSAEAWGRADCGITSASYHQGVLSATILYEILLGKATLYAVLVSALVLMAMVKRKDSRG

SEQ ID NO: 46221 - protein, 905 aa, synthetic construct
MALPVTALLLPLALLLHAARPQVQLVESGGGSVQAGGSLRLSCGASGNISSRNCMGWFRQAPGKEREGVAAIGQVTGRSYYVDSVKGRFTISLDNAKNTLYLQMNTLKPEDTAMYYCAAAPGCLLSALRSADYRNWGQGTQVTVSSGTGGGGSGGGGSGGGGSEFDIQMTQSPSSLSASVGDRVTITCKASDHINNWLAWYQQKPGKAPKLLIYGATTLETGVPSRFSGSGSGTDFTLTISSLQPEDFATYYCQQSWNTPWTFGQGTKVEIKRLEDLKNVFPPEVAVFEPSEAEISHTQKATLVCLATGFYPDHVELSWWVNGKEVHSGVCTDPQPLKEQPALNDSRYCLSSRLRVSATFWQNPRNHFRCQVQFYGLSENDEWTQDRAKPVTQIVSAEAWGRADCGFTSESYQQGVLSATILYEILLGKATLYAVLVSALVLMAMVKRKDSRGRAKRSGSGATNFSLLKQAGDVEENPGPTSATMDWIWRILFLVGAATGAHSGPEVQLVESGGGLVQAGGSLRLSCAASGRTFTMGWFRQAPGKEREFVAAISLSPTLAYYADSVKGRFTISRDNAKNTVVLQMNSLKPEDTALYYCAADRKSVMSIRPDYWGQGTQVTVSSGSGGGGSGGGGSGGGGSFEEVQLVESGGGLVQPGGSLRLSCAASGYAFSNYWVNWVRQAPGKGLEWVAQIYPGDGDTNYNGKFKGRFTISRDNSKNTLYLQMNSLRAEDTAVYYCARSITTVVGCAMDYWGQGTLVTVSSTRIQNPDPAVYQLRDSKSSDKSVCLFTDFDSQTNVSQSKDSDVYITDKCVLDMRSMDFKSNSAVAWSNKSDFACANAFNNSIIPEDTFFPSPESSCDVKLVEKSFETDTNLNFQNLSVIGFRILLLKVAGFNLLMTLRLWSS

SEQ ID NO: 46222 - protein, 768 aa, synthetic construct
MALPVTALLLPLALLLHAARPQVQLVESGGGSVQAGGSLRLSCGASGNISSRNCMGWFRQAPGKEREGVAAIGQVTGRSYYVDSVKGRFTISLDNAKNTLYLQMNTLKPEDTAMYYCAAAPGCLLSALRSADYRNWGQGTQVTVSSGTGGGGSGGGGSGGGGSEFDIQMTQSPSSLSASVGDRVTITCKASDHINNWLAWYQQKPGKAPKLLIYGATTLETGVPSRFSGSGSGTDFTLTISSLQPEDFATYYCQQSWNTPWTFGQGTKVEIKRLEDLKNVFPPEVAVFEPSEAEISHTQKATLVCLATGFYPDHVELSWWVNGKEVHSGVCTDPQPLKEQPALNDSRYCLSSRLRVSATFWQNPRNHFRCQVQFYGLSENDEWTQDRAKPVTQIVSAEAWGRADCGFTSESYQQGVLSATILYEILLGKATLYAVLVSALVLMAMVKRKDSRGRAKRSGSGATNFSLLKQAGDVEENPGPTSATMDWIWRILFLVGAATGAHSFEEVQLVESGGGLVQPGGSLRLSCAASGYAFSNYWVNWVRQAPGKGLEWVAQIYPGDGDTNYNGKFKGRFTISRDNSKNTLYLQMNSLRAEDTAVYYCARSITTVVGCAMDYWGQGTLVTVSSTRIQNPDPAVYQLRDSKSSDKSVCLFTDFDSQTNVSQSKDSDVYITDKCVLDMRSMDFKSNSAVAWSNKSDFACANAFNNSIIPEDTFFPSPESSCDVKLVEKSFETDTNLNFQNLSVIGFRILLLKVAGFNLLMTLRLWSS

SEQ ID NO: 46223 - protein, 768 aa, synthetic construct
MALPVTALLLPLALLLHAARPQVQLVESGGGVVQPGGSLRLSCAASGLSFSTYTVAWFRQAPGKGLEGVAAIPYTSQHMVYTDSVRGRFTISRDNSKNTLYLQMNSLRAEDTAVYYCATDRRPGTSMLAINGYNRWGQGTTVTVSSGTGGGGSGGGGSGGGGSEFDIQMTQSPSSLSASVGDRVTITCKASDHINNWLAWYQQKPGKAPKLLIYGATTLETGVPSRFSGSGSGTDFTLTISSLQPEDFATYYCQQSWNTPWTFGQGTKVEIKRLEDLKNVFPPEVAVFEPSEAEISHTQKATLVCLATGFYPDHVELSWWVNGKEVHSGVCTDPQPLKEQPALNDSRYCLSSRLRVSATFWQNPRNHFRCQVQFYGLSENDEWTQDRAKPVTQIVSAEAWGRADCGFTSESYQQGVLSATILYEILLGKATLYAVLVSALVLMAMVKRKDSRGRAKRSGSGATNFSLLKQAGDVEENPGPTSATMDWIWRILFLVGAATGAHSFEEVQLVESGGGLVQPGGSLRLSCAASGYAFSNYWVNWVRQAPGKGLEWVAQIYPGDGDTNYNGKFKGRFTISRDNSKNTLYLQMNSLRAEDTAVYYCARSITTVVGCAMDYWGQGTLVTVSSTRIQNPDPAVYQLRDSKSSDKSVCLFTDFDSQTNVSQSKDSDVYITDKCVLDMRSMDFKSNSAVAWSNKSDFACANAFNNSIIPEDTFFPSPESSCDVKLVEKSFETDTNLNFQNLSVIGFRILLLKVAGFNLLMTLRLWSS

SEQ ID NO: 46224 - protein, 767 aa, synthetic construct
MALPVTALLLPLALLLHAARPDIQMTQSPSSLSASVGDRVTITCKASDHINNWLAWYQQKPGKAPKLLIYGATTLETGVPSRFSGSGSGTDFTLTISSLQPEDFATYYCQQSWNTPWTFGQGTKVEIKRLEDLKNVFPPEVAVFEPSEAEISHTQKATLVCLATGFYPDHVELSWWVNGKEVHSGVCTDPQPLKEQPALNDSRYCLSSRLRVSATFWQNPRNHFRCQVQFYGLSENDEWTQDRAKPVTQIVSAEAWGRADCGFTSESYQQGVLSATILYEILLGKATLYAVLVSALVLMAMVKRKDSRGRAKRSGSGATNFSLLKQAGDVEENPGPTSTMDWIWRILFLVGAATGAHSGPQVQLVESGGGVVQPGGSLRLSCAASGLSFSTYTVAWFRQAPGKGLEGVAAIPYTSQHMVYTDSVRGRFTISRDNSKNTLYLQMNSLRAEDTAVYYCATDRRPGTSMLAINGYNRWGQGTTVTVSSGSGGGGSGGGGSGGGGSFEEVQLVESGGGLVQPGGSLRLSCAASGYAFSNYWVNWVRQAPGKGLEWVAQIYPGDGDTNYNGKFKGRFTISRDNSKNTLYLQMNSLRAEDTAVYYCARSITTVVGCAMDYWGQGTLVTVSSTRIQNPDPAVYQLRDSKSSDKSVCLFTDFDSQTNVSQSKDSDVYITDKCVLDMRSMDFKSNSAVAWSNKSDFACANAFNNSIIPEDTFFPSPESSCDVKLVEKSFETDTNLNFQNLSVIGFRILLLKVAGFNLLMTLRLWSS

SEQ ID NO: 46225 - protein, 769 aa, synthetic construct
MALPVTALLLPLALLLHAARPDIQMTQSPSSLSASVGDRVTITCKASDHINNWLAWYQQKPGKAPKLLIYGATTLETGVPSRFSGSGSGTDFTLTISSLQPEDFATYYCQQSWNTPWTFGQGTKVEIKRLEDLKNVFPPEVAVFEPSEAEISHTQKATLVCLATGFYPDHVELSWWVNGKEVHSGVCTDPQPLKEQPALNDSRYCLSSRLRVSATFWQNPRNHFRCQVQFYGLSENDEWTQDRAKPVTQIVSAEAWGRADCGFTSESYQQGVLSATILYEILLGKATLYAVLVSALVLMAMVKRKDSRGRAKRSGSGATNFSLLKQAGDVEENPGPTSTMDWIWRILFLVGAATGAHSGPEVQLVESGGGSVQAGGSLRLSCAASGYTYSINCMGWFRQAPGKEREGVAAISTGGGRTDYRDSVKGRFTISQDNAKNTVYLQMNSLKPEDTAMYYCAGKTTYPGYGCGLGRSAYNYWGQGTQVTVSSGSGGGGSGGGGSGGGGSFEEVQLVESGGGLVQPGGSLRLSCAASGYAFSNYWVNWVRQAPGKGLEWVAQIYPGDGDTNYNGKFKGRFTISRDNSKNTLYLQMNSLRAEDTAVYYCARSITTVVGCAMDYWGQGTLVTVSSTRIQNPDPAVYQLRDSKSSDKSVCLFTDFDSQTNVSQSKDSDVYITDKCVLDMRSMDFKSNSAVAWSNKSDFACANAFNNSIIPEDTFFPSPESSCDVKLVEKSFETDTNLNFQNLSVIGFRILLLKVAGFNLLMTLRLWSS

SEQ ID NO: 46226 - protein, 622 aa, synthetic construct
MALPVTALLLPLALLLHAARPDIQMTQSPSSLSASVGDRVTITCKASDHINNWLAWYQQKPGKAPKLLIYGATTLETGVPSRFSGSGSGTDFTLTISSLQPEDFATYYCQQSWNTPWTFGQGTKVEIKRLEDLKHVFPPEVAVFEPSDAEIWHTQKATLVCLATGFYPDHVELSWWVNGKEVHSGVSTDPQPLKEQPALNDSRYCLSSRLRVSATFWQNPRNHFRCQVQFYGLSENDEWTQDRAKPVTQIVSAEAWGRADCGFTSESYQQGVLSATILYEILLGKATLYAVLVSALVLMAMVKRKDSRGRAKRSGSGATNFSLLKQAGDVEENPGPTSMDWIWRILFLVGAATGAHSFEEVQLVESGGGLVQPGGSLRLSCAASGYAFSNYWVNWVRQAPGKGLEWVAQIYPGDGDTNYNGKFKGRFTISRDNSKNTLYLQMNSLRAEDTAVYYCARSITTVVGCAMDYWGQGTLVTVSSTRIQNPDPAVYQLRDSKSSDKSVCLFTDFDSQTNVSQSKDSDVYITDKTVLDMRSMDFKSNSAVAWSSKSDFACANAFNNSIIPEDTFFPSPEMACDVKLVEKSFETDTNLNFQNLLVIWLRILLLKVAGFNLLMTLRLWSS

SEQ ID NO: 46227 - protein, 622 aa, synthetic construct
MALPVTALLLPLALLLHAARPDIQMTQSPSSLSASVGDRVTITCKASDHINNWLAWYQQKPGKAPKLLIYGATTLETGVPSRFSGSGSGTDFTLTISSLQPEDFATYYCQQSWNTPWTFGQGTKVEIKRLEDLKHVFPPEVAVFEPSDAEIWHTQKATLVCLATGFYPDHVELSWWVNGKEVHSGVSTDPQPLKEQPALNDSRYCLSSRLRVSATFWQNPRNHFRCQVQFYGLSENDEWTQDRAKPVTQIVSAEAWGRADCGFTSESYQQGVLSATILYEILLGKATLYAVLVSALVLMAMVKRKDSRGRAKRSGSGATNFSLLKQAGDVEENPGPTSMDWIWRILFLVGAATGAHSFEEVQLVESGGGLVQPGGSLRLSCAASGYAFSNYWVNWVRQAPGKGLEWVAQIYPGDGDTNYNGKFKGRFTISRDNSKNTLYLQMNSLRAEDTAVYYCARSITTVVGCAMDYWGQGTLVTVSSTRIQNPDPAVYQLRDSKSSDKSVCLFTDFDSQTNVSQSKDSDVYITDKTVLDMRSMDFKSNSAVAWSTKSDFACANAFNNSIIPEDTFFPSPEVVCDVKLVEKSFETDTNLNFQNLVVIGARILLLKVAGFNLLMTLRLWSS

SEQ ID NO: 46228 - protein, 622 aa, synthetic construct
MALPVTALLLPLALLLHAARPDIQMTQSPSSLSASVGDRVTITCKASDHINNWLAWYQQKPGKAPKLLIYGATTLETGVPSRFSGSGSGTDFTLTISSLQPEDFATYYCQQSWNTPWTFGQGTKVEIKRLEDLKNVFPPEVAVFEPSKAEISRTQKATLVCLATGFYPPHVELSWWVNGKEVHDGVCTDPQPLKEQPALNDSRYCLSSRLRVSATFWQNPRNHFRCQVQFYGLSENDEWTQDRAKPVTQIVSAEAWGRADCGFTSESYQQGVLSATILYEILLGKATLYAVLVSALVLMAMVKRKDSRGRAKRSGSGATNFSLLKQAGDVEENPGPTSMDWIWRILFLVGAATGAHSFEEVQLVESGGGLVQPGGSLRLSCAASGYAFSNYWVNWVRQAPGKGLEWVAQIYPGDGDTNYNGKFKGRFTISRDNSKNTLYLQMNSLRAEDTAVYYCARSITTVVGCAMDYWGQGTLVTVSSTRIQNPDPAVYQLRDSKSSDKFVCLFTDFDSQINVSQSKDSDVYITDKCVLDMRSMDFKSNSAVAWSNKSDFTCANAFNNSIIPEDTFFPSPESSCDVKLVEKSFETDTNLNFQNLSVIGFRILLLKVAGFNLLMTLRLWSS

SEQ ID NO: 46229 - protein, 764 aa, synthetic construct
MALPVTALLLPLALLLHAARPDIQMTQSPSSLSASVGDRVTITCKASDHINNWLAWYQQKPGKAPKLLIYGATTLETGVPSRFSGSGSGTDFTLTISSLQPEDFATYYCQQSWNTPWTFGQGTKVEIKRLEDLKNVFPPEVAVFEPSEAEISHTQKATLVCLATGFYPDHVELSWWVNGKEVHSGVCTDPQPLKEQPALNDSRYCLSSRLRVSATFWQNPRNHFRCQVQFYGLSENDEWTQDRAKPVTQIVSAEAWGRADCGFTSESYQQGVLSATILYEILLGKATLYAVLVSALVLMAMVKRKDSRGRAKRSGSGATNFSLLKQAGDVEENPGPTSTMDWIWRILFLVGAATGAHSGPQVQLQESGPGLVKPSQTLSLTCTVSGASITTGEYYWNWFRQPPGKGLEWMGAIAASGSTTYSPSFESRTSISRDTSKNQFSLKLSSVTAADTAVYYCGRSFGVAAVTTGQNRGQGTLVTVSSGSGGGGSGGGGSGGGGSFEEVQLVESGGGLVQPGGSLRLSCAASGYAFSNYWVNWVRQAPGKGLEWVAQIYPGDGDTNYNGKFKGRFTISRDNSKNTLYLQMNSLRAEDTAVYYCARSITTVVGCAMDYWGQGTLVTVSSTRIQNPDPAVYQLRDSKSSDKSVCLFTDFDSQTNVSQSKDSDVYITDKCVLDMRSMDFKSNSAVAWSNKSDFACANAFNNSIIPEDTFFPSPESSCDVKLVEKSFETDTNLNFQNLSVIGFRILLLKVAGFNLLMTLRLWSS

SEQ ID NO: 46230 - protein, 905 aa, synthetic construct
MALPVTALLLPLALLLHAARPQVQLQESGPGLVKPSQTLSLTCTVSGGSITTGEFYWNWFRQPPGKGLEWMGAIAASGSTTYSPSFESRTSISRDTSKNQFSLKLSSVTAADTAVYYCGRSFGVAAVTTGQNRGQGTLVTVSSGTGGGGSGGGGSGGGGSEFDIQMTQSPSSLSASVGDRVTITCKASDHINNWLAWYQQKPGKAPKLLIYGATTLETGVPSRFSGSGSGTDFTLTISSLQPEDFATYYCQQSWNTPWTFGQGTKVEIKRLEIQNPDPAVYQLRDSKSSDKSVCLFTDFDSQTNVSQSKDSDVYITDKCVLDMRSMDFKSNSAVAWSNKSDFACANAFNNSIIPEDTFFPSSDVPCDVKLVEKSFETDTNLNFQNLSVIGFRILLLKVAGFNLLMTLRLWSSRAKRSGSGVKQTLNFDLLKLAGDVESNPGPTSTMDWIWRILFLVGAATGAHSGPEVQLVESGGGLVQPGGSLRLSCAASGRTFTMGWYRQAPGKEREFVAAISLSPTLAYYADSVKGRFTISRDNSKNTVVLQMNSLRAEDTALYYCAADRKSVMSIRPDYWGQGTLVTVSSGSGGGGSGGGGSGGGGSFEEVQLVESGGGLVQPGGSLRLSCAASGYAFSNYWVNWVRQAPGKGLEWVAQIYPGDGDTNYNGKFKGRFTISRDNSKNTLYLQMNSLRAEDTAVYYCARSITTVVGCAMDYWGQGTLVTVSSTREDLKNVFPPEVAVFEPSKAEIAHTQKATLVCLATGFYPDHVELSWWVNGKEVHSGVCTDPQPLKEQPALNDSRYCLSSRLRVSATFWQNPRNHFRCQVQFYGLSENDEWTQDRAKPVTQIVSAEAWGRADCGITSASYHQGVLSATILYEILLGKATLYAVLVSALVLMAMVKRKDSRG

SEQ ID NO: 46231 - protein, 768 aa, synthetic construct
MALPVTALLLPLALLLHAARPQVQLQESGPGLVKPSQTLSLTCTVSGGSITTGEFYWNWFRQPPGKGLEWMGAIAASGSTTYSPSFESRTSISRDTSKNQFSLKLSSVTAADTAVYYCGRSFGVAAVTTGQNRGQGTLVTVSSGTGGGGSGGGGSGGGGSEFDIQMTQSPSSLSASVGDRVTITCKASDHINNWLAWYQQKPGKAPKLLIYGATTLETGVPSRFSGSGSGTDFTLTISSLQPEDFATYYCQQSWNTPWTFGQGTKVEIKRLEIQNPDPAVYQLRDSKSSDKSVCLFTDFDSQTNVSQSKDSDVYITDKCVLDMRSMDFKSNSAVAWSNKSDFACANAFNNSIIPEDTFFPSSDVPCDVKLVEKSFETDTNLNFQNLSVIGFRILLLKVAGFNLLMTLRLWSSRAKRSGSGVKQTLNFDLLKLAGDVESNPGPTSTMDWIWRILFLVGAATGAHSFEEVQLVESGGGLVQPGGSLRLSCAASGYAFSNYWVNWVRQAPGKGLEWVAQIYPGDGDTNYNGKFKGRFTISRDNSKNTLYLQMNSLRAEDTAVYYCARSITTVVGCAMDYWGQGTLVTVSSTREDLKNVFPPEVAVFEPSKAEIAHTQKATLVCLATGFYPDHVELSWWVNGKEVHSGVCTDPQPLKEQPALNDSRYCLSSRLRVSATFWQNPRNHFRCQVQFYGLSENDEWTQDRAKPVTQIVSAEAWGRADCGITSASYHQGVLSATILYEILLGKATLYAVLVSALVLMAMVKRKDSRG

SEQ ID NO: 46232 - protein, 901 aa, synthetic construct
MALPVTALLLPLALLLHAARPEVQLVESGGGLVQAGGSLRLSCAASGRTFSMGWFRQAPGKEREFVAAITYSGGSPYYADSVKGRFTISRDNAKNTVYLQMNSLKPEDTAVYYCAANPTYGSDWNAENWGQGTQVTVSSGTGGGGSGGGGSGGGGSEFDIQMTQSPSSLSASVGDRVTITCKASDHINNWLAWYQQKPGKAPKLLIYGATTLETGVPSRFSGSGSGTDFTLTISSLQPEDFATYYCQQSWNTPWTFGQGTKVEIKRLEDLKNVFPPEVAVFEPSEAEISHTQKATLVCLATGFYPDHVELSWWVNGKEVHSGVCTDPQPLKEQPALNDSRYCLSSRLRVSATFWQNPRNHFRCQVQFYGLSENDEWTQDRAKPVTQIVSAEAWGRADCGFTSESYQQGVLSATILYEILLGKATLYAVLVSALVLMAMVKRKDSRGRAKRSGSGATNFSLLKQAGDVEENPGPTSTMDWIWRILFLVGAATGAHSGPQVQLQESGPGLVKPSQTLSLTCTVSGASITTGEYYWNWFRQPPGKGLEWMGAIAASGSTTYSPSFESRTSISRDTSKNQFSLKLSSVTAADTAVYYCGRSFGVAAVTTGQNRGQGTLVTVSSGSGGGGSGGGGSGGGGSFEEVQLVESGGGLVQPGGSLRLSCAASGYAFSNYWVNWVRQAPGKGLEWVAQIYPGDGDTNYNGKFKGRFTISRDNSKNTLYLQMNSLRAEDTAVYYCARSITTVVGCAMDYWGQGTLVTVSSTRIQNPDPAVYQLRDSKSSDKSVCLFTDFDSQTNVSQSKDSDVYITDKCVLDMRSMDFKSNSAVAWSNKSDFACANAFNNSIIPEDTFFPSPESSCDVKLVEKSFETDTNLNFQNLSVIGFRILLLKVAGFNLLMTLRLWSS

SEQ ID NO: 46233 - protein, 908 aa, synthetic construct
MALPVTALLLPLALLLHAARPEVQLVESGGGLVQAGGSLRLSCAASGRTFSMGWFRQAPGKEREFVAAITYSGGSPYYADSVKGRFTISRDNAKNTVYLQMNSLKPEDTAVYYCAANPTYGSDWNAENWGQGTQVTVSSGTGGGGSGGGGSGGGGSEFDIQMTQSPSSLSASVGDRVTITCKASDHINNWLAWYQQKPGKAPKLLIYGATTLETGVPSRFSGSGSGTDFTLTISSLQPEDFATYYCQQSWNTPWTFGQGTKVEIKRLEIQNPDPAVYQLRDSKSSDKSVCLFTDFDSQTNVSQSKDSDVYITDKCVLDMRSMDFKSNSAVAWSNKSDFACANAFNNSIIPEDTFFPSSDVPCDVKLVEKSFETDTNLNFQNLSVIGFRILLLKVAGFNLLMTLRLWSSRAKRSGSGVKQTLNFDLLKLAGDVESNPGPTSTMDWIWRILFLVGAATGAHSGPQVQLVESGGGLVQPGGSLRLSCAASGNINSRNCMGWFRQAPGKGREGVAAIGQVTGRTYYVDSVKGRFTISLDNSKNTLYLQMNSLRAEDTAVYYCAAAPGCLLSALRSADYRNWGQGTLVTVSSGSGGGGSGGGGSGGGGSFEEVQLVESGGGLVQPGGSLRLSCAASGYAFSNYWVNWVRQAPGKGLEWVAQIYPGDGDTNYNGKFKGRFTISRDNSKNTLYLQMNSLRAEDTAVYYCARSITTVVGCAMDYWGQGTLVTVSSTREDLKNVFPPEVAVFEPSKAEIAHTQKATLVCLATGFYPDHVELSWWVNGKEVHSGVCTDPQPLKEQPALNDSRYCLSSRLRVSATFWQNPRNHFRCQVQFYGLSENDEWTQDRAKPVTQIVSAEAWGRADCGITSASYHQGVLSATILYEILLGKATLYAVLVSALVLMAMVKRKDSRG

SEQ ID NO: 46234 - protein, 904 aa, synthetic construct
MALPVTALLLPLALLLHAARPEVQLVESGGGLVQAGGSLRLSCAASGRTFSMGWFRQAPGKEREFVAAITYSGGSPYYADSVKGRFTISRDNAKNTVYLQMNSLKPEDTAVYYCAANPTYGSDWNAENWGQGTQVTVSSGTGGGGSGGGGSGGGGSEFDIQMTQSPSSLSASVGDRVTITCKASDHINNWLAWYQQKPGKAPKLLIYGATTLETGVPSRFSGSGSGTDFTLTISSLQPEDFATYYCQQSWNTPWTFGQGTKVEIKRLEDLKNVFPPEVAVFEPSEAEISHTQKATLVCLATGFYPDHVELSWWVNGKEVHSGVCTDPQPLKEQPALNDSRYCLSSRLRVSATFWQNPRNHFRCQVQFYGLSENDEWTQDRAKPVTQIVSAEAWGRADCGFTSESYQQGVLSATILYEILLGKATLYAVLVSALVLMAMVKRKDSRGRAKRSGSGATNFSLLKQAGDVEENPGPTSTMDWIWRILFLVGAATGAHSGPQVQLVESGGGLVQPGGSLRLSCAASGNINSRNCMGWFRQAPGKGREGVAAIGQVTGRTYYVDSVKGRFTISLDNSKNTLYLQMNSLRAEDTAVYYCAAAPGCLLSALRSADYRNWGQGTLVTVSSGSGGGGSGGGGSGGGGSFEEVQLVESGGGLVQPGGSLRLSCAASGYAFSNYWVNWVRQAPGKGLEWVAQIYPGDGDTNYNGKFKGRFTISRDNSKNTLYLQMNSLRAEDTAVYYCARSITTVVGCAMDYWGQGTLVTVSSTRIQNPDPAVYQLRDSKSSDKSVCLFTDFDSQTNVSQSKDSDVYITDKCVLDMRSMDFKSNSAVAWSNKSDFACANAFNNSIIPEDTFFPSPESSCDVKLVEKSFETDTNLNFQNLSVIGFRILLLKVAGFNLLMTLRLWSS

SEQ ID NO: 46235 - protein, 904 aa, synthetic construct
MALPVTALLLPLALLLHAARPEVQLVESGGGLVQAGGSLRLSCAASGRTFTMGWFRQAPGKEREFVAAISLSPTLAYYADSVKGRFTISRDNAKNTVVLQMNSLKPEDTALYYCAADRKSVMSIRPDYWGQGTQVTVSSGTGGGGSGGGGSGGGGSEFDIQMTQSPSSLSASVGDRVTITCKASDHINNWLAWYQQKPGKAPKLLIYGATTLETGVPSRFSGSGSGTDFTLTISSLQPEDFATYYCQQSWNTPWTFGQGTKVEIKRLEDLKNVFPPEVAVFEPSEAEISHTQKATLVCLATGFYPDHVELSWWVNGKEVHSGVCTDPQPLKEQPALNDSRYCLSSRLRVSATFWQNPRNHFRCQVQFYGLSENDEWTQDRAKPVTQIVSAEAWGRADCGFTSESYQQGVLSATILYEILLGKATLYAVLVSALVLMAMVKRKDSRGRAKRSGSGATNFSLLKQAGDVEENPGPTSTMDWIWRILFLVGAATGAHSGPQVQLVESGGGLVQPGGSLRLSCAASGNINSRNCMGWFRQAPGKGREGVAAIGQVTGRTYYVDSVKGRFTISLDNSKNTLYLQMNSLRAEDTAVYYCAAAPGCLLSALRSADYRNWGQGTLVTVSSGSGGGGSGGGGSGGGGSFEEVQLVESGGGLVQPGGSLRLSCAASGYAFSNYWVNWVRQAPGKGLEWVAQIYPGDGDTNYNGKFKGRFTISRDNSKNTLYLQMNSLRAEDTAVYYCARSITTVVGCAMDYWGQGTLVTVSSTRIQNPDPAVYQLRDSKSSDKSVCLFTDFDSQTNVSQSKDSDVYITDKCVLDMRSMDFKSNSAVAWSNKSDFACANAFNNSIIPEDTFFPSPESSCDVKLVEKSFETDTNLNFQNLSVIGFRILLLKVAGFNLLMTLRLWSS

SEQ ID NO: 46236 - protein, 908 aa, synthetic construct
MALPVTALLLPLALLLHAARPQVQLQESGPGLVKPSQTLSLTCTVSGGSITTGEFYWNWFRQPPGKGLEWMGAIAASGSTTYSPSFESRTSISRDTSKNQFSLKLSSVTAADTAVYYCGRSFGVAAVTTGQNRGQGTLVTVSSGTGGGGSGGGGSGGGGSEFDIQMTQSPSSLSASVGDRVTITCKASDHINNWLAWYQQKPGKAPKLLIYGATTLETGVPSRFSGSGSGTDFTLTISSLQPEDFATYYCQQSWNTPWTFGQGTKVEIKRLEDLKNVFPPEVAVFEPSEAEISHTQKATLVCLATGFYPDHVELSWWVNGKEVHSGVCTDPQPLKEQPALNDSRYCLSSRLRVSATFWQNPRNHFRCQVQFYGLSENDEWTQDRAKPVTQIVSAEAWGRADCGFTSESYQQGVLSATILYEILLGKATLYAVLVSALVLMAMVKRKDSRGRAKRSGSGATNFSLLKQAGDVEENPGPTSTMDWIWRILFLVGAATGAHSGPQVQLVESGGGLVQPGGSLRLSCAASGNINSRNCMGWFRQAPGKGREGVAAIGQVTGRTYYVDSVKGRFTISLDNSKNTLYLQMNSLRAEDTAVYYCAAAPGCLLSALRSADYRNWGQGTLVTVSSGSGGGGSGGGGSGGGGSFEEVQLVESGGGLVQPGGSLRLSCAASGYAFSNYWVNWVRQAPGKGLEWVAQIYPGDGDTNYNGKFKGRFTISRDNSKNTLYLQMNSLRAEDTAVYYCARSITTVVGCAMDYWGQGTLVTVSSTRIQNPDPAVYQLRDSKSSDKSVCLFTDFDSQTNVSQSKDSDVYITDKCVLDMRSMDFKSNSAVAWSNKSDFACANAFNNSIIPEDTFFPSPESSCDVKLVEKSFETDTNLNFQNLSVIGFRILLLKVAGFNLLMTLRLWSS

SEQ ID NO: 46237 - protein, 484 aa, synthetic construct
MALPVTALLLPLALLLHAARPDIQMTQSPSSLSASVGDRVTITCKSSQSLLDSDGKTYLNWYQQKPGKAPKLLIYLVSKLDSGVPSRFSGSGSGTDFTLTISSLQPEDFATYYCFQGTHFPFTFGQGTKVEIKRGGGGSGGGGSGGGGSEVQLVESGGGLVQPGGSLRLSCAASGYTFTSYWMNWVRQAPGKGLEWVGMIDPSDSETHYNHIFKDRFTISADTSKNTAYLQMNSLRAEDTAVYYCARNLYLFGQGTLVTVSSTRKIEVMYPPPYLDNEKSNGTIIHVKGKHLCPSPLFPGPSKPFWVLVVVGGVLACYSLLVTVAFIIFWVRSKRSRLLHSDYMNMTPRRPGPTRKHYQPYAPPRDFAAYRSRVKFSRSADAPAYQQGQNQLYNELNLGRREEYDVLDKRRGRDPEMGGKPRRKNPQEGLYNELQKDKMAEAYSEIGMKGERRRGKGHDGLYQGLSTATKDTYDALHMQALPPR

SEQ ID NO: 46238 - protein, 490 aa, synthetic construct
MALPVTALLLPLALLLHAARPDIQMTQSPSSLSASVGDRVTITCKSSQSLLDSDGKTYLNWYQQKPGKAPKLLIYLVSKLDSGVPSRFSGSGSGTDFTLTISSLQPEDFATYYCFQGTHFPFTFGQGTKVEIKRGGGGSGGGGSGGGGSEVQLVESGGGLVQPGGSLRLSCAASGYTFTSYWMNWVRQAPGKGLEWVGMIDPSDSETHYNHIFKDRFTISADTSKNTAYLQMNSLRAEDTAVYYCARNLYLFGQGTLVTVSSTRAKPTTTPAPRPPTPAPTIASQPLSLRPEACRPAAGGAVHTRGLDFACDIYIWAPLAGTCGVLLLSLVITLYCKRGRKKLLYIFKQPFMRPVQTTQEEDGCSCRFPEEEEGGCELRVKFSRSADAPAYQQGQNQLYNELNLGRREEYDVLDKRRGRDPEMGGKPRRKNPQEGLYNELQKDKMAEAYSEIGMKGERRRGKGHDGLYQGLSTATKDTYDALHMQALPPR

SEQ ID NO: 46239 - protein, 490 aa, synthetic construct
MALPVTALLLPLALLLHAARPEVQLVESGGGLVQPGGSLRLSCAASGYTFTSYWMNWVRQAPGKGLEWVGMIDPSDSETHYNHIFKDRFTISADTSKNTAYLQMNSLRAEDTAVYYCARNLYLFGQGTLVTVSSGGGGSGGGGSGGGGSDIQMTQSPSSLSASVGDRVTITCKSSQSLLDSDGKTYLNWYQQKPGKAPKLLIYLVSKLDSGVPSRFSGSGSGTDFTLTISSLQPEDFATYYCFQGTHFPFTFGQGTKVEIKRTRAKPTTTPAPRPPTPAPTIASQPLSLRPEACRPAAGGAVHTRGLDFACDIYIWAPLAGTCGVLLLSLVITLYCKRGRKKLLYIFKQPFMRPVQTTQEEDGCSCRFPEEEEGGCELRVKFSRSADAPAYQQGQNQLYNELNLGRREEYDVLDKRRGRDPEMGGKPRRKNPQEGLYNELQKDKMAEAYSEIGMKGERRRGKGHDGLYQGLSTATKDTYDALHMQALPPR

SEQ ID NO: 46240 - protein, 623 aa, synthetic construct
MALPVTALLLPLALLLHAARPDIQMTQSPSSLSASVGDRVTITCKSSQSLLDSDGKTYLNWYQQKPGKAPKLLIYLVSKLDSGVPSRFSGSGSGTDFTLTISSLQPEDFATYYCFQGTHFPFTFGQGTKVEIKRLEIQNPDPAVYQLRDSKSSDKSVCLFTDFDSQTNVSQSKDSDVYITDKCVLDMRSMDFKSNSAVAWSNKSDFACANAFNNSIIPEDTFFPSSDVPCDVKLVEKSFETDTNLNFQNLSVIGFRILLLKVAGFNLLMTLRLWSSRAKRSGSGVKQTLNFDLLKLAGDVESNPGPTSMDWIWRILFLVGAATGAHSFEEVQLVESGGGLVQPGGSLRLSCAASGYTFTSYWMNWVRQAPGKGLEWVGMIDPSDSETHYNHIFKDRFTISADTSKNTAYLQMNSLRAEDTAVYYCARNLYLFGQGTLVTVSSTREDLKNVFPPEVAVFEPSKAEIAHTQKATLVCLATGFYPDHVELSWWVNGKEVHSGVCTDPQPLKEQPALNDSRYCLSSRLRVSATFWQNPRNHFRCQVQFYGLSENDEWTQDRAKPVTQIVSAEAWGRADCGITSASYHQGVLSATILYEILLGKATLYAVLVSALVLMAMVKRKDSRG

SEQ ID NO: 46241 - protein, 619 aa, synthetic construct
MALPVTALLLPLALLLHAARPDIQMTQSPSSLSASVGDRVTITCKSSQSLLDSDGKTYLNWYQQKPGKAPKLLIYLVSKLDSGVPSRFSGSGSGTDFTLTISSLQPEDFATYYCFQGTHFPFTFGQGTKVEIKRLEDLKNVFPPEVAVFEPSKAEIAHTQKATLVCLATGFYPDHVELSWWVNGKEVHSGVCTDPQPLKEQPALNDSRYCLSSRLRVSATFWQNPRNHFRCQVQFYGLSENDEWTQDRAKPVTQIVSAEAWGRADCGITSASYHQGVLSATILYEILLGKATLYAVLVSALVLMAMVKRKDSRGRAKRSGSGATNFSLLKQAGDVEENPGPTSMDWIWRILFLVGAATGAHSFEEVQLVESGGGLVQPGGSLRLSCAASGYTFTSYWMNWVRQAPGKGLEWVGMIDPSDSETHYNHIFKDRFTISADTSKNTAYLQMNSLRAEDTAVYYCARNLYLFGQGTLVTVSSTRIQNPDPAVYQLRDSKSSDKSVCLFTDFDSQTNVSQSKDSDVYITDKCVLDMRSMDFKSNSAVAWSNKSDFACANAFNNSIIPEDTFFPSSDVPCDVKLVEKSFETDTNLNFQNLSVIGFRILLLKVAGFNLLMTLRLWSS

SEQ ID NO: 46242 - protein, 619 aa, synthetic construct
MALPVTALLLPLALLLHAARPDIQMTQSPSSLSASVGDRVTITCKSSQSLLDSDGKTYLNWYQQKPGKAPKLLIYLVSKLDSGVPSRFSGSGSGTDFTLTISSLQPEDFATYYCFQGTHFPFTFGQGTKVEIKRLEDLKNVFPPEVAVFEPSEAEISHTQKATLVCLATGFYPDHVELSWWVNGKEVHSGVCTDPQPLKEQPALNDSRYCLSSRLRVSATFWQNPRNHFRCQVQFYGLSENDEWTQDRAKPVTQIVSAEAWGRADCGFTSESYQQGVLSATILYEILLGKATLYAVLVSALVLMAMVKRKDSRGRAKRSGSGATNFSLLKQAGDVEENPGPTSMDWIWRILFLVGAATGAHSFEEVQLVESGGGLVQPGGSLRLSCAASGYTFTSYWMNWVRQAPGKGLEWVGMIDPSDSETHYNHIFKDRFTISADTSKNTAYLQMNSLRAEDTAVYYCARNLYLFGQGTLVTVSSTRIQNPDPAVYQLRDSKSSDKSVCLFTDFDSQTNVSQSKDSDVYITDKCVLDMRSMDFKSNSAVAWSNKSDFACANAFNNSIIPEDTFFPSPESSCDVKLVEKSFETDTNLNFQNLSVIGFRILLLKVAGFNLLMTLRLWSS

SEQ ID NO: 46243 - protein, 623 aa, synthetic construct
MALPVTALLLPLALLLHAARPDIQMTQSPSSLSASVGDRVTITCKSSQSLLDSDGKTYLNWYQQKPGKAPKLLIYLVSKLDSGVPSRFSGSGSGTDFTLTISSLQPEDFATYYCFQGTHFPFTFGQGTKVEIKRLEIQNPDPAVYQLRDSKSSDKSVCLFTDFDSQTNVSQSKDSDVYITDKCVLDMRSMDFKSNSAVAWSNKSDFACANAFNNSIIPEDTFFPSPESSCDVKLVEKSFETDTNLNFQNLSVIGFRILLLKVAGFNLLMTLRLWSSRAKRSGSGVKQTLNFDLLKLAGDVESNPGPTSMDWIWRILFLVGAATGAHSFEEVQLVESGGGLVQPGGSLRLSCAASGYTFTSYWMNWVRQAPGKGLEWVGMIDPSDSETHYNHIFKDRFTISADTSKNTAYLQMNSLRAEDTAVYYCARNLYLFGQGTLVTVSSTREDLKNVFPPEVAVFEPSEAEISHTQKATLVCLATGFYPDHVELSWWVNGKEVHSGVCTDPQPLKEQPALNDSRYCLSSRLRVSATFWQNPRNHFRCQVQFYGLSENDEWTQDRAKPVTQIVSAEAWGRADCGFTSESYQQGVLSATILYEILLGKATLYAVLVSALVLMAMVKRKDSRG

SEQ ID NO: 46244 - protein, 635 aa, synthetic construct
MALPVTALLLPLALLLHAARPLEEDLKNVFPPEVAVFEPSKAEIAHTQKATLVCLATGFYPDHVELSWWVNGKEVHSGVCTDPQPLKEQPALNDSRYCLSSRLRVSATFWQNPRNHFRCQVQFYGLSENDEWTQDRAKPVTQIVSAEAWGRADCGITSASYHQGVLSATILYEILLGKATLYAVLVSALVLMAMVKRKDSRGRAKRSGSGATNFSLLKQAGDVEENPGPTSMALPVTALLLPLALLLHAARPDIQMTQSPSSLSASVGDRVTITCKSSQSLLDSDGKTYLNWYQQKPGKAPKLLIYLVSKLDSGVPSRFSGSGSGTDFTLTISSLQPEDFATYYCFQGTHFPFTFGQGTKVEIKRGGGGSGGGGSGGGGSEVQLVESGGGLVQPGGSLRLSCAASGYTFTSYWMNWVRQAPGKGLEWVGMIDPSDSETHYNHIFKDRFTISADTSKNTAYLQMNSLRAEDTAVYYCARNLYLFGQGTLVTVSSTRIQNPDPAVYQLRDSKSSDKSVCLFTDFDSQTNVSQSKDSDVYITDKCVLDMRSMDFKSNSAVAWSNKSDFACANAFNNSIIPEDTFFPSSDVPCDVKLVEKSFETDTNLNFQNLSVIGFRILLLKVAGFNLLMTLRLWSS

SEQ ID NO: 46245 - protein, 642 aa, synthetic construct
MALPVTALLLPLALLLHAARPLEGSGDRPDPAVYQLRDSKSSDKSVCLFTDFDSQTNVSQSKDSDVYITDKCVLDMRSMDFKSNSAVAWSNKSDFACANAFNNSIIPEDTFFPSPESSCDVKLVEKSFETDTNLNFQNLSVIGFRILLLKVAGFNLLMTLRLWSSSSRAKRSGSGVKQTLNFDLLKLAGDVESNPGPTSMALPVTALLLPLALLLHAARPDIQMTQSPSSLSASVGDRVTITCKSSQSLLDSDGKTYLNWYQQKPGKAPKLLIYLVSKLDSGVPSRFSGSGSGTDFTLTISSLQPEDFATYYCFQGTHFPFTFGQGTKVEIKRGGGGSGGGGSGGGGSEVQLVESGGGLVQPGGSLRLSCAASGYTFTSYWMNWVRQAPGKGLEWVGMIDPSDSETHYNHIFKDRFTISADTSKNTAYLQMNSLRAEDTAVYYCARNLYLFGQGTLVTVSSTREDLKNVFPPEVAVFEPSEAEISHTQKATLVCLATGFYPDHVELSWWVNGKEVHSGVCTDPQPLKEQPALNDSRYCLSSRLRVSATFWQNPRNHFRCQVQFYGLSENDEWTQDRAKPVTQIVSAEAWGRADCGFTSESYQQGVLSATILYEILLGKATLYAVLVSALVLMAMVKRKDSRG

SEQ ID NO: 46246 - protein, 619 aa, synthetic construct
MALPVTALLLPLALLLHAARPDIQMTQSPSSLSASVGDRVTITCKSSQSLLDSDGKTYLNWYQQKPGKAPKLLIYLVSKLDSGVPSRFSGSGSGTDFTLTISSLQPEDFATYYCFQGTHFPFTFGQGTKVEIKRLEDLKNVFPPEVAVFEPSEAEISHTQKATLVCLATGFYPDHVELSWWVNGKEVHSGVSTDPQPLKEQPALNDSRYCLSSRLRVSATFWQNPRNHFRCQVQFYGLSENDEWTQDRAKPVTQIVSAEAWGRADCGFTSESYQQGVLSATILYEILLGKATLYAVLVSALVLMAMVKRKDSRGRAKRSGSGATNFSLLKQAGDVEENPGPTSMDWIWRILFLVGAATGAHSFEEVQLVESGGGLVQPGGSLRLSCAASGYTFTSYWMNWVRQAPGKGLEWVGMIDPSDSETHYNHIFKDRFTISADTSKNTAYLQMNSLRAEDTAVYYCARNLYLFGQGTLVTVSSTRIQNPDPAVYQLRDSKSSDKSVCLFTDFDSQTNVSQSKDSDVYITDKTVLDMRSMDFKSNSAVAWSNKSDFACANAFNNSIIPEDTFFPSPESSCDVKLVEKSFETDTNLNFQNLSVIGFRILLLKVAGFNLLMTLRLWSS

SEQ ID NO: 46247 - protein, 627 aa, synthetic construct
MALPVTALLLPLALLLHAARPDIQMTQSPSSLSASVGDRVTITCKSSQSLLDSDGKTYLNWYQQKPGKAPKLLIYLVSKLDSGVPSRFSGSGSGTDFTLTISSLQPEDFATYYCFQGTHFPFTFGQGTKVEIKRLEDKQLDADVSPKPTIFLPSIAETKLQKAGTYLCLLEKFFPDVIKIHWQEKKSNTILGSQEGNTMKTNDTYMKFSWLTVPEKSLDKEHRCIVRHENNKNGVDQEIIFPPIKTDVITMDPKDNCSKDANDTLLLQLTNTSAYYMYLLLLLKSVVYFAIITCCLLRRTAFCCNGEKSRAKRSGSGATNFSLLKQAGDVEENPGPTSMDWIWRILFLVGAATGAHSFEEVQLVESGGGLVQPGGSLRLSCAASGYTFTSYWMNWVRQAPGKGLEWVGMIDPSDSETHYNHIFKDRFTISADTSKNTAYLQMNSLRAEDTAVYYCARNLYLFGQGTLVTVSSTRSQPHTKPSVFVMKNGTNVACLVKEFYPKDIRINLVSSKKITEFDPAIVISPSGKYNAVKLGKYEDSNSVTCSVQHDNKTVHSTDFEVKTDSTDHVKPKETENTKQPSKSCHKPKAIVHTEKVNMMSLTVLGLRMLFAKTVAVNFLLTAKLFFL

SEQ ID NO: 46248 - protein, 627 aa, synthetic construct
MALPVTALLLPLALLLHAARPDIQMTQSPSSLSASVGDRVTITCKSSQSLLDSDGKTYLNWYQQKPGKAPKLLIYLVSKLDSGVPSRFSGSGSGTDFTLTISSLQPEDFATYYCFQGTHFPFTFGQGTKVEIKRLESQPHTKPSVFVMKNGTNVACLVKEFYPKDIRINLVSSKKITEFDPAIVISPSGKYNAVKLGKYEDSNSVTCSVQHDNKTVHSTDFEVKTDSTDHVKPKETENTKQPSKSCHKPKAIVHTEKVNMMSLTVLGLRMLFAKTVAVNFLLTAKLFFLRAKRSGSGATNFSLLKQAGDVEENPGPTSMDWIWRILFLVGAATGAHSFEEVQLVESGGGLVQPGGSLRLSCAASGYTFTSYWMNWVRQAPGKGLEWVGMIDPSDSETHYNHIFKDRFTISADTSKNTAYLQMNSLRAEDTAVYYCARNLYLFGQGTLVTVSSTRDKQLDADVSPKPTIFLPSIAETKLQKAGTYLCLLEKFFPDVIKIHWQEKKSNTILGSQEGNTMKTNDTYMKFSWLTVPEKSLDKEHRCIVRHENNKNGVDQEIIFPPIKTDVITMDPKDNCSKDANDTLLLQLTNTSAYYMYLLLLLKSVVYFAIITCCLLRRTAFCCNGEKS

SEQ ID NO: 46249 - protein, 642 aa, synthetic construct
MALPVTALLLPLALLLHAARPLEDKQLDADVSPKPTIFLPSIAETKLQKAGTYLCLLEKFFPDVIKIHWQEKKSNTILGSQEGNTMKTNDTYMKFSWLTVPEKSLDKEHRCIVRHENNKNGVDQEIIFPPIKTDVITMDPKDNCSKDANDTLLLQLTNTSAYYMYLLLLLKSVVYFAIITCCLLRRTAFCCNGEKSRAKRSGSGATNFSLLKQAGDVEENPGPTSMALPVTALLLPLALLLHAARPDIQMTQSPSSLSASVGDRVTITCKSSQSLLDSDGKTYLNWYQQKPGKAPKLLIYLVSKLDSGVPSRFSGSGSGTDFTLTISSLQPEDFATYYCFQGTHFPFTFGQGTKVEIKRGGGGSGGGGSGGGGSEVQLVESGGGLVQPGGSLRLSCAASGYTFTSYWMNWVRQAPGKGLEWVGMIDPSDSETHYNHIFKDRFTISADTSKNTAYLQMNSLRAEDTAVYYCARNLYLFGQGTLVTVSSTRSQPHTKPSVFVMKNGTNVACLVKEFYPKDIRINLVSSKKITEFDPAIVISPSGKYNAVKLGKYEDSNSVTCSVQHDNKTVHSTDFEVKTDSTDHVKPKETENTKQPSKSCHKPKAIVHTEKVNMMSLTVLGLRMLFAKTVAVNFLLTAKLFFL

SEQ ID NO: 46250 - protein, 796 aa, synthetic construct
MALPVTALLLPLALLLHAARPDIQMTQSPSSLSASVGDRVTITCKSSQSLLDSDGKTYLNWYQQKPGKAPKLLIYLVSKLDSGVPSRFSGSGSGTDFTLTISSLQPEDFATYYCFQGTHFPFTFGQGTKVEIKRGQPKANPTVTLFPPSSEELQANKATLVCLISDFYPGAVTVAWKADGSPVKAGVETTKPSKQSNNKYAASSYLSLTPEQWKSHRSYSCQVTHEGSTVEKTVAPTECSGSQSFGLLDPKLCYLLDGILFIYGVILTALFLRVKFSRSADAPAYQQGQNQLYNELNLGRREEYDVLDKRRGRDPEMGGKPQRRKNPQEGLYNELQKDKMAEAYSEIGMKGERRRGKGHDGLYQGLSTATKDTYDALHMQALPPRRAKRSGSGATNFSLLKQAGDVEENPGPTSMDWIWRILFLVGAATGAHSFEEVQLVESGGGLVQPGGSLRLSCAASGYTFTSYWMNWVRQAPGKGLEWVGMIDPSDSETHYNHIFKDRFTISADTSKNTAYLQMNSLRAEDTAVYYCARNLYLFGQGTLVTVSSASTKGPSVFPLAPSSKSTSGGTAALGCLVKDYFPEPVTVSWNSGALTSGVHTFPAVLQSSGLYSLSSVVTVPSSSLGTQTYICNVNHKPSNTKVDKRVEPKSCGTQSFGLLDPKLCYLLDGILFIYGVILTALFLRVKFSRSADAPAYQQGQNQLYNELNLGRREEYDVLDKRRGRDPEMGGKPQRRKNPQEGLYNELQKDKMAEAYSEIGMKGERRRGKGHDGLYQGLSTATKDTYDALHMQALPPR

SEQ ID NO: 46251 - protein, 815 aa, synthetic construct
MALPVTALLLPLALLLHAARPDIQMTQSPSSLSASVGDRVTITCKSSQSLLDSDGKTYLNWYQQKPGKAPKLLIYLVSKLDSGVPSRFSGSGSGTDFTLTISSLQPEDFATYYCFQGTHFPFTFGQGTKVEIKRLEDLKNVFPPEVAVFEPSEAEISHTQKATLVCLATGFYPDHVELSWWVNGKEVHSGVSTDPQPLKEQPALNDSRYCLSSRLRVSATFWQNPRNHFRCQVQFYGLSENDEWTQDRAKPVTQIVSAEAWGRADCGSQSFGLLDPKLCYLLDGILFIYGVILTALFLRVKFSRSADAPAYQQGQNQLYNELNLGRREEYDVLDKRRGRDPEMGGKPQRRKNPQEGLYNELQKDKMAEAYSEIGMKGERRRGKGHDGLYQGLSTATKDTYDALHMQALPPRRAKRSGSGATNFSLLKQAGDVEENPGPTSMDWIWRILFLVGAATGAHSFEEVQLVESGGGLVQPGGSLRLSCAASGYTFTSYWMNWVRQAPGKGLEWVGMIDPSDSETHYNHIFKDRFTISADTSKNTAYLQMNSLRAEDTAVYYCARNLYLFGQGTLVTVSSTRIQNPDPAVYQLRDSKSSDKSVCLFTDFDSQTNVSQSKDSDVYITDKTVLDMRSMDFKSNSAVAWSNKSDFACANAFNNSIIPEDTFFPSPESSCGTQSFGLLDPKLCYLLDGILFIYGVILTALFLRVKFSRSADAPAYQQGQNQLYNELNLGRREEYDVLDKRRGRDPEMGGKPQRRKNPQEGLYNELQKDKMAEAYSEIGMKGERRRGKGHDGLYQGLSTATKDTYDALHMQALPPR

SEQ ID NO: 46252 - protein, 857 aa, synthetic construct
MALPVTALLLPLALLLHAARPDIQMTQSPSSLSASVGDRVTITCKSSQSLLDSDGKTYLNWYQQKPGKAPKLLIYLVSKLDSGVPSRFSGSGSGTDFTLTISSLQPEDFATYYCFQGTHFPFTFGQGTKVEIKRLEEDLKNVFPPEVAVFEPSEAEISHTQKATLVCLATGFYPDHVELSWWVNGKEVHSGVSTDPQPLKEQPALNDSRYCLSSRLRVSATFWQNPRNHFRCQVQFYGLSENDEWTQDRAKPVTQIVSAEAWGRADCGSQSFGLLDPKLCYLLDGILFIYGVILTALFLRVKFSRSADAPAYQQGQNQLYNELNLGRREEYDVLDKRRGRDPEMGGKPQRRKNPQEGLYNELQKDKMAEAYSEIGMKGERRRGKGHDGLYQGLSTATKDTYDALHMQALPPRRAKRSGSGATNFSLLKQAGDVEENPGPTSMDWIWRILFLVGAATGAHSFEEVQLVESGGGLVQPGGSLRLSCAASGYTFTSYWMNWVRQAPGKGLEWVGMIDPSDSETHYNHIFKDRFTISADTSKNTAYLQMNSLRAEDTAVYYCARNLYLFGQGTLVTVSSTRIQNPDPAVYQLRDSKSSDKSVCLFTDFDSQTNVSQSKDSDVYITDKTVLDMRSMDFKSNSAVAWSNKSDFACANAFNNSIIPEDTFFPSPESSCGTQSFGLLDPKLCYLLDGILFIYGVILTALFLRSKRSRLLHSDYMNMTPRRPGPTRKHYQPYAPPRDFAAYRSRVKFSRSADAPAYQQGQNQLYNELNLGRREEYDVLDKRRGRDPEMGGKPQRRKNPQEGLYNELQKDKMAEAYSEIGMKGERRRGKGHDGLYQGLSTATKDTYDALHMQALPPR

SEQ ID NO: 46253 - protein, 900 aa, synthetic construct
MALPVTALLLPLALLLHAARPDIQMTQSPSSLSASVGDRVTITCKSSQSLLDSDGKTYLNWYQQKPGKAPKLLIYLVSKLDSGVPSRFSGSGSGTDFTLTISSLQPEDFATYYCFQGTHFPFTFGQGTKVEIKRLEEDLKNVFPPEVAVFEPSEAEISHTQKATLVCLATGFYPDHVELSWWVNGKEVHSGVSTDPQPLKEQPALNDSRYCLSSRLRVSATFWQNPRNHFRCQVQFYGLSENDEWTQDRAKPVTQIVSAEAWGRADCGSQSFGLLDPKLCYLLDGILFIYGVILTALFLKRGRKKLLYIFKQPFMRPVQTTQEEDGCSCRFPEEEEGGCELRVKFSRSADAPAYQQGQNQLYNELNLGRREEYDVLDKRRGRDPEMGGKPQRRKNPQEGLYNELQKDKMAEAYSEIGMKGERRRGKGHDGLYQGLSTATKDTYDALHMQALPPRRAKRSGSGATNFSLLKQAGDVEENPGPTSMDWIWRILFLVGAATGAHSFEEVQLVESGGGLVQPGGSLRLSCAASGYTFTSYWMNWVRQAPGKGLEWVGMIDPSDSETHYNHIFKDRFTISADTSKNTAYLQMNSLRAEDTAVYYCARNLYLFGQGTLVTVSSTRIQNPDPAVYQLRDSKSSDKSVCLFTDFDSQTNVSQSKDSDVYITDKTVLDMRSMDFKSNSAVAWSNKSDFACANAFNNSIIPEDTFFPSPESSCGTQSFGLLDPKLCYLLDGILFIYGVILTALFLKRGRKKLLYIFKQPFMRPVQTTQEEDGCSCRFPEEEEGGCELRVKFSRSADAPAYQQGQNQLYNELNLGRREEYDVLDKRRGRDPEMGGKPQRRKNPQEGLYNELQKDKMAEAYSEIGMKGERRRGKGHDGLYQGLSTATKDTYDALHMQALPPR

SEQ ID NO: 46254 - protein, 587 aa, synthetic construct
MALPVTALLLPLALLLHAARPDIQMTQSPSSLSASVGDRVTITCKSSQSLLDSDGKTYLNWYQQKPGKAPKLLIYLVSKLDSGVPSRFSGSGSGTDFTLTISSLQPEDFATYYCFQGTHFPFTFGQGTKVEIKRLEQSFGLLDPKLCYLLDGILFIYGVILTALFLRVKFSRSADAPAYQQGQNQLYNELNLGRREEYDVLDKRRGRDPEMGGKPQRRKNPQEGLYNELQKDKMAEAYSEIGMKGERRRGKGHDGLYQGLSTATKDTYDALHMQALPPRRAKRSGSGATNFSLLKQAGDVEENPGPTSMDWIWRILFLVGAATGAHSFEEVQLVESGGGLVQPGGSLRLSCAASGYTFTSYWMNWVRQAPGKGLEWVGMIDPSDSETHYNHIFKDRFTISADTSKNTAYLQMNSLRAEDTAVYYCARNLYLFGQGTLVTVSSTRQSFGLLDPKLCYLLDGILFIYGVILTALFLRVKFSRSADAPAYQQGQNQLYNELNLGRREEYDVLDKRRGRDPEMGGKPQRRKNPQEGLYNELQKDKMAEAYSEIGMKGERRRGKGHDGLYQGLSTATKDTYDALHMQALPPR

SEQ ID NO: 46255 - protein, 645 aa, synthetic construct
MALPVTALLLPLALLLHAARPDIQMTQSPSSLSASVGDRVTITCKSSQSLLDSDGKTYLNWYQQKPGKAPKLLIYLVSKLDSGVPSRFSGSGSGTDFTLTISSLQPEDFATYYCFQGTHFPFTFGQGTKVEIKRLEGQPKANPTVTLFPPSSEELQANKATLVCLISDFYPGAVTVAWKADGSPVKAGVETTKPSKQSNNKYAASSYLSLTPEQWKSHRSYSCQVTHEGSTVEKTVAPTECSPIKTDVITMDPKDNCSKDANDTLLLQLTNTSAYYMYLLLLLKSVVYFAIITCCLLRRTAFCCNGEKSRAKRSGSGATNFSLLKQAGDVEENPGPTSMDWIWRILFLVGAATGAHSFEEVQLVESGGGLVQPGGSLRLSCAASGYTFTSYWMNWVRQAPGKGLEWVGMIDPSDSETHYNHIFKDRFTISADTSKNTAYLQMNSLRAEDTAVYYCARNLYLFGQGTLVTVSSTRASTKGPSVFPLAPSSKSTSGGTAALGCLVKDYFPEPVTVSWNSGALTSGVHTFPAVLQSSGLYSLSSVVTVPSSSLGTQTYICNVNHKPSNTKVDKRVEPKSCEVKTDSTDHVKPKETENTKQPSKSCHKPKAIVHTEKVNMMSLTVLGLRMLFAKTVAVNFLLTAKLFFL

SEQ ID NO: 46256 - protein, 623 aa, synthetic construct
MALPVTALLLPLALLLHAARPDIQMTQSPSSLSASVGDRVTITCKSSQSLLDSDGKTYLNWYQQKPGKAPKLLIYLVSKLDSGVPSRFSGSGSGTDFTLTISSLQPEDFATYYCFQGTHFPFTFGQGTKVEIKRLEGQPKANPTVTLFPPSSEELQANKATLVCLISDFYPGAVTVAWKADGSPVKAGVETTKPSKQSNNKYAASSYLSLTPEQWKSHRSYSCQVTHEGSTVEKTVAPTECSGRADCGITSASYHQGVLSATILYEILLGKATLYAVLVSALVLMAMVKRKDSRGRAKRSGSGATNFSLLKQAGDVEENPGPTSMDWIWRILFLVGAATGAHSFEEVQLVESGGGLVQPGGSLRLSCAASGYTFTSYWMNWVRQAPGKGLEWVGMIDPSDSETHYNHIFKDRFTISADTSKNTAYLQMNSLRAEDTAVYYCARNLYLFGQGTLVTVSSTRASTKGPSVFPLAPSSKSTSGGTAALGCLVKDYFPEPVTVSWNSGALTSGVHTFPAVLQSSGLYSLSSVVTVPSSSLGTQTYICNVNHKPSNTKVDKRVEPKSCIPEDTFFPSSDVPCDVKLVEKSFETDTNLNFQNLSVIGFRILLLKVAGFNLLMTLRLWSS

SEQ ID NO: 46257 - protein, 623 aa, synthetic construct
MALPVTALLLPLALLLHAARPDIQMTQSPSSLSASVGDRVTITCKSSQSLLDSDGKTYLNWYQQKPGKAPKLLIYLVSKLDSGVPSRFSGSGSGTDFTLTISSLQPEDFATYYCFQGTHFPFTFGQGTKVEIKRLEGQPKANPTVTLFPPSSEELQANKATLVCLISDFYPGAVTVAWKADGSPVKAGVETTKPSKQSNNKYAASSYLSLTPEQWKSHRSYSCQVTHEGSTVEKTVAPTECSGRADCGFTSESYQQGVLSATILYEILLGKATLYAVLVSALVLMAMVKRKDSRGRAKRSGSGATNFSLLKQAGDVEENPGPTSMDWIWRILFLVGAATGAHSFEEVQLVESGGGLVQPGGSLRLSCAASGYTFTSYWMNWVRQAPGKGLEWVGMIDPSDSETHYNHIFKDRFTISADTSKNTAYLQMNSLRAEDTAVYYCARNLYLFGQGTLVTVSSTRASTKGPSVFPLAPSSKSTSGGTAALGCLVKDYFPEPVTVSWNSGALTSGVHTFPAVLQSSGLYSLSSVVTVPSSSLGTQTYICNVNHKPSNTKVDKRVEPKSCIPEDTFFPSPESSCDVKLVEKSFETDTNLNFQNLSVIGFRILLLKVAGFNLLMTLRLWSS

SEQ ID NO: 46258 - protein, 449 aa, synthetic construct
MALPVTALLLPLALLLHAARPDIQMTQSPSSLSASVGDRVTITCKSSQSLLDSDGKTYLNWYQQKPGKAPKLLIYLVSKLDSGVPSRFSGSGSGTDFTLTISSLQPEDFATYYCFQGTHFPFTFGQGTKVEIKRGGGGSGGGGSGGGGSEVQLVESGGGLVQPGGSLRLSCAASGYTFTSYWMNWVRQAPGKGLEWVGMIDPSDSETHYNHIFKDRFTISADTSKNTAYLQMNSLRAEDTAVYYCARNLYLFGQGTLVTVSSTRDGNEEMGGITQTPYKVSISGTTVILTCPQYPGSEILWQHNDKNIGGDEDDKNIGSDEDHLSLKEFSELEQSGYYVCYPRGSKPEDANFYLYLRARVCENCMEMDVMSVATIVIVDICITGGLLLLVYYWSKNRKAKAKPVTRGAGAGGRQRGQNKERPPPVPNPDYEPIRKGQRDLYSGLNQRRI

SEQ ID NO: 46259 - protein, 414 aa, synthetic construct
MALPVTALLLPLALLLHAARPDIQMTQSPSSLSASVGDRVTITCKSSQSLLDSDGKTYLNWYQQKPGKAPKLLIYLVSKLDSGVPSRFSGSGSGTDFTLTISSLQPEDFATYYCFQGTHFPFTFGQGTKVEIKRGGGGSGGGGSGGGGSEVQLVESGGGLVQPGGSLRLSCAASGYTFTSYWMNWVRQAPGKGLEWVGMIDPSDSETHYNHIFKDRFTISADTSKNTAYLQMNSLRAEDTAVYYCARNLYLFGQGTLVTVSSTRFKIPIEELEDRVFVNCNTSITWVEGTVGTLLSDITRLDLGKRILDPRGIYRCNGTDIYKDKESTVQVHYRMCQSCVELDPATVAGIIVTDVIATLLLALGVFCFAGHETGRLSGAADTQALLRNDQVYQPLRDRDDAQYSHLGGNWARNK

SEQ ID NO: 46260 - protein, 424 aa, synthetic construct
MALPVTALLLPLALLLHAARPDIQMTQSPSSLSASVGDRVTITCKSSQSLLDSDGKTYLNWYQQKPGKAPKLLIYLVSKLDSGVPSRFSGSGSGTDFTLTISSLQPEDFATYYCFQGTHFPFTFGQGTKVEIKRGGGGSGGGGSGGGGSEVQLVESGGGLVQPGGSLRLSCAASGYTFTSYWMNWVRQAPGKGLEWVGMIDPSDSETHYNHIFKDRFTISADTSKNTAYLQMNSLRAEDTAVYYCARNLYLFGQGTLVTVSSTRQSIKGNHLVKVYDYQEDGSVLLTCDAEAKNITWFKDGKMIGFLTEDKKKWNLGSNAKDPRGMYQCKGSQNKSKPLQVYYRMCQNCIELNAATISGFLFAEIVSIFVLAVGVYFIAGQDGVRQSRASDKQTLLPNDQLYQPLKDREDDQYSHLQGNQLRRN

SEQ ID NO: 46261 - protein, 407 aa, synthetic construct
MALPVTALLLPLALLLHAARPDIQMTQSPSSLSASVGDRVTITCKSSQSLLDSDGKTYLNWYQQKPGKAPKLLIYLVSKLDSGVPSRFSGSGSGTDFTLTISSLQPEDFATYYCFQGTHFPFTFGQGTKVEIKRGGGGSGGGGSGGGGSEVQLVESGGGLVQPGGSLRLSCAASGYTFTSYWMNWVRQAPGKGLEWVGMIDPSDSETHYNHIFKDRFTISADTSKNTAYLQMNSLRAEDTAVYYCARNLYLFGQGTLVTVSSTRQSFGLLDPKLCYLLDGILFIYGVILTALFLRVKFSRSADAPAYQQGQNQLYNELNLGRREEYDVLDKRRGRDPEMGGKPQRRKNPQEGLYNELQKDKMAEAYSEIGMKGERRRGKGHDGLYQGLSTATKDTYDALHMQALPPR

SEQ ID NO: 46262 - protein, 502 aa, synthetic construct
MALPVTALLLPLALLLHAARPDIQMTQSPSSLSASVGDRVTITCKSSQSLLDSDGKTYLNWYQQKPGKAPKLLIYLVSKLDSGVPSRFSGSGSGTDFTLTISSLQPEDFATYYCFQGTHFPFTFGQGTKVEIKRGGGGSGGGGSGGGGSEVQLVESGGGLVQPGGSLRLSCAASGYTFTSYWMNWVRQAPGKGLEWVGMIDPSDSETHYNHIFKDRFTISADTSKNTAYLQMNSLRAEDTAVYYCARNLYLFGQGTLVTVSSTRGMRTEDLPKAVVFLEPQWYRVLEKDSVTLKCQGAYSPEDNSTQWFHNESLISSQASSYFIDAATVDDSGEYRCQTNLSTLSDPVQLEVHIGWLLLQAPRWVFKEEDPIHLRCHSWKNTALHKVTYLQNGKGRKYFHHNSDFYIPKATLKDSGSYFCRGLVGSKNVSSETVNITITQGLAVPTISSFFPPGYQVSFCLVMVLLFAVDTGLYFSVKTNIRSSTRDWKDHKFKWRKDPQDK

SEQ ID NO: 46263 - protein, 477 aa, synthetic construct
MALPVTALLLPLALLLHAARPDIQMTQSPSSLSASVGDRVTITCKSSQSLLDSDGKTYLNWYQQKPGKAPKLLIYLVSKLDSGVPSRFSGSGSGTDFTLTISSLQPEDFATYYCFQGTHFPFTFGQGTKVEIKRGGGGSGGGGSGGGGSEVQLVESGGGLVQPGGSLRLSCAASGYTFTSYWMNWVRQAPGKGLEWVGMIDPSDSETHYNHIFKDRFTISADTSKNTAYLQMNSLRAEDTAVYYCARNLYLFGQGTLVTVSSTRGMRTEDLPKAVVFLEPQWYRVLEKDSVTLKCQGAYSPEDNSTQWFHNESLISSQASSYFIDAATVDDSGEYRCQTNLSTLSDPVQLEVHIGWLLLQAPRWVFKEEDPIHLRCHSWKNTALHKVTYLQNGKGRKYFHHNSDFYIPKATLKDSGSYFCRGLVGSKNVSSETVNITITQGLAVPTISSFFPPGYQVSFCLVMVLLFAVDTGLYFSV

SEQ ID NO: 46264 - protein, 478 aa, synthetic construct
MALPVTALLLPLALLLHAARPDIQMTQSPSSLSASVGDRVTITCKSSQSLLDSDGKTYLNWYQQKPGKAPKLLIYLVSKLDSGVPSRFSGSGSGTDFTLTISSLQPEDFATYYCFQGTHFPFTFGQGTKVEIKRGGGGSGGGGSGGGGSEVQLVESGGGLVQPGGSLRLSCAASGYTFTSYWMNWVRQAPGKGLEWVGMIDPSDSETHYNHIFKDRFTISADTSKNTAYLQMNSLRAEDTAVYYCARNLYLFGQGTLVTVSSTRGMRTEDLPKAVVFLEPQWYRVLEKDSVTLKCQGAYSPEDNSTQWFHNESLISSQASSYFIDAATVDDSGEYRCQTNLSTLSDPVQLEVHIGWLLLQAPRWVFKEEDPIHLRCHSWKNTALHKVTYLQNGKGRKYFHHNSDFYIPKATLKDSGSYFCRGLVGSKNVSSETVNITITQGLAVPTISSFFPPGYQVSFCLVMVLLFAVDTGLYFSVK

SEQ ID NO: 46265 - protein, 722 aa, synthetic construct
MALPVTALLLPLALLLHAARPDIQMTQSPSSLSASVGDRVTITCKSSQSLLDSDGKTYLNWYQQKPGKAPKLLIYLVSKLDSGVPSRFSGSGSGTDFTLTISSLQPEDFATYYCFQGTHFPFTFGQGTKVEIKRLEGQPKANPTVTLFPPSSEELQANKATLVCLISDFYPGAVTVAWKADGSPVKAGVETTKPSKQSNNKYAASSYLSLTPEQWKSHRSYSCQVTHEGSTVEKTVAPTECSGSQSFGLLDPKLCYLLDGILFIYGVILTALFLRVKFSRSADAPAYQQGQNQLYNELNLGRREEYDVLDKRRGRDPEMGGKPQRRKNPQEGLYNELQKDKMAEAYSEIGMKGERRRGKGHDGLYQGLSTATKDTYDALHMQALPPRRAKRSGSGATNFSLLKQAGDVEENPGPTSMDWIWRILFLVGAATGAHSFEEVQLVESGGGLVQPGGSLRLSCAASGYTFTSYWMNWVRQAPGKGLEWVGMIDPSDSETHYNHIFKDRFTISADTSKNTAYLQMNSLRAEDTAVYYCARNLYLFGQGTLVTVSSTRASTKGPSVFPLAPSSKSTSGGTAALGCLVKDYFPEPVTVSWNSGALTSGVHTFPAVLQSSGLYSLSSVVTVPSSSLGTQTYICNVNHKPSNTKVDKRVEPKSCGTITQGLAVSTISSFFPPGYQVSFCLVMVLLFAVDTGLYFSVKTNIRSSTRDWKDHKFKWRKDPQDK

SEQ ID NO: 46266 - protein, 737 aa, synthetic construct
MALPVTALLLPLALLLHAARPDIQMTQSPSSLSASVGDRVTITCKSSQSLLDSDGKTYLNWYQQKPGKAPKLLIYLVSKLDSGVPSRFSGSGSGTDFTLTISSLQPEDFATYYCFQGTHFPFTFGQGTKVEIKRLEDLKNVFPPEVAVFEPSEAEISHTQKATLVCLATGFYPDHVELSWWVNGKEVHSGVSTDPQPLKEQPALNDSRYCLSSRLRVSATFWQNPRNHFRCQVQFYGLSENDEWTQDRAKPVTQIVSAEAWGRADCGSQSFGLLDPKLCYLLDGILFIYGVILTALFLRVKFSRSADAPAYQQGQNQLYNELNLGRREEYDVLDKRRGRDPEMGGKPQRRKNPQEGLYNELQKDKMAEAYSEIGMKGERRRGKGHDGLYQGLSTATKDTYDALHMQALPPRRAKRSGSGATNFSLLKQAGDVEENPGPTSMDWIWRILFLVGAATGAHSFEEVQLVESGGGLVQPGGSLRLSCAASGYTFTSYWMNWVRQAPGKGLEWVGMIDPSDSETHYNHIFKDRFTISADTSKNTAYLQMNSLRAEDTAVYYCARNLYLFGQGTLVTVSSTRIQNPDPAVYQLRDSKSSDKSVCLFTDFDSQTNVSQSKDSDVYITDKTVLDMRSMDFKSNSAVAWSNKSDFACANAFNNSIIPEDTFFPSPESSCGTITQGLAVSTISSFFPPGYQVSFCLVMVLLFAVDTGLYFSVKTNIRSSTRDWKDHKFKWRKDPQDK

SEQ ID NO: 46267 - protein, 712 aa, synthetic construct
MALPVTALLLPLALLLHAARPDIQMTQSPSSLSASVGDRVTITCKSSQSLLDSDGKTYLNWYQQKPGKAPKLLIYLVSKLDSGVPSRFSGSGSGTDFTLTISSLQPEDFATYYCFQGTHFPFTFGQGTKVEIKRLEDLKNVFPPEVAVFEPSEAEISHTQKATLVCLATGFYPDHVELSWWVNGKEVHSGVSTDPQPLKEQPALNDSRYCLSSRLRVSATFWQNPRNHFRCQVQFYGLSENDEWTQDRAKPVTQIVSAEAWGRADCGSQSFGLLDPKLCYLLDGILFIYGVILTALFLRVKFSRSADAPAYQQGQNQLYNELNLGRREEYDVLDKRRGRDPEMGGKPQRRKNPQEGLYNELQKDKMAEAYSEIGMKGERRRGKGHDGLYQGLSTATKDTYDALHMQALPPRRAKRSGSGATNFSLLKQAGDVEENPGPTSMDWIWRILFLVGAATGAHSFEEVQLVESGGGLVQPGGSLRLSCAASGYTFTSYWMNWVRQAPGKGLEWVGMIDPSDSETHYNHIFKDRFTISADTSKNTAYLQMNSLRAEDTAVYYCARNLYLFGQGTLVTVSSTRIQNPDPAVYQLRDSKSSDKSVCLFTDFDSQTNVSQSKDSDVYITDKTVLDMRSMDFKSNSAVAWSNKSDFACANAFNNSIIPEDTFFPSPESSCGTITQGLAVSTISSFFPPGYQVSFCLVMVLLFAVDTGLYFSV

SEQ ID NO: 46268 - protein, 713 aa, synthetic construct
MALPVTALLLPLALLLHAARPDIQMTQSPSSLSASVGDRVTITCKSSQSLLDSDGKTYLNWYQQKPGKAPKLLIYLVSKLDSGVPSRFSGSGSGTDFTLTISSLQPEDFATYYCFQGTHFPFTFGQGTKVEIKRLEDLKNVFPPEVAVFEPSEAEISHTQKATLVCLATGFYPDHVELSWWVNGKEVHSGVSTDPQPLKEQPALNDSRYCLSSRLRVSATFWQNPRNHFRCQVQFYGLSENDEWTQDRAKPVTQIVSAEAWGRADCGSQSFGLLDPKLCYLLDGILFIYGVILTALFLRVKFSRSADAPAYQQGQNQLYNELNLGRREEYDVLDKRRGRDPEMGGKPQRRKNPQEGLYNELQKDKMAEAYSEIGMKGERRRGKGHDGLYQGLSTATKDTYDALHMQALPPRRAKRSGSGATNFSLLKQAGDVEENPGPTSMDWIWRILFLVGAATGAHSFEEVQLVESGGGLVQPGGSLRLSCAASGYTFTSYWMNWVRQAPGKGLEWVGMIDPSDSETHYNHIFKDRFTISADTSKNTAYLQMNSLRAEDTAVYYCARNLYLFGQGTLVTVSSTRIQNPDPAVYQLRDSKSSDKSVCLFTDFDSQTNVSQSKDSDVYITDKTVLDMRSMDFKSNSAVAWSNKSDFACANAFNNSIIPEDTFFPSPESSCGTITQGLAVSTISSFFPPGYQVSFCLVMVLLFAVDTGLYFSVK

SEQ ID NO: 46269 - protein, 714 aa, synthetic construct
MALPVTALLLPLALLLHAARPDIQMTQSPSSLSASVGDRVTITCKSSQSLLDSDGKTYLNWYQQKPGKAPKLLIYLVSKLDSGVPSRFSGSGSGTDFTLTISSLQPEDFATYYCFQGTHFPFTFGQGTKVEIKRLEDLKNVFPPEVAVFEPSEAEISHTQKATLVCLATGFYPDHVELSWWVNGKEVHSGVSTDPQPLKEQPALNDSRYCLSSRLRVSATFWQNPRNHFRCQVQFYGLSENDEWTQDRAKPVTQIVSAEAWGRADCGSQSFGLLDPKLCYLLDGILFIYGVILTALFLRVKFSRSADAPAYQQGQNQLYNELNLGRREEYDVLDKRRGRDPEMGGKPQRRKNPQEGLYNELQKDKMAEAYSEIGMKGERRRGKGHDGLYQGLSTATKDTYDALHMQALPPRRAKRSGSGATNFSLLKQAGDVEENPGPTSMDWIWRILFLVGAATGAHSFEEVQLVESGGGLVQPGGSLRLSCAASGYTFTSYWMNWVRQAPGKGLEWVGMIDPSDSETHYNHIFKDRFTISADTSKNTAYLQMNSLRAEDTAVYYCARNLYLFGQGTLVTVSSTRIQNPDPAVYQLRDSKSSDKSVCLFTDFDSQTNVSQSKDSDVYITDKTVLDMRSMDFKSNSAVAWSNKSDFACANAFNNSIIPEDTFFPSPESSCGTITQGLAVSTISSFFPPGYQVSFCLVMVLLFAVDTGLYFSVKT

SEQ ID NO: 46270 - protein, 650 aa, synthetic construct
MALPVTALLLPLALLLHAARPDIQMTQSPSSLSASVGDRVTITCKSSQSLLDSDGKTYLNWYQQKPGKAPKLLIYLVSKLDSGVPSRFSGSGSGTDFTLTISSLQPEDFATYYCFQGTHFPFTFGQGTKVEIKRLEGQPKANPTVTLFPPSSEELQANKATLVCLISDFYPGAVTVAWKADGSPVKAGVETTKPSKQSNNKYAASSYLSLTPEQWKSHRSYSCQVTHEGSTVEKTVAPTECSGSLGEPQLCYILDAILFLYGIVLTLLYCRLKIQVRKAAITSYEKSDGVYTGLSTRNQETYETLKHEKPPQRAKRSGSGATNFSLLKQAGDVEENPGPTSMDWIWRILFLVGAATGAHSFEEVQLVESGGGLVQPGGSLRLSCAASGYTFTSYWMNWVRQAPGKGLEWVGMIDPSDSETHYNHIFKDRFTISADTSKNTAYLQMNSLRAEDTAVYYCARNLYLFGQGTLVTVSSTRASTKGPSVFPLAPSSKSTSGGTAALGCLVKDYFPEPVTVSWNSGALTSGVHTFPAVLQSSGLYSLSSVVTVPSSSLGTQTYICNVNHKPSNTKVDKRVEPKSCGTLGEPQLCYILDAILFLYGIVLTLLYCRLKIQVRKAAITSYEKSDGVYTGLSTRNQETYETLKHEKPPQ

SEQ ID NO: 46271 - protein, 620 aa, synthetic construct
MALPVTALLLPLALLLHAARPDIQMTQSPSSLSASVGDRVTITCKSSQSLLDSDGKTYLNWYQQKPGKAPKLLIYLVSKLDSGVPSRFSGSGSGTDFTLTISSLQPEDFATYYCFQGTHFPFTFGQGTKVEIKRLEDLKNVFPPEVAVFEPSEAEISHTQKATLVCLATGFYPDHVELSWWVNGKEVHSGVCTDPQPLKEQPALNDSRYCLSSRLRVSATFWQNPRNHFRCQVQFYGLSENDEWTQDRAKPVTQIVSAEAWGRADCGFTSESYQQGVLSAYYMYLLLLLKSVVYFAIITCCLLRRTAFCCNGEKSRAKRSGSGATNFSLLKQAGDVEENPGPTSMDWIWRILFLVGAATGAHSFEEVQLVESGGGLVQPGGSLRLSCAASGYTFTSYWMNWVRQAPGKGLEWVGMIDPSDSETHYNHIFKDRFTISADTSKNTAYLQMNSLRAEDTAVYYCARNLYLFGQGTLVTVSSTRIQNPDPAVYQLRDSKSSDKSVCLFTDFDSQTNVSQSKDSDVYITDKCVLDMRSMDFKSNSAVAWSNKSDFACANAFNNSIIPEDTFFPSPESSCDVKLVEKSFETDTNLNFQNLSVIGFRILLLKVAGFNLLMTLRLWSS

SEQ ID NO: 46272 - protein, 626 aa, synthetic construct
MALPVTALLLPLALLLHAARPDIQMTQSPSSLSASVGDRVTITCKSSQSLLDSDGKTYLNWYQQKPGKAPKLLIYLVSKLDSGVPSRFSGSGSGTDFTLTISSLQPEDFATYYCFQGTHFPFTFGQGTKVEIKRLEDKQLDADVSPKPTIFLPSIAETKLQKAGTYLCLLEKFFPDVIKIHWQEKKSNTILGSQEGNTMKTNDTYMKFSWLTVPEKSLDKEHRCIVRHENNKNGVDQEIIFPPIKTDVITMDPKDNCSKDANDTLLLQLTNTSAYYMYEILLGKATLYAVLVSALVLMAMVKRKDSRGRAKRSGSGATNFSLLKQAGDVEENPGPTSMDWIWRILFLVGAATGAHSFEEVQLVESGGGLVQPGGSLRLSCAASGYTFTSYWMNWVRQAPGKGLEWVGMIDPSDSETHYNHIFKDRFTISADTSKNTAYLQMNSLRAEDTAVYYCARNLYLFGQGTLVTVSSTRSQPHTKPSVFVMKNGTNVACLVKEFYPKDIRINLVSSKKITEFDPAIVISPSGKYNAVKLGKYEDSNSVTCSVQHDNKTVHSTDFEVKTDSTDHVKPKETENTKQPSKSCHKPKAIVHTEKVNMMSLTVIGFRILLLKVAGFNLLMTLRLWSS

SEQ ID NO: 46273 - protein, 626 aa, synthetic construct
MALPVTALLLPLALLLHAARPDIQMTQSPSSLSASVGDRVTITCKSSQSLLDSDGKTYLNWYQQKPGKAPKLLIYLVSKLDSGVPSRFSGSGSGTDFTLTISSLQPEDFATYYCFQGTHFPFTFGQGTKVEIKRLEDKQLDADVSPKPTIFLPSIAETKLQKAGTYLCLLEKFFPDVIKIHWQEKKSNTILGSQEGNTMKTNDTYMKFSWLTVPEKSLDKEHRCIVRHENNKNGVDQEIIFPPIKTDVITMDPKDNCSKDANDTLLLQLTNTSATILYEILLGKATLYAVLVSALVLMAMVKRKDSRGRAKRSGSGATNFSLLKQAGDVEENPGPTSMDWIWRILFLVGAATGAHSFEEVQLVESGGGLVQPGGSLRLSCAASGYTFTSYWMNWVRQAPGKGLEWVGMIDPSDSETHYNHIFKDRFTISADTSKNTAYLQMNSLRAEDTAVYYCARNLYLFGQGTLVTVSSTRSQPHTKPSVFVMKNGTNVACLVKEFYPKDIRINLVSSKKITEFDPAIVISPSGKYNAVKLGKYEDSNSVTCSVQHDNKTVHSTDFEVKTDSTDHVKPKETENTKQPSKSCHKPKAIVHTEKVNMMSLTVIGFRILLLKVAGFNLLMTLRLWSS

SEQ ID NO: 46274 - protein, 626 aa, synthetic construct
MALPVTALLLPLALLLHAARPDIQMTQSPSSLSASVGDRVTITCKSSQSLLDSDGKTYLNWYQQKPGKAPKLLIYLVSKLDSGVPSRFSGSGSGTDFTLTISSLQPEDFATYYCFQGTHFPFTFGQGTKVEIKRLEDKQLDADVSPKPTIFLPSIAETKLQKAGTYLCLLEKFFPDVIKIHWQEKKSNTILGSQEGNTMKTNDTYMKFSWLTVPEKSLDKEHRCIVRHENNKNGVDQEIIFPPIKTDVITMDPKDNCSKDANDTLLLQLTNTSAYYMYEILLGKATLYAVLVSALVLMAMVKRKDSRGRAKRSGSGATNFSLLKQAGDVEENPGPTSMDWIWRILFLVGAATGAHSFEEVQLVESGGGLVQPGGSLRLSCAASGYTFTSYWMNWVRQAPGKGLEWVGMIDPSDSETHYNHIFKDRFTISADTSKNTAYLQMNSLRAEDTAVYYCARNLYLFGQGTLVTVSSTRSQPHTKPSVFVMKNGTNVACLVKEFYPKDIRINLVSSKKITEFDPAIVISPSGKYNAVKLGKYEDSNSVTCSVQHDNKTVHSTDFEVKTDSTDHVKPKETENTKQPSKSCHKPKAIVHTEKVNMMSLTVLGFRILLLKVAGFNLLMTLRLWSS

SEQ ID NO: 46275 - protein, 626 aa, synthetic construct
MALPVTALLLPLALLLHAARPDIQMTQSPSSLSASVGDRVTITCKSSQSLLDSDGKTYLNWYQQKPGKAPKLLIYLVSKLDSGVPSRFSGSGSGTDFTLTISSLQPEDFATYYCFQGTHFPFTFGQGTKVEIKRLEDKQLDADVSPKPTIFLPSIAETKLQKAGTYLCLLEKFFPDVIKIHWQEKKSNTILGSQEGNTMKTNDTYMKFSWLTVPEKSLDKEHRCIVRHENNKNGVDQEIIFPPIKTDVITMDPKDNCSKDANDTLLLQLTNTSATILYEILLGKATLYAVLVSALVLMAMVKRKDSRGRAKRSGSGATNFSLLKQAGDVEENPGPTSMDWIWRILFLVGAATGAHSFEEVQLVESGGGLVQPGGSLRLSCAASGYTFTSYWMNWVRQAPGKGLEWVGMIDPSDSETHYNHIFKDRFTISADTSKNTAYLQMNSLRAEDTAVYYCARNLYLFGQGTLVTVSSTRSQPHTKPSVFVMKNGTNVACLVKEFYPKDIRINLVSSKKITEFDPAIVISPSGKYNAVKLGKYEDSNSVTCSVQHDNKTVHSTDFEVKTDSTDHVKPKETENTKQPSKSCHKPKAIVHTEKVNMMSLTVLGFRILLLKVAGFNLLMTLRLWSS

SEQ ID NO: 46276 - protein, 620 aa, synthetic construct
MALPVTALLLPLALLLHAARPDIQMTQSPSSLSASVGDRVTITCKSSQSLLDSDGKTYLNWYQQKPGKAPKLLIYLVSKLDSGVPSRFSGSGSGTDFTLTISSLQPEDFATYYCFQGTHFPFTFGQGTKVEIKRLEDLKNVFPPEVAVFEPSEAEISHTQKATLVCLATGFYPDHVELSWWVNGKEVHSGVCTDPQPLKEQPALNDSRYCLSSRLRVSATFWQNPRNHFRCQVQFYGLSENDEWTQDRAKPVTQIVSAEAWGRADCGFTSESYQQGVLSATILYLLLLLKSVVYFAIITCCLLRRTAFCCNGEKSRAKRSGSGATNFSLLKQAGDVEENPGPTSMDWIWRILFLVGAATGAHSFEEVQLVESGGGLVQPGGSLRLSCAASGYTFTSYWMNWVRQAPGKGLEWVGMIDPSDSETHYNHIFKDRFTISADTSKNTAYLQMNSLRAEDTAVYYCARNLYLFGQGTLVTVSSTRIQNPDPAVYQLRDSKSSDKSVCLFTDFDSQTNVSQSKDSDVYITDKCVLDMRSMDFKSNSAVAWSNKSDFACANAFNNSIIPEDTFFPSPESSCDVKLVEKSFETDTNLNFQNLSVIGLRMLFAKTVAVNFLLTAKLFFL

SEQ ID NO: 46277 - protein, 649 aa, synthetic construct
MALPVTALLLPLALLLHAARPDIQMTQSPSSLSASVGDRVTITCKSSQSLLDSDGKTYLNWYQQKPGKAPKLLIYLVSKLDSGVPSRFSGSGSGTDFTLTISSLQPEDFATYYCFQGTHFPFTFGQGTKVEIKRLEDLKNVFPPEVAVFEPSEAEISHTQKATLVCLATGFYPDHVELSWWVNGKEVHSGVSTDPQPLKEQPALNDSRYCLSSRLRVSATFWQNPRNHFRCQVQFYGLSENDEWTQDRAKPVTQIVSAEAWGRADCGSSKDANDTLLLQLTNTSAYYMYLLLLLKSVVYFAIITCCLLRRTAFCCNGEKSRAKRSGSGATNFSLLKQAGDVEENPGPTSMDWIWRILFLVGAATGAHSFEEVQLVESGGGLVQPGGSLRLSCAASGYTFTSYWMNWVRQAPGKGLEWVGMIDPSDSETHYNHIFKDRFTISADTSKNTAYLQMNSLRAEDTAVYYCARNLYLFGQGTLVTVSSTRIQNPDPAVYQLRDSKSSDKSVCLFTDFDSQTNVSQSKDSDVYITDKTVLDMRSMDFKSNSAVAWSNKSDFACANAFNNSIIPEDTFFPSPESSCGTEVKTDSTDHVKPKETENTKQPSKSCHKPKAIVHTEKVNMMSLTVLGLRMLFAKTVAVNFLLTAKLFFL

SEQ ID NO: 46278 - protein, 619 aa, synthetic construct
MALPVTALLLPLALLLHAARPDIQMTQSPSSLSASVGDRVTITCKSSQSLLDSDGKTYLNWYQQKPGKAPKLLIYLVSKLDSGVPSRFSGSGSGTDFTLTISSLQPEDFATYYCFQGTHFPFTFGQGTKVEIKRLEDLKNVFPPEVAVFEPSEAEISHTQKATLVCLATGFYPDHVELSWWVNGKEVHSGVCTDPQPLKEQPALNDSRYCLSSRLRVSATFWQNPRNHFRCQVQFYGLSENDEWTQDRAKPVTQIVSAEAWGRADCDVKLVEKSFETDTNLNFQNLSVIGFRILLLKVAGFNLLMTLRLWSSRAKRSGSGATNFSLLKQAGDVEENPGPTSMDWIWRILFLVGAATGAHSFEEVQLVESGGGLVQPGGSLRLSCAASGYTFTSYWMNWVRQAPGKGLEWVGMIDPSDSETHYNHIFKDRFTISADTSKNTAYLQMNSLRAEDTAVYYCARNLYLFGQGTLVTVSSTRIQNPDPAVYQLRDSKSSDKSVCLFTDFDSQTNVSQSKDSDVYITDKCVLDMRSMDFKSNSAVAWSNKSDFACANAFNNSIIPEDTFFPSPESSCGFTSESYQQGVLSATILYEILLGKATLYAVLVSALVLMAMVKRKDSRG

SEQ ID NO: 46279 - protein, 619 aa, synthetic construct
MALPVTALLLPLALLLHAARPDIQMTQSPSSLSASVGDRVTITCKSSQSLLDSDGKTYLNWYQQKPGKAPKLLIYLVSKLDSGVPSRFSGSGSGTDFTLTISSLQPEDFATYYCFQGTHFPFTFGQGTKVEIKRLEDLKNVFPPEVAVFEPSEAEISHTQKATLVCLATGFYPDHVELSWWVNGKEVHSGVCTDPQPLKEQPALNDSRYCLSSRLRVSATFWQNPRNHFRCQVQFYGLSENDEWTQDRAKPVTQIVSAEAWGRADCGFTSESYQQGVLSATNLSVIGFRILLLKVAGFNLLMTLRLWSSRAKRSGSGATNFSLLKQAGDVEENPGPTSMDWIWRILFLVGAATGAHSFEEVQLVESGGGLVQPGGSLRLSCAASGYTFTSYWMNWVRQAPGKGLEWVGMIDPSDSETHYNHIFKDRFTISADTSKNTAYLQMNSLRAEDTAVYYCARNLYLFGQGTLVTVSSTRIQNPDPAVYQLRDSKSSDKSVCLFTDFDSQTNVSQSKDSDVYITDKCVLDMRSMDFKSNSAVAWSNKSDFACANAFNNSIIPEDTFFPSPESSCDVKLVEKSFETDTNLNFQILYEILLGKATLYAVLVSALVLMAMVKRKDSRG

SEQ ID NO: 46280 - protein, 619 aa, synthetic construct; identical to SEQ ID NO: 46278

SEQ ID NO: 46281 - protein, 619 aa, synthetic construct; identical to SEQ ID NO: 46279

SEQ ID NO: 46282 - protein, 619 aa, synthetic construct; identical to SEQ ID NO: 46278

SEQ ID NO: 46283 - protein, 622 aa, synthetic construct
MALPVTALLLPLALLLHAARPDIQMTQSPSSLSASVGDRVTITCKSSQSLLDSDGKTYLNWYQQKPGKAPKLLIYLVSKLDSGVPSRFSGSGSGTDFTLTISSLQPEDFATYYCFQGTHFPFTFGQGTKVEIKRLEADVSPKPTIFLPSIAETKLQKAGTYLCLLEKFFPDVIKIHWQEKKSNTILGSQEGNTMKTNDTYMKFSWLTVPEKSLDKEHRCIVRHENNKNGVDQEIIFPPIKTDVITMDPKDNCSKDANDTLLLQLTNTSAYYMYLLLLLKSVVYFAIITCCLLRRTAFCCNGEKSRAKRSGSGATNFSLLKQAGDVEENPGPTSMDWIWRILFLVGAATGAHSFEEVQLVESGGGLVQPGGSLRLSCAASGYTFTSYWMNWVRQAPGKGLEWVGMIDPSDSETHYNHIFKDRFTISADTSKNTAYLQMNSLRAEDTAVYYCARNLYLFGQGTLVTVSSTRSQPHTKPSVFVMKNGTNVACLVKEFYPKDIRINLVSSKKITEFDPAIVISPSGKYNAVKLGKYEDSNSVTCSVQHDNKTVHSTDFEVKTDSTDHVKPKETENTKQPSKSCHKPKAIVHTEKVNMMSLTVIGFRILLLKVAGFNLLMTLRLWSS

SEQ ID NO: 46284 - protein, 622 aa, synthetic construct
MALPVTALLLPLALLLHAARPDIQMTQSPSSLSASVGDRVTITCKSSQSLLDSDGKTYLNWYQQKPGKAPKLLIYLVSKLDSGVPSRFSGSGSGTDFTLTISSLQPEDFATYYCFQGTHFPFTFGQGTKVEIKRLEADVSPKPTIFLPSIAETKLQKAGTYLCLLEKFFPDVIKIHWQEKKSNTILGSQEGNTMKTNDTYMKFSWLTVPEKSLDKEHRCIVRHENNKNGVDQEIIFPPIKTDVITMDPKDNCSKDANDTLLLQLTNTSAYYMYLLLLLKSVVYFAIITCCLLRRTAFCCNGEKSRAKRSGSGATNFSLLKQAGDVEENPGPTSMDWIWRILFLVGAATGAHSFEEVQLVESGGGLVQPGGSLRLSCAASGYTFTSYWMNWVRQAPGKGLEWVGMIDPSDSETHYNHIFKDRFTISADTSKNTAYLQMNSLRAEDTAVYYCARNLYLFGQGTLVTVSSTRSQPHTKPSVFVMKNGTNVACLVKEFYPKDIRINLVSSKKITEFDPAIVISPSGKYNAVKLGKYEDSNSVTCSVQHDNKTVHSTDFEVKTDSTDHVKPKETENTKQPSKSCHKPKAIVHTEKVNMMSLTVLGFRILLLKVAGFNLLMTLRLWSS

SEQ ID NO: 46285 - protein, 619 aa, synthetic construct; identical to SEQ ID NO: 46278

SEQ ID NO: 46286 - protein, 623 aa, synthetic construct
MALPVTALLLPLALLLHAARPDIQMTQSPSSLSASVGDRVTITCKSSQSLLDSDGKTYLNWYQQKPGKAPKLLIYLVSKLDSGVPSRFSGSGSGTDFTLTISSLQPEDFATYYCFQGTHFPFTFGQGTKVEIKRLEIQNPDPAVYQLRDSKSSDKSVCLFTDFDSQTNVSQSKDSDVYITDKCVLDMRSMDFKSNSAVAWSNKSDFACANAFNNSIIPEDTFFPSPESSCGFTSESYQQGVLSATILYEILLGKATLYAVLVSALVLMAMVKRKDSRGRAKRSGSGVKQTLNFDLLKLAGDVESNPGPTSMDWIWRILFLVGAATGAHSFEEVQLVESGGGLVQPGGSLRLSCAASGYTFTSYWMNWVRQAPGKGLEWVGMIDPSDSETHYNHIFKDRFTISADTSKNTAYLQMNSLRAEDTAVYYCARNLYLFGQGTLVTVSSTREDLKNVFPPEVAVFEPSEAEISHTQKATLVCLATGFYPDHVELSWWVNGKEVHSGVCTDPQPLKEQPALNDSRYCLSSRLRVSATFWQNPRNHFRCQVQFYGLSENDEWTQDRAKPVTQIVSAEAWGRADCDVKLVEKSFETDTNLNFQNLSVIGFRILLLKVAGFNLLMTLRLWSS

SEQ ID NO: 46287 - protein, 754 aa, synthetic construct
MALPVTALLLPLALLLHAARPEVQLVESGGGLVQPGGSLRLSCAASGFSFSDFWMSWVRQAPGKGLEWVATISQAGSEKDYVDSVKGRFTISRDNAKKSLYLQMNSLRAEDTAVYYCASGVYSFDYRGQGTLVTVSSGTGGGGSGGGGSGGGGSEFDIQMTQSPSSLSASVGDRVTITCKSSQSLLDSDGKTYLNWYQQKPGKAPKLLIYLVSKLDSGVPSRFSGSGSGTDFTLTISSLQPEDFATYYCFQGTHFPFTFGQGTKVEIKRLEDLKNVFPPEVAVFEPSEAEISHTQKATLVCLATGFYPDHVELSWWVNGKEVHSGVCTDPQPLKEQPALNDSRYCLSSRLRVSATFWQNPRNHFRCQVQFYGLSENDEWTQDRAKPVTQIVSAEAWGRADCDVKLVEKSFETDTNLNFQNLSVIGFRILLLKVAGFNLLMTLRLWSSRAKRSGSGATNFSLLKQAGDVEENPGPTSMDWIWRILFLVGAATGAHSFEEVQLVESGGGLVQPGGSLRLSCAASGYTFTSYWMNWVRQAPGKGLEWVGMIDPSDSETHYNHIFKDRFTISADTSKNTAYLQMNSLRAEDTAVYYCARNLYLFGQGTLVTVSSTRIQNPDPAVYQLRDSKSSDKSVCLFTDFDSQTNVSQSKDSDVYITDKCVLDMRSMDFKSNSAVAWSNKSDFACANAFNNSIIPEDTFFPSPESSCGFTSESYQQGVLSATILYEILLGKATLYAVLVSALVLMAMVKRKDSRG

SEQ ID NO: 46288 - protein, 758 aa, synthetic construct
MALPVTALLLPLALLLHAARPEVQLVESGGGLVQPGGSLRLSCAASGFSFSDFWMSWVRQAPGKGLEWVATISQAGSEKDYVDSVKGRFTISRDNAKKSLYLQMNSLRAEDTAVYYCASGVYSFDYRGQGTLVTVSSGTGGGGSGGGGSGGGGSEFDIQMTQSPSSLSASVGDRVTITCKSSQSLLDSDGKTYLNWYQQKPGKAPKLLIYLVSKLDSGVPSRFSGSGSGTDFTLTISSLQPEDFATYYCFQGTHFPFTFGQGTKVEIKRLEIQNPDPAVYQLRDSKSSDKSVCLFTDFDSQTNVSQSKDSDVYITDKCVLDMRSMDFKSNSAVAWSNKSDFACANAFNNSIIPEDTFFPSPESSCGFTSESYQQGVLSATILYEILLGKATLYAVLVSALVLMAMVKRKDSRGRAKRSGSGVKQTLNFDLLKLAGDVESNPGPTSMDWIWRILFLVGAATGAHSFEEVQLVESGGGLVQPGGSLRLSCAASGYTFTSYWMNWVRQAPGKGLEWVGMIDPSDSETHYNHIFKDRFTISADTSKNTAYLQMNSLRAEDTAVYYCARNLYLFGQGTLVTVSSTREDLKNVFPPEVAVFEPSEAEISHTQKATLVCLATGFYPDHVELSWWVNGKEVHSGVCTDPQPLKEQPALNDSRYCLSSRLRVSATFWQNPRNHFRCQVQFYGLSENDEWTQDRAKPVTQIVSAEAWGRADCDVKLVEKSFETDTNLNFQNLSVIGFRILLLKVAGFNLLMTLRLWSS

SEQ ID NO: 46289 - protein, 891 aa, synthetic construct
MALPVTALLLPLALLLHAARPEVQLVESGGGLVQPGGSLRLSCAASGFSFSDFWMSWVRQAPGKGLEWVATISQAGSEKDYVDSVKGRFTISRDNAKKSLYLQMNSLRAEDTAVYYCASGVYSFDYRGQGTLVTVSSGTGGGGSGGGGSGGGGSEFDIQMTQSPSSLSASVGDRVTITCKSSQSLLDSDGKTYLNWYQQKPGKAPKLLIYLVSKLDSGVPSRFSGSGSGTDFTLTISSLQPEDFATYYCFQGTHFPFTFGQGTKVEIKRLEDLKNVFPPEVAVFEPSEAEISHTQKATLVCLATGFYPDHVELSWWVNGKEVHSGVCTDPQPLKEQPALNDSRYCLSSRLRVSATFWQNPRNHFRCQVQFYGLSENDEWTQDRAKPVTQIVSAEAWGRADCDVKLVEKSFETDTNLNFQNLSVIGFRILLLKVAGFNLLMTLRLWSSRAKRSGSGATNFSLLKQAGDVEENPGPTSMDWIWRILFLVGAATGAHSGPQLQLQESGPGLVKPSETLSLTCTVSGDSISSGDYYWGWIRQPPGKGLEWIGHIYYSGVTYYNPSLKSRVTISVDTSRNQFSLKLSSVTAADTAVYYCTREDSSNWRSRGQGTLVTVSSGSGGGGSGGGGSGGGGSFEEVQLVESGGGLVQPGGSLRLSCAASGYTFTSYWMNWVRQAPGKGLEWVGMIDPSDSETHYNHIFKDRFTISADTSKNTAYLQMNSLRAEDTAVYYCARNLYLFGQGTLVTVSSTRIQNPDPAVYQLRDSKSSDKSVCLFTDFDSQTNVSQSKDSDVYITDKCVLDMRSMDFKSNSAVAWSNKSDFACANAFNNSIIPEDTFFPSPESSCGFTSESYQQGVLSATILYEILLGKATLYAVLVSALVLMAMVKRKDSRG

SEQ ID NO: 46290 - protein, 895 aa, synthetic construct
MALPVTALLLPLALLLHAARPEVQLVESGGGLVQPGGSLRLSCAASGFSFSDFWMSWVRQAPGKGLEWVATISQAGSEKDYVDSVKGRFTISRDNAKKSLYLQMNSLRAEDTAVYYCASGVYSFDYRGQGTLVTVSSGTGGGGSGGGGSGGGGSEFDIQMTQSPSSLSASVGDRVTITCKSSQSLLDSDGKTYLNWYQQKPGKAPKLLIYLVSKLDSGVPSRFSGSGSGTDFTLTISSLQPEDFATYYCFQGTHFPFTFGQGTKVEIKRLEIQNPDPAVYQLRDSKSSDKSVCLFTDFDSQTNVSQSKDSDVYITDKCVLDMRSMDFKSNSAVAWSNKSDFACANAFNNSIIPEDTFFPSPESSCGFTSESYQQGVLSATILYEILLGKATLYAVLVSALVLMAMVKRKDSRGRAKRSGSGVKQTLNFDLLKLAGDVESNPGPTSMDWIWRILFLVGAATGAHSGPQLQLQESGPGLVKPSETLSLTCTVSGDSISSGDYYWGWIRQPPGKGLEWIGHIYYSGVTYYNPSLKSRVTISVDTSRNQFSLKLSSVTAADTAVYYCTREDSSNWRSRGQGTLVTVSSGSGGGGSGGGGSGGGGSFEEVQLVESGGGLVQPGGSLRLSCAASGYTFTSYWMNWVRQAPGKGLEWVGMIDPSDSETHYNHIFKDRFTISADTSKNTAYLQMNSLRAEDTAVYYCARNLYLFGQGTLVTVSSTREDLKNVFPPEVAVFEPSEAEISHTQKATLVCLATGFYPDHVELSWWVNGKEVHSGVCTDPQPLKEQPALNDSRYCLSSRLRVSATFWQNPRNHFRCQVQFYGLSENDEWTQDRAKPVTQIVSAEAWGRADCDVKLVEKSFETDTNLNFQNLSVIGFRILLLKVAGFNLLMTLRLWSS

SEQ ID NO: 46291 - protein, 689 aa, synthetic construct
MALPVTALLLPLALLLHAARPDIQMTQSPSSLSASVGDRVTITCKSSQSLLDSDGKTYLNWYQQKPGKAPKLLIYLVSKLDSGVPSRFSGSGSGTDFTLTISSLQPEDFATYYCFQGTHFPFTFGQGTKVEIKRLEDLKNVFPPEVAVFEPSEAEISHTQKATLVCLATGFYPDHVELSWWVNGKEVHSGVCTDPQPLKEQPALNDSRYCLSSRLRVSATFWQNPRNHFRCQVQFYGLSENDEWTQDRAKPVTQIVSAEAWGRADCDVKLVEKSFETDTNLNFQNLSVIGFRILLLKVAGFNLLMTLRLWSSRAKRSGSGATNFSLLKQAGDVEENPGPTSMDWIWRILFLVGAATGAHSGPMDPDLEIRAAFLRQRNTALRTEVAELEQEVQRLENEVSQYETRYGPLGGGKGSGGGGSGGGGSGGGGSFEEVQLVESGGGLVQPGGSLRLSCAASGYTFTSYWMNWVRQAPGKGLEWVGMIDPSDSETHYNHIFKDRFTISADTSKNTAYLQMNSLRAEDTAVYYCARNLYLFGQGTLVTVSSTRIQNPDPAVYQLRDSKSSDKSVCLFTDFDSQTNVSQSKDSDVYITDKCVLDMRSMDFKSNSAVAWSNKSDFACANAFNNSIIPEDTFFPSPESSCGFTSESYQQGVLSATILYEILLGKATLYAVLVSALVLMAMVKRKDSRG

SEQ ID NO: 46292 - protein, 693 aa, synthetic construct
MALPVTALLLPLALLLHAARPDIQMTQSPSSLSASVGDRVTITCKSSQSLLDSDGKTYLNWYQQKPGKAPKLLIYLVSKLDSGVPSRFSGSGSGTDFTLTISSLQPEDFATYYCFQGTHFPFTFGQGTKVEIKRLEIQNPDPAVYQLRDSKSSDKSVCLFTDFDSQTNVSQSKDSDVYITDKCVLDMRSMDFKSNSAVAWSNKSDFACANAFNNSIIPEDTFFPSPESSCGFTSESYQQGVLSATILYEILLGKATLYAVLVSALVLMAMVKRKDSRGRAKRSGSGVKQTLNFDLLKLAGDVESNPGPTSMDWIWRILFLVGAATGAHSGPMDPDLEIRAAFLRQRNTALRTEVAELEQEVQRLENEVSQYETRYGPLGGGKGSGGGGSGGGGSGGGGSFEEVQLVESGGGLVQPGGSLRLSCAASGYTFTSYWMNWVRQAPGKGLEWVGMIDPSDSETHYNHIFKDRFTISADTSKNTAYLQMNSLRAEDTAVYYCARNLYLFGQGTLVTVSSTREDLKNVFPPEVAVFEPSEAEISHTQKATLVCLATGFYPDHVELSWWVNGKEVHSGVCTDPQPLKEQPALNDSRYCLSSRLRVSATFWQNPRNHFRCQVQFYGLSENDEWTQDRAKPVTQIVSAEAWGRADCDVKLVEKSFETDTNLNFQNLSVIGFRILLLKVAGFNLLMTLRLWSS

SEQ ID NO: 46293 - protein, 666 aa, synthetic construct
MALPVTALLLPLALLLHAARPDIQMTQSPSSLSASVGDRVTITCKSSQSLLDSDGKTYLNWYQQKPGKAPKLLIYLVSKLDSGVPSRFSGSGSGTDFTLTISSLQPEDFATYYCFQGTHFPFTFGQGTKVEIKRLEDLKNVFPPEVAVFEPSEAEISHTQKATLVCLATGFYPDHVELSWWVNGKEVHSGVCTDPQPLKEQPALNDSRYCLSSRLRVSATFWQNPRNHFRCQVQFYGLSENDEWTQDRAKPVTQIVSAEAWGRADCDVKLVEKSFETDTNLNFQNLSVIGFRILLLKVAGFNLLMTLRLWSSRAKRSGSGATNFSLLKQAGDVEENPGPTSMDWIWRILFLVGAATGAHSGPEVAALEKEVAALEKEVAALEKEVAALEKGSGGGGSGGGGSGGGGSFEEVQLVESGGGLVQPGGSLRLSCAASGYTFTSYWMNWVRQAPGKGLEWVGMIDPSDSETHYNHIFKDRFTISADTSKNTAYLQMNSLRAEDTAVYYCARNLYLFGQGTLVTVSSTRIQNPDPAVYQLRDSKSSDKSVCLFTDFDSQTNVSQSKDSDVYITDKCVLDMRSMDFKSNSAVAWSNKSDFACANAFNNSIIPEDTFFPSPESSCGFTSESYQQGVLSATILYEILLGKATLYAVLVSALVLMAMVKRKDSRG

SEQ ID NO: 46294 - protein, 670 aa, synthetic construct
MALPVTALLLPLALLLHAARPDIQMTQSPSSLSASVGDRVTITCKSSQSLLDSDGKTYLNWYQQKPGKAPKLLIYLVSKLDSGVPSRFSGSGSGTDFTLTISSLQPEDFATYYCFQGTHFPFTFGQGTKVEIKRLEIQNPDPAVYQLRDSKSSDKSVCLFTDFDSQTNVSQSKDSDVYITDKCVLDMRSMDFKSNSAVAWSNKSDFACANAFNNSIIPEDTFFPSPESSCGFTSESYQQGVLSATILYEILLGKATLYAVLVSALVLMAMVKRKDSRGRAKRSGSGVKQTLNFDLLKLAGDVESNPGPTSMDWIWRILFLVGAATGAHSGPEVAALEKEVAALEKEVAALEKEVAALEKGSGGGGSGGGGSGGGGSFEEVQLVESGGGLVQPGGSLRLSCAASGYTFTSYWMNWVRQAPGKGLEWVGMIDPSDSETHYNHIFKDRFTISADTSKNTAYLQMNSLRAEDTAVYYCARNLYLFGQGTLVTVSSTREDLKNVFPPEVAVFEPSEAEISHTQKATLVCLATGFYPDHVELSWWVNGKEVHSGVCTDPQPLKEQPALNDSRYCLSSRLRVSATFWQNPRNHFRCQVQFYGLSENDEWTQDRAKPVTQIVSAEAWGRADCDVKLVEKSFETDTNLNFQNLSVIGFRILLLKVAGFNLLMTLRLWSS

SEQ ID NO: 46295 - protein, 756 aa, synthetic construct
MALPVTALLLPLALLLHAARPDIQMTQSPSSLSASVGDRVTITCKSSQSLLDSDGKTYLNWYQQKPGKAPKLLIYLVSKLDSGVPSRFSGSGSGTDFTLTISSLQPEDFATYYCFQGTHFPFTFGQGTKVEIKRLEDLKNVFPPEVAVFEPSEAEISHTQKATLVCLATGFYPDHVELSWWVNGKEVHSGVCTDPQPLKEQPALNDSRYCLSSRLRVSATFWQNPRNHFRCQVQFYGLSENDEWTQDRAKPVTQIVSAEAWGRADCDVKLVEKSFETDTNLNFQNLSVIGFRILLLKVAGFNLLMTLRLWSSRAKRSGSGATNFSLLKQAGDVEENPGPTSMDWIWRILFLVGAATGAHSGPQVQLQESGGGLAQAGGSLRLSCAASGRTFSMGWFRQAPGKEREFVAAITYSGGSPYYASSVRGRFTISRDNAKNTVYLQMNSLKPEDTAVYYCAANPTYGSDWNAENWGQGTQVTVSSGSGGGGSGGGGSGGGGSFEEVQLVESGGGLVQPGGSLRLSCAASGYTFTSYWMNWVRQAPGKGLEWVGMIDPSDSETHYNHIFKDRFTISADTSKNTAYLQMNSLRAEDTAVYYCARNLYLFGQGTLVTVSSTRIQNPDPAVYQLRDSKSSDKSVCLFTDFDSQTNVSQSKDSDVYITDKCVLDMRSMDFKSNSAVAWSNKSDFACANAFNNSIIPEDTFFPSPESSCGFTSESYQQGVLSATILYEILLGKATLYAVLVSALVLMAMVKRKDSRG

SEQ ID NO: 46296 - protein, 760 aa, synthetic construct
MALPVTALLLPLALLLHAARPDIQMTQSPSSLSASVGDRVTITCKSSQSLLDSDGKTYLNWYQQKPGKAPKLLIYLVSKLDSGVPSRFSGSGSGTDFTLTISSLQPEDFATYYCFQGTHFPFTFGQGTKVEIKRLEIQNPDPAVYQLRDSKSSDKSVCLFTDFDSQTNVSQSKDSDVYITDKCVLDMRSMDFKSNSAVAWSNKSDFACANAFNNSIIPEDTFFPSPESSCGFTSESYQQGVLSATILYEILLGKATLYAVLVSALVLMAMVKRKDSRGRAKRSGSGVKQTLNFDLLKLAGDVESNPGPTSMDWIWRILFLVGAATGAHSGPQVQLQESGGGLAQAGGSLRLSCAASGRTFSMGWFRQAPGKEREFVAAITYSGGSPYYASSVRGRFTISRDNAKNTVYLQMNSLKPEDTAVYYCAANPTYGSDWNAENWGQGTQVTVSSGSGGGGSGGGGSGGGGSFEEVQLVESGGGLVQPGGSLRLSCAASGYTFTSYWMNWVRQAPGKGLEWVGMIDPSDSETHYNHIFKDRFTISADTSKNTAYLQMNSLRAEDTAVYYCARNLYLFGQGTLVTVSSTREDLKNVFPPEVAVFEPSEAEISHTQKATLVCLATGFYPDHVELSWWVNGKEVHSGVCTDPQPLKEQPALNDSRYCLSSRLRVSATFWQNPRNHFRCQVQFYGLSENDEWTQDRAKPVTQIVSAEAWGRADCDVKLVEKSFETDTNLNFQNLSVIGFRILLLKVAGFNLLMTLRLWSS

SEQ ID NO: 46297 - protein, 762 aa, synthetic construct
MALPVTALLLPLALLLHAARPEVQLVESGGSLVQPGGSLRLSCAASGFTFDDYAMSWVRQVPGKGLEWVSSINWSGTHTDYADSVKGRFTISRNNANNTLYLQMNSLKSEDTAVYYCAKNWRDAGTTWFEKSGSAGQGTQVTVSSGTGGGGSGGGGSGGGGSEFDIQMTQSPSSLSASVGDRVTITCKSSQSLLDSDGKTYLNWYQQKPGKAPKLLIYLVSKLDSGVPSRFSGSGSGTDFTLTISSLQPEDFATYYCFQGTHFPFTFGQGTKVEIKRLEDLKNVFPPEVAVFEPSEAEISHTQKATLVCLATGFYPDHVELSWWVNGKEVHSGVCTDPQPLKEQPALNDSRYCLSSRLRVSATFWQNPRNHFRCQVQFYGLSENDEWTQDRAKPVTQIVSAEAWGRADCDVKLVEKSFETDTNLNFQNLSVIGFRILLLKVAGFNLLMTLRLWSSRAKRSGSGATNFSLLKQAGDVEENPGPTSMDWIWRILFLVGAATGAHSFEEVQLVESGGGLVQPGGSLRLSCAASGYTFTSYWMNWVRQAPGKGLEWVGMIDPSDSETHYNHIFKDRFTISADTSKNTAYLQMNSLRAEDTAVYYCARNLYLFGQGTLVTVSSTRIQNPDPAVYQLRDSKSSDKSVCLFTDFDSQTNVSQSKDSDVYITDKCVLDMRSMDFKSNSAVAWSNKSDFACANAFNNSIIPEDTFFPSPESSCGFTSESYQQGVLSATILYEILLGKATLYAVLVSALVLMAMVKRKDSRG

SEQ ID NO: 46298 - protein, 766 aa, synthetic construct
MALPVTALLLPLALLLHAARPEVQLVESGGSLVQPGGSLRLSCAASGFTFDDYAMSWVRQVPGKGLEWVSSINWSGTHTDYADSVKGRFTISRNNANNTLYLQMNSLKSEDTAVYYCAKNWRDAGTTWFEKSGSAGQGTQVTVSSGTGGGGSGGGGSGGGGSEFDIQMTQSPSSLSASVGDRVTITCKSSQSLLDSDGKTYLNWYQQKPGKAPKLLIYLVSKLDSGVPSRFSGSGSGTDFTLTISSLQPEDFATYYCFQGTHFPFTFGQGTKVEIKRLEIQNPDPAVYQLRDSKSSDKSVCLFTDFDSQTNVSQSKDSDVYITDKCVLDMRSMDFKSNSAVAWSNKSDFACANAFNNSIIPEDTFFPSPESSCGFTSESYQQGVLSATILYEILLGKATLYAVLVSALVLMAMVKRKDSRGRAKRSGSGVKQTLNFDLLKLAGDVESNPGPTSMDWIWRILFLVGAATGAHSFEEVQLVESGGGLVQPGGSLRLSCAASGYTFTSYWMNWVRQAPGKGLEWVGMIDPSDSETHYNHIFKDRFTISADTSKNTAYLQMNSLRAEDTAVYYCARNLYLFGQGTLVTVSSTREDLKNVFPPEVAVFEPSEAEISHTQKATLVCLATGFYPDHVELSWWVNGKEVHSGVCTDPQPLKEQPALNDSRYCLSSRLRVSATFWQNPRNHFRCQVQFYGLSENDEWTQDRAKPVTQIVSAEAWGRADCDVKLVEKSFETDTNLNFQNLSVIGFRILLLKVAGFNLLMTLRLWSS

SEQ ID NO: 46299 - protein, 760 aa, synthetic construct
MALPVTALLLPLALLLHAARPEVQLLESGGGLVQPGGSLRLSCAASGFIFSSYAMSWVRQAPGKGQEWVSGVSGTGVNTYYADSVKGRFTISRDNSKNTLYLQMNSLRAEDTAVYYCASGKGWDSGSWYEDYRGQGTLVTVSSGTGGGGSGGGGSGGGGSEFDIQMTQSPSSLSASVGDRVTITCKSSQSLLDSDGKTYLNWYQQKPGKAPKLLIYLVSKLDSGVPSRFSGSGSGTDFTLTISSLQPEDFATYYCFQGTHFPFTFGQGTKVEIKRLEDLKNVFPPEVAVFEPSEAEISHTQKATLVCLATGFYPDHVELSWWVNGKEVHSGVCTDPQPLKEQPALNDSRYCLSSRLRVSATFWQNPRNHFRCQVQFYGLSENDEWTQDRAKPVTQIVSAEAWGRADCDVKLVEKSFETDTNLNFQNLSVIGFRILLLKVAGFNLLMTLRLWSSRAKRSGSGATNFSLLKQAGDVEENPGPTSMDWIWRILFLVGAATGAHSFEEVQLVESGGGLVQPGGSLRLSCAASGYTFTSYWMNWVRQAPGKGLEWVGMIDPSDSETHYNHIFKDRFTISADTSKNTAYLQMNSLRAEDTAVYYCARNLYLFGQGTLVTVSSTRIQNPDPAVYQLRDSKSSDKSVCLFTDFDSQTNVSQSKDSDVYITDKCVLDMRSMDFKSNSAVAWSNKSDFACANAFNNSIIPEDTFFPSPESSCGFTSESYQQGVLSATILYEILLGKATLYAVLVSALVLMAMVKRKDSRG

SEQ ID NO: 46300 - protein, 764 aa, synthetic construct
MALPVTALLLPLALLLHAARPEVQLLESGGGLVQPGGSLRLSCAASGFIFSSYAMSWVRQAPGKGQEWVSGVSGTGVNTYYADSVKGRFTISRDNSKNTLYLQMNSLRAEDTAVYYCASGKGWDSGSWYEDYRGQGTLVTVSSGTGGGGSGGGGSGGGGSEFDIQMTQSPSSLSASVGDRVTITCKSSQSLLDSDGKTYLNWYQQKPGKAPKLLIYLVSKLDSGVPSRFSGSGSGTDFTLTISSLQPEDFATYYCFQGTHFPFTFGQGTKVEIKRLEIQNPDPAVYQLRDSKSSDKSVCLFTDFDSQTNVSQSKDSDVYITDKCVLDMRSMDFKSNSAVAWSNKSDFACANAFNNSIIPEDTFFPSPESSCGFTSESYQQGVLSATILYEILLGKATLYAVLVSALVLMAMVKRKDSRGRAKRSGSGVKQTLNFDLLKLAGDVESNPGPTSMDWIWRILFLVGAATGAHSFEEVQLVESGGGLVQPGGSLRLSCAASGYTFTSYWMNWVRQAPGKGLEWVGMIDPSDSETHYNHIFKDRFTISADTSKNTAYLQMNSLRAEDTAVYYCARNLYLFGQGTLVTVSSTREDLKNVFPPEVAVFEPSEAEISHTQKATLVCLATGFYPDHVELSWWVNGKEVHSGVCTDPQPLKEQPALNDSRYCLSSRLRVSATFWQNPRNHFRCQVQFYGLSENDEWTQDRAKPVTQIVSAEAWGRADCDVKLVEKSFETDTNLNFQNLSVIGFRILLLKVAGFNLLMTLRLWSS

SEQ ID NO: 46301 - protein, 728 aa, synthetic construct
MALPVTALLLPLALLLHAARPMLPAPKNLVVSRITEDSARLSWTAPDAAFDSFPIRYIETLIWGEAIWLDVPGSERSYDLTGLKPGTEYAVVITGVKGGRFSSPLVASFTTGTGGGGSGGGGSGGGGSEFDIQMTQSPSSLSASVGDRVTITCKSSQSLLDSDGKTYLNWYQQKPGKAPKLLIYLVSKLDSGVPSRFSGSGSGTDFTLTISSLQPEDFATYYCFQGTHFPFTFGQGTKVEIKRLEDLKNVFPPEVAVFEPSEAEISHTQKATLVCLATGFYPDHVELSWWVNGKEVHSGVCTDPQPLKEQPALNDSRYCLSSRLRVSATFWQNPRNHFRCQVQFYGLSENDEWTQDRAKPVTQIVSAEAWGRADCDVKLVEKSFETDTNLNFQNLSVIGFRILLLKVAGFNLLMTLRLWSSRAKRSGSGATNFSLLKQAGDVEENPGPTSMDWIWRILFLVGAATGAHSFEEVQLVESGGGLVQPGGSLRLSCAASGYTFTSYWMNWVRQAPGKGLEWVGMIDPSDSETHYNHIFKDRFTISADTSKNTAYLQMNSLRAEDTAVYYCARNLYLFGQGTLVTVSSTRIQNPDPAVYQLRDSKSSDKSVCLFTDFDSQTNVSQSKDSDVYITDKCVLDMRSMDFKSNSAVAWSNKSDFACANAFNNSIIPEDTFFPSPESSCGFTSESYQQGVLSATILYEILLGKATLYAVLVSALVLMAMVKRKDSRG

SEQ ID NO: 46302 - protein, 732 aa, synthetic construct
MALPVTALLLPLALLLHAARPMLPAPKNLVVSRITEDSARLSWTAPDAAFDSFPIRYIETLIWGEAIWLDVPGSERSYDLTGLKPGTEYAVVITGVKGGRFSSPLVASFTTGTGGGGSGGGGSGGGGSEFDIQMTQSPSSLSASVGDRVTITCKSSQSLLDSDGKTYLNWYQQKPGKAPKLLIYLVSKLDSGVPSRFSGSGSGTDFTLTISSLQPEDFATYYCFQGTHFPFTFGQGTKVEIKRLEIQNPDPAVYQLRDSKSSDKSVCLFTDFDSQTNVSQSKDSDVYITDKCVLDMRSMDFKSNSAVAWSNKSDFACANAFNNSIIPEDTFFPSPESSCGFTSESYQQGVLSATILYEILLGKATLYAVLVSALVLMAMVKRKDSRGRAKRSGSGVKQTLNFDLLKLAGDVESNPGPTSMDWIWRILFLVGAATGAHSFEEVQLVESGGGLVQPGGSLRLSCAASGYTFTSYWMNWVRQAPGKGLEWVGMIDPSDSETHYNHIFKDRFTISADTSKNTAYLQMNSLRAEDTAVYYCARNLYLFGQGTLVTVSSTREDLKNVFPPEVAVFEPSEAEISHTQKATLVCLATGFYPDHVELSWWVNGKEVHSGVCTDPQPLKEQPALNDSRYCLSSRLRVSATFWQNPRNHFRCQVQFYGLSENDEWTQDRAKPVTQIVSAEAWGRADCDVKLVEKSFETDTNLNFQNLSVIGFRILLLKVAGFNLLMTLRLWSS

SEQ ID NO: 46303 - protein, 757 aa, synthetic construct
MALPVTALLLPLALLLHAARPEVQLVESGGGLVQPGGSLRLSCAASGFNIKDTCIGWVRRAPGKEEELVAKICKYSGHTRYADSVKGRFTISADTSKNTAYLQMNSLRAEDTAVYYCAAVSVRDGHYNYWGQGTTVTVSSGTGGGGSGGGGSGGGGSEFDIQMTQSPSSLSASVGDRVTITCKSSQSLLDSDGKTYLNWYQQKPGKAPKLLIYLVSKLDSGVPSRFSGSGSGTDFTLTISSLQPEDFATYYCFQGTHFPFTFGQGTKVEIKRLEDLKNVFPPEVAVFEPSEAEISHTQKATLVCLATGFYPDHVELSWWVNGKEVHSGVCTDPQPLKEQPALNDSRYCLSSRLRVSATFWQNPRNHFRCQVQFYGLSENDEWTQDRAKPVTQIVSAEAWGRADCDVKLVEKSFETDTNLNFQNLSVIGFRILLLKVAGFNLLMTLRLWSSRAKRSGSGATNFSLLKQAGDVEENPGPTSMDWIWRILFLVGAATGAHSFEEVQLVESGGGLVQPGGSLRLSCAASGYTFTSYWMNWVRQAPGKGLEWVGMIDPSDSETHYNHIFKDRFTISADTSKNTAYLQMNSLRAEDTAVYYCARNLYLFGQGTLVTVSSTRIQNPDPAVYQLRDSKSSDKSVCLFTDFDSQTNVSQSKDSDVYITDKCVLDMRSMDFKSNSAVAWSNKSDFACANAFNNSIIPEDTFFPSPESSCGFTSESYQQGVLSATILYEILLGKATLYAVLVSALVLMAMVKRKDSRG

SEQ ID NO: 46304 - protein, 761 aa, synthetic construct
MALPVTALLLPLALLLHAARPEVQLVESGGGLVQPGGSLRLSCAASGFNIKDTCIGWVRRAPGKEEELVAKICKYSGHTRYADSVKGRFTISADTSKNTAYLQMNSLRAEDTAVYYCAAVSVRDGHYNYWGQGTTVTVSSGTGGGGSGGGGSGGGGSEFDIQMTQSPSSLSASVGDRVTITCKSSQSLLDSDGKTYLNWYQQKPGKAPKLLIYLVSKLDSGVPSRFSGSGSGTDFTLTISSLQPEDFATYYCFQGTHFPFTFGQGTKVEIKRLEIQNPDPAVYQLRDSKSSDKSVCLFTDFDSQTNVSQSKDSDVYITDKCVLDMRSMDFKSNSAVAWSNKSDFACANAFNNSIIPEDTFFPSPESSCGFTSESYQQGVLSATILYEILLGKATLYAVLVSALVLMAMVKRKDSRGRAKRSGSGVKQTLNFDLLKLAGDVESNPGPTSMDWIWRILFLVGAATGAHSFEEVQLVESGGGLVQPGGSLRLSCAASGYTFTSYWMNWVRQAPGKGLEWVGMIDPSDSETHYNHIFKDRFTISADTSKNTAYLQMNSLRAEDTAVYYCARNLYLFGQGTLVTVSSTREDLKNVFPPEVAVFEPSEAEISHTQKATLVCLATGFYPDHVELSWWVNGKEVHSGVCTDPQPLKEQPALNDSRYCLSSRLRVSATFWQNPRNHFRCQVQFYGLSENDEWTQDRAKPVTQIVSAEAWGRADCDVKLVEKSFETDTNLNFQNLSVIGFRILLLKVAGFNLLMTLRLWSS

SEQ ID NO: 46305 - protein, 1128 aa, synthetic construct
MALPVTALLLPLALLLHAARPEVQLVESGGGLVQAGGSLRLSCAASGRTFSMGWFRQAPGKEREFVAAITYSGGSPYYADSVKGRFTISRDNAKNTVYLQMNSLKPEDTAVYYCAANPTYGSDWNAENWGQGTQVTVSSGTGGGGSGGGGSGGGGSEFDIQMTQSPSSLSASVGDRVTITCKSSQSLLDSDGKTYLNWYQQKPGKAPKLLIYLVSKLDSGVPSRFSGSGSGTDFTLTISSLQPEDFATYYCFQGTHFPFTFGQGTKVEIKRLEDLKNVFPPEVAVFEPSEAEISHTQKATLVCLATGFYPDHVELSWWVNGKEVHSGVCTDPQPLKEQPALNDSRYCLSSRLRVSATFWQNPRNHFRCQVQFYGLSENDEWTQDRAKPVTQIVSAEAWGRADCDVKLVEKSFETDTNLNFQNLSVIGFRILLLKVAGFNLLMTLRLWSSRAKRSGSGATNFSLLKQAGDVEENPGPTSATMDWIWRILFLVGAATGAHSGPEVQLVESGGGLVQAGGSLRLSCAASGRTFTMGWFRQAPGKEREFVAAISLSPTLAYYADSVKGRFTISRDNAKNTVVLQMNSLKPEDTALYYCAADRKSVMSIRPDYWGQGTQVTVSSGSGGGGSGGGGSGGGGSFEEVQLVESGGGLVQPGGSLRLSCAASGYTFTSYWMNWVRQAPGKGLEWVGMIDPSDSETHYNHIFKDRFTISADTSKNTAYLQMNSLRAEDTAVYYCARNLYLFGQGTLVTVSSTRIQNPDPAVYQLRDSKSSDKSVCLFTDFDSQTNVSQSKDSDVYITDKCVLDMRSMDFKSNSAVAWSNKSDFACANAFNNSIIPEDTFFPSPESSCGFTSESYQQGVLSATILYEILLGKATLYAVLVSALVLMAMVKRKDSRGRAKRSGSGVKQTLNFDLLKLAGDVESNPGPSRGHMTEYKPTVRLATRDDVPRAVRTLAAAFADYPATRHTVDPDRHIERVTELQELFLTRVGLDIGKVWVADDGAAVAVWTTPESVEAGAVFAEIGPRMAELSGSRLAAQQQMEGLLAPHRPKEPAWFLATVGVSPDHQGKGLGSAVVLPGVEAAERAGVPAFLETSAPRNLPFYERLGFTVTADVEVPEGPRTWCMTRKPGA

SEQ ID NO: 46306 - protein, 766 aa, synthetic construct
MALPVTALLLPLALLLHAARPEVQLVESGGGLVQPGGSLRLSCAASGFASDYYIIGWFRQAPGKEREGVSCISSRYANTNYADSVKGRFTISRDNAKNTVYLQMNSLKPEDTAVYYCAADTRRYTCPDIATMHRNFDSWGQGTLVTVSSGTGGGGSGGGGSGGGGSEFDIQMTQSPSSLSASVGDRVTITCKSSQSLLDSDGKTYLNWYQQKPGKAPKLLIYLVSKLDSGVPSRFSGSGSGTDFTLTISSLQPEDFATYYCFQGTHFPFTFGQGTKVEIKRLEDLKNVFPPEVAVFEPSEAEISHTQKATLVCLATGFYPDHVELSWWVNGKEVHSGVCTDPQPLKEQPALNDSRYCLSSRLRVSATFWQNPRNHFRCQVQFYGLSENDEWTQDRAKPVTQIVSAEAWGRADCDVKLVEKSFETDTNLNFQNLSVIGFRILLLKVAGFNLLMTLRLWSSRAKRSGSGATNFSLLKQAGDVEENPGPTSMDWIWRILFLVGAATGAHSFEEVQLVESGGGLVQPGGSLRLSCAASGYTFTSYWMNWVRQAPGKGLEWVGMIDPSDSETHYNHIFKDRFTISADTSKNTAYLQMNSLRAEDTAVYYCARNLYLFGQGTLVTVSSTRIQNPDPAVYQLRDSKSSDKSVCLFTDFDSQTNVSQSKDSDVYITDKCVLDMRSMDFKSNSAVAWSNKSDFACANAFNNSIIPEDTFFPSPESSCGFTSESYQQGVLSATILYEILLGKATLYAVLVSALVLMAMVKRKDSRG

SEQ ID NO: 46307 - protein, 766 aa, synthetic construct
MALPVTALLLPLALLLHAARPEVQLVESGGGLVQPGGSLRLSCEASGFASDDYIIGWFRQAPGKEREGVSCISSKYANTVYTDSVKGRFRLSRGTAKNTVYLQMSALKPEDTAVYYCAMDSRRVTCPEISTMHRNFDSWGQGTLVTVSSGTGGGGSGGGGSGGGGSEFDIQMTQSPSSLSASVGDRVTITCKSSQSLLDSDGKTYLNWYQQKPGKAPKLLIYLVSKLDSGVPSRFSGSGSGTDFTLTISSLQPEDFATYYCFQGTHFPFTFGQGTKVEIKRLEDLKNVFPPEVAVFEPSEAEISHTQKATLVCLATGFYPDHVELSWWVNGKEVHSGVCTDPQPLKEQPALNDSRYCLSSRLRVSATFWQNPRNHFRCQVQFYGLSENDEWTQDRAKPVTQIVSAEAWGRADCDVKLVEKSFETDTNLNFQNLSVIGFRILLLKVAGFNLLMTLRLWSSRAKRSGSGATNFSLLKQAGDVEENPGPTSMDWIWRILFLVGAATGAHSFEEVQLVESGGGLVQPGGSLRLSCAASGYTFTSYWMNWVRQAPGKGLEWVGMIDPSDSETHYNHIFKDRFTISADTSKNTAYLQMNSLRAEDTAVYYCARNLYLFGQGTLVTVSSTRIQNPDPAVYQLRDSKSSDKSVCLFTDFDSQTNVSQSKDSDVYITDKCVLDMRSMDFKSNSAVAWSNKSDFACANAFNNSIIPEDTFFPSPESSCGFTSESYQQGVLSATILYEILLGKATLYAVLVSALVLMAMVKRKDSRG

SEQ ID NO: 46308 - protein, 766 aa, synthetic construct
MALPVTALLLPLALLLHAARPEVQLVESGGGLVQPGGSLRLSCAASGFASDYYIIGWFRQAPGKEREGVSCISSRYANTNYADSVKGRFTISRDNAKNTVYLQMNSLKPEDTAVYYCAADTRRYTCPDIATMHRNFDSWGQGTLVTVSSGTGGGGSGGGGSGGGGSEFDIQMTQSPSSLSASVGDRVTITCKSSQSLLDSDGKTYLNWYQQKPGKAPKLLIYLVSKLDSGVPSRFSGSGSGTDFTLTISSLQPEDFATYYCFQGTHFPFTFGQGTKVEIKRLEIQNPDPAVYQLRDSKSSDKSVCLFTDFDSQTNVSQSKDSDVYITDKCVLDMRSMDFKSNSAVAWSNKSDFACANAFNNSIIPEDTFFPSPESSCGFTSESYQQGVLSATILYEILLGKATLYAVLVSALVLMAMVKRKDSRGRAKRSGSGATNFSLLKQAGDVEENPGPTSMDWIWRILFLVGAATGAHSFEEVQLVESGGGLVQPGGSLRLSCAASGYTFTSYWMNWVRQAPGKGLEWVGMIDPSDSETHYNHIFKDRFTISADTSKNTAYLQMNSLRAEDTAVYYCARNLYLFGQGTLVTVSSTRDLKNVFPPEVAVFEPSEAEISHTQKATLVCLATGFYPDHVELSWWVNGKEVHSGVCTDPQPLKEQPALNDSRYCLSSRLRVSATFWQNPRNHFRCQVQFYGLSENDEWTQDRAKPVTQIVSAEAWGRADCDVKLVEKSFETDTNLNFQNLSVIGFRILLLKVAGFNLLMTLRLWSS

SEQ ID NO: 46309 - protein, 766 aa, synthetic construct
MALPVTALLLPLALLLHAARPEVQLVESGGGLVQPGGSLRLSCEASGFASDDYIIGWFRQAPGKEREGVSCISSKYANTVYTDSVKGRFRLSRGTAKNTVYLQMSALKPEDTAVYYCAMDSRRVTCPEISTMHRNFDSWGQGTLVTVSSGTGGGGSGGGGSGGGGSEFDIQMTQSPSSLSASVGDRVTITCKSSQSLLDSDGKTYLNWYQQKPGKAPKLLIYLVSKLDSGVPSRFSGSGSGTDFTLTISSLQPEDFATYYCFQGTHFPFTFGQGTKVEIKRLEIQNPDPAVYQLRDSKSSDKSVCLFTDFDSQTNVSQSKDSDVYITDKCVLDMRSMDFKSNSAVAWSNKSDFACANAFNNSIIPEDTFFPSPESSCGFTSESYQQGVLSATILYEILLGKATLYAVLVSALVLMAMVKRKDSRGRAKRSGSGATNFSLLKQAGDVEENPGPTSMDWIWRILFLVGAATGAHSFEEVQLVESGGGLVQPGGSLRLSCAASGYTFTSYWMNWVRQAPGKGLEWVGMIDPSDSETHYNHIFKDRFTISADTSKNTAYLQMNSLRAEDTAVYYCARNLYLFGQGTLVTVSSTRDLKNVFPPEVAVFEPSEAEISHTQKATLVCLATGFYPDHVELSWWVNGKEVHSGVCTDPQPLKEQPALNDSRYCLSSRLRVSATFWQNPRNHFRCQVQFYGLSENDEWTQDRAKPVTQIVSAEAWGRADCDVKLVEKSFETDTNLNFQNLSVIGFRILLLKVAGFNLLMTLRLWSS

SEQ ID NO: 46310 - protein, 757 aa, synthetic construct
MALPVTALLLPLALLLHAARPQVKLEESGGGLVQPGESLRLSCSASGSIFKVFRVFAMSWYRQGPGKQRELVASISSGETTTYAESVKGRFTISRDNAKNTAYLQMDSLKPEDTAVYYCNADHTFTGDFWGQGTQVTVSSGTGGGGSGGGGSGGGGSEFDIQMTQSPSSLSASVGDRVTITCKSSQSLLDSDGKTYLNWYQQKPGKAPKLLIYLVSKLDSGVPSRFSGSGSGTDFTLTISSLQPEDFATYYCFQGTHFPFTFGQGTKVEIKRLEIQNPDPAVYQLRDSKSSDKSVCLFTDFDSQTNVSQSKDSDVYITDKCVLDMRSMDFKSNSAVAWSNKSDFACANAFNNSIIPEDTFFPSPESSCGFTSESYQQGVLSATILYEILLGKATLYAVLVSALVLMAMVKRKDSRGRAKRSGSGATNFSLLKQAGDVEENPGPTSMDWIWRILFLVGAATGAHSFEEVQLVESGGGLVQPGGSLRLSCAASGYTFTSYWMNWVRQAPGKGLEWVGMIDPSDSETHYNHIFKDRFTISADTSKNTAYLQMNSLRAEDTAVYYCARNLYLFGQGTLVTVSSTRDLKNVFPPEVAVFEPSEAEISHTQKATLVCLATGFYPDHVELSWWVNGKEVHSGVCTDPQPLKEQPALNDSRYCLSSRLRVSATFWQNPRNHFRCQVQFYGLSENDEWTQDRAKPVTQIVSAEAWGRADCDVKLVEKSFETDTNLNFQNLSVIGFRILLLKVAGFNLLMTLRLWSS

SEQ ID NO: 46311 - protein, 758 aa, synthetic construct
MALPVTALLLPLALLLHAARPDIQMTQSPSSLSASVGDRVTITCKSSQSLLDSDGKTYLNWYQQKPGKAPKLLIYLVSKLDSGVPSRFSGSGSGTDFTLTISSLQPEDFATYYCFQGTHFPFTFGQGTKVEIKRLEDLKNVFPPEVAVFEPSEAEISHTQKATLVCLATGFYPDHVELSWWVNGKEVHSGVCTDPQPLKEQPALNDSRYCLSSRLRVSATFWQNPRNHFRCQVQFYGLSENDEWTQDRAKPVTQIVSAEAWGRADCDVKLVEKSFETDTNLNFQNLSVIGFRILLLKVAGFNLLMTLRLWSSRAKRSGSGATNFSLLKQAGDVEENPGPTSATMDWIWRILFLVGAATGAHSGPEVQLVESGGGLVQAGGSLRLSCAASGRTFSMGWFRQAPGKEREFVAAITYSGGSPYYADSVKGRFTISRDNAKNTVYLQMNSLKPEDTAVYYCAANPTYGSDWNAENWGQGTQVTVSSGSGGGGSGGGGSGGGGSFEEVQLVESGGGLVQPGGSLRLSCAASGYTFTSYWMNWVRQAPGKGLEWVGMIDPSDSETHYNHIFKDRFTISADTSKNTAYLQMNSLRAEDTAVYYCARNLYLFGQGTLVTVSSTRIQNPDPAVYQLRDSKSSDKSVCLFTDFDSQTNVSQSKDSDVYITDKCVLDMRSMDFKSNSAVAWSNKSDFACANAFNNSIIPEDTFFPSPESSCGFTSESYQQGVLSATILYEILLGKATLYAVLVSALVLMAMVKRKDSRG

SEQ ID NO: 46312 - protein, 759 aa, synthetic construct
MALPVTALLLPLALLLHAARPDIQMTQSPSSLSASVGDRVTITCKSSQSLLDSDGKTYLNWYQQKPGKAPKLLIYLVSKLDSGVPSRFSGSGSGTDFTLTISSLQPEDFATYYCFQGTHFPFTFGQGTKVEIKRLEDLKNVFPPEVAVFEPSEAEISHTQKATLVCLATGFYPDHVELSWWVNGKEVHSGVCTDPQPLKEQPALNDSRYCLSSRLRVSATFWQNPRNHFRCQVQFYGLSENDEWTQDRAKPVTQIVSAEAWGRADCDVKLVEKSFETDTNLNFQNLSVIGFRILLLKVAGFNLLMTLRLWSSRAKRSGSGATNFSLLKQAGDVEENPGPTSATMDWIWRILFLVGAATGAHSGPEVQLVESGGGLVQPGGSLRLSCAASGSIFGFNDMAWYRQAPGKQRELVALISRVGVTSSADSVKGRFTISRVNAKDTVYLQMNSLKPEDTAVYYCYMDQRLDGSTLAYWGQGTQVTVSSGSGGGGSGGGGSGGGGSFEEVQLVESGGGLVQPGGSLRLSCAASGYTFTSYWMNWVRQAPGKGLEWVGMIDPSDSETHYNHIFKDRFTISADTSKNTAYLQMNSLRAEDTAVYYCARNLYLFGQGTLVTVSSTRIQNPDPAVYQLRDSKSSDKSVCLFTDFDSQTNVSQSKDSDVYITDKCVLDMRSMDFKSNSAVAWSNKSDFACANAFNNSIIPEDTFFPSPESSCGFTSESYQQGVLSATILYEILLGKATLYAVLVSALVLMAMVKRKDSRG

SEQ ID NO: 46313 - protein, 755 aa, synthetic construct
MALPVTALLLPLALLLHAARPDIQMTQSPSSLSASVGDRVTITCKSSQSLLDSDGKTYLNWYQQKPGKAPKLLIYLVSKLDSGVPSRFSGSGSGTDFTLTISSLQPEDFATYYCFQGTHFPFTFGQGTKVEIKRLEDLKNVFPPEVAVFEPSEAEISHTQKATLVCLATGFYPDHVELSWWVNGKEVHSGVCTDPQPLKEQPALNDSRYCLSSRLRVSATFWQNPRNHFRCQVQFYGLSENDEWTQDRAKPVTQIVSAEAWGRADCDVKLVEKSFETDTNLNFQNLSVIGFRILLLKVAGFNLLMTLRLWSSRAKRSGSGATNFSLLKQAGDVEENPGPTSATMDWIWRILFLVGAATGAHSGPEVQLVESGGGLVQAGGSLRLSCAASGSVFSGNVMGWYRQAPGKEREWVAAIASGGSIYYRDSVKGRFTISRDNAKNTVYLQMNSLKPEDTAVYYCNSHPPTLPYWGLGTQVTVSSGSGGGGSGGGGSGGGGSFEEVQLVESGGGLVQPGGSLRLSCAASGYTFTSYWMNWVRQAPGKGLEWVGMIDPSDSETHYNHIFKDRFTISADTSKNTAYLQMNSLRAEDTAVYYCARNLYLFGQGTLVTVSSTRIQNPDPAVYQLRDSKSSDKSVCLFTDFDSQTNVSQSKDSDVYITDKCVLDMRSMDFKSNSAVAWSNKSDFACANAFNNSIIPEDTFFPSPESSCGFTSESYQQGVLSATILYEILLGKATLYAVLVSALVLMAMVKRKDSRG

SEQ ID NO: 46314 - protein, 753 aa, synthetic construct
MALPVTALLLPLALLLHAARPDIQMTQSPSSLSASVGDRVTITCKSSQSLLDSDGKTYLNWYQQKPGKAPKLLIYLVSKLDSGVPSRFSGSGSGTDFTLTISSLQPEDFATYYCFQGTHFPFTFGQGTKVEIKRLEDLKNVFPPEVAVFEPSEAEISHTQKATLVCLATGFYPDHVELSWWVNGKEVHSGVCTDPQPLKEQPALNDSRYCLSSRLRVSATFWQNPRNHFRCQVQFYGLSENDEWTQDRAKPVTQIVSAEAWGRADCDVKLVEKSFETDTNLNFQNLSVIGFRILLLKVAGFNLLMTLRLWSSRAKRSGSGATNFSLLKQAGDVEENPGPTSATMDWIWRILFLVGAATGAHSGPEVQLLESGGGLVQPGGSLRLSCAASGFSFSSYALSWVRQAPGKGLEWVSSIGENDGTTDYADAVKGRFTISRDNSKNTLYLQMNSLRVEDTAVYYCVKDGIHWGQGTLVTVSSGSGGGGSGGGGSGGGGSFEEVQLVESGGGLVQPGGSLRLSCAASGYTFTSYWMNWVRQAPGKGLEWVGMIDPSDSETHYNHIFKDRFTISADTSKNTAYLQMNSLRAEDTAVYYCARNLYLFGQGTLVTVSSTRIQNPDPAVYQLRDSKSSDKSVCLFTDFDSQTNVSQSKDSDVYITDKCVLDMRSMDFKSNSAVAWSNKSDFACANAFNNSIIPEDTFFPSPESSCGFTSESYQQGVLSATILYEILLGKATLYAVLVSALVLMAMVKRKDSRG

SEQ ID NO: 46315 - protein, 1122 aa, synthetic construct
MGPRLLFWALLCLLGTGPVEAGVTQSPTHLIKTRGQQATLRCSPISGHTSVYWYQQALGLGLQFLLWYDEGEERNRGNFPPRFSGRQFPNYSSELNVNALELEDSALYLCASSLGGPRGLAGLRGDEQFFGPGTRLTVLEGTGGGGSGGGEFDIQMTQSPSSLSASVGDRVTITCKSSQSLLDSDGKTYLNWYQQKPGKAPKLLIYLVSKLDSGVPSRFSGSGSGTDFTLTISSLQPEDFATYYCFQGTHFPFTFGQGTKVEIKRLEDLKNVFPPEVAVFEPSEAEISHTQKATLVCLATGFYPDHVELSWWVNGKEVHSGVCTDPQPLKEQPALNDSRYCLSSRLRVSATFWQNPRNHFRCQVQFYGLSENDEWTQDRAKPVTQIVSAEAWGRADCDVKLVEKSFETDTNLNFQNLSVIGFRILLLKVAGFNLLMTLRLWSSRAKRSGSGATNFSLLKQAGDVEENPGPTSATMDWIWRILFLVGAATGAHSGPEVQLVESGGGLVQAGGSLRLSCAASGRTFSMGWFRQAPGKEREFVAAITYSGGSPYYADSVKGRFTISRDNAKNTVYLQMNSLKPEDTAVYYCAANPTYGSDWNAENWGQGTQVTVSSGSGGGGSGGGGSGGGGSFEEVQLVESGGGLVQPGGSLRLSCAASGYTFTSYWMNWVRQAPGKGLEWVGMIDPSDSETHYNHIFKDRFTISADTSKNTAYLQMNSLRAEDTAVYYCARNLYLFGQGTLVTVSSTRIQNPDPAVYQLRDSKSSDKSVCLFTDFDSQTNVSQSKDSDVYITDKCVLDMRSMDFKSNSAVAWSNKSDFACANAFNNSIIPEDTFFPSPESSCGFTSESYQQGVLSATILYEILLGKATLYAVLVSALVLMAMVKRKDSRGRAKRSGSGVKQTLNFDLLKLAGDVESNPGPSRGHMTEYKPTVRLATRDDVPRAVRTLAAAFADYPATRHTVDPDRHIERVTELQELFLTRVGLDIGKVWVADDGAAVAVWTTPESVEAGAVFAEIGPRMAELSGSRLAAQQQMEGLLAPHRPKEPAWFLATVGVSPDHQGKGLGSAVVLPGVEAAERAGVPAFLETSAPRNLPFYERLGFTVTADVEVPEGPRTWCMTRKPGA

SEQ ID NO: 46316 - protein, 1121 aa, synthetic construct
MGPRLLFWALLCLLGTGPVEAGVTQSPTHLIKTRGQQATLRCSPISGHTSVYWYQQALGLGLQFLLWYDEGEERNRGNFPPRFSGRQFPNYSSELNVNALELEDSALYLCASSLGGDELGADGNEQFFGPGTRLTVLEGTGGGGSGGGSEFDIQMTQSPSSLSASVGDRVTITCKSSQSLLDSDGKTYLNWYQQKPGKAPKLLIYLVSKLDSGVPSRFSGSGSGTDFTLTISSLQPEDFATYYCFQGTHFPFTFGQGTKVEIKRLEDLKNVFPPEVAVFEPSEAEISHTQKATLVCLATGFYPDHVELSWWVNGKEVHSGVCTDPQPLKEQPALNDSRYCLSSRLRVSATFWQNPRNHFRCQVQFYGLSENDEWTQDRAKPVTQIVSAEAWGRADCDVKLVEKSFETDTNLNFQNLSVIGFRILLLKVAGFNLLMTLRLWSSRAKRSGSGATNFSLLKQAGDVEENPGPTSATMDWIWRILFLVGAATGAHSGPEVQLVESGGGLVQAGGSLRLSCAASGRTFSMGWFRQAPGKEREFVAAITYSGGSPYYADSVKGRFTISRDNAKNTVYLQMNSLKPEDTAVYYCAANPTYGSDWNAENWGQGTQVTVSSGSGGGGSGGGGSGGGGSFEEVQLVESGGGLVQPGGSLRLSCAASGYTFTSYWMNWVRQAPGKGLEWVGMIDPSDSETHYNHIFKDRFTISADTSKNTAYLQMNSLRAEDTAVYYCARNLYLFGQGTLVTVSSTRIQNPDPAVYQLRDSKSSDKSVCLFTDFDSQTNVSQSKDSDVYITDKCVLDMRSMDFKSNSAVAWSNKSDFACANAFNNSIIPEDTFFPSPESSCGFTSESYQQGVLSATILYEILLGKATLYAVLVSALVLMAMVKRKDSRGRAKRSGSGVKQTLNFDLLKLAGDVESNPGPSRGHMTEYKPTVRLATRDDVPRAVRTLAAAFADYPATRHTVDPDRHIERVTELQELFLTRVGLDIGKVWVADDGAAVAVWTTPESVEAGAVFAEIGPRMAELSGSRLAAQQQMEGLLAPHRPKEPAWFLATVGVSPDHQGKGLGSAVVLPGVEAAERAGVPAFLETSAPRNLPFYERLGFTVTADVEVPEGPRTWCMTRKPGA

SEQ ID NO: 46317 - protein, 946 aa, synthetic construct
MALPVTALLLPLALLLHAARPDIQMTQSPSSLSASVGDRVTITCKSSQSLLDSDGKTYLNWYQQKPGKAPKLLIYLVSKLDSGVPSRFSGSGSGTDFTLTISSLQPEDFATYYCFQGTHFPFTFGQGTKVEIKRLEDLKNVFPPEVAVFEPSEAEISHTQKATLVCLATGFYPDHVELSWWVNGKEVHSGVCTDPQPLKEQPALNDSRYCLSSRLRVSATFWQNPRNHFRCQVQFYGLSENDEWTQDRAKPVTQIVSAEAWGRADCDVKLVEKSFETDTNLNFQNLSVIGFRILLLKVAGFNLLMTLRLWSSRAKRSGSGATNFSLLKQAGDVEENPGPTSATMDWIWRILFLVGAATGAHSGPMGSWLEFYHRLNAIDSRLWALGGSEAELAAFEKEIAAFESELQAYKGKGNPEVESLRDHAAHIREWLQAYRHNGSGGGGSGGGGSGGGGSFEEVQLVESGGGLVQPGGSLRLSCAASGYTFTSYWMNWVRQAPGKGLEWVGMIDPSDSETHYNHIFKDRFTISADTSKNTAYLQMNSLRAEDTAVYYCARNLYLFGQGTLVTVSSTRIQNPDPAVYQLRDSKSSDKSVCLFTDFDSQTNVSQSKDSDVYITDKCVLDMRSMDFKSNSAVAWSNKSDFACANAFNNSIIPEDTFFPSPESSCGFTSESYQQGVLSATILYEILLGKATLYAVLVSALVLMAMVKRKDSRGRAKRSGSGVKQTLNFDLLKLAGDVESNPGPSRGHMTEYKPTVRLATRDDVPRAVRTLAAAFADYPATRHTVDPDRHIERVTELQELFLTRVGLDIGKVWVADDGAAVAVWTTPESVEAGAVFAEIGPRMAELSGSRLAAQQQMEGLLAPHRPKEPAWFLATVGVSPDHQGKGLGSAVVLPGVEAAERAGVPAFLETSAPRNLPFYERLGFTVTADVEVPEGPRTWCMTRKPGA

SEQ ID NO: 46318 - protein, 946 aa, synthetic construct
MALPVTALLLPLALLLHAARPACMGSWFEFYDRLNAIDARLWALGGSEAELAAFEKEIAAFESELQAYKGKGNPEVENLRVHAAAIREWLQAYRHNGTGGGGSGGGGSGGGGSEFDIQMTQSPSSLSASVGDRVTITCKSSQSLLDSDGKTYLNWYQQKPGKAPKLLIYLVSKLDSGVPSRFSGSGSGTDFTLTISSLQPEDFATYYCFQGTHFPFTFGQGTKVEIKRLEDLKNVFPPEVAVFEPSEAEISHTQKATLVCLATGFYPDHVELSWWVNGKEVHSGVCTDPQPLKEQPALNDSRYCLSSRLRVSATFWQNPRNHFRCQVQFYGLSENDEWTQDRAKPVTQIVSAEAWGRADCDVKLVEKSFETDTNLNFQNLSVIGFRILLLKVAGFNLLMTLRLWSSRAKRSGSGATNFSLLKQAGDVEENPGPTSMDWIWRILFLVGAATGAHSFEEVQLVESGGGLVQPGGSLRLSCAASGYTFTSYWMNWVRQAPGKGLEWVGMIDPSDSETHYNHIFKDRFTISADTSKNTAYLQMNSLRAEDTAVYYCARNLYLFGQGTLVTVSSTRIQNPDPAVYQLRDSKSSDKSVCLFTDFDSQTNVSQSKDSDVYITDKCVLDMRSMDFKSNSAVAWSNKSDFACANAFNNSIIPEDTFFPSPESSCGFTSESYQQGVLSATILYEILLGKATLYAVLVSALVLMAMVKRKDSRGRAKRSGSGVKQTLNFDLLKLAGDVESNPGPSRGHMTEYKPTVRLATRDDVPRAVRTLAAAFADYPATRHTVDPDRHIERVTELQELFLTRVGLDIGKVWVADDGAAVAVWTTPESVEAGAVFAEIGPRMAELSGSRLAAQQQMEGLLAPHRPKEPAWFLATVGVSPDHQGKGLGSAVVLPGVEAAERAGVPAFLETSAPRNLPFYERLGFTVTADVEVPEGPRTWCMTRKPGA

SEQ ID NO: 46319 - protein, 1063 aa, synthetic construct
MALPVTALLLPLALLLHAARPACMDPDLEIRAAFLRQRNTALRTEVAELEQEVQRLENEVSQYETRYGPLGGGKGTGGGGSGGGGSGGGGSEFDIQMTQSPSSLSASVGDRVTITCKSSQSLLDSDGKTYLNWYQQKPGKAPKLLIYLVSKLDSGVPSRFSGSGSGTDFTLTISSLQPEDFATYYCFQGTHFPFTFGQGTKVEIKRLEDLKNVFPPEVAVFEPSEAEISHTQKATLVCLATGFYPDHVELSWWVNGKEVHSGVCTDPQPLKEQPALNDSRYCLSSRLRVSATFWQNPRNHFRCQVQFYGLSENDEWTQDRAKPVTQIVSAEAWGRADCDVKLVEKSFETDTNLNFQNLSVIGFRILLLKVAGFNLLMTLRLWSSRAKRSGSGATNFSLLKQAGDVEENPGPTSATMDWIWRILFLVGAATGAHSGPEVQLVESGGGLVQAGGSLRLSCAASGRTFSMGWFRQAPGKEREFVAAITYSGGSPYYADSVKGRFTISRDNAKNTVYLQMNSLKPEDTAVYYCAANPTYGSDWNAENWGQGTQVTVSSGSGGGGSGGGGSGGGGSFEEVQLVESGGGLVQPGGSLRLSCAASGYTFTSYWMNWVRQAPGKGLEWVGMIDPSDSETHYNHIFKDRFTISADTSKNTAYLQMNSLRAEDTAVYYCARNLYLFGQGTLVTVSSTRIQNPDPAVYQLRDSKSSDKSVCLFTDFDSQTNVSQSKDSDVYITDKCVLDMRSMDFKSNSAVAWSNKSDFACANAFNNSIIPEDTFFPSPESSCGFTSESYQQGVLSATILYEILLGKATLYAVLVSALVLMAMVKRKDSRGRAKRSGSGVKQTLNFDLLKLAGDVESNPGPSRGHMTEYKPTVRLATRDDVPRAVRTLAAAFADYPATRHTVDPDRHIERVTELQELFLTRVGLDIGKVWVADDGAAVAVWTTPESVEAGAVFAEIGPRMAELSGSRLAAQQQMEGLLAPHRPKEPAWFLATVGVSPDHQGKGLGSAVVLPGVEAAERAGVPAFLETSAPRNLPFYERLGFTVTADVEVPEGPRTWCMTRKPGA

SEQ ID NO: 46320 - protein, 946 aa, synthetic construct
MALPVTALLLPLALLLHAARPDIQMTQSPSSLSASVGDRVTITCKSSQSLLDSDGKTYLNWYQQKPGKAPKLLIYLVSKLDSGVPSRFSGSGSGTDFTLTISSLQPEDFATYYCFQGTHFPFTFGQGTKVEIKRLEDLKNVFPPEVAVFEPSEAEISHTQKATLVCLATGFYPDHVELSWWVNGKEVHSGVCTDPQPLKEQPALNDSRYCLSSRLRVSATFWQNPRNHFRCQVQFYGLSENDEWTQDRAKPVTQIVSAEAWGRADCDVKLVEKSFETDTNLNFQNLSVIGFRILLLKVAGFNLLMTLRLWSSRAKRSGSGATNFSLLKQAGDVEENPGPTSATMDWIWRILFLVGAATGAHSGPMGSWSEFYDRLHAIHHRLYALGGSEAELAAFEKEIAAFESELQAYKGKGNPEVEALRDTAAFIRTRLQAYRHNGSGGGGSGGGGSGGGGSFEEVQLVESGGGLVQPGGSLRLSCAASGYTFTSYWMNWVRQAPGKGLEWVGMIDPSDSETHYNHIFKDRFTISADTSKNTAYLQMNSLRAEDTAVYYCARNLYLFGQGTLVTVSSTRIQNPDPAVYQLRDSKSSDKSVCLFTDFDSQTNVSQSKDSDVYITDKCVLDMRSMDFKSNSAVAWSNKSDFACANAFNNSIIPEDTFFPSPESSCGFTSESYQQGVLSATILYEILLGKATLYAVLVSALVLMAMVKRKDSRGRAKRSGSGVKQTLNFDLLKLAGDVESNPGPSRGHMTEYKPTVRLATRDDVPRAVRTLAAAFADYPATRHTVDPDRHIERVTELQELFLTRVGLDIGKVWVADDGAAVAVWTTPESVEAGAVFAEIGPRMAELSGSRLAAQQQMEGLLAPHRPKEPAWFLATVGVSPDHQGKGLGSAVVLPGVEAAERAGVPAFLETSAPRNLPFYERLGFTVTADVEVPEGPRTWCMTRKPGA

SEQ ID NO: 46321 - protein, 1156 aa, synthetic construct
MALPVTALLLPLALLLHAARPDIQMTQSPSSLSASVGDRVTITCKSSQSLLDSDGKTYLNWYQQKPGKAPKLLIYLVSKLDSGVPSRFSGSGSGTDFTLTISSLQPEDFATYYCFQGTHFPFTFGQGTKVEIKRLEDLKNVFPPEVAVFEPSEAEISHTQKATLVCLATGFYPDHVELSWWVNGKEVHSGVCTDPQPLKEQPALNDSRYCLSSRLRVSATFWQNPRNHFRCQVQFYGLSENDEWTQDRAKPVTQIVSAEAWGRADCDVKLVEKSFETDTNLNFQNLSVIGFRILLLKVAGFNLLMTLRLWSSRAKRSGSGATNFSLLKQAGDVEENPGPTSTMDWIWRILFLVGAATGAHSLFNQEVQIPLTESYCGPCPKNWICYKNNCYQFFDESKNWYESQASCMSQNASLLKVYSKEDQDLLKLVKSAHWMGLVHIPTNGSWQWEDGSILSPNLLTIIEMQKGDCALYASSFKGYIENCSTPNTYICMQRTVSGGGGSGGGGSGGGGDLFNQEVQIPLTESYCGPCPKNWICYKNNCYQFFDESKNWYESQASCMSQNASLLKVYSKEDQDLLKLVKSAHWMGLVHIPTNGSWQWEDGSILSPNLLTIIEMQKGDCALYASSFKGYIENCSTPNTYICMQRTVGSGGGGSGGGGSGGGGSFEEVQLVESGGGLVQPGGSLRLSCAASGYTFTSYWMNWVRQAPGKGLEWVGMIDPSDSETHYNHIFKDRFTISADTSKNTAYLQMNSLRAEDTAVYYCARNLYLFGQGTLVTVSSTRIQNPDPAVYQLRDSKSSDKSVCLFTDFDSQTNVSQSKDSDVYITDKCVLDMRSMDFKSNSAVAWSNKSDFACANAFNNSIIPEDTFFPSPESSCGFTSESYQQGVLSATILYEILLGKATLYAVLVSALVLMAMVKRKDSRGRAKRSGSGVKQTLNFDLLKLAGDVESNPGPSRGHMTEYKPTVRLATRDDVPRAVRTLAAAFADYPATRHTVDPDRHIERVTELQELFLTRVGLDIGKVWVADDGAAVAVWTTPESVEAGAVFAEIGPRMAELSGSRLAAQQQMEGLLAPHRPKEPAWFLATVGVSPDHQGKGLGSAVVLPGVEAAERAGVPAFLETSAPRNLPFYERLGFTVTADVEVPEGPRTWCMTRKPGA

SEQ ID NO: 46322 - protein, 619 aa, synthetic construct; identical to SEQ ID NO: 46279

SEQ ID NO: 46323 - protein, 623 aa, synthetic construct
MALPVTALLLPLALLLHAARPDIQMTQSPSSLSASVGDRVTITCKSSQSLLDSDGKTYLNWYQQKPGKAPKLLIYLVSKLDSGVPSRFSGSGSGTDFTLTISSLQPEDFATYYCFQGTHFPFTFGQGTKVEIKRLEIQNPDPAVYQLRDSKSSDKSVCLFTDFDSQTNVSQSKDSDVYITDKCVLDMRSMDFKSNSAVAWSNKSDFACANAFNNSIIPEDTFFPSPESSCDVKLVEKSFETDTNLNFQILYEILLGKATLYAVLVSALVLMAMVKRKDSRGRAKRSGSGVKQTLNFDLLKLAGDVESNPGPTSMDWIWRILFLVGAATGAHSFEEVQLVESGGGLVQPGGSLRLSCAASGYTFTSYWMNWVRQAPGKGLEWVGMIDPSDSETHYNHIFKDRFTISADTSKNTAYLQMNSLRAEDTAVYYCARNLYLFGQGTLVTVSSTREDLKNVFPPEVAVFEPSEAEISHTQKATLVCLATGFYPDHVELSWWVNGKEVHSGVCTDPQPLKEQPALNDSRYCLSSRLRVSATFWQNPRNHFRCQVQFYGLSENDEWTQDRAKPVTQIVSAEAWGRADCGFTSESYQQGVLSATNLSVIGFRILLLKVAGFNLLMTLRLWSS

SEQ ID NO: 46324 - protein, 754 aa, synthetic construct
MALPVTALLLPLALLLHAARPEVQLVESGGGLVQPGGSLRLSCAASGFSFSDFWMSWVRQAPGKGLEWVATISQAGSEKDYVDSVKGRFTISRDNAKKSLYLQMNSLRAEDTAVYYCASGVYSFDYRGQGTLVTVSSGTGGGGSGGGGSGGGGSEFDIQMTQSPSSLSASVGDRVTITCKSSQSLLDSDGKTYLNWYQQKPGKAPKLLIYLVSKLDSGVPSRFSGSGSGTDFTLTISSLQPEDFATYYCFQGTHFPFTFGQGTKVEIKRLEDLKNVFPPEVAVFEPSEAEISHTQKATLVCLATGFYPDHVELSWWVNGKEVHSGVCTDPQPLKEQPALNDSRYCLSSRLRVSATFWQNPRNHFRCQVQFYGLSENDEWTQDRAKPVTQIVSAEAWGRADCGFTSESYQQGVLSATNLSVIGFRILLLKVAGFNLLMTLRLWSSRAKRSGSGATNFSLLKQAGDVEENPGPTSMDWIWRILFLVGAATGAHSFEEVQLVESGGGLVQPGGSLRLSCAASGYTFTSYWMNWVRQAPGKGLEWVGMIDPSDSETHYNHIFKDRFTISADTSKNTAYLQMNSLRAEDTAVYYCARNLYLFGQGTLVTVSSTRIQNPDPAVYQLRDSKSSDKSVCLFTDFDSQTNVSQSKDSDVYITDKCVLDMRSMDFKSNSAVAWSNKSDFACANAFNNSIIPEDTFFPSPESSCDVKLVEKSFETDTNLNFQILYEILLGKATLYAVLVSALVLMAMVKRKDSRG

SEQ ID NO: 46325 - protein, 758 aa, synthetic construct
MALPVTALLLPLALLLHAARPEVQLVESGGGLVQPGGSLRLSCAASGFSFSDFWMSWVRQAPGKGLEWVATISQAGSEKDYVDSVKGRFTISRDNAKKSLYLQMNSLRAEDTAVYYCASGVYSFDYRGQGTLVTVSSGTGGGGSGGGGSGGGGSEFDIQMTQSPSSLSASVGDRVTITCKSSQSLLDSDGKTYLNWYQQKPGKAPKLLIYLVSKLDSGVPSRFSGSGSGTDFTLTISSLQPEDFATYYCFQGTHFPFTFGQGTKVEIKRLEIQNPDPAVYQLRDSKSSDKSVCLFTDFDSQTNVSQSKDSDVYITDKCVLDMRSMDFKSNSAVAWSNKSDFACANAFNNSIIPEDTFFPSPESSCDVKLVEKSFETDTNLNFQILYEILLGKATLYAVLVSALVLMAMVKRKDSRGRAKRSGSGVKQTLNFDLLKLAGDVESNPGPTSMDWIWRILFLVGAATGAHSFEEVQLVESGGGLVQPGGSLRLSCAASGYTFTSYWMNWVRQAPGKGLEWVGMIDPSDSETHYNHIFKDRFTISADTSKNTAYLQMNSLRAEDTAVYYCARNLYLFGQGTLVTVSSTREDLKNVFPPEVAVFEPSEAEISHTQKATLVCLATGFYPDHVELSWWVNGKEVHSGVCTDPQPLKEQPALNDSRYCLSSRLRVSATFWQNPRNHFRCQVQFYGLSENDEWTQDRAKPVTQIVSAEAWGRADCGFTSESYQQGVLSATNLSVIGFRILLLKVAGFNLLMTLRLWSS

SEQ ID NO: 46326 - protein, 891 aa, synthetic construct
MALPVTALLLPLALLLHAARPEVQLVESGGGLVQPGGSLRLSCAASGFSFSDFWMSWVRQAPGKGLEWVATISQAGSEKDYVDSVKGRFTISRDNAKKSLYLQMNSLRAEDTAVYYCASGVYSFDYRGQGTLVTVSSGTGGGGSGGGGSGGGGSEFDIQMTQSPSSLSASVGDRVTITCKSSQSLLDSDGKTYLNWYQQKPGKAPKLLIYLVSKLDSGVPSRFSGSGSGTDFTLTISSLQPEDFATYYCFQGTHFPFTFGQGTKVEIKRLEDLKNVFPPEVAVFEPSEAEISHTQKATLVCLATGFYPDHVELSWWVNGKEVHSGVCTDPQPLKEQPALNDSRYCLSSRLRVSATFWQNPRNHFRCQVQFYGLSENDEWTQDRAKPVTQIVSAEAWGRADCGFTSESYQQGVLSATNLSVIGFRILLLKVAGFNLLMTLRLWSSRAKRSGSGATNFSLLKQAGDVEENPGPTSMDWIWRILFLVGAATGAHSGPQLQLQESGPGLVKPSETLSLTCTVSGDSISSGDYYWGWIRQPPGKGLEWIGHIYYSGVTYYNPSLKSRVTISVDTSRNQFSLKLSSVTAADTAVYYCTREDSSNWRSRGQGTLVTVSSGSGGGGSGGGGSGGGGSFEEVQLVESGGGLVQPGGSLRLSCAASGYTFTSYWMNWVRQAPGKGLEWVGMIDPSDSETHYNHIFKDRFTISADTSKNTAYLQMNSLRAEDTAVYYCARNLYLFGQGTLVTVSSTRIQNPDPAVYQLRDSKSSDKSVCLFTDFDSQTNVSQSKDSDVYITDKCVLDMRSMDFKSNSAVAWSNKSDFACANAFNNSIIPEDTFFPSPESSCDVKLVEKSFETDTNLNFQILYEILLGKATLYAVLVSALVLMAMVKRKDSRG

SEQ ID NO: 46327 - protein, 895 aa, synthetic construct
MALPVTALLLPLALLLHAARPEVQLVESGGGLVQPGGSLRLSCAASGFSFSDFWMSWVRQAPGKGLEWVATISQAGSEKDYVDSVKGRFTISRDNAKKSLYLQMNSLRAEDTAVYYCASGVYSFDYRGQGTLVTVSSGTGGGGSGGGGSGGGGSEFDIQMTQSPSSLSASVGDRVTITCKSSQSLLDSDGKTYLNWYQQKPGKAPKLLIYLVSKLDSGVPSRFSGSGSGTDFTLTISSLQPEDFATYYCFQGTHFPFTFGQGTKVEIKRLEIQNPDPAVYQLRDSKSSDKSVCLFTDFDSQTNVSQSKDSDVYITDKCVLDMRSMDFKSNSAVAWSNKSDFACANAFNNSIIPEDTFFPSPESSCDVKLVEKSFETDTNLNFQILYEILLGKATLYAVLVSALVLMAMVKRKDSRGRAKRSGSGVKQTLNFDLLKLAGDVESNPGPTSMDWIWRILFLVGAATGAHSGPQLQLQESGPGLVKPSETLSLTCTVSGDSISSGDYYWGWIRQPPGKGLEWIGHIYYSGVTYYNPSLKSRVTISVDTSRNQFSLKLSSVTAADTAVYYCTREDSSNWRSRGQGTLVTVSSGSGGGGSGGGGSGGGGSFEEVQLVESGGGLVQPGGSLRLSCAASGYTFTSYWMNWVRQAPGKGLEWVGMIDPSDSETHYNHIFKDRFTISADTSKNTAYLQMNSLRAEDTAVYYCARNLYLFGQGTLVTVSSTREDLKNVFPPEVAVFEPSEAEISHTQKATLVCLATGFYPDHVELSWWVNGKEVHSGVCTDPQPLKEQPALNDSRYCLSSRLRVSATFWQNPRNHFRCQVQFYGLSENDEWTQDRAKPVTQIVSAEAWGRADCGFTSESYQQGVLSATNLSVIGFRILLLKVAGFNLLMTLRLWSS

SEQ ID NO: 46328 - protein, 723 aa, synthetic construct
MALPVTALLLPLALLLHAARPDIQMTQSPSSLSASVGDRVTITCKSSQSLLDSDGKTYLNWYQQKPGKAPKLLIYLVSKLDSGVPSRFSGSGSGTDFTLTISSLQPEDFATYYCFQGTHFPFTFGQGTKVEIKRLEDLKNVFPPEVAVFEPSEAEISHTQKATLVCLATGFYPDHVELSWWVNGKEVHSGVCTDPQPLKEQPALNDSRYCLSSRLRVSATFWQNPRNHFRCQVQFYGLSENDEWTQDRAKPVTQIVSAEAWGRADDVIKIHWQEKKSNTILGSQEGNTMKTNDTYMKFSWLTVPEKSLDKEHRCIVRHENNKNGVDQEIIFPPIKTDVITMDPKDNCSKDANDTLLLQLTNTSAYYMYLLLLLKSVVYFAIITCCLLMAMVKRKDSRGRAKRSGSGATNFSLLKQAGDVEENPGPTSMDWIWRILFLVGAATGAHSFEEVQLVESGGGLVQPGGSLRLSCAASGYTFTSYWMNWVRQAPGKGLEWVGMIDPSDSETHYNHIFKDRFTISADTSKNTAYLQMNSLRAEDTAVYYCARNLYLFGQGTLVTVSSTRIQNPDPAVYQLRDSKSSDKSVCLFTDFDSQTNVSQSKDSDVYITDKCVLDMRSMDFKSNSAVAWSNKSDFACANAFNNSIIPEDTFFPSPESSDSTDHVKPKETENTKQPSKSCHKPKAIVHTEKVNMMSLTVLGLRMLFAKTVAVNFLLTAKLFFLLTA

SEQ ID NO: 46329 - protein, 727 aa, synthetic construct
MALPVTALLLPLALLLHAARPDIQMTQSPSSLSASVGDRVTITCKSSQSLLDSDGKTYLNWYQQKPGKAPKLLIYLVSKLDSGVPSRFSGSGSGTDFTLTISSLQPEDFATYYCFQGTHFPFTFGQGTKVEIKRLEIQNPDPAVYQLRDSKSSDKSVCLFTDFDSQTNVSQSKDSDVYITDKCVLDMRSMDFKSNSAVAWSNKSDFACANAFNNSIIPEDTFFPSPESSDSTDHVKPKETENTKQPSKSCHKPKAIVHTEKVNMMSLTVLGLRMLFAKTVAVNFLLTAKLFFLLTARAKRSGSGVKQTLNFDLLKLAGDVESNPGPTSMDWIWRILFLVGAATGAHSFEEVQLVESGGGLVQPGGSLRLSCAASGYTFTSYWMNWVRQAPGKGLEWVGMIDPSDSETHYNHIFKDRFTISADTSKNTAYLQMNSLRAEDTAVYYCARNLYLFGQGTLVTVSSTREDLKNVFPPEVAVFEPSEAEISHTQKATLVCLATGFYPDHVELSWWVNGKEVHSGVCTDPQPLKEQPALNDSRYCLSSRLRVSATFWQNPRNHFRCQVQFYGLSENDEWTQDRAKPVTQIVSAEAWGRADDVIKIHWQEKKSNTILGSQEGNTMKTNDTYMKFSWLTVPEKSLDKEHRCIVRHENNKNGVDQEIIFPPIKTDVITMDPKDNCSKDANDTLLLQLTNTSAYYMYLLLLLKSVVYFAIITCCLLMAMVKRKDSRG

SEQ ID NO: 46330 - protein, 858 aa, synthetic construct
MALPVTALLLPLALLLHAARPEVQLVESGGGLVQPGGSLRLSCAASGFSFSDFWMSWVRQAPGKGLEWVATISQAGSEKDYVDSVKGRFTISRDNAKKSLYLQMNSLRAEDTAVYYCASGVYSFDYRGQGTLVTVSSGTGGGGSGGGGSGGGGSEFDIQMTQSPSSLSASVGDRVTITCKSSQSLLDSDGKTYLNWYQQKPGKAPKLLIYLVSKLDSGVPSRFSGSGSGTDFTLTISSLQPEDFATYYCFQGTHFPFTFGQGTKVEIKRLEDLKNVFPPEVAVFEPSEAEISHTQKATLVCLATGFYPDHVELSWWVNGKEVHSGVCTDPQPLKEQPALNDSRYCLSSRLRVSATFWQNPRNHFRCQVQFYGLSENDEWTQDRAKPVTQIVSAEAWGRADDVIKIHWQEKKSNTILGSQEGNTMKTNDTYMKFSWLTVPEKSLDKEHRCIVRHENNKNGVDQEIIFPPIKTDVITMDPKDNCSKDANDTLLLQLTNTSAYYMYLLLLLKSVVYFAIITCCLLMAMVKRKDSRGRAKRSGSGATNFSLLKQAGDVEENPGPTSMDWIWRILFLVGAATGAHSFEEVQLVESGGGLVQPGGSLRLSCAASGYTFTSYWMNWVRQAPGKGLEWVGMIDPSDSETHYNHIFKDRFTISADTSKNTAYLQMNSLRAEDTAVYYCARNLYLFGQGTLVTVSSTRIQNPDPAVYQLRDSKSSDKSVCLFTDFDSQTNVSQSKDSDVYITDKCVLDMRSMDFKSNSAVAWSNKSDFACANAFNNSIIPEDTFFPSPESSDSTDHVKPKETENTKQPSKSCHKPKAIVHTEKVNMMSLTVLGLRMLFAKTVAVNFLLTAKLFFLLTA

SEQ ID NO: 46331 - protein, 862 aa, synthetic construct
MALPVTALLLPLALLLHAARPEVQLVESGGGLVQPGGSLRLSCAASGFSFSDFWMSWVRQAPGKGLEWVATISQAGSEKDYVDSVKGRFTISRDNAKKSLYLQMNSLRAEDTAVYYCASGVYSFDYRGQGTLVTVSSGTGGGGSGGGGSGGGGSEFDIQMTQSPSSLSASVGDRVTITCKSSQSLLDSDGKTYLNWYQQKPGKAPKLLIYLVSKLDSGVPSRFSGSGSGTDFTLTISSLQPEDFATYYCFQGTHFPFTFGQGTKVEIKRLEIQNPDPAVYQLRDSKSSDKSVCLFTDFDSQTNVSQSKDSDVYITDKCVLDMRSMDFKSNSAVAWSNKSDFACANAFNNSIIPEDTFFPSPESSDSTDHVKPKETENTKQPSKSCHKPKAIVHTEKVNMMSLTVLGLRMLFAKTVAVNFLLTAKLFFLLTARAKRSGSGVKQTLNFDLLKLAGDVESNPGPTSMDWIWRILFLVGAATGAHSFEEVQLVESGGGLVQPGGSLRLSCAASGYTFTSYWMNWVRQAPGKGLEWVGMIDPSDSETHYNHIFKDRFTISADTSKNTAYLQMNSLRAEDTAVYYCARNLYLFGQGTLVTVSSTREDLKNVFPPEVAVFEPSEAEISHTQKATLVCLATGFYPDHVELSWWVNGKEVHSGVCTDPQPLKEQPALNDSRYCLSSRLRVSATFWQNPRNHFRCQVQFYGLSENDEWTQDRAKPVTQIVSAEAWGRADDVIKIHWQEKKSNTILGSQEGNTMKTNDTYMKFSWLTVPEKSLDKEHRCIVRHENNKNGVDQEIIFPPIKTDVITMDPKDNCSKDANDTLLLQLTNTSAYYMYLLLLLKSVVYFAIITCCLLMAMVKRKDSRG

SEQ ID NO: 46332 - protein, 995 aa, synthetic construct
MALPVTALLLPLALLLHAARPEVQLVESGGGLVQPGGSLRLSCAASGFSFSDFWMSWVRQAPGKGLEWVATISQAGSEKDYVDSVKGRFTISRDNAKKSLYLQMNSLRAEDTAVYYCASGVYSFDYRGQGTLVTVSSGTGGGGSGGGGSGGGGSEFDIQMTQSPSSLSASVGDRVTITCKSSQSLLDSDGKTYLNWYQQKPGKAPKLLIYLVSKLDSGVPSRFSGSGSGTDFTLTISSLQPEDFATYYCFQGTHFPFTFGQGTKVEIKRLEDLKNVFPPEVAVFEPSEAEISHTQKATLVCLATGFYPDHVELSWWVNGKEVHSGVCTDPQPLKEQPALNDSRYCLSSRLRVSATFWQNPRNHFRCQVQFYGLSENDEWTQDRAKPVTQIVSAEAWGRADDVIKIHWQEKKSNTILGSQEGNTMKTNDTYMKFSWLTVPEKSLDKEHRCIVRHENNKNGVDQEIIFPPIKTDVITMDPKDNCSKDANDTLLLQLTNTSAYYMYLLLLLKSVVYFAIITCCLLMAMVKRKDSRGRAKRSGSGATNFSLLKQAGDVEENPGPTSMDWIWRILFLVGAATGAHSGPQLQLQESGPGLVKPSETLSLTCTVSGDSISSGDYYWGWIRQPPGKGLEWIGHIYYSGVTYYNPSLKSRVTISVDTSRNQFSLKLSSVTAADTAVYYCTREDSSNWRSRGQGTLVTVSSGSGGGGSGGGGSGGGGSFEEVQLVESGGGLVQPGGSLRLSCAASGYTFTSYWMNWVRQAPGKGLEWVGMIDPSDSETHYNHIFKDRFTISADTSKNTAYLQMNSLRAEDTAVYYCARNLYLFGQGTLVTVSSTRIQNPDPAVYQLRDSKSSDKSVCLFTDFDSQTNVSQSKDSDVYITDKCVLDMRSMDFKSNSAVAWSNKSDFACANAFNNSIIPEDTFFPSPESSDSTDHVKPKETENTKQPSKSCHKPKAIVHTEKVNMMSLTVLGLRMLFAKTVAVNFLLTAKLFFLLTA

SEQ ID NO: 46333 - protein, 999 aa, synthetic construct
MALPVTALLLPLALLLHAARPEVQLVESGGGLVQPGGSLRLSCAASGFSFSDFWMSWVRQAPGKGLEWVATISQAGSEKDYVDSVKGRFTISRDNAKKSLYLQMNSLRAEDTAVYYCASGVYSFDYRGQGTLVTVSSGTGGGGSGGGGSGGGGSEFDIQMTQSPSSLSASVGDRVTITCKSSQSLLDSDGKTYLNWYQQKPGKAPKLLIYLVSKLDSGVPSRFSGSGSGTDFTLTISSLQPEDFATYYCFQGTHFPFTFGQGTKVEIKRLEIQNPDPAVYQLRDSKSSDKSVCLFTDFDSQTNVSQSKDSDVYITDKCVLDMRSMDFKSNSAVAWSNKSDFACANAFNNSIIPEDTFFPSPESSDSTDHVKPKETENTKQPSKSCHKPKAIVHTEKVNMMSLTVLGLRMLFAKTVAVNFLLTAKLFFLLTARAKRSGSGVKQTLNFDLLKLAGDVESNPGPTSMDWIWRILFLVGAATGAHSGPQLQLQESGPGLVKPSETLSLTCTVSGDSISSGDYYWGWIRQPPGKGLEWIGHIYYSGVTYYNPSLKSRVTISVDTSRNQFSLKLSSVTAADTAVYYCTREDSSNWRSRGQGTLVTVSSGSGGGGSGGGGSGGGGSFEEVQLVESGGGLVQPGGSLRLSCAASGYTFTSYWMNWVRQAPGKGLEWVGMIDPSDSETHYNHIFKDRFTISADTSKNTAYLQMNSLRAEDTAVYYCARNLYLFGQGTLVTVSSTREDLKNVFPPEVAVFEPSEAEISHTQKATLVCLATGFYPDHVELSWWVNGKEVHSGVCTDPQPLKEQPALNDSRYCLSSRLRVSATFWQNPRNHFRCQVQFYGLSENDEWTQDRAKPVTQIVSAEAWGRADDVIKIHWQEKKSNTILGSQEGNTMKTNDTYMKFSWLTVPEKSLDKEHRCIVRHENNKNGVDQEIIFPPIKTDVITMDPKDNCSKDANDTLLLQLTNTSAYYMYLLLLLKSVVYFAIITCCLLMAMVKRKDSRG

SEQ ID NO: 46334 - protein, 721 aa, synthetic construct
MALPVTALLLPLALLLHAARPDIQMTQSPSSLSASVGDRVTITCKSSQSLLDSDGKTYLNWYQQKPGKAPKLLIYLVSKLDSGVPSRFSGSGSGTDFTLTISSLQPEDFATYYCFQGTHFPFTFGQGTKVEIKRLEDLKNVFPPEVAVFEPSEAEISHTQKATLVCLATGFYPDHVELSWWVNGKEVHSGVCTDPQPLKEQPALNDSRYCLSSRLRVSATFWQNPRNHFRCQVQFYGLSENDEWTQDRAKPVTQIVSAEAWGRADDVIKIHWQEKKSNTILGSQEGNTMKTNDTYMKFSWLTVPEKSLDKEHRCIVRHENNKNGVDQEIIFPPIKTDVITMDPKDNCSKDANDTLLLQLTNTSAYYMYLLLLLKSVVYFAIITCCLLRRTAFCCNGEKSRAKRSGSGATNFSLLKQAGDVEENPGPTSMDWIWRILFLVGAATGAHSFEEVQLVESGGGLVQPGGSLRLSCAASGYTFTSYWMNWVRQAPGKGLEWVGMIDPSDSETHYNHIFKDRFTISADTSKNTAYLQMNSLRAEDTAVYYCARNLYLFGQGTLVTVSSTRIQNPDPAVYQLRDSKSSDKSVCLFTDFDSQTNVSQSKDSDVYITDKCVLDMRSMDFKSNSAVAWSNKSDFACANAFNNSIIPEDTFFPSPESSDSTDHVKPKETENTKQPSKSCHKPKAIVHTEKVNMMSLTVLGLRMLFAKTVAVNFLLTAKLFFL

SEQ ID NO: 46335 - protein, 725 aa, synthetic construct
MALPVTALLLPLALLLHAARPDIQMTQSPSSLSASVGDRVTITCKSSQSLLDSDGKTYLNWYQQKPGKAPKLLIYLVSKLDSGVPSRFSGSGSGTDFTLTISSLQPEDFATYYCFQGTHFPFTFGQGTKVEIKRLEIQNPDPAVYQLRDSKSSDKSVCLFTDFDSQTNVSQSKDSDVYITDKCVLDMRSMDFKSNSAVAWSNKSDFACANAFNNSIIPEDTFFPSPESSDSTDHVKPKETENTKQPSKSCHKPKAIVHTEKVNMMSLTVLGLRMLFAKTVAVNFLLTAKLFFLRAKRSGSGVKQTLNFDLLKLAGDVESNPGPTSMDWIWRILFLVGAATGAHSFEEVQLVESGGGLVQPGGSLRLSCAASGYTFTSYWMNWVRQAPGKGLEWVGMIDPSDSETHYNHIFKDRFTISADTSKNTAYLQMNSLRAEDTAVYYCARNLYLFGQGTLVTVSSTREDLKNVFPPEVAVFEPSEAEISHTQKATLVCLATGFYPDHVELSWWVNGKEVHSGVCTDPQPLKEQPALNDSRYCLSSRLRVSATFWQNPRNHFRCQVQFYGLSENDEWTQDRAKPVTQIVSAEAWGRADDVIKIHWQEKKSNTILGSQEGNTMKTNDTYMKFSWLTVPEKSLDKEHRCIVRHENNKNGVDQEIIFPPIKTDVITMDPKDNCSKDANDTLLLQLTNTSAYYMYLLLLLKSVVYFAIITCCLLRRTAFCCNGEKS

SEQ ID NO: 46336 - protein, 856 aa, synthetic construct
MALPVTALLLPLALLLHAARPEVQLVESGGGLVQPGGSLRLSCAASGFSFSDFWMSWVRQAPGKGLEWVATISQAGSEKDYVDSVKGRFTISRDNAKKSLYLQMNSLRAEDTAVYYCASGVYSFDYRGQGTLVTVSSGTGGGGSGGGGSGGGGSEFDIQMTQSPSSLSASVGDRVTITCKSSQSLLDSDGKTYLNWYQQKPGKAPKLLIYLVSKLDSGVPSRFSGSGSGTDFTLTISSLQPEDFATYYCFQGTHFPFTFGQGTKVEIKRLEDLKNVFPPEVAVFEPSEAEISHTQKATLVCLATGFYPDHVELSWWVNGKEVHSGVCTDPQPLKEQPALNDSRYCLSSRLRVSATFWQNPRNHFRCQVQFYGLSENDEWTQDRAKPVTQIVSAEAWGRADDVIKIHWQEKKSNTILGSQEGNTMKTNDTYMKFSWLTVPEKSLDKEHRCIVRHENNKNGVDQEIIFPPIKTDVITMDPKDNCSKDANDTLLLQLTNTSAYYMYLLLLLKSVVYFAIITCCLLRRTAFCCNGEKSRAKRSGSGATNFSLLKQAGDVEENPGPTSMDWIWRILFLVGAATGAHSFEEVQLVESGGGLVQPGGSLRLSCAASGYTFTSYWMNWVRQAPGKGLEWVGMIDPSDSETHYNHIFKDRFTISADTSKNTAYLQMNSLRAEDTAVYYCARNLYLFGQGTLVTVSSTRIQNPDPAVYQLRDSKSSDKSVCLFTDFDSQTNVSQSKDSDVYITDKCVLDMRSMDFKSNSAVAWSNKSDFACANAFNNSIIPEDTFFPSPESSDSTDHVKPKETENTKQPSKSCHKPKAIVHTEKVNMMSLTVLGLRMLFAKTVAVNFLLTAKLFFL

SEQ ID NO: 46337 - protein, 993 aa, synthetic construct
MALPVTALLLPLALLLHAARPEVQLVESGGGLVQPGGSLRLSCAASGFSFSDFWMSWVRQAPGKGLEWVATISQAGSEKDYVDSVKGRFTISRDNAKKSLYLQMNSLRAEDTAVYYCASGVYSFDYRGQGTLVTVSSGTGGGGSGGGGSGGGGSEFDIQMTQSPSSLSASVGDRVTITCKSSQSLLDSDGKTYLNWYQQKPGKAPKLLIYLVSKLDSGVPSRFSGSGSGTDFTLTISSLQPEDFATYYCFQGTHFPFTFGQGTKVEIKRLEDLKNVFPPEVAVFEPSEAEISHTQKATLVCLATGFYPDHVELSWWVNGKEVHSGVCTDPQPLKEQPALNDSRYCLSSRLRVSATFWQNPRNHFRCQVQFYGLSENDEWTQDRAKPVTQIVSAEAWGRADDVIKIHWQEKKSNTILGSQEGNTMKTNDTYMKFSWLTVPEKSLDKEHRCIVRHENNKNGVDQEIIFPPIKTDVITMDPKDNCSKDANDTLLLQLTNTSAYYMYLLLLLKSVVYFAIITCCLLRRTAFCCNGEKSRAKRSGSGATNFSLLKQAGDVEENPGPTSMDWIWRILFLVGAATGAHSGPQLQLQESGPGLVKPSETLSLTCTVSGDSISSGDYYWGWIRQPPGKGLEWIGHIYYSGVTYYNPSLKSRVTISVDTSRNQFSLKLSSVTAADTAVYYCTREDSSNWRSRGQGTLVTVSSGSGGGGSGGGGSGGGGSFEEVQLVESGGGLVQPGGSLRLSCAASGYTFTSYWMNWVRQAPGKGLEWVGMIDPSDSETHYNHIFKDRFTISADTSKNTAYLQMNSLRAEDTAVYYCARNLYLFGQGTLVTVSSTRIQNPDPAVYQLRDSKSSDKSVCLFTDFDSQTNVSQSKDSDVYITDKCVLDMRSMDFKSNSAVAWSNKSDFACANAFNNSIIPEDTFFPSPESSDSTDHVKPKETENTKQPSKSCHKPKAIVHTEKVNMMSLTVLGLRMLFAKTVAVNFLLTAKLFFL

SEQ ID NO: 46338 - protein, 619 aa, synthetic construct
MALPVTALLLPLALLLHAARPDIQMTQSPSSLSASVGDRVTITCKSSQSLLDSDGKTYLNWYQQKPGKAPKLLIYLVSKLDSGVPSRFSGSGSGTDFTLTISSLQPEDFATYYCFQGTHFPFTFGQGTKVEIKRLEDLKNVFPPEVAVFEPSEAEISHTQKATLVCLATGFYPDHVELSWWVNGKEVHSGVSTDPQPLKEQPALNDSRYCLSSRLRVSATFWQNPRNHFRCQVQFYGLSENDEWTQDRAKPVTQIVSAEAWGRADCDVKLVEKSFETDTNLNFQNLSVIGFRILLLKVAGFNLLMTLRLWSSRAKRSGSGATNFSLLKQAGDVEENPGPTSMDWIWRILFLVGAATGAHSFEEVQLVESGGGLVQPGGSLRLSCAASGYTFTSYWMNWVRQAPGKGLEWVGMIDPSDSETHYNHIFKDRFTISADTSKNTAYLQMNSLRAEDTAVYYCARNLYLFGQGTLVTVSSTRIQNPDPAVYQLRDSKSSDKSVCLFTDFDSQTNVSQSKDSDVYITDKTVLDMRSMDFKSNSAVAWSNKSDFACANAFNNSIIPEDTFFPSPESSCGFTSESYQQGVLSATILYEILLGKATLYAVLVSALVLMAMVKRKDSRG

SEQ ID NO: 46339 - protein, 619 aa, synthetic construct
MALPVTALLLPLALLLHAARPDIQMTQSPSSLSASVGDRVTITCKSSQSLLDSDGKTYLNWYQQKPGKAPKLLIYLVSKLDSGVPSRFSGSGSGTDFTLTISSLQPEDFATYYCFQGTHFPFTFGQGTKVEIKRLEDLKNVFPPEVAVFEPSEAEISHTQKATLVCLATGFYPDHVELSWWVNGKEVHSGVSTDPQPLKEQPALNDSRYCLSSRLRVSATFWQNPRNHFRCQVQFYGLSENDEWTQDRAKPVTQIVSAEAWGRADCGFTSESYQQGVLSATNLSVIGFRILLLKVAGFNLLMTLRLWSSRAKRSGSGATNFSLLKQAGDVEENPGPTSMDWIWRILFLVGAATGAHSFEEVQLVESGGGLVQPGGSLRLSCAASGYTFTSYWMNWVRQAPGKGLEWVGMIDPSDSETHYNHIFKDRFTISADTSKNTAYLQMNSLRAEDTAVYYCARNLYLFGQGTLVTVSSTRIQNPDPAVYQLRDSKSSDKSVCLFTDFDSQTNVSQSKDSDVYITDKTVLDMRSMDFKSNSAVAWSNKSDFACANAFNNSIIPEDTFFPSPESSCDVKLVEKSFETDTNLNFQILYEILLGKATLYAVLVSALVLMAMVKRKDSRG

SEQ ID NO: 46340 - protein, 723 aa, synthetic construct
MALPVTALLLPLALLLHAARPDIQMTQSPSSLSASVGDRVTITCKSSQSLLDSDGKTYLNWYQQKPGKAPKLLIYLVSKLDSGVPSRFSGSGSGTDFTLTISSLQPEDFATYYCFQGTHFPFTFGQGTKVEIKRLEDLKNVFPPEVAVFEPSEAEISHTQKATLVCLATGFYPDHVELSWWVNGKEVHSGVSTDPQPLKEQPALNDSRYCLSSRLRVSATFWQNPRNHFRCQVQFYGLSENDEWTQDRAKPVTQIVSAEAWGRADDVIKIHWQEKKSNTILGSQEGNTMKTNDTYMKFSWLTVPEKSLDKEHRCIVRHENNKNGVDQEIIFPPIKTDVITMDPKDNCSKDANDTLLLQLTNTSAYYMYLLLLLKSVVYFAIITCCLLMAMVKRKDSRGRAKRSGSGATNFSLLKQAGDVEENPGPTSMDWIWRILFLVGAATGAHSFEEVQLVESGGGLVQPGGSLRLSCAASGYTFTSYWMNWVRQAPGKGLEWVGMIDPSDSETHYNHIFKDRFTISADTSKNTAYLQMNSLRAEDTAVYYCARNLYLFGQGTLVTVSSTRIQNPDPAVYQLRDSKSSDKSVCLFTDFDSQTNVSQSKDSDVYITDKTVLDMRSMDFKSNSAVAWSNKSDFACANAFNNSIIPEDTFFPSPESSDSTDHVKPKETENTKQPSKSCHKPKAIVHTEKVNMMSLTVLGLRMLFAKTVAVNFLLTAKLFFLLTA

SEQ ID NO: 46341 - protein, 721 aa, synthetic construct
MALPVTALLLPLALLLHAARPDIQMTQSPSSLSASVGDRVTITCKSSQSLLDSDGKTYLNWYQQKPGKAPKLLIYLVSKLDSGVPSRFSGSGSGTDFTLTISSLQPEDFATYYCFQGTHFPFTFGQGTKVEIKRLEDLKNVFPPEVAVFEPSEAEISHTQKATLVCLATGFYPDHVELSWWVNGKEVHSGVSTDPQPLKEQPALNDSRYCLSSRLRVSATFWQNPRNHFRCQVQFYGLSENDEWTQDRAKPVTQIVSAEAWGRADDVIKIHWQEKKSNTILGSQEGNTMKTNDTYMKFSWLTVPEKSLDKEHRCIVRHENNKNGVDQEIIFPPIKTDVITMDPKDNCSKDANDTLLLQLTNTSAYYMYLLLLLKSVVYFAIITCCLLRRTAFCCNGEKSRAKRSGSGATNFSLLKQAGDVEENPGPTSMDWIWRILFLVGAATGAHSFEEVQLVESGGGLVQPGGSLRLSCAASGYTFTSYWMNWVRQAPGKGLEWVGMIDPSDSETHYNHIFKDRFTISADTSKNTAYLQMNSLRAEDTAVYYCARNLYLFGQGTLVTVSSTRIQNPDPAVYQLRDSKSSDKSVCLFTDFDSQTNVSQSKDSDVYITDKTVLDMRSMDFKSNSAVAWSNKSDFACANAFNNSIIPEDTFFPSPESSDSTDHVKPKETENTKQPSKSCHKPKAIVHTEKVNMMSLTVLGLRMLFAKTVAVNFLLTAKLFFL

SEQ ID NO: 46342 - protein, 864 aa, synthetic construct
MALPVTALLLPLALLLHAARPLEEDLKNVFPPEVAVFEPSEAEISHTQKATLVCLATGFYPDHVELSWWVNGKEVHSGVCTDPQPLKEQPALNDSRYCLSSRLRVSATFWQNPRNHFRCQVQFYGLSENDEWTQDRAKPVTQIVSAEAWGRADCGFTSESYQQGVLSATNLSVIGFRILLLKVAGFNLLMTLRLWSSRAKRSGSGATNFSLLKQAGDVEENPGPTSMALPVTALLLPLALLLHAARPDIQMTQSPSSLSASVGDRVTITCKSSQSLLDSDGKTYLNWYQQKPGKAPKLLIYLVSKLDSGVPSRFSGSGSGTDFTLTISSLQPEDFATYYCFQGTHFPFTFGQGTKVEIKRGGGGSGGGGSGGGGSEVQLVESGGGLVQPGGSLRLSCAASGYTFTSYWMNWVRQAPGKGLEWVGMIDPSDSETHYNHIFKDRFTISADTSKNTAYLQMNSLRAEDTAVYYCARNLYLFGQGTLVTVSSTRIQNPDPAVYQLRDSKSSDKSVCLFTDFDSQTNVSQSKDSDVYITDKCVLDMRSMDFKSNSAVAWSNKSDFACANAFNNSIIPEDTFFPSPESSCDVKLVEKSFETDTNLNFQILYEVIGFRILLLKVAGFNLLMTLRLWSSRAKRSGSGVKQTLNFDLLKLAGDVESNPGPSRGHMTEYKPTVRLATRDDVPRAVRTLAAAFADYPATRHTVDPDRHIERVTELQELFLTRVGLDIGKVWVADDGAAVAVWTTPESVEAGAVFAEIGPRMAELSGSRLAAQQQMEGLLAPHRPKEPAWFLATVGVSPDHQGKGLGSAVVLPGVEAAERAGVPAFLETSAPRNLPFYERLGFTVTADVEVPEGPRTWCMTRKPGA

SEQ ID NO: 46343 - protein, 864 aa, synthetic construct
MALPVTALLLPLALLLHAARPLEIQNPDPAVYQLRDSKSSDKSVCLFTDFDSQTNVSQSKDSDVYITDKCVLDMRSMDFKSNSAVAWSNKSDFACANAFNNSIIPEDTFFPSPESSCDVKLVEKSFETDTNLNFQILYEVIGFRILLLKVAGFNLLMTLRLWSSRAKRSGSGATNFSLLKQAGDVEENPGPTSMALPVTALLLPLALLLHAARPDIQMTQSPSSLSASVGDRVTITCKSSQSLLDSDGKTYLNWYQQKPGKAPKLLIYLVSKLDSGVPSRFSGSGSGTDFTLTISSLQPEDFATYYCFQGTHFPFTFGQGTKVEIKRGGGGSGGGGSGGGGSEVQLVESGGGLVQPGGSLRLSCAASGYTFTSYWMNWVRQAPGKGLEWVGMIDPSDSETHYNHIFKDRFTISADTSKNTAYLQMNSLRAEDTAVYYCARNLYLFGQGTLVTVSSTREDLKNVFPPEVAVFEPSEAEISHTQKATLVCLATGFYPDHVELSWWVNGKEVHSGVCTDPQPLKEQPALNDSRYCLSSRLRVSATFWQNPRNHFRCQVQFYGLSENDEWTQDRAKPVTQIVSAEAWGRADCGFTSESYQQGVLSATNLSVIGFRILLLKVAGFNLLMTLRLWSSRAKRSGSGVKQTLNFDLLKLAGDVESNPGPSRGHMTEYKPTVRLATRDDVPRAVRTLAAAFADYPATRHTVDPDRHIERVTELQELFLTRVGLDIGKVWVADDGAAVAVWTTPESVEAGAVFAEIGPRMAELSGSRLAAQQQMEGLLAPHRPKEPAWFLATVGVSPDHQGKGLGSAVVLPGVEAAERAGVPAFLETSAPRNLPFYERLGFTVTADVEVPEGPRTWCMTRKPGA

SEQ ID NO: 46344 - protein, 864 aa, synthetic construct; identical to SEQ ID NO: 46342

SEQ ID NO: 46345 - protein, 972 aa, synthetic construct
MALPVTALLLPLALLLHAARPLEEDLKNVFPPEVAVFEPSEAEISHTQKATLVCLATGFYPDHVELSWWVNGKEVHSGVSTDPQPLKEQPALNDSRYCLSSRLRVSATFWQNPRNHFRCQVQFYGLSENDEWTQDRAKPVTQIVSAEAWGRADDVIKIHWQEKKSNTILGSQEGNTMKTNDTYMKFSWLTVPEKSLDKEHRCIVRHENNKNGVDQEIIFPPIKTDVITMDPKDNCSKDANDTLLLQLTNTSAYYMYLLLLLKSVVYFAIITCCLLMAMVKRKDSRGRAKRSGSGATNFSLLKQAGDVEENPGPTSMALPVTALLLPLALLLHAARPDIQMTQSPSSLSASVGDRVTITCKSSQSLLDSDGKTYLNWYQQKPGKAPKLLIYLVSKLDSGVPSRFSGSGSGTDFTLTISSLQPEDFATYYCFQGTHFPFTFGQGTKVEIKRGGGGSGGGGSGGGGSEVQLVESGGGLVQPGGSLRLSCAASGYTFTSYWMNWVRQAPGKGLEWVGMIDPSDSETHYNHIFKDRFTISADTSKNTAYLQMNSLRAEDTAVYYCARNLYLFGQGTLVTVSSTRIQNPDPAVYQLRDSKSSDKSVCLFTDFDSQTNVSQSKDSDVYITDKTVLDMRSMDFKSNSAVAWSNKSDFACANAFNNSIIPEDTFFPSPESSDSTDHVKPKETENTKQPSKSCHKPKAIVHTEKVNMMSLTVLGLRMLFAKTVAVNFLLTAKLFFLLTARAKRSGSGVKQTLNFDLLKLAGDVESNPGPSRGHMTEYKPTVRLATRDDVPRAVRTLAAAFADYPATRHTVDPDRHIERVTELQELFLTRVGLDIGKVWVADDGAAVAVWTTPESVEAGAVFAEIGPRMAELSGSRLAAQQQMEGLLAPHRPKEPAWFLATVGVSPDHQGKGLGSAVVLPGVEAAERAGVPAFLETSAPRNLPFYERLGFTVTADVEVPEGPRTWCMTRKPGA

SEQ ID NO: 46346 - protein, 972 aa, synthetic construct
MALPVTALLLPLALLLHAARPLEIQNPDPAVYQLRDSKSSDKSVCLFTDFDSQTNVSQSKDSDVYITDKTVLDMRSMDFKSNSAVAWSNKSDFACANAFNNSIIPEDTFFPSPESSDSTDHVKPKETENTKQPSKSCHKPKAIVHTEKVNMMSLTVLGLRMLFAKTVAVNFLLTAKLFFLLTARAKRSGSGATNFSLLKQAGDVEENPGPTSMALPVTALLLPLALLLHAARPDIQMTQSPSSLSASVGDRVTITCKSSQSLLDSDGKTYLNWYQQKPGKAPKLLIYLVSKLDSGVPSRFSGSGSGTDFTLTISSLQPEDFATYYCFQGTHFPFTFGQGTKVEIKRGGGGSGGGGSGGGGSEVQLVESGGGLVQPGGSLRLSCAASGYTFTSYWMNWVRQAPGKGLEWVGMIDPSDSETHYNHIFKDRFTISADTSKNTAYLQMNSLRAEDTAVYYCARNLYLFGQGTLVTVSSTREDLKNVFPPEVAVFEPSEAEISHTQKATLVCLATGFYPDHVELSWWVNGKEVHSGVSTDPQPLKEQPALNDSRYCLSSRLRVSATFWQNPRNHFRCQVQFYGLSENDEWTQDRAKPVTQIVSAEAWGRADDVIKIHWQEKKSNTILGSQEGNTMKTNDTYMKFSWLTVPEKSLDKEHRCIVRHENNKNGVDQEIIFPPIKTDVITMDPKDNCSKDANDTLLLQLTNTSAYYMYLLLLLKSVVYFAIITCCLLMAMVKRKDSRGRAKRSGSGVKQTLNFDLLKLAGDVESNPGPSRGHMTEYKPTVRLATRDDVPRAVRTLAAAFADYPATRHTVDPDRHIERVTELQELFLTRVGLDIGKVWVADDGAAVAVWTTPESVEAGAVFAEIGPRMAELSGSRLAAQQQMEGLLAPHRPKEPAWFLATVGVSPDHQGKGLGSAVVLPGVEAAERAGVPAFLETSAPRNLPFYERLGFTVTADVEVPEGPRTWCMTRKPGA

SEQ ID NO: 46347 - protein, 970 aa, synthetic construct
MALPVTALLLPLALLLHAARPLEEDLKNVFPPEVAVFEPSEAEISHTQKATLVCLATGFYPDHVELSWWVNGKEVHSGVCTDPQPLKEQPALNDSRYCLSSRLRVSATFWQNPRNHFRCQVQFYGLSENDEWTQDRAKPVTQIVSAEAWGRADDVIKIHWQEKKSNTILGSQEGNTMKTNDTYMKFSWLTVPEKSLDKEHRCIVRHENNKNGVDQEIIFPPIKTDVITMDPKDNCSKDANDTLLLQLTNTSAYYMYLLLLLKSVVYFAIITCCLLRRTAFCCNGEKSRAKRSGSGATNFSLLKQAGDVEENPGPTSMALPVTALLLPLALLLHAARPDIQMTQSPSSLSASVGDRVTITCKSSQSLLDSDGKTYLNWYQQKPGKAPKLLIYLVSKLDSGVPSRFSGSGSGTDFTLTISSLQPEDFATYYCFQGTHFPFTFGQGTKVEIKRGGGGSGGGGSGGGGSEVQLVESGGGLVQPGGSLRLSCAASGYTFTSYWMNWVRQAPGKGLEWVGMIDPSDSETHYNHIFKDRFTISADTSKNTAYLQMNSLRAEDTAVYYCARNLYLFGQGTLVTVSSTRIQNPDPAVYQLRDSKSSDKSVCLFTDFDSQTNVSQSKDSDVYITDKCVLDMRSMDFKSNSAVAWSNKSDFACANAFNNSIIPEDTFFPSPESSDSTDHVKPKETENTKQPSKSCHKPKAIVHTEKVNMMSLTVLGLRMLFAKTVAVNFLLTAKLFFLRAKRSGSGVKQTLNFDLLKLAGDVESNPGPSRGHMTEYKPTVRLATRDDVPRAVRTLAAAFADYPATRHTVDPDRHIERVTELQELFLTRVGLDIGKVWVADDGAAVAVWTTPESVEAGAVFAEIGPRMAELSGSRLAAQQQMEGLLAPHRPKEPAWFLATVGVSPDHQGKGLGSAVVLPGVEAAERAGVPAFLETSAPRNLPFYERLGFTVTADVEVPEGPRTWCMTRKPGA

SEQ ID NO: 46348 - protein, 970 aa, synthetic construct
MALPVTALLLPLALLLHAARPLEIQNPDPAVYQLRDSKSSDKSVCLFTDFDSQTNVSQSKDSDVYITDKCVLDMRSMDFKSNSAVAWSNKSDFACANAFNNSIIPEDTFFPSPESSDSTDHVKPKETENTKQPSKSCHKPKAIVHTEKVNMMSLTVLGLRMLFAKTVAVNFLLTAKLFFLRAKRSGSGATNFSLLKQAGDVEENPGPTSMALPVTALLLPLALLLHAARPDIQMTQSPSSLSASVGDRVTITCKSSQSLLDSDGKTYLNWYQQKPGKAPKLLIYLVSKLDSGVPSRFSGSGSGTDFTLTISSLQPEDFATYYCFQGTHFPFTFGQGTKVEIKRGGGGSGGGGSGGGGSEVQLVESGGGLVQPGGSLRLSCAASGYTFTSYWMNWVRQAPGKGLEWVGMIDPSDSETHYNHIFKDRFTISADTSKNTAYLQMNSLRAEDTAVYYCARNLYLFGQGTLVTVSSTREDLKNVFPPEVAVFEPSEAEISHTQKATLVCLATGFYPDHVELSWWVNGKEVHSGVCTDPQPLKEQPALNDSRYCLSSRLRVSATFWQNPRNHFRCQVQFYGLSENDEWTQDRAKPVTQIVSAEAWGRADDVIKIHWQEKKSNTILGSQEGNTMKTNDTYMKFSWLTVPEKSLDKEHRCIVRHENNKNGVDQEIIFPPIKTDVITMDPKDNCSKDANDTLLLQLTNTSAYYMYLLLLLKSVVYFAIITCCLLRRTAFCCNGEKSRAKRSGSGVKQTLNFDLLKLAGDVESNPGPSRGHMTEYKPTVRLATRDDVPRAVRTLAAAFADYPATRHTVDPDRHIERVTELQELFLTRVGLDIGKVWVADDGAAVAVWTTPESVEAGAVFAEIGPRMAELSGSRLAAQQQMEGLLAPHRPKEPAWFLATVGVSPDHQGKGLGSAVVLPGVEAAERAGVPAFLETSAPRNLPFYERLGFTVTADVEVPEGPRTWCMTRKPGA

SEQ ID NO: 46349 - protein, 970 aa, synthetic construct
MALPVTALLLPLALLLHAARPLEEDLKNVFPPEVAVFEPSEAEISHTQKATLVCLATGFYPDHVELSWWVNGKEVHSGVSTDPQPLKEQPALNDSRYCLSSRLRVSATFWQNPRNHFRCQVQFYGLSENDEWTQDRAKPVTQIVSAEAWGRADDVIKIHWQEKKSNTILGSQEGNTMKTNDTYMKFSWLTVPEKSLDKEHRCIVRHENNKNGVDQEIIFPPIKTDVITMDPKDNCSKDANDTLLLQLTNTSAYYMYLLLLLKSVVYFAIITCCLLRRTAFCCNGEKSRAKRSGSGATNFSLLKQAGDVEENPGPTSMALPVTALLLPLALLLHAARPDIQMTQSPSSLSASVGDRVTITCKSSQSLLDSDGKTYLNWYQQKPGKAPKLLIYLVSKLDSGVPSRFSGSGSGTDFTLTISSLQPEDFATYYCFQGTHFPFTFGQGTKVEIKRGGGGSGGGGSGGGGSEVQLVESGGGLVQPGGSLRLSCAASGYTFTSYWMNWVRQAPGKGLEWVGMIDPSDSETHYNHIFKDRFTISADTSKNTAYLQMNSLRAEDTAVYYCARNLYLFGQGTLVTVSSTRIQNPDPAVYQLRDSKSSDKSVCLFTDFDSQTNVSQSKDSDVYITDKTVLDMRSMDFKSNSAVAWSNKSDFACANAFNNSIIPEDTFFPSPESSDSTDHVKPKETENTKQPSKSCHKPKAIVHTEKVNMMSLTVLGLRMLFAKTVAVNFLLTAKLFFLRAKRSGSGVKQTLNFDLLKLAGDVESNPGPSRGHMTEYKPTVRLATRDDVPRAVRTLAAAFADYPATRHTVDPDRHIERVTELQELFLTRVGLDIGKVWVADDGAAVAVWTTPESVEAGAVFAEIGPRMAELSGSRLAAQQQMEGLLAPHRPKEPAWFLATVGVSPDHQGKGLGSAVVLPGVEAAERAGVPAFLETSAPRNLPFYERLGFTVTADVEVPEGPRTWCMTRKPGA

SEQ ID NO: 46350 - protein, 970 aa, synthetic construct
MALPVTALLLPLALLLHAARPLEIQNPDPAVYQLRDSKSSDKSVCLFTDFDSQTNVSQSKDSDVYITDKTVLDMRSMDFKSNSAVAWSNKSDFACANAFNNSIIPEDTFFPSPESSDSTDHVKPKETENTKQPSKSCHKPKAIVHTEKVNMMSLTVLGLRMLFAKTVAVNFLLTAKLFFLRAKRSGSGATNFSLLKQAGDVEENPGPTSMALPVTALLLPLALLLHAARPDIQMTQSPSSLSASVGDRVTITCKSSQSLLDSDGKTYLNWYQQKPGKAPKLLIYLVSKLDSGVPSRFSGSGSGTDFTLTISSLQPEDFATYYCFQGTHFPFTFGQGTKVEIKRGGGGSGGGGSGGGGSEVQLVESGGGLVQPGGSLRLSCAASGYTFTSYWMNWVRQAPGKGLEWVGMIDPSDSETHYNHIFKDRFTISADTSKNTAYLQMNSLRAEDTAVYYCARNLYLFGQGTLVTVSSTREDLKNVFPPEVAVFEPSEAEISHTQKATLVCLATGFYPDHVELSWWVNGKEVHSGVSTDPQPLKEQPALNDSRYCLSSRLRVSATFWQNPRNHFRCQVQFYGLSENDEWTQDRAKPVTQIVSAEAWGRADDVIKIHWQEKKSNTILGSQEGNTMKTNDTYMKFSWLTVPEKSLDKEHRCIVRHENNKNGVDQEIIFPPIKTDVITMDPKDNCSKDANDTLLLQLTNTSAYYMYLLLLLKSVVYFAIITCCLLRRTAFCCNGEKSRAKRSGSGVKQTLNFDLLKLAGDVESNPGPSRGHMTEYKPTVRLATRDDVPRAVRTLAAAFADYPATRHTVDPDRHIERVTELQELFLTRVGLDIGKVWVADDGAAVAVWTTPESVEAGAVFAEIGPRMAELSGSRLAAQQQMEGLLAPHRPKEPAWFLATVGVSPDHQGKGLGSAVVLPGVEAAERAGVPAFLETSAPRNLPFYERLGFTVTADVEVPEGPRTWCMTRKPGA

SEQ ID NO: 46351 - protein, 868 aa, synthetic construct
MALPVTALLLPLALLLHAARPLEEDLKNVFPPEVAVFEPSKAEIAHTQKATLVCLATGFYPDHVELSWWVNGKEVHSGVCTDPQPLKEQPALNDSRYCLSSRLRVSATFWQNPRNHFRCQVQFYGLSENDEWTQDRAKPVTQIVSAEAWGRADCGITSASYHQGVLSATILYEILLGKATLYAVLVSALVLMAMVKRKDSRGRAKRSGSGATNFSLLKQAGDVEENPGPTSMALPVTALLLPLALLLHAARPDIQMTQSPSSLSASVGDRVTITCKSSQSLLDSDGKTYLNWYQQKPGKAPKLLIYLVSKLDSGVPSRFSGSGSGTDFTLTISSLQPEDFATYYCFQGTHFPFTFGQGTKVEIKRGGGGSGGGGSGGGGSEVQLVESGGGLVQPGGSLRLSCAASGYTFTSYWMNWVRQAPGKGLEWVGMIDPSDSETHYNHIFKDRFTISADTSKNTAYLQMNSLRAEDTAVYYCARNLYLFGQGTLVTVSSTRIQNPDPAVYQLRDSKSSDKSVCLFTDFDSQTNVSQSKDSDVYITDKCVLDMRSMDFKSNSAVAWSNKSDFACANAFNNSIIPEDTFFPSSDVPCDVKLVEKSFETDTNLNFQNLSVIGFRILLLKVAGFNLLMTLRLWSSRAKRSGSGVKQTLNFDLLKLAGDVESNPGPSRGHMTEYKPTVRLATRDDVPRAVRTLAAAFADYPATRHTVDPDRHIERVTELQELFLTRVGLDIGKVWVADDGAAVAVWTTPESVEAGAVFAEIGPRMAELSGSRLAAQQQMEGLLAPHRPKEPAWFLATVGVSPDHQGKGLGSAVVLPGVEAAERAGVPAFLETSAPRNLPFYERLGFTVTADVEVPEGPRTWCMTRKPGA

SEQ ID NO: 46352 - protein, 868 aa, synthetic construct
MALPVTALLLPLALLLHAARPLEIQNPDPAVYQLRDSKSSDKSVCLFTDFDSQTNVSQSKDSDVYITDKCVLDMRSMDFKSNSAVAWSNKSDFACANAFNNSIIPEDTFFPSSDVPCDVKLVEKSFETDTNLNFQNLSVIGFRILLLKVAGFNLLMTLRLWSSRAKRSGSGATNFSLLKQAGDVEENPGPTSMALPVTALLLPLALLLHAARPDIQMTQSPSSLSASVGDRVTITCKSSQSLLDSDGKTYLNWYQQKPGKAPKLLIYLVSKLDSGVPSRFSGSGSGTDFTLTISSLQPEDFATYYCFQGTHFPFTFGQGTKVEIKRGGGGSGGGGSGGGGSEVQLVESGGGLVQPGGSLRLSCAASGYTFTSYWMNWVRQAPGKGLEWVGMIDPSDSETHYNHIFKDRFTISADTSKNTAYLQMNSLRAEDTAVYYCARNLYLFGQGTLVTVSSTREDLKNVFPPEVAVFEPSKAEIAHTQKATLVCLATGFYPDHVELSWWVNGKEVHSGVCTDPQPLKEQPALNDSRYCLSSRLRVSATFWQNPRNHFRCQVQFYGLSENDEWTQDRAKPVTQIVSAEAWGRADCGITSASYHQGVLSATILYEILLGKATLYAVLVSALVLMAMVKRKDSRGRAKRSGSGVKQTLNFDLLKLAGDVESNPGPSRGHMTEYKPTVRLATRDDVPRAVRTLAAAFADYPATRHTVDPDRHIERVTELQELFLTRVGLDIGKVWVADDGAAVAVWTTPESVEAGAVFAEIGPRMAELSGSRLAAQQQMEGLLAPHRPKEPAWFLATVGVSPDHQGKGLGSAVVLPGVEAAERAGVPAFLETSAPRNLPFYERLGFTVTADVEVPEGPRTWCMTRKPGA

SEQ ID NO: 46353 - protein, 761 aa, synthetic construct
MALPVTALLLPLALLLHAARPLEQSFGLLDPKLCYLLDGILFIYGVILTALFLRVKFSRSADAPAYQQGQNQLYNELNLGRREEYDVLDKRRGRDPEMGGKPQRRKNPQEGLYNELQKDKMAEAYSEIGMKGERRRGKGHDGLYQGLSTATKDTYDALHMQALPPRRAKRSGSGATNFSLLKQAGDVEENPGPTSMALPVTALLLPLALLLHAARPDIQMTQSPSSLSASVGDRVTITCKSSQSLLDSDGKTYLNWYQQKPGKAPKLLIYLVSKLDSGVPSRFSGSGSGTDFTLTISSLQPEDFATYYCFQGTHFPFTFGQGTKVEIKRGGGGSGGGGSGGGGSEVQLVESGGGLVQPGGSLRLSCAASGYTFTSYWMNWVRQAPGKGLEWVGMIDPSDSETHYNHIFKDRFTISADTSKNTAYLQMNSLRAEDTAVYYCARNLYLFGQGTLVTVSSTRELGEPQLCYILDAILFLYGIVLTLLYCRLKIQVRKAAITSYEKSDGVYTGLSTRNQETYETLKHEKPPQRAKRSGSGVKQTLNFDLLKLAGDVESNPGPSRGHMTEYKPTVRLATRDDVPRAVRTLAAAFADYPATRHTVDPDRHIERVTELQELFLTRVGLDIGKVWVADDGAAVAVWTTPESVEAGAVFAEIGPRMAELSGSRLAAQQQMEGLLAPHRPKEPAWFLATVGVSPDHQGKGLGSAVVLPGVEAAERAGVPAFLETSAPRNLPFYERLGFTVTADVEVPEGPRTWCMTRKPGA

SEQ ID NO: 46354 - protein, 972 aa, synthetic construct; identical to SEQ ID NO: 46345

SEQ ID NO: 46355 - protein, 972 aa, synthetic construct; identical to SEQ ID NO: 46346

SEQ ID NO: 46356 - protein, 971 aa, synthetic construct
MALPVTALLLPLALLLHAARPLEEEDLKNVFPPEVAVFEPSEAEISHTQKATLVCLATGFYPDHVELSWWVNGKEVHSGVCTDPQPLKEQPALNDSRYCLSSRLRVSATFWQNPRNHFRCQVQFYGLSENDEWTQDRAKPVTQIVSAEAWGRADDVIKIHWQEKKSNTILGSQEGNTMKTNDTYMKFSWLTVPEKSLDKEHRCIVRHENNKNGVDQEIIFPPIKTDVITMDPKDNCSKDANDTLLLQLTNTSAYYMYLLLLLKSVVYFAIITCCLLRRTAFCCNGEKSRAKRSGSGATNFSLLKQAGDVEENPGPTSMALPVTALLLPLALLLHAARPDIQMTQSPSSLSASVGDRVTITCKSSQSLLDSDGKTYLNWYQQKPGKAPKLLIYLVSKLDSGVPSRFSGSGSGTDFTLTISSLQPEDFATYYCFQGTHFPFTFGQGTKVEIKRGGGGSGGGGSGGGGSEVQLVESGGGLVQPGGSLRLSCAASGYTFTSYWMNWVRQAPGKGLEWVGMIDPSDSETHYNHIFKDRFTISADTSKNTAYLQMNSLRAEDTAVYYCARNLYLFGQGTLVTVSSTRIQNPDPAVYQLRDSKSSDKSVCLFTDFDSQTNVSQSKDSDVYITDKCVLDMRSMDFKSNSAVAWSNKSDFACANAFNNSIIPEDTFFPSPESSDSTDHVKPKETENTKQPSKSCHKPKAIVHTEKVNMMSLTVLGLRMLFAKTVAVNFLLTAKLFFLRAKRSGSGVKQTLNFDLLKLAGDVESNPGPSRGHMTEYKPTVRLATRDDVPRAVRTLAAAFADYPATRHTVDPDRHIERVTELQELFLTRVGLDIGKVWVADDGAAVAVWTTPESVEAGAVFAEIGPRMAELSGSRLAAQQQMEGLLAPHRPKEPAWFLATVGVSPDHQGKGLGSAVVLPGVEAAERAGVPAFLETSAPRNLPFYERLGFTVTADVEVPEGPRTWCMTRKPGA

SEQ ID NO: 46357 - protein, 971 aa, synthetic construct
MALPVTALLLPLALLLHAARPLEIQNPDPAVYQLRDSKSSDKSVCLFTDFDSQTNVSQSKDSDVYITDKCVLDMRSMDFKSNSAVAWSNKSDFACANAFNNSIIPEDTFFPSPESSDSTDHVKPKETENTKQPSKSCHKPKAIVHTEKVNMMSLTVLGLRMLFAKTVAVNFLLTAKLFFLRAKRSGSGATNFSLLKQAGDVEENPGPTSMALPVTALLLPLALLLHAARPDIQMTQSPSSLSASVGDRVTITCKSSQSLLDSDGKTYLNWYQQKPGKAPKLLIYLVSKLDSGVPSRFSGSGSGTDFTLTISSLQPEDFATYYCFQGTHFPFTFGQGTKVEIKRGGGGSGGGGSGGGGSEVQLVESGGGLVQPGGSLRLSCAASGYTFTSYWMNWVRQAPGKGLEWVGMIDPSDSETHYNHIFKDRFTISADTSKNTAYLQMNSLRAEDTAVYYCARNLYLFGQGTLVTVSSTREEDLKNVFPPEVAVFEPSEAEISHTQKATLVCLATGFYPDHVELSWWVNGKEVHSGVCTDPQPLKEQPALNDSRYCLSSRLRVSATFWQNPRNHFRCQVQFYGLSENDEWTQDRAKPVTQIVSAEAWGRADDVIKIHWQEKKSNTILGSQEGNTMKTNDTYMKFSWLTVPEKSLDKEHRCIVRHENNKNGVDQEIIFPPIKTDVITMDPKDNCSKDANDTLLLQLTNTSAYYMYLLLLLKSVVYFAIITCCLLRRTAFCCNGEKSRAKRSGSGVKQTLNFDLLKLAGDVESNPGPSRGHMTEYKPTVRLATRDDVPRAVRTLAAAFADYPATRHTVDPDRHIERVTELQELFLTRVGLDIGKVWVADDGAAVAVWTTPESVEAGAVFAEIGPRMAELSGSRLAAQQQMEGLLAPHRPKEPAWFLATVGVSPDHQGKGLGSAVVLPGVEAAERAGVPAFLETSAPRNLPFYERLGFTVTADVEVPEGPRTWCMTRKPGA

SEQ ID NO: 46358 - protein, 868 aa, synthetic construct
MALPVTALLLPLALLLHAARPLEEDLKNVFPPEVAVFEPSEAEISHTQKATLVCLATGFYPDHVELSWWVNGKEVHSGVSTDPQPLKEQPALNDSRYCLSSRLRVSATFWQNPRNHFRCQVQFYGLSENDEWTQDRAKPVTQIVSAEAWGRADCGFTSESYQQGVLSATNLSVIGFRILLLKVAGFNLLMTLRLWSSRAKRSGSGATNFSLLKQAGDVEENPGPTSMALPVTALLLPLALLLHAARPDIQMTQSPSSLSASVGDRVTITCKSSQSLLDSDGKTYLNWYQQKPGKAPKLLIYLVSKLDSGVPSRFSGSGSGTDFTLTISSLQPEDFATYYCFQGTHFPFTFGQGTKVEIKRGGGGSGGGGSGGGGSEVQLVESGGGLVQPGGSLRLSCAASGYTFTSYWMNWVRQAPGKGLEWVGMIDPSDSETHYNHIFKDRFTISADTSKNTAYLQMNSLRAEDTAVYYCARNLYLFGQGTLVTVSSTRIQNPDPAVYQLRDSKSSDKSVCLFTDFDSQTNVSQSKDSDVYITDKTVLDMRSMDFKSNSAVAWSNKSDFACANAFNNSIIPEDTFFPSPESSCDVKLVEKSFETDTNLNFQILYEILLGKATLYAVLVSALVLMAMVKRKDSRGRAKRSGSGVKQTLNFDLLKLAGDVESNPGPSRGHMTEYKPTVRLATRDDVPRAVRTLAAAFADYPATRHTVDPDRHIERVTELQELFLTRVGLDIGKVWVADDGAAVAVWTTPESVEAGAVFAEIGPRMAELSGSRLAAQQQMEGLLAPHRPKEPAWFLATVGVSPDHQGKGLGSAVVLPGVEAAERAGVPAFLETSAPRNLPFYERLGFTVTADVEVPEGPRTWCMTRKPGA

SEQ ID NO: 46359 - protein, 868 aa, synthetic construct
MALPVTALLLPLALLLHAARPLEIQNPDPAVYQLRDSKSSDKSVCLFTDFDSQTNVSQSKDSDVYITDKTVLDMRSMDFKSNSAVAWSNKSDFACANAFNNSIIPEDTFFPSPESSCDVKLVEKSFETDTNLNFQILYEILLGKATLYAVLVSALVLMAMVKRKDSRGRAKRSGSGATNFSLLKQAGDVEENPGPTSMALPVTALLLPLALLLHAARPDIQMTQSPSSLSASVGDRVTITCKSSQSLLDSDGKTYLNWYQQKPGKAPKLLIYLVSKLDSGVPSRFSGSGSGTDFTLTISSLQPEDFATYYCFQGTHFPFTFGQGTKVEIKRGGGGSGGGGSGGGGSEVQLVESGGGLVQPGGSLRLSCAASGYTFTSYWMNWVRQAPGKGLEWVGMIDPSDSETHYNHIFKDRFTISADTSKNTAYLQMNSLRAEDTAVYYCARNLYLFGQGTLVTVSSTREDLKNVFPPEVAVFEPSEAEISHTQKATLVCLATGFYPDHVELSWWVNGKEVHSGVSTDPQPLKEQPALNDSRYCLSSRLRVSATFWQNPRNHFRCQVQFYGLSENDEWTQDRAKPVTQIVSAEAWGRADCGFTSESYQQGVLSATNLSVIGFRILLLKVAGFNLLMTLRLWSSRAKRSGSGVKQTLNFDLLKLAGDVESNPGPSRGHMTEYKPTVRLATRDDVPRAVRTLAAAFADYPATRHTVDPDRHIERVTELQELFLTRVGLDIGKVWVADDGAAVAVWTTPESVEAGAVFAEIGPRMAELSGSRLAAQQQMEGLLAPHRPKEPAWFLATVGVSPDHQGKGLGSAVVLPGVEAAERAGVPAFLETSAPRNLPFYERLGFTVTADVEVPEGPRTWCMTRKPGA

SEQ ID NO: 46360 - protein, 868 aa, synthetic construct
MALPVTALLLPLALLLHAARPLEEDLKNVFPPEVAVFEPSEAEISHTQKATLVCLATGFYPDHVELSWWVNGKEVHSGVCTDPQPLKEQPALNDSRYCLSSRLRVSATFWQNPRNHFRCQVQFYGLSENDEWTQDRAKPVTQIVSAEAWGRADCDVKLVEKSFETDTNLNFQNLSVIGFRILLLKVAGFNLLMTLRLWSSRAKRSGSGATNFSLLKQAGDVEENPGPTSMALPVTALLLPLALLLHAARPDIQMTQSPSSLSASVGDRVTITCKSSQSLLDSDGKTYLNWYQQKPGKAPKLLIYLVSKLDSGVPSRFSGSGSGTDFTLTISSLQPEDFATYYCFQGTHFPFTFGQGTKVEIKRGGGGSGGGGSGGGGSEVQLVESGGGLVQPGGSLRLSCAASGYTFTSYWMNWVRQAPGKGLEWVGMIDPSDSETHYNHIFKDRFTISADTSKNTAYLQMNSLRAEDTAVYYCARNLYLFGQGTLVTVSSTRIQNPDPAVYQLRDSKSSDKSVCLFTDFDSQTNVSQSKDSDVYITDKCVLDMRSMDFKSNSAVAWSNKSDFACANAFNNSIIPEDTFFPSPESSCGFTSESYQQGVLSATILYEILLGKATLYAVLVSALVLMAMVKRKDSRGRAKRSGSGVKQTLNFDLLKLAGDVESNPGPSRGHMTEYKPTVRLATRDDVPRAVRTLAAAFADYPATRHTVDPDRHIERVTELQELFLTRVGLDIGKVWVADDGAAVAVWTTPESVEAGAVFAEIGPRMAELSGSRLAAQQQMEGLLAPHRPKEPAWFLATVGVSPDHQGKGLGSAVVLPGVEAAERAGVPAFLETSAPRNLPFYERLGFTVTADVEVPEGPRTWCMTRKPGA

SEQ ID NO: 46361 - protein, 868 aa, synthetic construct
MALPVTALLLPLALLLHAARPLEEDLKNVFPPEVAVFEPSEAEISHTQKATLVCLATGFYPDHVELSWWVNGKEVHSGVSTDPQPLKEQPALNDSRYCLSSRLRVSATFWQNPRNHFRCQVQFYGLSENDEWTQDRAKPVTQIVSAEAWGRADCDVKLVEKSFETDTNLNFQNLSVIGFRILLLKVAGFNLLMTLRLWSSRAKRSGSGATNFSLLKQAGDVEENPGPTSMALPVTALLLPLALLLHAARPDIQMTQSPSSLSASVGDRVTITCKSSQSLLDSDGKTYLNWYQQKPGKAPKLLIYLVSKLDSGVPSRFSGSGSGTDFTLTISSLQPEDFATYYCFQGTHFPFTFGQGTKVEIKRGGGGSGGGGSGGGGSEVQLVESGGGLVQPGGSLRLSCAASGYTFTSYWMNWVRQAPGKGLEWVGMIDPSDSETHYNHIFKDRFTISADTSKNTAYLQMNSLRAEDTAVYYCARNLYLFGQGTLVTVSSTRIQNPDPAVYQLRDSKSSDKSVCLFTDFDSQTNVSQSKDSDVYITDKTVLDMRSMDFKSNSAVAWSNKSDFACANAFNNSIIPEDTFFPSPESSCGFTSESYQQGVLSATILYEILLGKATLYAVLVSALVLMAMVKRKDSRGRAKRSGSGVKQTLNFDLLKLAGDVESNPGPSRGHMTEYKPTVRLATRDDVPRAVRTLAAAFADYPATRHTVDPDRHIERVTELQELFLTRVGLDIGKVWVADDGAAVAVWTTPESVEAGAVFAEIGPRMAELSGSRLAAQQQMEGLLAPHRPKEPAWFLATVGVSPDHQGKGLGSAVVLPGVEAAERAGVPAFLETSAPRNLPFYERLGFTVTADVEVPEGPRTWCMTRKPGA

SEQ ID NO: 46362 - protein, 971 aa, synthetic construct
MALPVTALLLPLALLLHAARPLEEEDLKNVFPPEVAVFEPSEAEISHTQKATLVCLATGFYPDHVELSWWVNGKEVHSGVSTDPQPLKEQPALNDSRYCLSSRLRVSATFWQNPRNHFRCQVQFYGLSENDEWTQDRAKPVTQIVSAEAWGRADDVIKIHWQEKKSNTILGSQEGNTMKTNDTYMKFSWLTVPEKSLDKEHRCIVRHENNKNGVDQEIIFPPIKTDVITMDPKDNCSKDANDTLLLQLTNTSAYYMYLLLLLKSVVYFAIITCCLLRRTAFCCNGEKSRAKRSGSGATNFSLLKQAGDVEENPGPTSMALPVTALLLPLALLLHAARPDIQMTQSPSSLSASVGDRVTITCKSSQSLLDSDGKTYLNWYQQKPGKAPKLLIYLVSKLDSGVPSRFSGSGSGTDFTLTISSLQPEDFATYYCFQGTHFPFTFGQGTKVEIKRGGGGSGGGGSGGGGSEVQLVESGGGLVQPGGSLRLSCAASGYTFTSYWMNWVRQAPGKGLEWVGMIDPSDSETHYNHIFKDRFTISADTSKNTAYLQMNSLRAEDTAVYYCARNLYLFGQGTLVTVSSTRIQNPDPAVYQLRDSKSSDKSVCLFTDFDSQTNVSQSKDSDVYITDKTVLDMRSMDFKSNSAVAWSNKSDFACANAFNNSIIPEDTFFPSPESSDSTDHVKPKETENTKQPSKSCHKPKAIVHTEKVNMMSLTVLGLRMLFAKTVAVNFLLTAKLFFLRAKRSGSGVKQTLNFDLLKLAGDVESNPGPSRGHMTEYKPTVRLATRDDVPRAVRTLAAAFADYPATRHTVDPDRHIERVTELQELFLTRVGLDIGKVWVADDGAAVAVWTTPESVEAGAVFAEIGPRMAELSGSRLAAQQQMEGLLAPHRPKEPAWFLATVGVSPDHQGKGLGSAVVLPGVEAAERAGVPAFLETSAPRNLPFYERLGFTVTADVEVPEGPRTWCMTRKPGA

SEQ ID NO: 46363 - protein, 868 aa, synthetic construct
MALPVTALLLPLALLLHAARPLEEDLKNVFPPEVAVFEPSEAEISHTQKATLVCLATGFYPDHVELSWWVNGKEVHSGVCTDPQPLKEQPALNDSRYCLSSRLRVSATFWQNPRNHFRCQVQFYGLSENDEWTQDRAKPVTQIVSAEAWGRADCGFTSESYQQGVLSATNLSVIGFRILLLKVAGFNLLMTLRLWSSRAKRSGSGATNFSLLKQAGDVEENPGPTSMALPVTALLLPLALLLHAARPDIQMTQSPSSLSASVGDRVTITCKSSQSLLDSDGKTYLNWYQQKPGKAPKLLIYLVSKLDSGVPSRFSGSGSGTDFTLTISSLQPEDFATYYCFQGTHFPFTFGQGTKVEIKRGGGGSGGGGSGGGGSEVQLVESGGGLVQPGGSLRLSCAASGYTFTSYWMNWVRQAPGKGLEWVGMIDPSDSETHYNHIFKDRFTISADTSKNTAYLQMNSLRAEDTAVYYCARNLYLFGQGTLVTVSSTRIQNPDPAVYQLRDSKSSDKSVCLFTDFDSQTNVSQSKDSDVYITDKCVLDMRSMDFKSNSAVAWSNKSDFACANAFNNSIIPEDTFFPSPESSCDVKLVEKSFETDTNLNFQILYEILLGKATLYAVLVSALVLMAMVKRKDSRGRAKRSGSGVKQTLNFDLLKLAGDVESNPGPSRGHMTEYKPTVRLATRDDVPRAVRTLAAAFADYPATRHTVDPDRHIERVTELQELFLTRVGLDIGKVWVADDGAAVAVWTTPESVEAGAVFAEIGPRMAELSGSRLAAQQQMEGLLAPHRPKEPAWFLATVGVSPDHQGKGLGSAVVLPGVEAAERAGVPAFLETSAPRNLPFYERLGFTVTADVEVPEGPRTWCMTRKPGA

SEQ ID NO: 46364 - protein, 897 aa, synthetic construct
MALPVTALLLPLALLLHAARPLEEEDLKNVFPPEVAVFEPSEAEISHTQKATLVCLATGFYPDHVELSWWVNGKEVHSGVCTDPQPLKEQPALNDSRYCLSSRLRVSATFWQNPRNHFRCQVQFYGLSENDEWTQDRAKPVTQIVSAEAWGRADCGFTSESYQQGVLSATNLSVIGFRILLLKVAGFNLLMTLRLWSSRAKRSGSGATNFSLLKQAGDVEENPGPTSMALPVTALLLPLALLLHAARPDIQMTQSPSSLSASVGDRVTITCKSSQSLLDSDGKTYLNWYQQKPGKAPKLLIYLVSKLDSGVPSRFSGSGSGTDFTLTISSLQPEDFATYYCFQGTHFPFTFGQGTKVEIKRGGGGSGGGGSGGGGSEVQLVESGGGLVQPGGSLRLSCAASGYTFTSYWMNWVRQAPGKGLEWVGMIDPSDSETHYNHIFKDRFTISADTSKNTAYLQMNSLRAEDTAVYYCARNLYLFGQGTLVTVSSTRGQPKANPTVTLFPPSSEELQANKATLVCLISDFYPGAVTVAWKADGSPVKAGVETTKPSKQSNNKYAASSYLSLTPEQWKSHRSYSCQVTHEGSTVEKTVAPTECSPIKTDVITMDPKDNCSKDANDTLLLQLTNTSAYYMYLLLLLKSVVYFAIITCCLLRRTAFCCNGEKSRAKRSGSGVKQTLNFDLLKLAGDVESNPGPSRGHMTEYKPTVRLATRDDVPRAVRTLAAAFADYPATRHTVDPDRHIERVTELQELFLTRVGLDIGKVWVADDGAAVAVWTTPESVEAGAVFAEIGPRMAELSGSRLAAQQQMEGLLAPHRPKEPAWFLATVGVSPDHQGKGLGSAVVLPGVEAAERAGVPAFLETSAPRNLPFYERLGFTVTADVEVPEGPRTWCMTRKPGA

SEQ ID NO: 46365 - protein, 897 aa, synthetic construct
MALPVTALLLPLALLLHAARPLEGQPKANPTVTLFPPSSEELQANKATLVCLISDFYPGAVTVAWKADGSPVKAGVETTKPSKQSNNKYAASSYLSLTPEQWKSHRSYSCQVTHEGSTVEKTVAPTECSPIKTDVITMDPKDNCSKDANDTLLLQLTNTSAYYMYLLLLLKSVVYFAIITCCLLRRTAFCCNGEKSRAKRSGSGATNFSLLKQAGDVEENPGPTSMALPVTALLLPLALLLHAARPDIQMTQSPSSLSASVGDRVTITCKSSQSLLDSDGKTYLNWYQQKPGKAPKLLIYLVSKLDSGVPSRFSGSGSGTDFTLTISSLQPEDFATYYCFQGTHFPFTFGQGTKVEIKRGGGGSGGGGSGGGGSEVQLVESGGGLVQPGGSLRLSCAASGYTFTSYWMNWVRQAPGKGLEWVGMIDPSDSETHYNHIFKDRFTISADTSKNTAYLQMNSLRAEDTAVYYCARNLYLFGQGTLVTVSSTREEDLKNVFPPEVAVFEPSEAEISHTQKATLVCLATGFYPDHVELSWWVNGKEVHSGVCTDPQPLKEQPALNDSRYCLSSRLRVSATFWQNPRNHFRCQVQFYGLSENDEWTQDRAKPVTQIVSAEAWGRADCGFTSESYQQGVLSATNLSVIGFRILLLKVAGFNLLMTLRLWSSRAKRSGSGVKQTLNFDLLKLAGDVESNPGPSRGHMTEYKPTVRLATRDDVPRAVRTLAAAFADYPATRHTVDPDRHIERVTELQELFLTRVGLDIGKVWVADDGAAVAVWTTPESVEAGAVFAEIGPRMAELSGSRLAAQQQMEGLLAPHRPKEPAWFLATVGVSPDHQGKGLGSAVVLPGVEAAERAGVPAFLETSAPRNLPFYERLGFTVTADVEVPEGPRTWCMTRKPGA
